United States Patent Application Publication US 2007/0061916 A1 - sequence listing, part 14

SEQ ID NO: 73944 - protein, 89 aa, Gossypium hirsutum
  Clone ID: LIB3145-017-Q1-K1-B11.pep
SVVIWKKKCNKHAVQVYFLTPTAHVDSRILKAIAIENSKDVDAAAEIVLSEILPYLSKRTGAGSSSSRNRSPPGQANEAGMMKMILLPR

SEQ ID NO: 73945 - protein, 123 aa, Gossypium hirsutum
  Clone ID: LIB3120-012-P1-K1-E2.pep
PTRSNRPAMEVRLVQVQSASDGADSTLSNPLCEESPQNSPKYSNRQSIHSPPAFGSSPNLEALALEANKSKDQDGDSSLLDSSHLSRPMHEVTFSTEDKPKLLSQLTALLAEVGLNIQEAHVV

SEQ ID NO: 73946 - protein, 63 aa, Gossypium hirsutum
  Clone ID: LIB3135-024-Q1-K1-B11.pep
NMIKKKKKTGSRQAICYFLFCFQGFLSCLHLGNRIIFIIPVIRGLPLLHCTWSLNTIVFFSFG

SEQ ID NO: 73947 - protein, 456 aa, Gossypium hirsutum
  unsure (1)..(456): unsure at all Xaa locations
  Clone ID: GOSHI-09MAY01-C4526_1.pep
VIVLDPXKNCPASALAYDHMVGSFDDSATVEEFAKRXGVLTVETEHVDVATLEKLEQQGIDCEPKASTIRIIQDKYLQKVHFSRHGIPLPEFMEINNLEETKRAGELYGYPLMIKGKRLAYDGRGNAVXRVRPRVRELSSAIDVLGGFGRGLYVEKWAPFIKELAVIVARGRDNSILCYPLVETIHKENICHIVKAPADVPWRIRKLANDVAYKAISSLEGAGVFAVELFLTRDGQILLNEVAXRPHNSGHHTIESCYTSQFEQHLRAVVGLPLGDPSMKTPAAIMYNLLGEREGEPGFRVAHQLIARALEIPGATAHWYDKPEMRRQRKMGHITLGGPSGGILEVRLKSMLREEGYENPNEVAPRVGIVMASDSDLPGLKDAARILNTFGVSTEVRIVSAHRTPELMYYYASSAWERGIHVIIAWAGGATHSPGMVASLTPLPVIGVPVRAYTLD

SEQ ID NO: 73948 - protein, 81 aa, Gossypium hirsutum
  Clone ID: LIB3166-014-P1-K1-F9.pep
ILLNEVAPRPHNSGHHTIESCYTSQFEQHLRAVVGLPLGDPSMKTPAAIMYNLLGEDEREPGFKVAHQLIARALEIPGATA

SEQ ID NO: 73949 - protein, 235 aa, Gossypium hirsutum
  Clone ID: GOSHI-09MAY01-C4496_1.pep
MQTQPPQLIELSQLHHPNVVSTGLRLSFGDQQQKLQQHQNQNQNQSYGQQQQQQNLVSNSSVFASDDLVTQIKRQRDELDHFLQAQGEELRRTLAEKRHRHYRALLEAAEESVARRFREKEAEVEKAKRRNVELEARAAQLGAEVQVWQAKAKAQEVTAASLQAQLQQAIMNGGAGLTQQDSRRGGEEWRKRAGGESEAQAEDAQSAYVDPGRVVAAASGPCCMACRTRAVEPFA

SEQ ID NO: 73950 - protein, 228 aa, Gossypium hirsutum
  Clone ID: GOSHI-09MAY01-C4456_1.pep
MAANIHDQSFSIAFGLLGNILSFFVYLAPLPTFYKIFKKKSTEGFQSIPYSVALFSAMLLLYYAFLKQHDAVMLITINSIGSCIESIYLIFYLIYATKTARIYTTKLVIFFNIVALGLIILVTLVFFKGHLRVSIVGWICAIFSACVFAAPLSIIRLVIKTKSVEYMPFPLSFFLTLCAITWFLYGFSLRDFYIATPNILGFSFGITQMILYLVYRGETKALVLPDSN

SEQ ID NO: 73951 - protein, 60 aa, Gossypium hirsutum
  Clone ID: LIB3584-048-P1-K2-D4.pep
YVHLPLSFFLTLCAITWFLYGFSLRDFYIATPNILGFSFGITQMILYGGYRWRNESIGLA

SEQ ID NO: 73952 - protein, 348 aa, Gossypium hirsutum
  Clone ID: GOSHI-09MAY01-C4476_1.pep
MEGYKNASKHIAVLAFPFGTHAAPLLNIIRQLSDACPDTMFSFLSTQQSNNSTFPKNLDKIKPFNVWDGLPEGYSFRGNPHEPVDYFLKAVPGSFIKAIDAVVSETGKPVDCLITDAFYAFGADIADELNIPWVAVWMSGPRALFLHLQTDVIRQHVGINNPEDKPLDFPEFSGFRVTDLPNGIASGDIDAPMPALLHKMGVSLSRATAIVANSYEDLDNTVVNMLKLRFSMFLNVGPFNLVSVSSSTVDDSHGCLDWVSKHEAASVVYISFGSMITPPPHELQALCEALEECEFPFLWSVRGNPEKQLPQGFLERTSSKGKIVPWAPQQQILEYPSVGVFVSHGGWN

SEQ ID NO: 73953 - protein, 300 aa, Gossypium hirsutum
  unsure (1)..(300): unsure at all Xaa locations
  Clone ID: GOSHI-09MAY01-C4466_1.pep
FRFSSFYTRLRVILILLAFVALLPPVFFHFKLRRLHQTKLRKCGWLNNPPLVCAHGGDSTNAFPNTMSAYSIALHSQVDCIEIDVSRSSDGVLFALHDRDLQRISGNSTSKVGHFRSNELKELDVYHQSGNSKIPTIEDALKLISASVRQVILDAKVGPPSYEKGLANDILSTVEKMQCKNCLIWAKSDSLVRDIIKLSSDVAVGYVVMVDPHTGARTNLLRMKGPKVAGAYHQLIDERMVKTLHGREKKVYLPXTVGDVDSMMRMLHMRADAIVTSSPTLLQRTMQDQRTTVLWEKVFL

SEQ ID NO: 73954 - protein, 123 aa, Gossypium hirsutum
  Clone ID: GOSHI-09MAY01-C4746_1.pep
VNDKRNKLAQPLKFAVGFNRRGTEESQMKTPKDASKNSDMSVLLDRNKCFGAVAAAVKGIVSDSVVDLKSPELSILVELLPLSGVPNGSLLVGVSVLPQNLVSTKPRLCIKPLVCDKNGKKAS

SEQ ID NO: 73955 - protein, 209 aa, Gossypium hirsutum
  unsure (1)..(209): unsure at all Xaa locations
  Clone ID: GOSHI-09MAY01-C4776_1.pep
PTRPINIKPWDSILKDIKEGKKRRXIDREPYAYWKGNPFVDEKRQDLLKCNVTGQQXWNARLFVQDWYPLKAQHGFKQSNVADQCTYRYKIYIEGYAWSVTEKYILACDSVTLIVQPQFYDFFMRSMQPVEHYXPIRNDDKCRSLKFAVDWGNNHKKKAHEIXGKAPSSFMQEQLKMDYIYDYMYHLLNEYAKLLKFKPRIPEGAIDLY

SEQ ID NO: 73956 - protein, 185 aa, Gossypium hirsutum
  Clone ID: GOSHI-09MAY01-C4766_2.pep
MAMNLGHHIGTLSGKQIPTEFAAGEQPSSTTASPSAVWKSPAGNLRSNSPQENASPPMLTPPLTPNSAGEWSYLINLPMLRPDLSVACQAFATSSPLEMTEEEVAGTAEWTVGGRKDEKKGVSVFVMMPLDSVTNGNTVNRKKAMNASLHALKSAGVEGIMIDVWWGLVEREGAGAYNWGGYTEL

SEQ ID NO: 73957 - protein, 587 aa, Gossypium hirsutum
  Clone ID: GOSHI-09MAY01-C4766_1.pep
MALNLAHQIGSLAGTQIAAEVTTGEQSSSATADVSGVRKVPLANLRCNAPGEALSPPMLTPPLTPRSAANRPAMMSPSLRPDLSAACQAFGTLSPLETAEESSASVAWKEGGKKEEKKGVPVYVMMPLDSVTNGNTVNRKKAMNASLHALKSAGVEGIMIDVWWGLVEREATGAYNWGGYAELLEMAKKHGLKVQAVMSFHQCGGNVGDSCIIPLPKWVTEEIEKDPDLAYTDQWGRRNYEYLSLGCDNLPVLKGRTPVQCYADFMRAFRDNFKHLLGDTIVEIQVGMGPAGELRYPSYPEANGTWKFPGIGAFQCLVQYMLSSLKAAAEAAGGPEWGSTGPTDAGHYNNWPEDTPFFKKEGGGWNTPYGEFFLTWYSQMLLEHGARILSSATSIFDGAGVKISVKVAGIHWHYGTRSHAPELTAGYYNTRYRDGYLPIAQMLARHGAVFNFTCIEMRDHEQPQDALCAPEKLVKQVALATGAAQVPLAGENALPRYDEYAHEQILRASSLNVDGSAVDREMCAFTYLRMNPSLFHPGNWRRFVAFVKKMNEGKGARRCWEEVEREAEQFVHVTQPFIQEAAVALMH

SEQ ID NO: 73958 - protein, 329 aa, Gossypium hirsutum
  Clone ID: GOSHI-09MAY01-C4716_1.pep
SSAADAQNIGWGRWYSMKELEMATRGFAEENVIGEGGYGVVFRGLLQDGSVVAVKNLLNNKGQAEKEFNVEVEAIGKVRHKNLVGLVGYCTEGAQRILVYEYVDNGNLEQWLHGDVGPVSPLTWDIRMKIAIGTAEGLAYLHEGLEPKVVHRDVKSSNILLDKKWNPKVSDFGLAKLLGSESSYVTTRVMGTFGYVSPEYASTGMLNEGSDVYSFGVLLMEIITGRSPIDYSRAPGEMNLVEWFKGMVASRRGEELVDPLIEVQPSPRALKRALLVCLRCIDLDANKRPKMGQIVHMLEADDFPFRSEHRPAQERYSVPSSVPTSAKFP

SEQ ID NO: 73959 - protein, 204 aa, Gossypium hirsutum
  Clone ID: GOSHI-09MAY01-C4696_1.pep
MNILKNLGFGANNKPTASMENCAIAQGPEDDVPPPGQLFAQFGAGCFGGVELAFQRVSGITKTEVGYSQGFMHNPSYEDVCSGTTNHSEVVRVQYDPNECSYDTLLHVFWARHDPTTLNRQGNDVGTQYRSGIYFYSPEQEKAAVESMEKQQKLLNRKIVTEILPARKFYRAEEYHQQYLAKGGRFGCKQSAEKGCNDPIRCYG

SEQ ID NO: 73960 - protein, 62 aa, Gossypium hirsutum
  Clone ID: uC-gsronu33B004a09b1.pep
NSIDKSRSSYRKSGNLAIASDRIIASFLSRLFTTKTTSRQFQALFDRTRGRTRGRTRGRTRG

SEQ ID NO: 73961 - protein, 263 aa, Gossypium hirsutum
  Clone ID: GOSHI-09MAY01-C4646_2.pep
QSFLLPESPARLPSFHTCVGANEERLTPKWYKEHGIELVLGTRVKSVDVRRKKLLTATGETISYKILLIATGARALKLEEFGVDGSEAENVCVLRDLADANGLVNVMQSCSSGNAVVIGGGYIGMECAASLAINKINVTLVFPEVHCMARLFTPKIASYYEEYYQAKGVKFVKGTVLTSFEFDSSGKVMAVNLRDGSQLPADLVVVGIGIRPNTSLFEGQLTLEKGGIKVNGKMQTSNDSVYAVGDVAAFPVKLFGETRRLEH

SEQ ID NO: 73962 - protein, 296 aa, Gossypium hirsutum
  Clone ID: GOSHI-09MAY01-C4646_1.pep
MGRAFVYVILGGGVAAGYAALEFTRKGVSPGELCIISEEPVAPYERPALSKGFLLPESPARLPSFHTCVGANEERLTPKWYKEHGIELVLGTRVKSVDVRRKKLLTATGETISYKILLIATGARALKLEEFGVDGSEAENVCYLRDLADALARLFTPKIASYYEEYYQAKGVKFVKGTVLTSFEFDSSGKVMAVNLRDGSQLPADLVVVGIGIRPNTSLFEGQLTLEKGGIKVNGKMQTSNDSVYAVGDVAAFPVKLFGETRRLEHVDSARKSAKHAVAAIMEPKKSGEFDYLPFF

SEQ ID NO: 73963 - protein, 326 aa, Gossypium hirsutum
  Clone ID: GOSHI-09MAY01-C4616_1.pep
MAATFFRRLSKATPATFNNAFRGQPKSGFAGFRFSTIAAVAGGISTYYCFSDSNLVHLDQVNEETGPKVALKSDKWLEFKLQDTARVSHNTHLFRFSFDPSAKLGLDVASCILTRAPLGQDAEGKTKYVIRPYTPISDPDAKGYFDLLIKVYPEGKMSQHFASLKPGDVVEVKGPIEKLRYSPNMKKHIGMIAGGTGITPMLQVIEAILKNPDDKTQVSLLYANVSPDDILLKQKLDILAASHPNLKVLYTVDNPTKTWKGGAGFISKDMVTKCLPGPAEDTLILVCGPPGMMEHISGGKAKDYSQGELTGILKELGYAERIVYKF

SEQ ID NO: 73964 - protein, 57 aa, Gossypium hirsutum
  unsure (1)..(57): unsure at all Xaa locations
  Clone ID: LIB3135-040-Q1-K1-C6.pep
GIIKQRSAILKPRDVFEVNGPIXKLRYSPNMKKHIGMIAGGTSITPMLQVIEAILKN

SEQ ID NO: 73965 - protein, 201 aa, Gossypium hirsutum
  Clone ID: GOSHI-09MAY01-C4606_7.pep
CCWLWKTSSLSICCSTGHDHSVSDEDGIAIIKHAVERGVTHIDTADLYGPKTNEILVGKALKHLPREKVQLATKFGVESMGPDGPVINGTPEFVRSSLEASLQRLDVDYIDLYYIIRVDRKTPIEDTMEELKKLVDEGKIKYIGISEASPETIRRAHAVHPLTAVQLEWSLWTRDVEEELIPLCRFVLLSSIIGNFFFIRI

SEQ ID NO: 73966 - protein, 86 aa, Gossypium hirsutum
  Clone ID: GOSHI-09MAY01-C4606_4.pep
YLKPKLLTHCSHASAHASDDVAPLPGTTKIKNLDSNIESVKVKLTKEDLKEISDAIPIHEVAGGTYPDALKQFSWKYGNTPPKKSA

SEQ ID NO: 73967 - protein, 189 aa, Gossypium hirsutum
  Clone ID: GOSHI-09MAY01-C4606_2.pep
YVFAHASDHSGVHSSGRAHAVHPLTAGQLEWSLWTRDDEEEIIPLCRELGIGIVPYRPLERGFFARRANKDTSNTPVRMFTRLSGENLERKRILYSKVEKLAEKHGCTPAQLALAWVLHQGDDVSPIPGTTKIKNLDSNIESVKVKLTKEDLKEISDAIPIHEVAGGTYPDGLKQFTWKYGNTPPKKST

SEQ ID NO: 73968 - protein, 339 aa, Gossypium hirsutum
  Clone ID: GOSHI-09MAY01-C4606_1.pep
MAIEIPRVKLGTQGFEVSKLGFGCMSLTGHDHSVSDEDGIAIIKHAVERGVTHIDTADLYGPKTNEILVGKALKHLPREKVQLATKFGVESMGPDGPVINGTPEFVRSSLEASLQRLDVDYIDLYYIIRVDRKTPIEDTMEELKKLVEEGKIKYIGISEASPETIRRAHAVHPLTAVQLEWSLWTRDVEEELIPLCRELGIGIVAYSPLGHGFFAGKAKEDTSNSSLEVFPRFQGENLEQNRILYSKVEKLAEKHGCTPAQLALAWVLHQGDDVSPIPGTTKIKNLDSNIESVKVKLTKEDLKEISDAIPIHEVAGGTYPDGLKQFTWKYGNTPPKKSA

SEQ ID NO: 73969 - protein, 98 aa, Gossypium hirsutum
  Clone ID: LIB3166-006-P1-K1-G2.pep
ENGVFFWGVKSIIFWLLQVSKLGFGCMSLTGHDHSVSDEDGIAIIKHAVERGVTHIDTADLYGPKTNEILVGKVSFRHLFKLNQIETESDSFMFSISN

SEQ ID NO: 73970 - protein, 144 aa, Gossypium hirsutum
  unsure (1)..(144): unsure at all Xaa locations
  Clone ID: LIB3197-053-Q1-M1-H5.pep
CLSTRISLVMVGKALKHLPREKVQLATKFGVESMGPGGPVINGTPEFVRSSLEASLQRLDVDYIDLYYIIRVDHKTPIEDTMXELNKLVEEGKIKYIGISEASPETIRRAHAVHPLTAVQPEWSLWTRDVEEEIIPLCRELXIG

SEQ ID NO: 73971 - protein, 170 aa, Gossypium hirsutum
  unsure (1)..(170): unsure at all Xaa locations
  Clone ID: uC-gsflmaxxa098a02b1.pep
RHERRYTWGNFKTQWGGPNGPVINGTPEFVRSSLEASLQRLDVDYIDLYYIIRVDHKTPIEDTMEELNKLVEEGKIKYIGISEASPETIRRAHAVHPLTAVQLEWTLWTPDVEEEIIPLCRELGIGIVPYSPLGRGFFAGRANKDTFNTPLRMXPMFSGENLEKNRILYS

SEQ ID NO: 73972 - protein, 61 aa, Gossypium hirsutum
  Clone ID: uC-gsronu33B007g05b1.pep
RNNIINTEPSINDNADFSNSSIFQWLQFLGKSIHPNTHEALLLNLGPLVWWCIAIFPSELL

SEQ ID NO: 73973 - protein, 68 aa, Gossypium hirsutum
  Clone ID: LIB3272-013-P1-K1-A1.pep
DEAGIAIINHAFERGITHLDTPDMCGPKTNQILVGKALKHLPREKVQLATKFSVESMGPGGPVINGTP

SEQ ID NO: 73974 - protein, 72 aa, Gossypium hirsutum
  Clone ID: LIB3166-053-P1-K1-G5.pep
MAFEIPRVKLGTEGFEVSKLGFGCMSLTGHDHSVSDEDGIAIIKHAVERGVTHIDTADLYGPKTNEFLSERH

SEQ ID NO: 73975 - protein, 313 aa, Gossypium hirsutum
  unsure (1)..(313): unsure at all Xaa locations
  Clone ID: GOSHI-09MAY01-C4636_1.pep
MTSSVDSNSHGNLDEQISQLMQCKPLAEQEVRVLCDKAKEILMDESNVQPVKSPVTICGDIHGQFHDLAELFRIXGGKCPDTNYLFMGDYVDRGYYSVETVTLLVALKVRYPQRITILRGNHESRQITQVYGFYDECLRKYGSANVWKIFTDLFDYFPLTALVESEIFCLHGGLSPSIETLDNIRNFDRVQEVPHEGPMCDLLWSDPDDRCGWGISPRGAGYTFGQDISEQFNHTNSLKLIARAHQLVMEGYNWGHEQKVVTIFSAPNYCYRCGNMASILEVDDCQGHTFIQFEPAPRRGEPDVTRRTPDYFL

SEQ ID NO: 73976 - protein, 91 aa, Gossypium hirsutum
  Clone ID: LIB3584-042-P1-K1-C10.pep
FFWSFFEDNFCFSIFRYGSANVWKIFTDLFDYFPLTALVESEIFCLHGGLSPSIETLDNIRNFDRVQEVPHEGPMCDLLWSDPDDRCGWGI

SEQ ID NO: 73977 - protein, 98 aa, Gossypium hirsutum
  Clone ID: GOSHI-09MAY01-C4196_1.pep
TYGLIVGFQGVKQLVGFQPDIAQKILQIPLAETEHIDFQVWKEEPSGEFSVRNAYKLLQYSSLDPNSYLIQLETKNFFRKLCDLQLPAKFKIIVWRIS

SEQ ID NO: 73978 - protein, 55 aa, Gossypium hirsutum
  Clone ID: GOSHI-09MAY01-C4046_6.pep
DTQDIIEKARLGDLDYVKHAFTLFTDFVAVFVRILIIMLKNSAEKGERKKKKRSD

SEQ ID NO: 73979 - protein, 148 aa, Gossypium hirsutum
  Clone ID: GOSHI-09MAY01-C4046_3.pep
PRVLHASVDAWVQIDPSVGVSALVGTALAFACFSGAAMLARRTEYLYLGGLLSSGVSILMWLHFASSVFGGSTTLFMFEIYFGLLVFVGYMVLDTQDIIEKAHLGDLHYVKHALTLFTDFVALFVRILIIMLKNSPEKNEKKKKRRND

SEQ ID NO: 73980 - protein, 243 aa, Gossypium hirsutum
  Clone ID: GOSHI-09MAY01-C4046_2.pep
MEAFFESRSRSNWSYDTLKNFRQISPVVQSHLKRVYLTLCCALVASAFGAYLHILWNIGGYLTSFACFGTMIWLLSIPPYQEQRRVSLLMASAVFEGASVGPLIDLAIQIDPSVLVAAFVGTAIAFACFSGAAMLAKRREYLYLGGLLSSGVSMLLWLHLASFIFGGSAAFFMFEIYFGLLVFVGYMVVDTQDIIEKAHLGDLDYVKHALTLFTDFVAVFVRILIIMLKNSAEKSEKKKKRRD

SEQ ID NO: 73981 - protein, 246 aa, Gossypium hirsutum
  Clone ID: GOSHI-09MAY01-C4046_1.pep
MDAFTSFFDSQSRNIWSYDTLKNFRQISPIVQAHLKQVYLTLCCALIASAVGAYLHILWNIGGYLTTFACLGTIIWLLSTPPCEEQKRVSLLMASAVFEGASIGPLIDLAIQIDPSVLVASFVGTALAFACFSGAAMLARRREYLYLGGLLSSGVSVLLWLHFASSIFGGSTALFMTEIYLGLLVFVGYMIVDTQDIIEKAHLGDLDYVKHALTLFTDFGAVLVRILIIMVKNSAEKGERKKKRRD

SEQ ID NO: 73982 - protein, 132 aa, Gossypium hirsutum
  Clone ID: LIB3584-039-P1-K1-C9.pep
MDSFSSFFDYQSRTHWSYSTFKNFSQISPLVQSHLKRVYLTLCCALVASAFGAYLHILWNIGGYLTTFACFGTMIWLLSIPTYQEQKRVSLLMASAVFQGASIGPLIDLAIKIDPSVLVAAFVGTALAFACF

SEQ ID NO: 73983 - protein, 102 aa, Gossypium hirsutum
  Clone ID: LIB3189-013-P1-K1-B1.pep
RREYLYLGGLLSSGVSVLLWLHFASCIFGGSTALFMTEIYLGFLVFVGYMIVDTHDIFLKAHLVDLDYLKHALTLFTDYSAVYVLIIDIIYSISSIFILIIK

SEQ ID NO: 73984 - protein, 97 aa, Gossypium hirsutum
  Clone ID: LIB3135-057-Q1-K1-B3.pep
MGTFSAFFDSQSRSQWNYNTLKNFRQISPIVQTHLKKVYMTLCCMLVASAFGAYLHIIWNIGGSLTTFACFGAIIWLHSTPPCQEQKRVSLLMASAV

SEQ ID NO: 73985 - protein, 275 aa, Gossypium hirsutum
  unsure (1)..(275): unsure at all Xaa locations
  Clone ID: GOSHI-09MAY01-C4026_1.pep
GIYHFSLQPRDLSALLQKLHSGEMVHEAVTRGCKEQQRQIEMNLMLGNIPLLLELIWSWIAPSEDDQNISRPRDPQMIRFGAHVVLVLRYLLAEEIKDTFREKLMTVGDRILHMYSLFLFSKHHEELVGIYASQLASHRCIDLFVHMMEVRLNSSVHVKYKIFLSAMEYLPFSQGDDSKGSFEEIIERLLSRSRETKAGKFDETSDVVEQHRLQSLQKALVVQWLCFTPPSTITDVKXISAKLLMRALIHSNILIRXFAFDSMWRVLAMPIGAHE

SEQ ID NO: 73986 - protein, 306 aa, Gossypium hirsutum
  unsure (1)..(306): unsure at all Xaa locations
  Clone ID: GOSHI-09MAY01-C4376_3.pep
LLQNIASSLEXLSEKNPAKENGPPSGSDQDVAMADTSPSSVKASPSVRSPCFIEGVSKSSYVKQASDLKNSSLKVINCHDSVIYLLAPLRYATIYGCSDATIVLGAVGKAVRVEHCERVHVIIAAKRVCIANCRECLFFLGVNQRPLVVGDNHKLQVAPYNTFYSRLEEHMTEVGIQATINRWDDPLALGAVDPHDSLSHPAGVSDAQAESAAQLDPDQFTNFLIPNWFEGESAGSTKDNPFPLPDPCLTSQLRNQNNLGEIKQILREAPLEENLKRELSCALHVYFRDWLYASGNIRQLYCLQSD

SEQ ID NO: 73987 - protein, 89 aa, Gossypium hirsutum
  Clone ID: AI728588.1.pep
FNYLHFSTFEICHYLWMLRCYYSSWSCWQGIIAFVLLAICIALILEPVETFSSTIIKILDTDLFSSFYMVLVFELLNISLVRFVLMFLL

SEQ ID NO: 73988 - protein, 140 aa, Gossypium hirsutum
  Clone ID: LIB3828-019-Q1-N6-H3.pep
LISASAGLYYAMVHDLDEWMRFMVLFQFLQPFCQFPRLSSSLFVVGSLQHPTLNRQLTTETPFQFGTSHKFLCRIGSALFGVRPGTPKKIKKAIRYYSSANLFVIFWTEENNNNKFNPTVPFVSLGLYSSVINLNNHSCC

SEQ ID NO: 73989 - protein, 113 aa, Gossypium hirsutum
  unsure (1)..(113): unsure at all Xaa locations
  Clone ID: LIB3827-002-Q1-K6-B11.pep
FQVINCHDSVIYILAPLRYATIYGCSDATIVLGAVGKAVRVEHCERVHVIIAAKRVCIANCRECVFFLGVNHRPLIVGDNHKLQVAPLYTYYFSLEXHMTEVGIEATINRWDD

SEQ ID NO: 73990 - protein, 115 aa, Gossypium hirsutum
  Clone ID: AI725462.1.pep
RLLFIFNTAFTFQNHLGVVLSWFFGAIKIDCFVNSFIKFHQVAPYNTFYSQLEEHMTEVGIQATMNRWDEPLALGAVDPHDSLSHPAGVSDAQAESAAQLDPDQFTNFLIPNWFD

SEQ ID NO: 73991 - protein, 69 aa, Gossypium hirsutum
  Clone ID: LIB3584-045-P1-K2-A9.pep
DKSNIERSSPCRKSKERIIMCSSCILQRLVIRIINHISDLLTSYVVVLFGVLRLILGIRLLYCPRPECI

SEQ ID NO: 73992 - protein, 87 aa, Gossypium hirsutum
  Clone ID: AW187329.1.pep
LILASAGLYYAMVHDLDEWMRFVVLFQFLQPFCQFPKLSSSLFVVGSLQHPTLNRQLTNETPFQFGTSHKFLCRIGSVLCACTPAHP

SEQ ID NO: 73993 - protein, 278 aa, Gossypium hirsutum
  unsure (1)..(278): unsure at all Xaa locations
  Clone ID: GOSHI-09MAY01-C4326_1.pep
MGKSGYSKLHIAMFPWVAYGHCMRFLHLSNKLAHKGHKISFILPKGVQPKLENRNQYPNLIQFVPLVIPHVDGLPPGAETTSVVPLNQQKYLAFAVDQTRDQVEGILGALKPDMVFYDFWFWIPDLARQLGIHPICYVVVSSMIMSLXQTSGRITKEMTVEEVTKLPPDNPSSTVKFKAEEAAALLFGAEDFGSGLSFGERTRTAVSGSDAIAFRTSRETEGPFCDYVARGNGKSXLLSGPCFLETKTQQLDEKWVSWLSQFEPGSVVFCSIGSQSVL

SEQ ID NO: 73994 - protein, 151 aa, Gossypium hirsutum
  Clone ID: GOSHI-09MAY01-C4256_1.pep
HAIERWQSQAAAADPDFFHPTNCKDEEDSNASSRQPTWKHDGRANESSVSQVSVNKERFENHPHGADRIKQAVVDYVASLLMPLYKARKIDKEGYKSIMKKTATKVMEQATDAEKNMAVFEFLDFKRKNKIRPFVDKLIERHMAMKPTMNL

SEQ ID NO: 73995 - protein, 175 aa, Gossypium hirsutum
  Clone ID: GOSHI-09MAY01-C5986_1.pep
MIPEGPSPVTSSPLQFFPWMSPSPGIGSPFPWLWELKPEERGLWLIRLLVACANHVAAGSLENANIGLEQISHLASPDGDTMQRIAAYFTEALANRMLKAWPGLHKALNSTKISSVPDEILVQKLFFELCPFLKLAYIITNQAIVEAMEGEKMVHIIDLNSCEPAQWINLFQTFS

SEQ ID NO: 73996 - protein, 95 aa, Gossypium hirsutum
  unsure (1)..(95): unsure at all Xaa locations
  Clone ID: GOSHI-09MAY01-C5916_7.pep
KKGLIDSVASKSLLVVKGNAIEDKIEGQKEVKAKEQEEKDVIAQQNMYAQLLPLALPAPPMPGMGGGFAPPXPPMGGMGMPPSMPPFGMPPMGSY

SEQ ID NO: 73997 - protein, 140 aa, Gossypium hirsutum
  Clone ID: GOSHI-09MAY01-C5916_6.pep
PRVRELLVYFIEQGKKECFAACLFVCYDLIRPDVALEMAWVNNVIDFTFPFLLQFIREYTGKVDELIKDKIEAQKDVKAKEQEEKEVIAQQNMYAQLLPLALPAPPMPGMGGGFAPPPPMGGGMGMPPMPPYGMPQMGSY

SEQ ID NO: 73998 - protein, 183 aa, Gossypium hirsutum
  Clone ID: GOSHI-09MAY01-C5916_4.pep
PASGVAAYIYKKAGRWKQSIALSRKDNHYRDAMETASQSGERELAEELLVYFIEQGKKECFASCLFVCYDLLRPDVVLELAWINNMIDFAFPYLLQFIREYTGKVDELIKDKIEAQKEVKAKEQEEKDVIAQQNMYAQLLPLALPAPPMPGMGGFAPSPPPPPMGGMGMPPMPAFGMPPMGSY

SEQ ID NO: 73999 - protein, 199 aa, Gossypium hirsutum
  Clone ID: GOSHI-09MAY01-C5916_3.pep
GRVGGRVGAQLREGLVSDAIESFIRADDATQFLDVIRASEDADVYPDLVRYLLMVRQKVKEPKVDGELIYADAKIDRLGEIEEFILIPNVANLQNVGDRLFDEALYEAAKIIFAFISNWAKLAVTLVRLKQFQGAVDAARKANSAKTWKEVCFACVDAEEFRLAQICGLNIIIQVDDLEEVSEYYQNRGCFNELISLME

SEQ ID NO: 74000 - protein, 125 aa, Gossypium hirsutum
  Clone ID: GOSHI-09MAY01-C5916_2.pep
MAKSMRSKREKRLRAIRREIVEPFYQKKDEAKMVAIEAALAAPKLPASSPPSGSMQLEEQVTAPSSATTNLNSMEVEMADCDENKTKASLRAIGRIGKMSKKKLKIAKKKRRAGGKGKIRGKRNL

SEQ ID NO: 74001 - protein, 488 aa, Gossypium hirsutum
  unsure (1)..(488): unsure at all Xaa locations
  Clone ID: GOSHI-09MAY01-C5916_1.pep
LTRGIKLFHASAHASGAKLAVTLVRLKQFQGAVDAARKANSAKTWKEVCFACVDAEEFRLAQICGLNIIIQVDDLEEVSEYYQNRGCFNELISLMESGLGLERAHMGIFTELGVLYARYRAEKLMEHIKLFSTRLNIPKLIRACDEQQHWKELTYLYIQYDEFDNAATTVMNHSPEAWDHMQFKDIIVKVASVELYYKAVHFYLQEHPDLINDMLNVLALRVDHTRVVDIMRKAGHLRLVKPYMVAVQSNNVSAVNEALNEIYVEEEDYDRLRESIDLHDNFDQIGLAQKIEKHELLEMRRVAAYIYKKAGRWKQSIALSKKDNHYKDAMETASQSGERELAEELLVYFIEQGKKECFASCLFVCYDLLRPDVALELAWIHNMIDFAFPYLLQFIREYTGKVDELIKDKIEAQKEVKAKEQEEKEVIAQQNMLXYYSACLTHAQLLPLALPAPPMPGXGGGFAPPPPMGGGMGMPPMPPYGMPQMGSY

SEQ ID NO: 74002 - protein, 130 aa, Gossypium hirsutum
  unsure (1)..(130): unsure at all Xaa locations
  Clone ID: LIB3147-051-Q1-K1-E3.pep
LRREIVEPFYQKKDEAXMVAIEAALAAPKLPASSPPSGSMQLEEQVTAPSSATTNLNSMEVEMADCDENKTKASLRAIGRIGKMSKKKLKIKIWNNAIFVFQVCDIWPCNILLFRRSIFWVVIESKLGIS

SEQ ID NO: 74003 - protein, 101 aa, Gossypium hirsutum
  Clone ID: GOSHI-09MAY01-C5926_2.pep
LAKISVAGLAVMDSNLCRYPYDHERVSFAEISASTEVPRSEMRPEITVLDGRERDKLLDNALMVRQCALMASIWGVEQMLLGLPEAAAALLSSGNPRVSWP

SEQ ID NO: 74004 - protein, 103 aa, Gossypium hirsutum
  Clone ID: GOSHI-09MAY01-C5926_1.pep
KRQITFASLENLLIYYSRIFSVQYLLGCIYLFCVFSLFLSMYAFLSVSLLLSPLLYRFAKGFIALNYCLFWKEIGRFLGFFDFLSFSCSAFFVYLLLVSFSCR

SEQ ID NO: 74005 - protein, 229 aa, Gossypium hirsutum
  Clone ID: GOSHI-09MAY01-C5806_1.pep
MPEAPKNTLKPTADYNLELKNKKTLQFIEAVTSNADEVQKKVLEEILSRNAHVEYLQTRGLNGHTDRETFKKTMPVITYEDIQPHIDRIANGDTSPILSSNPISEFLTSSGTSGGERKLMPTIEEELGRRPLLYSLLMPGMSQFGPGLDEGKGMYFLFIKSEAKTPGGLVARPVLTSYYKSTHFKNRPYDPYTNYTSPNETILCPDSYQSMYSQMLCGLCQHKEVLRVG

SEQ ID NO: 74006 - protein, 197 aa, Gossypium hirsutum
  Clone ID: GOSHI-09MAY01-C5826_2.pep
MHTSLLFLSTLFICVHLSDQFQPFQYNALKQIQQFLNYPSVLTIFDSTWDFCNVESSPFLTIVCYEDNVTQLHITGNNGVFPPSLPQNFSIDALFSSISSLSNLKVLSLVSLGLWGPLPATIGKLSSMEILNLSSNYIDGFIPLELSYLNNLQTLVLDHNKFTGQIPRRVSSFNDLPVLSWKNNSLFETLTSSIRSF

SEQ ID NO: 74007 - protein, 143 aa, Gossypium hirsutum
  Clone ID: GOSHI-09MAY01-C5826_1.pep
MGSIAQSVLMALTVAVNQLAPSNVHAVHRKQGKSPSPTSKPKPKPTYTTTITAAAANVGFTGIATRGLILSAVAFAPQLNDSRTELLKKYLKKTEENKAKNDKEHRMENYYRRNYKDYFEFVEGTLKGKDEQQLSEAEKASKR

SEQ ID NO: 74008 - protein, 88 aa, Gossypium hirsutum
  Clone ID: GOSHI-09MAY01-C5506_2.pep
MGQIQYSEKYFDDTYEYRHVVLPPEVAKLLPKSRLLSENEWRAIGVQQSRGWVHYAIHRPEPHIMLFRRPLNYQQQQENQAQQAMLAK

SEQ ID NO: 74009 - protein, 88 aa, Gossypium hirsutum
  Clone ID: GOSHI-09MAY01-C5506_1.pep
MGQIQYSEKYFDDTYEYRHVVLPPEVAKLLPKNRLLSENEWRAIGVQQSRGWVHYAIHRPEPHIMLFRRPLNYQQQQENQAQQSMLAK

SEQ ID NO: 74010 - protein, 50 aa, Gossypium hirsutum
  unsure (1)..(50): unsure at all Xaa locations
  Clone ID: LIB3829-005-Q6-N6-H4.pep
MGQIQYSXKYFDDTYENRNVVLHPEVAKLLPKNHLLSDVFCLGFYTCHCL

SEQ ID NO: 74011 - protein, 293 aa, Gossypium hirsutum
  Clone ID: GOSHI-09MAY01-C5536_1.pep
EILVILEMLSIKNPNPSSGLEPLKRFHRASSSSSPMALCSSPSLRLRSPAYRVSLAAPKGFVVGFRSLHSRLPFHHSVVAFAASHEESNHSEMEVDREKDELETESEEESNEAWKQALASFKEQALKLQSVSLEAYEVHSKKALITLKETSEVLKVQAEKARNDLTEVVKEMSEEGKEYLSTAAENSPPEVQEIVETFSSSAEDFNDVSKVHDFHVGIPYGFILSVGGFLSFMVTGSISAIRFGIILGGALLALSVSSLKSHKRGESSPLAIKGQAVISSVLLLRELSLLIRR

SEQ ID NO: 74012 - protein, 155 aa, Gossypium hirsutum
  unsure (1)..(155): unsure at all Xaa locations
  Clone ID: LIB3585-046-Q6-K1-F5.pep
MEVEGEKDELEMGSEEESNEAWKQALASFKEQALKLQSVSLEAYEVHSKKALITLKETSEVLKVQAEKARNDLTEVVKEMSEEGKEYLSXGFLSFMVTGSISAIRFGIILGGALLALSVSSLKSHKRGESSPLAIKGQAVISSVLFLRELSLLIL

SEQ ID NO: 74013 - protein, 181 aa, Gossypium hirsutum
  unsure (1)..(181): unsure at all Xaa locations
  Clone ID: GOSHI-09MAY01-C5486_1.pep
EMQRFTAKIVEMMKQEKLYASQGGPIILSQIENEYGNIDSAYGAAAXPYIKWAAGVAISLDTGVPWVMCQQSDAPDPIINTCNGFYCDQFTPNSIKKPKMWTENWSGWFLSFGGTVPYRPVEDLAFAVARFFQRGGTFQSYYMYHGGTNFDRTTLGPFIASTYDYEXPIDEYGQVRQLKLG

SEQ ID NO: 74014 - protein, 175 aa, Gossypium hirsutum
  Clone ID: GOSHI-09MAY01-C5456_5.pep
MAFEGLVLRGTMRAHTDMVTAIATPIDNSDMIVTSSRDKSIILWHLTKDEKTYGVARRRLTGHSHFVQDVVLSSDSQFALSGSWDGELRLWDLNAGTSARRFVGHTKDVLSGAFSIDNRQIVSASRDRSIKLWNTLGECKYTIQDGDAHTDWVSCVRFSPNTLQPTIVSAFWDKT

SEQ ID NO: 74015 - protein, 143 aa, Gossypium hirsutum
  unsure (1)..(143): unsure at all Xaa locations
  Clone ID: GOSHI-09MAY01-C5456_4.pep
MRDRNTLAGHTGYVNTVAVSPDGSLCASGGKXGVILLWDLAEGKKLYSLEAGAVIHSLCFSPNRYWLCAATEQSIKIWDLESKSIVEDLKVDLKAEAETSAATDNANKKKVIYCTSLNWSADGSTLFSGYTDGVIRVWGIGRF

SEQ ID NO: 74016 - protein, 130 aa, Gossypium hirsutum
  Clone ID: GOSHI-09MAY01-C5456_3.pep
CEHGAVSPDGSLCASGGKDGVILLWDLAEGKKLYSLEAGAVIHSLCFSPNRYWLCAATEQSIKIWDLESKSVVEDLKVDLKAEAETSAATDNANKKKVIYCTSLNWSADGSTLFSGYTDGVIRVWGIGRY

SEQ ID NO: 74017 - protein, 327 aa, Gossypium hirsutum
  unsure (1)..(327): unsure at all Xaa locations
  Clone ID: GOSHI-09MAY01-C5456_2.pep
MAGSEGLTLRGTMRAHTDMVTAIATPIDNSDMIVTSSRDKSIILWHLTKDEKTYGVPRRRLTGHSHFVQDVVLSSDSQFALSGSWDGELRLWDLSAGISARRFVGHTKDVLSVAFSIDNRQIGSASRDRTIRLWNTLGECIYTIQESDAHTDWVXCVRFSPNTVQPXIVSPSWDKTVKVWNLTNCKIRNTLAGHSGYVNTVAVSPDGSLCASGGKDGVILLWDLAEGKKLYSLDAGSVIHSLCFSPNRYWLCAATEQGIKIWDLESKSIVEDLKVDLKAEAEKSDVTDIGNKKKVIYCTSLNWSADGSTLFSGYTDGVIRVWGIGRY

SEQ ID NO: 74018 - protein, 327 aa, Gossypium hirsutum
  Clone ID: GOSHI-09MAY01-C5456_1.pep
MAVSEGLVLRGTMRAHTDMVTAIATPIDNSDMIVTSSRDKSIILWHLTKDEKTYGVARRRLTGHSHFVQDVVLSSDSQFALSGSWDGELRLWDLSAGTSARRFVGHTKDVLSVAFSIDNRQIVSASRDRTIKLWNTLGECKYTIQEGDAHTDWVSCVRFSPNTLQPTIVSASWDKTVKVWNLTNCKIRNTLAGHSGYVNTVAVSPDGSLCASGGKDGVILLWDLAEGKKLYSLDAGSVIHSLCFSPNRYWLCAATEQSIKIWDLESKSIVEDLKVDLKAEAEKSDVTDNANKKKVIYCTSLNWSADGSTLFSGYTDGVIRVWGIGRY

SEQ ID NO: 74019 - protein, 94 aa, Gossypium hirsutum
  Clone ID: LIB3825-005-Q1-N6-D12.pep
PIIIRVDEVTPVSNSESDMSQGNMMANNAKFGQNQEENGGFWENMTMNLPVLDDSIWAEAVMSLDFPVMDDPSIFGTSLVDTTGWDALQTPWCM

SEQ ID NO: 74020 - protein, 66 aa, Gossypium hirsutum
  Clone ID: LIB3825-011-Q1-K6-B10.pep
KLKRRNLRSSPSKKKKKDGLSVAFSINNRAIVSAFRDRTIKLKNTLGECKYTLQEGNAHTDWISWG

SEQ ID NO: 74021 - protein, 49 aa, Gossypium hirsutum
  Clone ID: LIB3149-001-P1-K1-G9.pep
FFFFFFFFFFYYFFFFFFFFFFFFFFFFFFFFFFFFLSKISSNVTTKPK

SEQ ID NO: 74022 - protein, 54 aa, Gossypium hirsutum
  Clone ID: LIB3135-061-Q1-K1-H8.pep
PRVRKAEAEKSDVTDNAGKKRVIYCTSLNCSANGSTLFSGYTDGVIRVWGIGRY

SEQ ID NO: 74023 - protein, 48 aa, Gossypium hirsutum
  Clone ID: AI726162.1.pep
STEKSDVTDIGNKKKVIYCTSLNWSADGSTLFSGYTDGVIRVWGIGRY

SEQ ID NO: 74024 - protein, 33 aa, Gossypium hirsutum
  Clone ID: LIB3149-001-P1-K1-G10.pep
YYKFFYLSKISSNVTTKPRYHKSIGLNENLQTK

SEQ ID NO: 74025 - protein, 197 aa, Gossypium hirsutum
  Clone ID: GOSHI-09MAY01-C5446_1.pep
VSGYGASDGYPSQHGIINDAQAALDHLSQRTDIDTDRIVVFGRSLGGAVGSVLTKNNPDKVAALILENTFTSILDMAGVLLPFLKWFIGGPGTKGPKILNFLVRSPWSTIDIIGQVKQPILLLSGLQDEMVPPSHMQMLYAKAAARNRQCIFVEFPTGMHMDTWLSGGDQYWRTIQQFFEKHVPKTGYDIDSQRRGD

SEQ ID NO: 74026 - protein, 155 aa, Gossypium hirsutum
  Clone ID: GOSHI-09MAY01-C5416_1.pep
KTRAVSVGGAVKGFKKILVLYTNYGRQRKPEKTNWVMHQYHLGSNEEEKDGELVVSKVFYQTQPRQCGPSSVMYTLGRKLITRSPLHQSPNPMAKSSGSRGLVEHNNPPFIPYDDGSHHNRESPPQLIPDLVVQGDGSSFIRLTSDTSKGRVERK

SEQ ID NO: 74027 - protein, 140 aa, Gossypium hirsutum
  Clone ID: GOSHI-09MAY01-C5786_1.pep
MSGEEGREAATATVPAANSSTKPWVEELPTIESLIDSKDLAIRSAQSLFHNSSTHLRSFQDSLPQASSHYKSYEDAFFSKLKEGVMIAKENPGAAVGITLTAALCLMRGPRRFLFRNTLGRFQSEEAKFSRAEKNVKVLS

SEQ ID NO: 74028 - protein, 187 aa, Gossypium hirsutum
  Clone ID: GOSHI-09MAY01-C5736_1.pep
MAETQSRGLVFAGKKRGTGTDDFDGDDIFVAKKSMLPTMASESDPAAALANARHEFGEHGGVNMSIEASATFTVMEPETMRRMFAGELGPDRDFFIYSRHFNPTVLNLGRLMAALEGTEAAYCTASGMSAISSVLVQLCSSGGHVVASRTLYRGTHALLTHFFSKTWYITTTFGDLGDLQAWKNAIG

SEQ ID NO: 74029 - protein, 249 aa, Gossypium hirsutum
  Clone ID: GOSHI-09MAY01-C5686_1.pep
MDYPGNSQDMAVPPVEGVAGGGTAYGWNDGGLNVSNPLKGSIDPTEVPTADLVHVWCLPSTANVGPQEVPRNLEPVNLLAARNERESVQLAIRPKVSWSGSSVAGVVQVQCCDLCSASGDRLIVGQSLKLRRVVPILGVPDALVPLDLPISQISLQPGETTAVWVSIDVPNEQPPGLYEGEIIINATKADTESSSQCLGKAEKHQLFTELRNCLDALEPIDGKPLDEVVERVKSSTTSLRKVLLSSSIF

SEQ ID NO: 74030 - protein, 156 aa, Gossypium hirsutum
  unsure (1)..(156): unsure at all Xaa locations
  Clone ID: GOSHI-09MAY01-C5196_2.pep
MNMSCSPEFMVHKPARSPEKTSFTQTCNLLSQYLKEKGSFGDLSLGMTCNVEANETPEMLRPTMNLFPVNGKSGDDCHAAPPPRKLRSMDLVPNQAAFSSPKDDALKSSMNKLGSSVEPQTAQMTIFYGGQVIXVFNDFXADKAREIMLLAGKGSS

SEQ ID NO: 74031 - protein, 169 aa, Gossypium hirsutum
  Clone ID: GOSHI-09MAY01-C5196_1.pep
MSSCSESTAMKPARSLEKPSFAQTCNLLSQYLKEKGSFGGLSLGMTCNVEANGTPVVPPPTMNLFPVNDKSDNVCGRNGGNPKNLASMDLFPQQAGLASKDDSPNKLEPQTAPMTIFYGGRVIVFNDFPANKAKEIMLLASNSSSQSNDSFNPIPFTSSIARSPIKSSI

SEQ ID NO: 74032 - protein, 333 aa, Gossypium hirsutum
  Clone ID: GOSHI-09MAY01-C5186_1.pep
IPGFIQALPSTLSSGDLKCREGKPQAAVDRTPHASAFRGWTETDNPWTYDDETDNAEMTYVNLQLNPERYTGYNGTSARRIWDAVYSGNCPKYPAEELCQEEKILYKLISGLHSSISVHIASDYLIDEATNLWGHNLEIMYYRVLQYPNRVENLYFTFLFVLRAVTKTADYLEQAEYDTGNPTEDIKTQSLMKQLLYDPKLQAACPLPFDEAKLWKGRTGPELKQKIQAQFKNISAVMDCVGCEKCRLWGKLQVSGLGTALKILFSVNDEENLIQILQLQRNEVIALMNLLNRLSESVKFVHEMGAAAEMGRMHYSSRLKSLAQRILASIVNT

SEQ ID NO: 74033 - protein, 104 aa, Gossypium hirsutum
  unsure (1)..(104): unsure at all Xaa locations
  Clone ID: AI054499.1.pep
ETDNPWTYDDETDNSEMTYVNLQLNPERYTGYNGTSARRIWDAVYSENCPKXLCQEEKIXYKLDSCLHSSISVHIASDYLIDEATYLWGHILEICIIGLQYPIC

SEQ ID NO: 74034 - protein, 220 aa, Gossypium hirsutum
  Clone ID: GOSHI-09MAY01-C5086_1.pep
MGDEDVVLLDFWPSPFGMRVRIALAEKEIKYEYKEEDLRNKSDLLLKMNPVHKKIPVLIHNGKPVCESLIQVQYIDEIWPHKSPLLPTDPYQRAIARFWADFVDNKIYDLGRKLWTTKGEEQEAAKKEFIACLKLLEGELGNKDYFGGENLGYVDVVLVPFYSWFYAYEKCGNFSIETECPKLIAWAKRCMEKDTVSKSLPDQDKIYDFVLHLKKVFGIE

SEQ ID NO: 74035 - protein, 79 aa, Gossypium hirsutum
  unsure (1)..(79): unsure at all Xaa locations
  Clone ID: LIB3584-031-P1-K1-B11.pep
PSPFIIIVRTALSVKGIKYHYNEXYLRNKIYSLLKMNPIHNKIPVLIHTSKPIXQSLIQVQYIYXIFPHISPLLPTDPY

SEQ ID NO: 74036 - protein, 344 aa, Gossypium hirsutum
  unsure (1)..(344): unsure at all Xaa locations
  Clone ID: GOSHI-09MAY01-C5076_1.pep
SVRFVLEQXQVLKTEISKARIRLMEPLLKGPAALDYLMKAFTNCPGSPSEACLSLPMTMRWLSPVSNCKDEEWGEHQNSVSNLKANDSSSQELLMSITLKTGGSYNSKNSTQIPFVNPNSSNVTGQEQPECKGDKVDVLVRLGLLKLVSGVSGLTPDALPETFMLNFSRLRGVQAEIQKIIVISTSILIFRQILSSEQVSDMERTISNCTEQLSEFLNCVEDADIEGIVDTIIGTSRLGDKVTDDKNLQLRKSMMARMLAKSLQAEDPVFKKVSLAVYLAFRGVVFGGSGTHGRKLAETALRRVGAASLTERVVKEAKVLVVAATVSIGVHGPWYATLIGTCDL

SEQ ID NO: 74037 - protein, 156 aa, Gossypium hirsutum
  Clone ID: GOSHI-09MAY01-C5016_1.pep
RAGLHLKLPNPDGDSRVNLVYIYGPKIKYERGAAVAFNVRDRNKGLINPEIVQKLAEREGISLGIGFLNHIRILDSPRQQQGALSLEDTTLCKPMENGRHDGKSRFIRVEVVTASLSFLTNFEDVYKLWAFVAKFLNPSFIREGTLPTVAEEEPET

SEQ ID NO: 74038 - protein, 400 aa, Gossypium hirsutum
  unsure (1)..(400): unsure at all Xaa locations
  Clone ID: GOSHI-09MAY01-C5356_1.pep
MGIIERIKEIEAEMARTQKNKATEYHLGQLKAKIAKLRTQLLEPPKGSSGGGDGFEVTKFGHGRVALIGFPSVGKSTLLTMLTGTHSEAASYEFTTLTCIPGIIHYNDTKIQLLDLPGIIEGASEGKGRGRQVIAVAKSSDLVLMVLDASKSEGHRQILTKELEAVGLRLNKRPPQIYFKKKKTGGISFNSTLPLTHVDEKLCYQILHEYKIHNAEVLFREDATVDDLIDVIEGNRKYIKCVYVYNKIDVIGIDDVDKLARQPNSVVISCNLTLNLDRLLSKMWEEMGLVRVYTKPQGQQPDFSDPVVLSADRGGCSVEDFCNHIHRSLIKDVKYVLXVWGSSARHYPQHCGLGHSLQDEDVVQIVKKKEKEEGGRGRFKSHTTGPARISDREKKAPLKT

SEQ ID NO: 74039 - protein, 123 aa, Gossypium hirsutum
  Clone ID: LIB3543-052-Q1-K1-B5.pep
MRLLVSQVIAVAKSSDLVLMVLDASKSEGHRQILTRELESVGLRLNKRPPQIYFKKKKTGGISFNSTLPLTHVDEKLCYQILHEYKIHNAELLFREDATVDDLIDVIEGNRKYIKCVYVYNKI

SEQ ID NO: 74040 - protein, 93 aa, Gossypium hirsutum
  Clone ID: LIB3147-051-Q1-K1-H7.pep
KGSSAGGDGFEVTKFGHGRVALIGFPSVGKSTLLTMLTGTHSEAASYEFTTLACIPGIIHYTDTKIQLLDLPGIIEGASEGKGRGRQVKICRF

SEQ ID NO: 74041 - protein, 305 aa, Gossypium hirsutum
  Clone ID: GOSHI-09MAY01-C5376_1.pep
DAWVDTSYGDRYLFSHVIDQLSVSSAEVSDPGSLTLDIIQQAEAEVKRLDQLKASKMKELFLKKQNELEEICNKSHMEIPSRSEMENILNLINTGEIDYAELLMSIDEQISRAKEEASSRKSIMEKVEKWILARDEERWLEEYSMDENRYSVSRGAHRNLRRAERARVTVNKIPALVDSLMAKTKSWEEERRKVFLYDEVPLLAMLEEYNLSRQEREEEKQRQRMKKVQSQVVVEQENFTTSRPSTSNRRLSNKSLNGGFGNASPLNKKLSLSIQQLGSNGKSSVALGTSFIKEGKKEAGKRIFS

SEQ ID NO: 74042 - protein, 142 aa, Gossypium hirsutum
  Clone ID: GOSHI-09MAY01-C5366_1.pep
MVGHEAVEVAKTVLEVADVAWTAMECCHHLHHRHNPDDDSPENHDAFKLEKELETLKSENQRLRNLLEQNLKLLNNLSESPAYLNDCPPDLYARLVSTVESKDFLLRLKSLNGSNTKIEFPFKEATGDDKHSAEILINVNQN

SEQ ID NO: 74043 - protein, 112 aa, Gossypium hirsutum
  Clone ID: GOSHI-09MAY01-C5316_1.pep
MSGMEVAKDQELVDGTVAQESGKSMPSSQQEEAVVKKKYGGIMPKKPPLISKDHERAYFDSADWALGKQGVEKPKGPLQALRPKLQPTQQQTRYRKSPYAPSDVEDGGSGQP

SEQ ID NO: 74044 - protein, 224 aa, Gossypium hirsutum
  unsure (1)..(224): unsure at all Xaa locations
  Clone ID: GOSHI-09MAY01-C5306_1.pep
TELTLRKSDSTLFKEALVSLATESXLHPLVPYFTYFISDEVSRGLNDYSLLFALMRVVWSLLQNPHIHIEPYLHQLMPSVVTCLVSKKLGNRIADNHWELRDFTAKLVASICKRFGHVYNTLQTRLTKTLLNALLDPKRALTQHYGAVQGLAALGPNVVCLLILPNLEPYLRLLEPELLLEKQKNEMKRYEAWRIYGVLLRAXGQSIFERLKIFSPLPLNFSPC

SEQ ID NO: 74045 - protein, 153 aa, Gossypium hirsutum
  Clone ID: GOSHI-09MAY01-C5326_1.pep
AGLMRGAVSMALAYNQFTSLGHTQLRGNAMMITSTISVVLFSTVVFGLMTKPLVRLLLPSPKHLMRTLSSEPSTPKSFIVPLLGNEGQPEADQNNRNACRPTSLRMLLTTPSNTVHYYWRKFDDAFMRPVFGGRGFVPFVPGSPTEQNGHQWQ

SEQ ID NO: 74046 - protein, 155 aa, Gossypium hirsutum
  Clone ID: GOSHI-09MAY01-C5296_1.pep
SYWSSPNSDGTAETGMYRFGSVGQDTQLLLWDLVMDEIVVPLRRCPPGGSPTYSTGSQSSHWDNVSPLGTLQPASSIRDVPKISPVVAHRVHSEPLSGLIFTQESVLTVCQEGHIKIWMRPGIAESQSSNTESLSSSAKDKLLLPSKIGGSSYKQ

SEQ ID NO: 74047 - protein, 174 aa, Gossypium hirsutum
  unsure (1)..(174): unsure at all Xaa locations
  Clone ID: LIB3584-036-P1-K1-G8.pep
PTRPPTRPPTRPEKDDIFHGSRNAEDGSKLKSREGNTRAEPKRKKMRGKFIRKETDRAISSATKGLVFEVHFKFVNEPHILLAQIAEKTAKKVYIHSFGKIDQCLVTDCSENQVFYYGEDPKQRKSPSGKANIPALHTAGVDFGAFWKMEGHLDVRYLYYNNIYSMLNXYGVEA

SEQ ID NO: 74048 - protein, 120 aa, Gossypium hirsutum
  Clone ID: LIB3166-020-P1-K1-G7.pep
KVYIQSWARIDQCRVTHCSENQVFYYGEDPKQRKSPSGKANRPGLHTAGVDFGAFWKMEGHLDVRYLYSNNIHAMLNTYGVQAARETIISEISYVFTSYAIGVNIHHLTLIADFMTHSGR

SEQ ID NO: 74049 - protein, 137 aa, Gossypium hirsutum
  Clone ID: GOSHI-09MAY01-C5256_1.pep
MKKLYRRGTVHPSPLSTTDHLSFLPATILTLVAALSPEDREVLAYLISCANNDFSNFSTHRKNTQKHPTKRSISFSSGSDHDHPPLFTCDCFRCYMSYWVRWDSSPNPQLIHEIIDAFEDGLAQSKKTKSKKDRQKK

SEQ ID NO: 74050 - protein, 228 aa, Gossypium hirsutum
  unsure (1)..(228): unsure at all Xaa locations
  Clone ID: GOSHI-09MAY01-C5276_1.pep
AVYTRRFVIYIKEGVYEEXVRVPLEKXNVVFLGDGMGKTIIAGALNAGMPGLTTYETATGGVLGDGFMASGLTIRNTAGPDAHQAVAFRSDSDLSVIENCEFLGNQDTLYAHSLRQFYRKCRIQGNVDFIFGNSASVFQDCEILVAPRQVKPEKGENNAVTAHGRTDPAQSTGLGFQNCLINGTDEFMRYYYSKPKVHKNFLGRPWKEYSKTDFINCVMEALIXPNGW

SEQ ID NO: 74051 - protein, 108 aa, Gossypium hirsutum
  Clone ID: LIB3120-011-Q1-K1-A3.pep
GLPSNLKTDVSVCKDWIGGCYKTVQEAVNASPANAESTRRFVIYIKEGVYEETVRVPLEKKNVVFLGDGMGKTIIAGALNAGMPGLTTYETATVSEYYYPPTLLTLNI

SEQ ID NO: 74052 - protein, 76 aa, Gossypium hirsutum
  unsure (1)..(76): unsure at all Xaa locations
  Clone ID: uC-gsronu33b025c05b1.pep
FVIYIKEGVXRESVRVPLEKKNVVFLGDGMGKTIIAVALNARMPGLTTYDTATGGVIRDGYFTPPSYNQVPCITSP

SEQ ID NO: 74053 - protein, 619 aa, Gossypium hirsutum
  Clone ID: GOSHI-09MAY01-C5266_1.pep
NFGSSHSSNSAQHQSVSVNEQLEEKWYASPEDINEGVCTILSNIYSLGVLLFELLCQFESERGHAAAMLDLRHRIFPPTFLSENLKEAGFCLRLLHPEPSLRPTTRDILQSEVLNGFQEVFAEELSSSINQDDTESELLLHFLGLSKEQKQKHASKLMEDIACLEADIKEVEKRRHFSRKPLTYSSINARECRHHSKEPPISEMHSSLYPFSSDNEMRLMRNINQLESAYFSMRSRVPFHETDSMRRPDKDLLKNRDNGHLTQNNEEIPNPPDCLGAFFDGLCKYARYSKFEVRGIMRSGEFNNSANVICSLSFDRDEDYFAAAGVSKKIKIFEFNALFNDSVDVHYPVIEMLNKSKLSCVCWNNYIKNYLASTDYDGLVKLWDASTGQAISHYIEHEKRAWSVDFSQVYPTKLASGSDDCSVKLWSINEMNCLGTIRNIANVCCVQFSAHSPHLLAFGSADYKTYCYDLRNARAPWCVLDGHDKAVSYVKFLDSETVVTASTDNTLKLWDLNKTSSGGLSSNACSLTFSGHTNEKNFVGLSVVDGFIACGSETNEVYAYYRSLPMPITSHKFGSIDPISGKDTDDDNGLFVSSVCWRGKSDMVVAANSSGCIKVLQMV

SEQ ID NO: 74054 - protein, 146 aa, Gossypium hirsutum
  unsure (1)..(146): unsure at all Xaa locations
  Clone ID: AI054779.1.pep
MDVFTGLSNASHTQFSNFGSSHSSNSAQHQSVSVNEQLEEKWYASPEEINEGVCIILSNIYTFGVLLFELLCQFESERAHAAAMLDLCHRIFPSTFLSENLKEAGXCLRLLHPEPSLRPTTKDYPTIEYLIDSRRFAEKCVINRMI

SEQ ID NO: 74055 - protein, 138 aa, Gossypium hirsutum
  Clone ID: LIB3048-027-Q1-L1-B3.pep
MDVFTGLSNASHTQFSNFGSSHSSNSAQHQSVSVNEQLEEKWYASPEEINEGVCTILSNIYSLGVLFFELLCQFESERAHAAAMLDLCHRIFPPTFLSENLKEAGFCLRLLHPEPSLRPTTRYYKLFIGAKCEALESY

SEQ ID NO: 74056 - protein, 160 aa, Gossypium hirsutum
  unsure (1)..(160): unsure at all Xaa locations
  Clone ID: GOSHI-09MAY01-C5206_1.pep
ESSATWWLKRLIGRKSEVALDWPYPFPQGRLFVLTLSAALEGYHVNVDGRHVTSFPYRTGFVLEDATGLSLKGELEVHSVFAAALPTPHPSFAPQKHLERLSXWNAPPLPDGNVELFIGILSAGNHFAERMXVRKSWVQHKLIKSSKVVARFFVALNGRK

SEQ ID NO: 74057 - protein, 163 aa, Gossypium hirsutum
  Clone ID: LIB3584-034-P1-K1-G4.pep
DDNGSEESKTTWWLNRLIGRKKKVTLDWQYAFAEGKLFVLTLRAGLEGYHVNVDGRHITSFPYRTGFVLEDATGLSLKGDLDVHSVFAASLPNSHPSFDPQKHLERLSKWKAPPLPNGNVELFIGILSAGNHFAERMAARKSWMHHKLIKSSNGGARFFVALS

SEQ ID NO: 74058 - protein, 78 aa, Gossypium hirsutum
  Clone ID: GOSHI-09MAY01-C5236_5.pep
SKKQHTVTREKKEIELLARGRHDPCVVPRAVPMVEAMVAMVLVDQLMAQHGQCNLFPINPELQEPLSFSFPNFEPANI

SEQ ID NO: 74059 - protein, 181 aa, Gossypium hirsutum
  unsure (1)..(181): unsure at all Xaa locations
  Clone ID: GOSHI-09MAY01-C5236_4.pep
NKTVRTRGDSIGGVVTCIVRNAPRGLGSPVFDKLXIKLAKLNVGGVGLFFFNNSTFLTHNIIPFFTYNITINGRKVRSGGIQGGISNGEIINMRVAFKPTPAISRKQHTVTREKKEIELLVHGRHDPCVAPRAVPVVEAMVALVLVDQLMAQYAQCNLFPINAELQEPLSLGFPNFEPAMI

SEQ ID NO: 74060 - protein, 309 aa, Gossypium hirsutum
  unsure (1)..(309): unsure at all Xaa locations
  Clone ID: GOSHI-09MAY01-C5236_3.pep
PIHVFVPNTDQRGHDYKEMSIAYRPSHADATYDMKYGVRAVQGGGRSSARETIGRVASGAIAKKILKHFSGTEVLAYVSQVHQVVLPDGSVYHDTVTLDQIESNIVRCPHPEYAEKMIAAIDAVRTRGDSIGGVVTCIVRNAPRGLGSPVFDKLEAELAKAVMSLPATKGFEFGSGFAGTFLTGSEHNDEFFTDEHGTIRTKTNRSGGIQGGISNGEIINMRVAFKPTATISKKQHTVTREKEEIELLARGRHDPCVVPRAVPMVEAMVAMVLADXLMAQHGQCNLFPINPELQEPLSFIFPNFEPANI

SEQ ID NO: 74061 - protein, 290 aa, Gossypium hirsutum
  unsure (1)..(290): unsure at all Xaa locations
  Clone ID: GOSHI-09MAY01-C5236_2.pep
HAFAHASAHASAHADATYDMKYGVRAVHGGGRSSARETIGRVAXGAIAKKILKLFSGTEVLAYVSQVHQVVLPDGSVDHDTVTLDQIESNIVRCPNPDYAEKMIAAIDAVRTRGNSIGGVVTCIVRNAPRGLGSPVFDKLEAELAKAVMSLPATKGFEFGSGFAGTFLTGSEHNDEFYTDEHGRIRTRTNRSGGIQGGISNGEIINMRVAFKPTATIGKKQHTVTREKQEIELLARGRHDPCVVPRAVPMVEAMVALVLVDQLMAQYAQCNLFPINSELQEPLNLEPANI

SEQ ID NO: 74062 - protein, 277 aa, Gossypium hirsutum
  unsure (1)..(277): unsure at all Xaa locations
  Clone ID: GOSHI-09MAY01-C5236_1.pep
MASSITSKPFLGATKPNSSLSPDLQRLSFSSLRISIKPRTHKKLQIQAAGSTFGNYFRVTTFGESHGGGVGCIVDGCPPRIPLSEADLQGDLDRRRPGQSRITTPRKETDTCRIYSGVSEGVTTGTPIHVLVPNTDQRGHDYKEMSIAYRPSHADATYDMKYGVRAVQGGGRSSARETIGRVASGAIAKKILKLFSGTEVLAYVSQVHQVVLPDGSVDHDTVTLDQIESNIVRCPNPDYAEKMIAAIDAVRTKXNSIGGVVTCILRNAPRGLGSPVF

SEQ ID NO: 74063 - protein, 152 aa, Gossypium hirsutum
  Clone ID: uC-gsronu33B113b12b1.pep
RWHARVSRFRNSTDRVRRSVRRRVTRLGTRPCTRTTARADTRTRSSVRETIGRVASGAIAKKILKLFSGTEVLAYVSQVHQVVLADGSVDHDTVTLDQIESNIVRCPNPDYAEKMIAAIDAVRTRGNSIGGVVTCIVRNAPRGLGSPVFDKL

SEQ ID NO: 74064 - protein, 101 aa, Gossypium hirsutum
  Clone ID: LIB3493-021-P1-M1-D12.pep
MASSIICKPFLRATKPNSSLYPDLQRLHFPSLRISIKPRTHKKLQIQAAGSTFGNYFRVTTFGESNGGGVGCIVDGCPPRIPLSEADLQGDLDRRRPGQSR

SEQ ID NO: 74065 - protein, 49 aa, Gossypium hirsutum
  Clone ID: LIB3145-007-Q1-K1-H5.pep
VVINFKFVFFCCCCNLQYYSFYLYYLLTVLMKKKKKKKKKKKKKKKKIK

SEQ ID NO: 74066 - protein, 424 aa, Gossypium hirsutum
  unsure (1)..(424): unsure at all Xaa locations
  Clone ID: GOSHI-09MAY01-C5226_1.pep
GSTLASADFFQSGIEGEWGSRSRSASPKRTMSKSMSISPWRTHSRSPSLSRSRSVSRSPVALLNPGGFLERSLSRSPARSIRISPSRTRKDRSISRSPVRGHPRRTIGRSPVRSLLRSRRSPSRSPPRSTXKSTSRSPVRLSKRSTSGSPARSFRRSISRSPRRSRRSTSGSPVRSSRRSISRSSARAPPRRSISRSPLREPSRNYRRSYSRSPTTVRRVRSPPGRGRSLSTSVSPDASPKRIRRGRGFSERYSYARRYRTPSPDRSPVRSYRFSGRIDRERYSSYRRYSPRRYRSPPRGRTPPRYRGRRSRTRSLSVSPSPRYRNRRYGHSRSRSPSRSRTSIRSRSPSRSRTPVRSRSPVDSPRAGRRRSPSQSRSRSESRSSLNSQSPKKVSKAKSRSSSGSPDGGRGLVSYDDGSPDSGR

SEQ ID NO: 74067 - protein, 128 aa, Gossypium hirsutum
  unsure (1)..(128): unsure at all Xaa locations
  Clone ID: LIB3584-036-P1-K1-A4.pep
PVRSLLRSRRSPTRSPLKSTRKXMGRSPVRLSKRSTSRSPARSRRSISGSPVRSSRRSISRSSARAPPRRSISRSSLREPIKNYRRSYSRSPTAVRRVRSPTDRGRNMSRSVSPDESAKRIRRGRCFQ

SEQ ID NO: 74068 - protein, 66 aa, Gossypium hirsutum
  Clone ID: LIB3147-027-Q1-K1-C1.pep
PKVKIYPKPRHDRANQQQTTISKKNTWNRINVITNHKPLATTQIRDKKFVKLHSSVHQQKMGVIKH

SEQ ID NO: 74069 - protein, 230 aa, Gossypium hirsutum
  unsure (1)..(230): unsure at all Xaa locations
  Clone ID: GOSHI-09MAY01-C6996_2.pep
MNTMASSKKLISREEWEKKLNNVKIRXKEDMNKLVMNFLVTEGYVEAAEKFRMESGTHPDIDLATITDRMAVKKAVQCGNVEDAIEKINDLNPEILDTNPQLFFHLQQQRLIELIRNGKVEEALEFAQEELAPRGEENQTFLEELERTVSLLAFEDVSNCPLGELLDISQRIKTASEVNAAILTSQSHEKDPKLPSLLKMLIWAQNQLDEKAAYPRINNLSNATLEDPTV

SEQ ID NO: 74070 - protein, 243 aa, Gossypium hirsutum
  unsure (1)..(243): unsure at all Xaa locations
  Clone ID: GOSHI-09MAY01-C6996_1.pep
MSLFWFVIRQLAEIEEQMATSKKVITREEWEKRLNDVKIRKEDMNKLVMNFLVTEGYVEAAEKFQMESGTEPDIDLATITDRMAVKKAVQSGNVEDAIEKVNDLNPEILDTNPQLFFHLQQQRLIELIRNGKXEEALEFAQEELAPRGEENQSFLEELERTVSLLAFEDVSNCPVGELLDISQRLKTASEVNAAILTSQSHEKDPKLPSLLKMLIWAQNQLDEKAAYPRINDLSNATLEDPTV

SEQ ID NO: 74071 - protein, 89 aa, Gossypium hirsutum
  Clone ID: LIB3828-006-Q1-N6-E5.pep
LEELERTISLLVFEDTSNCPVGELLDISQRLKTATEVNAAVLTSQSHEKDPKLPSLLKMLIWAQNQLDKKAAYPCINDLSNARLEDPTF

SEQ ID NO: 74072 - protein, 109 aa, Gossypium hirsutum
  Clone ID: LIB3148-021-Q1-K1-F5.pep
EALEFAQEELAPRGEENQSFLEELERTVSLLVFKDVSNCPVRELLDISQRLKTANEVNAAILTSQSHEKDPKLHSLLKMLIWAQNQLDEKATYPRIKDFLKATLENPAV

SEQ ID NO: 74073 - protein, 117 aa, Gossypium hirsutum
  unsure (1)..(117): unsure at all Xaa locations
  Clone ID: LIB3493-049-P1-M1-E12.pep
MSLFWIVIRRLAEIEERMATSKKVITREEWEKRLNDVKIRKEDMNKLVMNFLVTEGYVEAAXKIQMESGTXPDIDLATISDRMAXKKAVQCGNVEDAIEKVNDLNPEILDTNPQLFF

SEQ ID NO: 74074 - protein, 68 aa, Gossypium hirsutum
  Clone ID: LIB3165-008-P1-K1-F6.pep
MSLFWIVIRRLAEIEERMATSKKVITREEWEKRLNDVKIRKEDMNKLVMNFLVTEGYVEAAEKFQMES

SEQ ID NO: 74075 - protein, 81 aa, Gossypium hirsutum
  unsure (1)..(81): unsure at all Xaa locations
  Clone ID: uC-gsflmaxxa091c11b1.pep
MSLFWIGIRQLAEIEEQMATSKKVITREEWEKRLNDVKIRKEDMNKLVMNFLVTEGYVEVAXXFQMESGTEPFIEPWTITD

SEQ ID NO: 74076 - protein, 42 aa, Gossypium hirsutum
  Clone ID: LIB3135-044-Q1-K1-C6.pep
MTDPKLPSLLKMLIWAQNQLDKKAASPRINDLSNARLEDPTF

SEQ ID NO: 74077 - protein, 454 aa, Gossypium hirsutum
  Clone ID: GOSHI-09MAY01-C6956_1.pep
MATSSTSLVLKVHRHEPELIAPAKPTPHEYKLLSDIDDQEGLRFQIPVIQFYKYNPSMQGKDPVRVIREALAQALVFYYPFAGRLREGPQRKLMVDCTGEGLMFIEADADVTLEQFGDVLQPPFPCLEELLYDVPGSTGVLNCPVILIQVTRLRCGGFIFALRLNHTMSDAAGLAQFMSAVGEMARGRLTPSIPPVWERHLLGARDPPRVTCKHCEYEEVEGTIVPYDDMVHRSFFFGPTEVSALRKLVPKHLRKCSTFELLTACLWRCRTIAIQANPEEEVRIICIVNARSRFNPPLPSGYYGNAFAFPVAVAQAGKLCQNPLGYSLELVKQAKNDVTEEYMKSLADLMVIKGRPHFTVIRSYLVSDVTRARFGDADFGWGKAVYGGPAKGGVGAIPGVASFLIPVKNKKGEAGVVLPITLPARAMEIFVKELDGMLKGKPIERKPGFISSSL

SEQ ID NO: 74078 - protein, 50 aa, Gossypium hirsutum
  Clone ID: LIB3146-019-Q1-K1-E10.pep
AVYGAPAKGGVGAIPGVASFLIPFNNKNGEAGIVLPITLPAESMEIFVKE

SEQ ID NO: 74079 - protein, 126 aa, Gossypium hirsutum
  unsure (1)..(126): unsure at all Xaa locations
  Clone ID: GOSHI-09MAY01-C6946_1.pep
RNCGDIFCDKCTHARIAXRRADENAPQVRVCDRCMAEGTQRLNNAKQIPSKPTVLQSHEDLARKLQEEMGRSRRASSGSMSDGSGRRMKEVACPTCTVHLQVQVPSSGSETIECGVCQHPFLVSAH

SEQ ID NO: 74080 - protein, 271 aa, Gossypium hirsutum
  Clone ID: GOSHI-09MAY01-C6546_1.pep
PTRPRVSRRGKLFVKGNLPLRTSEASLGDKVDLKCEFLEVRAKNILSGQVDTQLQITGSILQPNISGNIKLSHGEAYLPHDKGSGPAPFNRLTSNQSRLPGAGINQAVASRYVSRFFGSEPAFSRTKLPLLSAKSADVEKEMEQVNIKPSLDVRLSDLKLVLGPELRIVYPLILNFAVSGELELNGQAHPKWIKPKGILTFENGDVNLAATQVRLKPEHLNLAKFEPEYGFDPMLDLALGGSEWQFRIQSRASNWQDKLLVTSTRSVEQDV

SEQ ID NO: 74081 - protein, 250 aa, Gossypium hirsutum
  unsure (1)..(250): unsure at all Xaa locations
  Clone ID: GOSHI-09MAY01-C6576_1.pep
WSFIGSRAYHHHGIDMDHPILXLNMTIIAICIKEGLYWITKRAGERQGSALMMANAWHHRADAISSVVALIGVGGSILGVKFLNPLAGLVVSGMILKAGLETGYQSVLELVDAALPTEQLEPINQTILQVKGVKGCHRMRGRRAGSNLYLDVHIVVDPFSSVSTAHGIGENVRHQIHKSHPEVTEVFIHIDPAYVEFSPDLMDQNEGLKTITEQNSNMSVGEENVQAIVSHLLSSKFSKKFKVERITQHT

SEQ ID NO: 74082 - protein, 214 aa, Gossypium hirsutum
  Clone ID: GOSHI-09MAY01-C6476_1.pep
MAMATQASLFTPSTLCTPKSGDRIAAVLRKQPPFLTVPSFKSPKSIIAPRTIKAQATEEKAETTATKEAPVGFTPPELDPNTPSPIFGGSTGGLLRKAQLEEFYVITWESPKEQIFEMPTGGAAIMRQGPNLLKLARKEQCLALGTRLRSKYKIKYQFYRVFPNGEVQYLHPKDGVYPEKVNPGRQGVGQNFRSIGKNVSPIEVKFTGKQVYDL

SEQ ID NO: 74083 - protein, 87 aa, Gossypium hirsutum
  Clone ID: LIB3165-056-P1-K1-H1.pep
VHAYAISLFSLAMATQACLLTPSTLCTPKSGDRIGGVLRKQPPVLTGPSFKCPKSIICPRTINSQGTRRERPGTYPPQKGRHPGSGF

SEQ ID NO: 74084 - protein, 97 aa, Gossypium hirsutum
  Clone ID: GOSHI-09MAY01-C6466_2.pep
HASAHASAVDPKKGNIGIIAPIAIGFIVGANILAGGAFDGASMNPAVSFGPAVVSWTWDNHWVYWLGPFVGSAIAAIVYEVFFIAPDTHEQLPTSEF

SEQ ID NO: 74085 - protein, 252 aa, Gossypium hirsutum
  Clone ID: GOSHI-09MAY01-C6466_1.pep
MPISRIAVGSAAEAGQADALKAALAEFISMLIFVFAGEGSGMAFNKLTDNGSTTPAGLVAASVAHAFALFVAVSVGANISGGHVNPAVTFGAFVGGHITLVRSILYWIAQLLGSVVACLLLKFSTGGLTTSAFGLSSGVGAWNAVVFEIVMTFGLVYTVYATAVDPKKGNIGIIAPIAIGFIVGANILAGGAFDGASMNPAVSFGPAVVSWTWDNHWVYWLGPFVGAAIAAIVYEVFFIGPDTHEQLPTTEY

SEQ ID NO: 74086 - protein, 185 aa, Gossypium hirsutum
  Clone ID: GOSHI-09MAY01-C6416_1.pep
MPEDTEYRCFIGNLSWSTSDRGLKDAFEKFGNLLEAKVATDKFSGRSRGFGFVTFDEKAAMEEAIEAMNGMDLDGRNITVDRAKPQQGSGRDYDGDRSRDRGRDRDHDRSRGYDGSRGSNGGECFKCGKPGHFARECPSDGARGGKYGGRGDRYGGGSVGRRYGPDRFGDRFGGRNIYAGIRWVS

SEQ ID NO: 74087 - protein, 182 aa, Gossypium hirsutum
  Clone ID: GOSHI-09MAY01-C6406_1.pep
MEKTAALNASVTSYSLSFNKILTPKNSMAAVSFLASFSPRIHSLSSPFPSPAIKPKRPTNTFQVRSVAAPTEDVAGFDDMVSGTQRKYYMLGGKGGVGKTCCAASLAVKFANNGHHTLVVSTDPAHSLSDSFAQDLTGGMLVPVEGPDFPLFALEINPEKAREEFRDAAKNNGGTGVKDLWM

SEQ ID NO: 74088 - protein, 128 aa, Gossypium hirsutum
  unsure (1)..(128): unsure at all Xaa locations
  Clone ID: GOSHI-09MAY01-C6436_1.pep
TKVFVLVWRLKVRPRVPLYSLRRFYPGETLFNGTLALAGRDQQTTGFAWGARECPGLSIYPGKLLGXAHVAHAGLIVFWAGAMNLFEVAHFVPEKPMYEQGLILLPHLSYSXGWGGGPGGEIIDTFSY

SEQ ID NO: 74089 - protein, 136 aa, Gossypium hirsutum
  Clone ID: GOSHI-09MAY01-C6676_1.pep
MRSFLKFVSRCVKNPEVSTTEEMVVTAPGREETRSFMAPKMVALKKKKKRVKVGTPFSTTPEWKPSLYVISEDNVLAEKREKTTPEASTTPADRAVKRKSGAGSRSKVHVRSYSDDIGRNQEPVVIPTFSPTPFMF

SEQ ID NO: 74090 - protein, 247 aa, Gossypium hirsutum
  unsure (1)..(247): unsure at all Xaa locations
  Clone ID: GOSHI-09MAY01-C6196_1.pep
MDKLSCYLLLLLSFFCFRLDLSWSLETRFNRAPNNQGSSDLANLVYHMGPVLSSPIKLYIIWYGNWNSTHQATIRDFLNSFSSPALSPSVADWWKTVRLYTDQTGSNITDSLSLSGEFFDSRLSNGVRLNRLSMQHIIKNAVTSKPSPLPLDPRSGLYLVLTSSDVQVDEFCRAVCGFHYFSFPSIVGATVPYAWIGYSGTQCPGVCAYPFARPLGAPPASAMXRNDIMRPPNGDARVDRMNSVISS

SEQ ID NO: 74091 - protein, 84 aa, Gossypium hirsutum
  Clone ID: LIB3585-048-Q6-K1-E1.pep
EIFRCFNIAVQIQVVLMMEWRLEPWQAVVSDGVEFEDGVAVACADDAGWLGNKDRGSFKDKDLVVSLEIEKHFMLVLGSSYSIW

SEQ ID NO: 74092 - protein, 122 aa, Gossypium hirsutum
  Clone ID: LIB3149-028-Q1-K1-E11.pep
MKCFSISKLTTKSLSLKFPLSLFPNYPASSAVAAAARFPSLSPRSIRFSICSDASRSSRGGVSLSSRDRNLFTMAGADEFVKGNVHPNGVAVITLDRPKALNAMNLDMDIKYKQILDEWESD

SEQ ID NO: 74093 - protein, 78 aa, Gossypium hirsutum
  Clone ID: GOSHI-09MAY01-C6106_2.pep
PTRPVVFILPLAFIFLDFFCKEGGFGFLFLKLKTAAVSGGKSFNLSSSVKKIFLLHVMLYYYYYYYYYLFFYCLQLQQ

SEQ ID NO: 74094 - protein, 134 aa, Gossypium hirsutum
  Clone ID: GOSHI-09MAY01-C6106_1.pep
MADCDSTLQSPTDKVQKKPTSFPKLLTGFTLKAFSDNTESIMSPKSILDSKPCSALKNPFWSESSTPKTPEPEAKHKLDSKGIGLAIVDSFKDDYFDPNLPKPVLFGSQLRIQIPSLPHVFSPAESPRTPPEFS

SEQ ID NO: 74095 - protein, 192 aa, Gossypium hirsutum
  Clone ID: GOSHI-09MAY01-C6136_1.pep
MSSILKMPLSIPVPSQALSFSKSLVSPIPLFLYTKLSTLSLHNSAPPPNTIIRMGGGPRTYPGGVSKWQWKRMQAKKAKQLLKTRLARERHIYEMRKRAELKAPVSELERPWEVVEKAPNLFSVSADDQVKVLADRFQKPGGFDMWSDRDGPQLFDAVDELPSARFFPKGVVHSVKPYLRSRESSENTKLLT

SEQ ID NO: 74096 - protein, 280 aa, Gossypium hirsutum
  Clone ID: GOSHI-09MAY01-C6056_1.pep
MATEEPAVVADPAPETEEDKTAETKATSKSGRAKKTKEPKTKKAAAPRKPRAAPTHPPYEEMIKDAIVTLKERTGSSQYAIAKFIEEKQKNLPGNFKKLLLVHLKKLVAAGKLVKVKASYKLPSARSSKTATAASAPAKKKPATTKSKSKPASKPKEGKSTKTTPKAKAKTKTTSKAKSKPAAKPKPTSKAKAAPAKTKAVASVKPKTTAATKSKAAAKPKDKPVKASRTSTRTSPGKRAAAPKPAAKKAPAAKKAPAKSVKPKSVKSPAKKAPSRRGKK

SEQ ID NO: 74097 - protein, 137 aa, Gossypium hirsutum
  Clone ID: LIB3583-060-P1-K1-H2.pep
RGRVGGRVGPASPLVGGSPASPEANAKTKTTSKAKSKPAAKPKATSKANAAPAKTNAVASVKPKTTAATKPKAAAKPKDKPVKASRTSTRTSPGKRASAPKPAAKKAPAAKKAPAKSVKPKSVKSPAKKATSRRGKK

SEQ ID NO: 74098 - protein, 117 aa, Gossypium hirsutum
  Clone ID: LIB3048-034-Q1-L1-H8.pep
EVGFGLAAGLLLAFEVVFVLAFALGVVFVLFPSLGFEAGLDFDLVVTGFLFARTRTTVTGFRSLTKRRLIQTLTFTNFPTSPRFFKRPNQKFLEIPRKIFPGPESSKPGGPTVLDAA

SEQ ID NO: 74099 - protein, 488 aa, Gossypium hirsutum
  Clone ID: GOSHI-09MAY01-C6296_1.pep
MASATTSTTLSLLKTTASTTSSSASRSSASLIRLPSTRRHLKSSPLIHSLGFSSAASGDSLLSLHVSSKVRSFKGKGSRGVVSMAKKSVGDLTAADLKGKKVFVRADLNVPLDDSQNITDDTRIRAAIPTIKHLIQNGAKVILSSHLGRPKGVTPKFSLAPLVPRLSELLGIQVVKADDCIGPEVEKLVAALPEGGVLLLENVRFYKEEEKNEPEFAKKLASLADLFVNDAFGTAHRAHASTEGVTKFLKPSVAGFLLQKELDYLVGAVSSPKRPFAAIVGGSKVSSKIGVIESLLEKCDILLLGGGMIFTFYKAQGLSVGSSLVEEDKLELATSLLVKAKAKGVSLLLPTDVVIADKFAPDANSKIVPASAIPDGWMGLDIGPDSVKTFNEALDTTQTIIWNGPMGVFEFEKFAVGTEAIAKKLAELSGKGVTTIIGGGDSVAAVEKVGVADVMSHISTGGGASLELLEGKELPGVIALDEAVPVAV

SEQ ID NO: 74100 - protein, 201 aa, Gossypium hirsutum
  Clone ID: GOSHI-09MAY01-C6286_1.pep
MAASVATMAMLNAKCLSISSTKMSSPTKPTPKPFSLLSMQNLPKGLTISKPANNSNLPSSLAGSAIAGAIFSTLSSCDPALAAQQIAEIAEGDNRGLALLLPIIPAIAWVLFNILQPALNQLNRMRSSKGVIIGLGLGGLAASGFMSTPEASASEIAMVADAASSDNRGTLLLFVVAPALLWVAYNILQPALNQLNRMRSQ

SEQ ID NO: 74101 - protein, 112 aa, Gossypium hirsutum
  Clone ID: LIB3135-035-Q1-K1-G3.pep
RPRVRPRVRPRVRPRVRLNAKCLSISSTKMSSPTKPTPKPFSLLSMQNLPKGLTISKPANNSNLPSSLAGSAIAGAIFSTLSSCDPALAAQQIAEIAEGDNRGLALLLPIIP

SEQ ID NO: 74102 - protein, 122 aa, Gossypium hirsutum
  Clone ID: GOSHI-09MAY01-C6256_1.pep
TPPPDLTHPITKPLKSFSFPVFSSTANCSTMSSAVIAGASSSCSAAFTSRKNYSNKTTSTPSPKAFNTSQKTALQGLSLQEAKGGISDFFIAEKKSSVCSSHVGRGLEITCKNCRCFKNYRG

SEQ ID NO: 74103 - protein, 272 aa, Gossypium hirsutum
  Clone ID: GOSHI-09MAY01-C6246_1.pep
MATQALVSSSLTYSVETARQILGAKRQIGPSRKGSFVVKAASTPPVKQGADRPLWFASKQSLSYLDGSLPGDYGFDPLGLSDPEGPGGFIEPKWLAYGEIINGRYAMLGAVGAIAPEILGKAGLIPAETALPWFRTGVIPPAGTYSYWADPYTLFVFEMALMGFAEHRRFQDWAKPGSMGKQYFLGFEKYLGGSGEPAYPGGPLFNPLGFGKDEKSLKDLKLKEVKNGRLAMLAILGYFIQGLVTGVGPYQNLLDHLADPFNNNVLTNLKFH

SEQ ID NO: 74104 - protein, 98 aa, Gossypium hirsutum
  unsure (1)..(98): unsure at all Xaa locations
  Clone ID: LIB3165-057-P1-K1-C1.pep
MATQALVSSSLTYSVETARQILGAKRQIGPSRKGSFVVKAASTPPVKQGADRPLWFASKQSLSYLDGSLPGDYGFDPMGLSDPEGSGXGLIEPKWLAY

SEQ ID NO: 74105 - protein, 128 aa, Gossypium hirsutum
  Clone ID: LIB3165-007-P1-K1-C12.pep
PTRSPTRSSTRPRTRGAGGAIAAEILGKAGLIPAETALPWFRTGVIPPAGTYNYWADPYTLFVFEMALMGFAEHRRFQDWAKPGSMGKQYFLGFEKYLGGSGEPAYPGGPLFNPLGFGKDEKSLKDLK

SEQ ID NO: 74106 - protein, 109 aa, Gossypium hirsutum
  Clone ID: LIB3165-007-P1-K1-E1.pep
MATQALVSSSLTYSVETARQILGAKRQIGPSRKGSFVVKAASTPPVKQGADRPLWFASKQSLSYLDGSLPGDYGFDPLGLSDPEGPGGFIEPKWLAYGEIINGRYAMLG

SEQ ID NO: 74107 - protein, 73 aa, Gossypium hirsutum
  unsure (1)..(73): unsure at all Xaa locations
  Clone ID: LIB3120-006-Q1-K1-B7.pep
MATQALEKSSLTYSVETARQILGAKRQIGPSRKGTFVVKAGSTSPVKQGTDRPLWVASKQXSLSYLEGKPSSE

SEQ ID NO: 74108 - protein, 155 aa, Gossypium hirsutum
  Clone ID: GOSHI-09MAY01-C6276_2.pep
MHRSRSPLLIALSFLFTSFTISNALYGPSSPVVQLTPSNFKSKVLNSNGVVLVEFFAPWCGHCQTLTPTWEKAANVLKGVATVAALDADAHKSLAQEYGIRGFPTIKVFAPGKPPVDYQGARDVKPIAEFALKQVKAPLKDRLAGETSGGSSEKS

SEQ ID NO: 74109 - protein, 434 aa, Gossypium hirsutum
  Clone ID: GOSHI-09MAY01-C6276_1.pep
MHRSPPPVRPPVPFLGTSFTISNALYGPSSPVVQLTPSNFKSKVLNSNGVVLVEFFAPWCGHCQTLTPTWEKASNVLKGVATVAALDADAHKSLSQEYGIRGFPTIKVFVPGKPPVDYMGARDVKPIAEFALQQVKALLKDRLAGKASGGSSEKSESSASVELNSHNFDELVLKSKELWIVEFFAPWCGHCKRLAPEWKRAANNLKGKVKLGHVDCDSEKSLMSRFNVQGFPTILVFGADKDSPVPYEGARTASAIESFALEQLETNVGPAEVTELTGPDVMEEKCSSAAICFVAFLPDILDSKAEGRNKYLDMLLSVAEKFKRSPYSYVWAAAGKQPDLENRVGVGGYGYPALVALNVKKGAYAPLISAFELEHIIEFVKEAGRGGKGNLPLEGTPEIAKTEAWDGKDGEIMEEDEFSLEELMGDFTASKDEL

SEQ ID NO: 74110 - protein, 94 aa, Gossypium hirsutum
  Clone ID: LIB3189-047-P1-K1-H3.pep
NFDAAAISFLWFSPATCTCNNARAPSLIAVASLSTSFTISNALYRPSSPLAQITPSNFKSKVLNSNGVVLVEFFAPWCGHCQTLTPTWEKASNV

SEQ ID NO: 74111 - protein, 93 aa, Gossypium hirsutum
  Clone ID: GOSHI-09MAY01-C6216_2.pep
MTSANGNASQVTNNGDVRKPFKIFIGYDPREDQAYEVCRHSILKRTSIPVEITPIVQSDLRAKGLYWRSRDQFESTEFSFTRFLTHCPAIVIR

SEQ ID NO: 74112 - protein, 254 aa, Gossypium hirsutum
  unsure (1)..(254): unsure at all Xaa locations
  Clone ID: GOSHI-09MAY01-C6216_1.pep
MTLANGEAHQVTNNGDLSKPFKIFVGYDPREDLAYEVCRHSILKRSSVPVEITPIVQSDLREKGLYWRERNKLESTEFSFSRFLTPYLANYNGWALFIDCDFLYLADIKELMELIDDKYAIMCVHHDYTPKETTKMDGAVQTLYPRKNWSSMVLYNCGHPKNKGLTPEVVNNQTGAFLHRFQWLEDDEIGSIPSIWNFLEGHNKVVENDSXTFPKAIHYTRGGPWFEAWKNCESADLWLNEMLDYIQDTKLNAS

SEQ ID NO: 74113 - protein, 197 aa, Gossypium hirsutum
  Clone ID: GOSHI-09MAY01-C7986_1.pep
MSLVPFPFFLFFISLFFATFSFTISSPDALNVQSLPLSTSPPATIPAFPEQSNVVGCPLDLPEQLFHSVKNACGTKINNGVASELHRSRCCPVLAAWLYAAYSATALGGVGRVVPAVAGRTQSYDMPLLPDDSETCVDDLGKALKQRGVELAKPNETCDAVYCYCGIRLHPLTCPDAFSVDQKGNLVGDDSVERLER

SEQ ID NO: 74114 - protein, 123 aa, Gossypium hirsutum
  unsure (1)..(123): unsure at all Xaa locations
  Clone ID: GOSHI-09MAY01-C7946_1.pep
GGGAMSNSKSLAVQILKGPWLMVFGSLLIMSAAGATYMFSLYSGDIKESLGYDQTTLNYLSFFKDLGTNVGVLSGLIAEVTPPWFVLSVGAGLNFFGYFMDWXLAVTKRIPTKVWQMCLYICI

SEQ ID NO: 74115 - protein, 195 aa, Gossypium hirsutum
  Clone ID: GOSHI-09MAY01-C7976_1.pep
VIVEKGMQNGQKITFPGEADEAPETVTGDIVFVLQQKDHPKFKRKGEDLFLEHTLSLTEALCGFQFVITHLDGRQLLIKSNPGEVVKPDSCKAINDEGMPLYQRPFMKGKLYIQFTVEFPDSLSPDQVKALEAILPPKPTSQLSDMELDECEETTLYDVNIEEEMRRKQQQAAQEAYEEDEDMHGGAQRVQCAQQ

SEQ ID NO: 74116 - protein, 71 aa, Gossypium hirsutum
  Clone ID: GOSHI-09MAY01-C7906_2.pep
DKTAGGFFHNDGMRGYTIGVAMAEKTAPKVYDHGGGKGGYGGGGDRRRDSYRDGGSGPDRHHHGGNRSRPY

SEQ ID NO: 74117 - protein, 254 aa, Gossypium hirsutum
  Clone ID: GOSHI-09MAY01-C7906_1.pep
PTPAPAPNSYGGNYPPAPNTYGGNANYGMDSVPPPTSYTGGPTSYPPSYGGPAGGYAGEGLSDARTGGRGGPPGGYDGGYGSGGPRNQGGGYGGPPVEAPAKIKQCDGNCGDSCDNSRIYITNLPPDVTIEELRDLFGGIGQVGRIKQKRGYKDQWPWNIKIYTDEKGNQKGDAVLSYEDPQAAHSAGGFFHNHVMRGYTIGVAMAEKTALKVHDHGGGKGGYGGGGDRRRDSYRDGGSGPDRHPHGGNRSRPY

SEQ ID NO: 74118 - protein, 57 aa, Gossypium hirsutum
  Clone ID: LIB3493-015-P1-M1-B1.pep
VGRIKQKRGYKDQWPWNIKIYTDDKGNQKGDAVLSYEDPQAAHSAGSFFNSKYSQTS

SEQ ID NO: 74119 - protein, 471 aa, Gossypium hirsutum
  Clone ID: GOSHI-09MAY01-C7566_1.pep
LFRDWNIGQAKSTVAASAAASINPCLKIEALQNRVGPETENVFDDTFWENLTVVINALDNVNARLYVDQRCLYFQKPLLESGTLGAKCNTQMVIPHLTENYGASRDPPEKQAPMCTVHSFPHNIDHCLTWARSEFEGLLEKTPAEVNAYLSNPVEYKTAQRTAGDAQARDNLERILECLEKEKCVTFQDCIFWARLRFEDFFVNRVKQLIYTFPEDAATSTGAPFWSAPKRFPQPFQFSVADPSHLQFVMAASILRAETFGIPIPDWIEHPKMLAEAIEKLIVPDFEPKKDVKIVTDEKATTLSVASIDDAAGIDELIFKLELCTKNLPLGFKMKPIQFEKDDDTNYHMDLIAGLANMRARNYSIPEVDKLKAKFIAGRIIPAIATSTAMATGLVCLELYKALDGGHKLEDYRNTFANLALPLFSMAEPVPPKTIKHGDMSWTVWDRWILKGNPSLRELIQWLKDKGLNAY

SEQ ID NO: 74120 - protein, 131 aa, Gossypium hirsutum
  unsure (1)..(131): unsure at all Xaa locations
  Clone ID: GOSHI-09MAY01-C7416_2.pep
MASPTSALTNSPFCPHLLPQFSPLPVLSFTHSLKPILPKLKSLISLKRDNHPSTLTVKAQTLDFSGSFFEGGFGSDDDPPSQPGSGITALEDKEEPQCPPGLRQYETMAVLRPDMSEDERLXLTQKYEELL

SEQ ID NO: 74121 - protein, 211 aa, Gossypium hirsutum
  unsure (1)..(211): unsure at all Xaa locations
  Clone ID: GOSHI-09MAY01-C7416_1.pep
PKWHAPTSALTNSPFCPHLLPQFSPLPVLSFTHSLKSIPPKLKSGGGGIFFSTXSTLTVKAQXLDFSGSFFEGGFGSDDDPPSQPGSGITALEDKEEPQCPPGLRQYETMAVLRPDMSEDERLALTQKYEELLVAGGGMYIEVFNRGVIPLAYSIKKKILAGETNAYLDGIYLLFTYFTKPESITALEAALNTDDDVIRSTSFKIRKRKYN

SEQ ID NO: 74122 - protein, 114 aa, Gossypium hirsutum
  Clone ID: GOSHI-09MAY01-C7796_1.pep
KGAQRLSKCMAKTIPAEAISKAFQFPLPKHLPFPLFAPPPFRRTKFLPWGFQINGLVLFATTDTPLAQSRHFPIAATSYVIELQNLNPKDSAFSVFDLIPSLDGQSLGLCKRNV

SEQ ID NO: 74123 - protein, 214 aa, Gossypium hirsutum
  Clone ID: GOSHI-09MAY01-C7786_1.pep
MASAAAHLSFSLPFPPFSSPGHRPVTAFPYPTTQSQNQSRVSLRTRALGPDFLGDFGARDPFPAEIASGFAEKVLGNVDTEPRPPTPPASALSLAKQDCSPMSPLQPPLSVDEAKALIKKVVGWRLLDEEGGLKLQCSWKLRDFKSGVELINRIYKVTEATDHFPSLHLEGPNQVRAELWTASIGGLSMNDFIVAAKIDEIKTSDLAPRKRIWA

SEQ ID NO: 74124 - protein, 82 aa, Gossypium hirsutum
  Clone ID: GOSHI-09MAY01-C7756_1.pep
KPPMTRLASKTKIATMIQAGRTAAISLLLQKLRDTISLVLFFFNESNSLPQTKQRWESNNKNNDKIGCVLSFLRKTRKQEET

SEQ ID NO: 74125 - protein, 140 aa, Gossypium hirsutum
  unsure (1)..(140): unsure at all Xaa locations
  Clone ID: GOSHI-09MAY01-C7776_1.pep
DAWATTILFXTTGAHLMTFSVEHASTMERSVGGFQIPAGSLTVFFVAAILITLAVYDRLVMPFWNTWTGKPGFSSLQRIALGLALSTMGMASAAVAEVKRLEVARATGASATTGTLPVTVFILIPQFFLVGAGEAFIYTG

SEQ ID NO: 74126 - protein, 111 aa, Gossypium hirsutum
  unsure (1)..(111): unsure at all Xaa locations
  Clone ID: GOSHI-09MAY01-C7706_1.pep
QRCLLHPKSKSKDKKSSKDSQKASARPSGPANAASGAPASAYNPLLGTFHTIETAPSSSASPLQSNGRFRNIDDTDEHLGGSLGAGVDFDSISNNGSXSGESEEHKEKTSN

SEQ ID NO: 74127 - protein, 154 aa, Gossypium hirsutum
  Clone ID: GOSHI-09MAY01-C7736_1.pep
MLTHNVSAPSSLCPILSNDWHFHVSDQLIFPHNLNPNLFWRASRKIKGCRLKASFWESIRSGILKNNTTQIVEPPSTLEEEEEPLPDEFVLVEKSQPDGEVEQIIFSSGGDVDVYELQALCDKVGWPRRPLSKLAAALKICFLVAALPSALNLP

SEQ ID NO: 74128 - protein, 153 aa, Gossypium hirsutum
  Clone ID: GOSHI-09MAY01-C7686_2.pep
MDWGNVTAEDLIDALREVDWSSPPRPLSEFFSRFTIPRSYVKWNSRIKCNLYYYRTNYFILIVLILGLGFLRRPLAILAAILTALSIAFLNDTFASSFSEKVTRTVRLFSPHLPAKMRPPFTPVIRGRPSAKRAIYICGPPRWVCVFIFSSVS

SEQ ID NO: 74129 - protein, 209 aa, Gossypium hirsutum
  Clone ID: GOSHI-09MAY01-C7686_1.pep
MDWGNVTAEDLIDALREVDWSSPPRPLPEFFSRFTFPRSYAKWNSRLKCNLYYYRTNYFIMIVVILGLGFLRRPVAVLAAMLTALCIAFLNDSFAGTFSEKVTRTVRQFSPHLAAKMRPPLTPVIRGRPSSKRTIHICGRPRWVFVFIFSSVSFILWYVSCGLLTVLWALAIALLATVLHASFRTPNLKARLNTFREEFRAVWRNYSEL

SEQ ID NO: 74130 - protein, 87 aa, Gossypium hirsutum
  Clone ID: uC-gsflnu33B061c01b1.pep
SDAWADAWADAWADAWGRPRWVFVFVFSTVSFILWYVSCGLLTVLWALAIALLATILHASFRTPNLKARLNTFREEFRAVWRNYSEL

SEQ ID NO: 74131 - protein, 131 aa, Gossypium hirsutum
  Clone ID: GOSHI-09MAY01-C7656_1.pep
AAAAVPALSSLSHRAPIPSISFLFPDSTRPFSLSRSFRSFSLTPQAKASDIEISFFDDLNPEDEPVAFDPPTPPEGFIPPPAFDDGPEETEDEVAAAYEELYGPAYSGVSVLGNDVYVMDSKVKKTSAFGK

SEQ ID NO: 74132 - protein, 210 aa, Gossypium hirsutum
  Clone ID: GOSHI-09MAY01-C7606_1.pep
SAITLPTLYGSLFQSHFLGKSPITHRPYKPFFSVAKQPKKAFYAKFDLFEILGGRGLCNGEKGIEVELKRNVVEASSVGNTDVESSDSTAISVQDDAFEKEMMGLTGGFPGGEKGLKKFIEENPPPAKQSVSDSVSIARLGKPKSPELPLLMPGMIAIVKNPNNPFYMYCGIVQRITDGKAGVLFEGGNWDRLITFRLDELERREKSPSM

SEQ ID NO: 74133 - protein, 124 aa, Gossypium hirsutum
  Clone ID: LIB3165-018-P1-K1-F10.pep
MGSAGITLPTLQGSLFQSHFLTGGFPGGEKGLKKFIEENPPPAKQSVSDSVSIARLGKPKSPELPLLMPGMIAIVKNPNNPFYMYCGIVQRITDGKAGVLFEGGNWDRLITFRLDELERREKGP

SEQ ID NO: 74134 - protein, 50 aa, Gossypium hirsutum
  Clone ID: GOSHI-09MAY01-C7196_5.pep
LASFAEFKRTYESTSMYVIVMKINVTFALCMKVHASPMLYDNFRGKHKNK

SEQ ID NO: 74135 - protein, 346 aa, Gossypium hirsutum
  Clone ID: GOSHI-09MAY01-C7196_4.pep
MSKAGALDLASGLGGKIEKTEVLSAVEQYERYHVFYGGEEEERKANYTDMVNKYYDLVTSFYEFGWGESFHFAPRWKGESLKESIKRHEHFLALQLGLKPGHKVLDVGCGIGGPLREIARFSSTSVTGINNNEYQITRGKELNRIAGVEKTCNFVKADFMKMAFPDSTFDAIYAIEATCHAPDAYGCYKEIYRVLKPGQYFAAYEWCMTDSFDPNNSEHQKIKAEIEIGDGLPDIRLTGQCLEALKQAGFEIIWEKDLAVGSPLPWYLPLDTSHFSLSSFRLTSVGRFITRNMVKALEFVGLAPKGSQRVQDFLEKAAEGLVEGGRKEIFTPMYFFLARKPLSESQ

SEQ ID NO: 74136 - protein, 130 aa, Gossypium hirsutum
  Clone ID: GOSHI-09MAY01-C7196_3.pep
MAQIKRMECQLEIKSSADKFFDAYKTKAQLMPKMANQVVRDVKLVEGSGWDSEGSVRQWYFVAGGKLETCKEMMEKVNDKDRTIVYKLVEGEIMKAFKSWNSILNVMPIGEGSLVKWTMEFEKQNDDVPD

SEQ ID NO: 74137 - protein, 152 aa, Gossypium hirsutum
  Clone ID: GOSHI-09MAY01-C7196_1.pep
MGQFKRIVSRLRPRAPPRVRFDAYMTKAQLMPKMANQVVRDVKLVEGSGWDSEGSARQWYFVAGGKLETCKEMMEKVNDKDRTIVYKLVEGEIMKAFKSWNSILNVMPIGEGSLVKWTMEFEKQNDDVPDPVKYGEFLTTWAKNVDTYLLNV

SEQ ID NO: 74138 - protein, 123 aa, Gossypium hirsutum
  unsure (1)..(123): unsure at all Xaa locations
  Clone ID: uC-gsflnu33B144b12b1.pep
VFILGIHTLEGRQCMNFRQGTKKQEIWFTSVLKEVEEEPQTRVMVPKSKPKSTVASTVVEGEIMKAFKSWNSILNVMPIGEGSLVKWTMEXEKQNDDVPDPVKYGEVLTTLAKNADTYLLMSN

SEQ ID NO: 74139 - protein, 117 aa, Gossypium hirsutum
  Clone ID: LIB3145-040-Q1-K1-B4.pep
DGLPDIRLTGQCLEALKEAGFEIIWEKDLAVGSPLPWYLPLDTSHFSLSSFRLTSVGRFITRNMVKALEFVGLAPKGSLVKWTMEFEKQNDDVPDPVKYGEFLTTWAKNVDTYLLNV

SEQ ID NO: 74140 - protein, 41 aa, Gossypium hirsutum
  Clone ID: uC-gsronu33B139g06b1.pep
LATFAEFKRTYESTCMYVIVMKINVTFALCMKVHASPMLYD

SEQ ID NO: 74141 - protein, 52 aa, Gossypium hirsutum
  Clone ID: LIB3120-054-P1-K1-C5.pep
MPANTLYKFYISNDLIGHFWHKIGFGLVGIKVLISLGIDLEFALHPLNLNDA

SEQ ID NO: 74142 - protein, 132 aa, Gossypium hirsutum
  Clone ID: GOSHI-09MAY01-C7186_1.pep
MASKRSASVALFFALNILFFSLVSANCSCPSPKPKPNPTPSPTPAAEGKCPINTLKLGVCAEVLGLVNVTVGSPPVQPCCTLIKGLADLEAAVCLCTAIKGNILGINLNIPVSLSLLLNVCSKKVPSGFQCP

SEQ ID NO: 74143 - protein, 151 aa, Gossypium hirsutum
  Clone ID: GOSHI-09MAY01-C7166_1.pep
LYSMAAQGLPQALHMIPRNQVQPFNPVKNRGFSAFLSRGPSPLTTSKVSVSGFHSKFPVGSSFSCFARRGFVVRAESNPEGEGEAEAERNENGGAEPETKAVAEAEAEGEGEGDDDAGEQKPNEPRIPRIKLGDIMGILNKRAIEASDKER

SEQ ID NO: 74144 - protein, 117 aa, Gossypium hirsutum
  Clone ID: uC-gsronu33B098d09b1.pep
VHSVCLSLATERGPLLYTMVSQVLPQPFNPVKNRGFSAFLSRGPSPLATSKVSVSGFHSKFPVGSSFSCFARRGFVVRAESNPEGEGEAEAERHENGVVEPKTKAETEAECEGEGEG

SEQ ID NO: 74145 - protein, 317 aa, Gossypium hirsutum
  Clone ID: GOSHI-09MAY01-C7136_1.pep
MNQDNEQDNNPDALDDFLLKRKRGRPRKHPKHDLNQGENAQMPWNQNLNHAENAHVPPGFGAVNGNRPHQVNPDANDVMVGQAASGVIEAAFDAGYLLTVRVGNSDTTLRGVVFRPGHYVPISAENDVAPTRPPTRPNEIPFPRERTGTAHPLNGPALTNQVPRARASNLGAIKNKNVQPAATQFNSLLSRGTVVPVVLQPASLSNGKVSSQQLSQPPHLVSKGKQVSGAANATNEEKPVNQMPTVGNPIFPTQPQPRSSNHTVPKGIQSETVSYSQLPADGLQDKDAKSMTGMPFEKLLSEVMKRGQVPLQPPEVQ

SEQ ID NO: 74146 - protein, 105 aa, Gossypium hirsutum
  Clone ID: LIB3165-011-P1-K1-E4.pep
MNQDNEQDNNPDALDDFLLKRKRGRPRKHPKHDLNQGENAQMPWNQNLNHAENAHVPPGFGAVNGNRPHQVNPDANDVMVGQAVSGVIEAAFDAGYLLTVRVGNS

SEQ ID NO: 74147 - protein, 326 aa, Gossypium hirsutum
  Clone ID: GOSHI-09MAY01-C7046_1.pep
MATVSQLNNFPCKTFLITPQNSNFTSKLPVLPLNSTKPTQNSIKKSQFLTQKSVQPRPVFQVRASDADDEWGPDKEEPVVIESPGVAVAEEKKPDDAGEIESLKKALVDSFYGTDRGLKASSETRAEIVELITQLEAKNPTPAPTEALPLLNGKWILKYTSFPGLFPLLSRGQFPLVKVEEISQTIDAESLTVQNSVQFAGPLASSSISTSAKFEVRSPKRVQIKFQEGIIGTPQLTDSIVLPENVEFLGQKIDLTPIKGLLTSVQDTASSVAKTISSQPPLKIPLSNSNAESWLLTTYLDDELRISRGDAGSVFVLVKEGSALLN

SEQ ID NO: 74148 - protein, 115 aa, Gossypium hirsutum
  Clone ID: LIB3165-014-P1-K1-A5.pep
MATVSQLNNFPCKTFLIIPQNSNFTSKLPVLPLNSTKPTQNSIKKSQFLTQKSVQPRPVFQIRASDADDEWGPDKEEPVVIESPGVAVAEEKKPDDAGEIESLKKALVDSFYGTD

SEQ ID NO: 74149 - protein, 172 aa, Gossypium hirsutum
  unsure (1)..(172): unsure at all Xaa locations
  Clone ID: GOSHI-09MAY01-C7016_1.pep
KPWLPLTLLEPFPTTISSSAFKRLSTPPPPPPPPSSFFLKPPSSFTSTSTTNTLSSLSSATTFSLPSSTTSTTTSQAISFDTLQHHLSNQNFRQADEETRRLLILLAGEAAQKRGYVFFSEVQFISQNDLKAIDELWKKHSDNKFGYSVQKKXWQKVKKDFTKLFLKLGWMK

SEQ ID NO: 74150 - protein, 154 aa, Gossypium hirsutum
  Clone ID: GOSHI-09MAY01-C7356_1.pep
SIHRLMARSLGRAGIKLRPGTKPCTSSSRLVSLRTQSSQPNHFDQSDASSESSSDPLLRKRGDAIHRIIVRRSAPDWLPFLPGSSYWVPPPTSQSYGLAQIVEKLANPLTPEESLSTTTIRGWPSSEYFIKGGSPHPVEVEMKSNASSKSEEEG

SEQ ID NO: 74151 - protein, 82 aa, Gossypium hirsutum
  Clone ID: uC-gsflnu33B099b03b1.pep
WLVHFAKPQSSYDPSPNLAHYPLVSFRCEPNRANPIISISSMLFPSLPSIRLLRILVDAIHWIFVCHIFLLFLLLLLSLFLH

SEQ ID NO: 74152 - protein, 139 aa, Gossypium hirsutum
  Clone ID: GOSHI-09MAY01-C7316_2.pep
MAATNTLMSCGIATAFPSVLSSSKSKFATATPLPSFGANVGHRVSMSADWMPGQPRPPYLDGSAPGDFGFDPLRLGEVPENLERYKESELIHCRWAMLAVPGILVPEALGYGNWVKAQEWAAVPGGQATYLGNPVPWGT

SEQ ID NO: 74153 - protein, 191 aa, Gossypium hirsutum
  Clone ID: GOSHI-09MAY01-C7316_1.pep
MAANTLMSCGIATTFPSLLSSSKSKFSGAAVSLPSAVGTNVGHRVSMSADWMPGQPRPPYLDGSAPGDFGFDPLRLGEVPENLERYKESELIHCRWAMLAVPGILVPEALGFGNWVKAQEWAAIPGGQATYLGNPVPWGTLPTILVIEFLAIAFVEHQRSMEKDTEKKKYPGGAFDPLGYSKDPKKFEEYK

SEQ ID NO: 74154 - protein, 95 aa, Gossypium hirsutum
  unsure (1)..(95): unsure at all Xaa locations
  Clone ID: LIB3166-028-P1-K1-H10.pep
MVGSNTLMSCGINTDFPSVLSCTKSKFSTDTPLPSFGANVAHRVSHVADWMPGQPMPPYLDGSTPGDFRFYSLRLAEAPXNLERYTVCATIHCRL

SEQ ID NO: 74155 - protein, 81 aa, Gossypium hirsutum
  Clone ID: LIB3120-044-P1-K1-C2.pep
IDTDVSLPSAVGTNVGHRVSMSADWMPGQPRPPYLDGSAPGDFGFDPLRLGVVPVNLERYKESELIHCRWAMLAVPGILVP

SEQ ID NO: 74156 - protein, 194 aa, Gossypium hirsutum
  Clone ID: GOSHI-09MAY01-C7246_1.pep
MAEKKWILILFLTFIIAVSQVHHLYMGELASIMLEKLQQWRKPFNNGGKNLAIGPNLTACHSSYGRPDLLVYCCPPGFQTPVPFTDFKFPDPSPVRVRRPAHLLNESFIAKYNKALSIMKSLPYDDPRSFLRQANLHCQFCTGAYEMLNRSGSELNIHRTWMFFPWHRMMIYFHERILGSLIGDDTFALPFWAW

SEQ ID NO: 74157 - protein, 277 aa, Gossypium hirsutum
  Clone ID: GOSHI-09MAY01-C1996_1.pep
SAEAGSLQRSQTIGQRIMDNIFLRGFTSKPKSPTSETPVPSSPLKLPESLEPDARDEEESPLMATVRGKCITQLLLLGAVDSIQKKYWDNLKATQKIAIMDILLSLLEFAASYNSYSNLRTRMHHTPAERPPLNLLRQELAGTSIYLDVLQKVTSGFNDNNRQNLESNGSQDTEDSKLEGIAEERLISFCEQVLRDATDLQSTIGETTNVDMHRVLELRSPIIIKVLRGMCFMNNKIFRKHLREFYPLLTKLVCCDQLGVRGALGDLFRIQLKALLP

SEQ ID NO: 74158 - protein, 134 aa, Gossypium hirsutum
  unsure (1)..(134): unsure at all Xaa locations
  Clone ID: GOSHI-09MAY01-C1986_1.pep
LYWSATGPKXVESLARQFLSNPYKVIIGSPDLKANQSINQVVEVITDLEKYNRLIKLLKDLMDGNRILIFMETKKGCDQVTRQLRMDGWPALSIHGDKNQAERDWVLAEFKSGRSPIMTATDVAARGLGRITVF

SEQ ID NO: 74159 - protein, 569 aa, Gossypium hirsutum
  Clone ID: GOSHI-09MAY01-C1956_1.pep
MLGRPGLSRTGSFRPENLGQNALHMIGNLCFTIFVIGVLVFTIIAATYEPEDPLFHPSTKLTAFLTSTSNATFQSDNTVVKTGEDFMAANQTAFATFINVTDVVEIKEERTDQTSSSECEGDSRKPLNCRDPEVFHLMMKEAIERFKDIHFYRFGKPAPGPEENTCDMAWRFRPKEGKTAAFYKDYRRFVINRSENCTLSVVSIGDYHSGVNARKRKNKNQKLGFEKTSGKQEQVVAALPVVGEAVNDSLPVVESENAFSRGKYLIYVGGGDRCKSMNHYLWSFLCALGEAQYLNRTLVMDLKLCLSSIYTSSNQDEEGKDFRFYFDFEHLKEAASVLDHEQFWQDWNKWQKKDGLSLHLVEDFRVTPMKLSEVKDSLIMRKFGLVEPDNYWYRVCEGETESVVQRPWHLVWKSRRLMDIVSAIASKLNWDYDSVHIVRGEKARNRDLWPNLAQDTSPDALISTLQNKIEDGRNVYIATNEPDTSFFDPLKDKYSTHFLDEYKDLWDENSEWYSETKNLNNGVPVEFDGYMRVSVDTEVLLRGKKQIETFNELTNDCKDGINTCNTASS

SEQ ID NO: 74160 - protein, 140 aa, Gossypium hirsutum
  Clone ID: GOSHI-09MAY01-C1946_1.pep
SALITNFNDFKVAKLIDQSNRTWKKELIASTFPEDVAEKIICIPLAEEPHEDFWVWSAEASENDPRAYSLQADYKEFYKKLWLLNLPSKIKITIWKISWNFLSTRVNMLLIKLTNTTVCPRCRVGTENMDHLFRKCPGYL

SEQ ID NO: 74161 - protein, 101 aa, Gossypium hirsutum
  Clone ID: LIB3583-017-P1-K1-E8.pep
MSWVFAKNSVSQCRIFCCALWAIWGDKNDRVHKKVSKSDQVVKINFDAAYDENFNQAAVGIVARESEGKVLLSCSKIYQPIASAFATEVLMCRKAIQIGID

SEQ ID NO: 74162 - protein, 71 aa, Gossypium hirsutum
  Clone ID: LIB3493-005-P1-M1-F1.pep
GVTLGGVLRFEINEVFCQLRINLDVQKPIRRGIFVSSDNVNKVCVPFKHENLPMFCFGCGRMGHGIKIVLR

SEQ ID NO: 74163 - protein, 87 aa, Gossypium hirsutum
  unsure (1)..(87): unsure at all Xaa locations
  Clone ID: GOSHI-09MAY01-C1916_8.pep
LSRPKDITPIGGFPHYGVVKSDYLMIKGXCVGPKKRVVTXRQSLINQTSRVALEEIKLKFIDTSSKFGHGRFQTTQEKQKFYGRLKA

SEQ ID NO: 74164 - protein, 60 aa, Gossypium hirsutum
  Clone ID: GOSHI-09MAY01-C1916_7.pep
GGCVGPKKRVVTLRQSLINLTSRVALEEIKLKFIDTSSKFGHGRFQTTQEKQKFYGRLKA

SEQ ID NO: 74165 - protein, 74 aa, Gossypium hirsutum
  Clone ID: GOSHI-09MAY01-C1916_6.pep
ISFSFLIKPDFLVSFSSSIVAGVKTRKIKSKKLAELEKEIMGSEQNEGTSFPPSEPKLCANGCGFFGTAANMNL

SEQ ID NO: 74166 - protein, 114 aa, Gossypium hirsutum
  Clone ID: GOSHI-09MAY01-C1916_5.pep
YQERYNEHPDDDFDPKALPIVKDISFTGIHGQGVRVPVRIHGSEDIPIRNVTFRDMSVGLTYKKKHIFQCAFIQGRVIGTIFPAPCENLDRYNEEGQLVKRSTAQNITDIDYDI

SEQ ID NO: 74167 - protein, 213 aa, Gossypium hirsutum
  Clone ID: GOSHI-09MAY01-C1916_4.pep
SLRPPASAHAPGIKFPIKSVLVNCLFVFNQTRFPGFFFFIDRRRRKNKKNQKQKACRIRKKIMGSEQNEGTSFPPSEPKLCANGCGFFGTAANMNLCSKCYRDLRVGEEQAAKAKAVMEKSLSIKTKHEPVVVETFKPHVGSSSTSIEQQQPAVVAVNQQPEPKAANRCFICRKKVGLTGFKCRCENTFCGEHRFPEKHECSFDFKGIGRDAI

SEQ ID NO: 74168 - protein, 252 aa, Gossypium hirsutum
  unsure (1)..(252): unsure at all Xaa locations
  Clone ID: GOSHI-09MAY01-C1916_3.pep
MSHRKFEHPRHGSLGFLPRKRASRHRGKVKAFPKDDPTKPCKLTAFLGYKAGMTHIVREVEKPGSKLHKKETCEAVTIIETPPMVIVGVVGYVKTPRGLRSLNTVWAQHLSEEVKRRFYKHWCKSKKKAFVKYSKQYEXEEGKKGIQAQLEKMKKYATVIRVLAHTQIRKMXGLKQKKAHLMEIQVNGGTIAGKVDFAYKFFEKQVPXDAVFQKDEMIDIIGVTKGKGYEGVGRDAIAKANPVVKADKGKRF

SEQ ID NO: 74169 - protein, 128 aa, Gossypium hirsutum
  Clone ID: GOSHI-09MAY01-C1916_2.pep
FLSLSRTITVGGTFSLFALLSAISVLFAYKCVPETLKPHVGSSSTSIEQQQPAVVAVNQQPEPKAANRCFICRKKVGLTGFKCRCENTFCGEHRYPEKHECSFDFKGIGRDAIAKANPVVKADKVERF

SEQ ID NO: 74170 - protein, 389 aa, Gossypium hirsutum
  Clone ID: GOSHI-09MAY01-C1916_1.pep
MSHRKFEHPRHGSLGFLPRKRASRHRGKVKAFPKDDPSKPCKLTAFLGYKAGMTHIVREVEKPGSKLHKKETCEAVTIVETPPMVIVGVVGYVKTPRGLRSLNTVWAQHLSEEVKRRFYKHWCKSKKKAFTKYSKRYESEEGKKSIEAQLEKIKKYATVVRVLAHTQIRKMKGLKQKKAHLMEIQVNGGTIADKVDFAYKFFEKQVPIDAVFQKDEMIDIIGVTKGKGYEGVVTRWGVTRLPRKTHRGLRKVACIGAWHPARVSFTVARAGQNGYHHRTEMNKKVYRVGKVGDETHSAITDYDRTEKDITPIGGFPHYGVVKSDYLMIKGGCVGPKKRVVTLRQSLINQTSRVALEEIKLKFIDTSSKFGHGRFQTTQEKQKFYGRLKA

SEQ ID NO: 74171 - protein, 118 aa, Gossypium hirsutum
  unsure (1)..(118): unsure at all Xaa locations
  Clone ID: uC-gsflmaxxa009c01b1.pep
CCSQPQHSPHGISLSRRGRMSHRKLNTQLCPSISFMLLACLISCTTARDSSREALQVTIGIGNGNLSKGCNDKHHNLPFKLNCKLPTTPLANEVLKFADQRLALVHPIIXKFKSLITS

SEQ ID NO: 74172 - protein, 80 aa, Gossypium hirsutum
  Clone ID: uC-gsflmaxxa009d09b1.pep
QVTYRFKHSKTMSIIISFMLLVCLISCTTARDSSREALQVTIGIGSGILSWRLFMVYINMVDGNRFERRPPLWETSWVLL

SEQ ID NO: 74173 - protein, 53 aa, Gossypium hirsutum
  Clone ID: LIB3146-058-Q1-K1-B6.pep
HNKAHLIFIFINVQTITCEGYFSYKFFQKQIPIDAFFQNDKMIDIIGVTKGKG

SEQ ID NO: 74174 - protein, 110 aa, Gossypium hirsutum
  unsure (1)..(110): unsure at all Xaa locations
  Clone ID: uC-gsflmaxxa009c07b1.pep
MNVIIMYHLKIEHPXHVSLVFLPRKRSXRHRGKVKAFPKDDPSKPCKLTAFLGYKAGMTHIVREVEKPGSKLHKKETCEAVTIIETPPMVIVGLLXYVKTPRGLRSLNTV

SEQ ID NO: 74175 - protein, 93 aa, Gossypium hirsutum
  Clone ID: LIB3147-001-Q1-K1-E8.pep
VSPAVSHFFVGSKSQRLRTVCLGEMGLVYFSLFPFSARYYLFDSWSYAGEDFKVVLYIFHHLAEIHIHGMLFPLQKKTRIILIKSTIKRIVPI

SEQ ID NO: 74176 - protein, 358 aa, Gossypium hirsutum
  Clone ID: GOSHI-09MAY01-C1816_1.pep
MEGDLLDWEVLHNSDSDSNSILVNSPQLRNLEGIEGDTGGMIRSDYFSLDNQSMYAKEGDASEEGSIESDNPSWIDPKPETQFRRNNSGDFWSDSGSDRSDDRKLSDFSVKKDLESAENEVCLQGIGKPEARADGLGTFKPDGAELTELDRIKELDFGGFGDIQDQNKDLGELWPDAGGDGLVSMKFKDVEKEASIDFGDCMEKGAEMENSGELDNRNSSALDLGVGHGTTAGNEGSTIDEMKLSAKSVNEEEKKKVVWWKVPFELLRYCVLRVSPVWSFSVAAAVMGFVILGRRLYKMKRKSSNLQLKVTMDDKKVSQFMTRAARLNEAFSVVRRVPIIRPSLPTAGVNTWSVMSMR

SEQ ID NO: 74177 - protein, 99 aa, Gossypium hirsutum
  Clone ID: LIB3165-009-P1-K1-E4.pep
MEGDLLDWEVLHNSDSDSNSILVNSPQVRNLEVIEGDTGGMIRSDYFSLDNQSMYAKEGDASEEGSIESDNPSWIDPKPETQFRRNNSGDFWSDSGSDR

SEQ ID NO: 74178 - protein, 145 aa, Gossypium hirsutum
  unsure (1)..(145): unsure at all Xaa locations
  Clone ID: GOSHI-09MAY01-C1836_2.pep
VAPDGKPASVSYSSTMDIAIIREVFSEIVSAAEVLGRKDDALIGKVREALAKLPPTKIARDGSIMEWAVDFQDPEVHHRHVSHLFGLFPGHTITVEKTPDLCEAGDFTLFKXRGVEGPGWSTTWKTALWARLHNSEHAYRMVKHL

SEQ ID NO: 74179 - protein, 149 aa, Gossypium hirsutum
  unsure (1)..(149): unsure at all Xaa locations
  Clone ID: LIB3582-048-P1-K1-H6.pep
MNRVAVTTNAEMSYGWQRFQDPECITACIHLFGLFPGHTITVEKTPDLCKAGDFTLFKRVXTGVEGPGWSTTWKTALWARLHNSEHAYRMVKHLISLVDPTHESDFEGGLYSNLFTAHPPXQIDANFGFSAAVAEMLVQSTTKDLYLLP

SEQ ID NO: 74180 - protein, 51 aa, Gossypium hirsutum
  Clone ID: GOSHI-09MAY01-C1596_4.pep
MGLKALDYETMNENVKKVQYAVRGELYLRASELQKEGKKIIFTNVGNPHAL

SEQ ID NO: 74181 - protein, 143 aa, Gossypium hirsutum
  unsure (1)..(143): unsure at all Xaa locations
  Clone ID: GOSHI-09MAY01-C1596_2.pep
MGLKALDYETMNENVKKVQYAVRXIFTNVGNPQALGQKPLTFPRQVVALCQAPFLLDDPNVGLIFPADAIARAKHYLSLTSGGLGAYSDSRGIPGVRKEVAEFIERRDGYPSDPELIFLTDGASKGVMQILNCIIRGQGDGVL

SEQ ID NO: 74182 - protein, 400 aa, Gossypium hirsutum
  Clone ID: GOSHI-09MAY01-C1596_1.pep
MGLKALDYETMNENVKKVQYAVRGELYLRASELQKEGKKIIFTNVGNPQALGQKPLTFPRQVVALCQAPFLLDDPNVGLIFPADAIARAKHYLSLTSGGLGAYSDSRGIPGVRKEVAEFIERRDGYPSDPELIFLTDGASKGVMQILNCIIRGQGDGVLVPVPQYPLYSATISLFGGSLVPYYLEETANWGLDVNNLRESVAQARFKGITVRAMVIINPGNPTGQCLSEANLREILNFCYQENLVLLGDEVYQQNIYQDERPFISSRKVLMDMGPPISKEVQLVSFHTVSKGYWGECGQRGGYFEMTNIPPKTVDEIYKIASISLSPNVPAQIFMGLMVNPLKPGDVSYDQFVRESKGILESLRRRARIMTDGFNSCKNVVCNFTEGAMYSFPQIHLPPK

SEQ ID NO: 74183 - protein, 86 aa, Gossypium hirsutum
  unsure (1)..(86): unsure at all Xaa locations
  Clone ID: LIB3165-005-P1-K1-G3.pep
QFFYSICRAKKKTFTSSGYDKLSFFKILVLTAGKKTNVGNTKALGQKXQLTLPCQVVALSQAPFLLDDPNVRLIFXCDAVARAKDY

SEQ ID NO: 74184 - protein, 33 aa, Gossypium hirsutum
  Clone ID: uC-gsronu33B101b08b1.pep
MGLKALDYETMNENVKKAQYAVRGELYPRASEL

SEQ ID NO: 74185 - protein, 444 aa, Gossypium hirsutum
  Clone ID: GOSHI-09MAY01-C1556_1.pep
TSKSFVGKALGQPGLKLSVRVGETGFREVVAYLLDYGHFANVPPTALVKITHSVFNVNDGVNAHKPLKKNLVSKIASFQQFIPHDFDASDHGTSSFPVSAVHRIGILDIRIFNTDRHAGNLLVRKLDGIGRFGQVELIPIDHGLCLPETLEDPYFEWIHWPQASIPFSEDELEYIEKLDPVKDCEMLRRELPMIREACLRVLVLCTIFLKEAAAFGLCLAEIGQMMSREFRAGEEEPSELEVVCLEARRLIAERELSSPKSEVGDAEFQFEIDCEEPELEFIPKMVTDDSMTRASFQFGNGFVNNHHRLPLSKLEECFEEDEESELEAEQNGFSPFEALERIPSISKLSMSLRDTCLCDKSQKYSKFSGTKQENGYLTSSSGHRSANEQLPASVSFVKLADLNEEEWILFLEKFQELLKPAFSKRKSVTIGQKQMQRLGTSCQF

SEQ ID NO: 74186 - protein, 350 aa, Gossypium hirsutum
  Clone ID: GOSHI-09MAY01-C1516_1.pep
MLAVLICMAPINTCSSAAASTASLATRPPSPKFPAIFVFGDSTVDTGNNNYVKTLFKANLPPYGESFPGHIPTGRFSDGKLVPDFLASFLGIKDDVPPFLKPNLSENELRTGVTFASAGSGYDYLTTRLSNAIPVSKQVEMFKSYINKLMGIVGKDKANNIIGEALVIISAGTNDFVFNFHDIPTRRLEFDIVGYQHFLLQKLEDFLKELYELGCRKMIVAGLPPIGCLPIQMTAKFQIPTNRKCLEDQNSDAESYNKKLAKLLPELQAKLPGSKLAYADVYEPLFDMINYPQQYGFVEIKRGCCGTGIIEALFLCNAMTPICRNPSEFLFWDCIHPSQQAYIYLANYII

SEQ ID NO: 74187 - protein, 47 aa, Gossypium hirsutum
  Clone ID: GOSHI-09MAY01-C1496_3.pep
SSWLLMVAGLIAVCGDASLHHHQHCRQRHVSCGRRVVVRVGRPGRSR

SEQ ID NO: 74188 - protein, 125 aa, Gossypium hirsutum
  Clone ID: GOSHI-09MAY01-C1496_2.pep
GRKPEYEQFESGHGRKPEFGRPGSEFESDFGRRLDFEQSSEEFGFVHCIFFSLFYFLHFLFFYSLFFIIHLFLFFFIFFSLFIFIFLYFFFFLYFIIFYFLFILFILFYSIIFFFLIIFLLLFFY

SEQ ID NO: 74189 - protein, 369 aa, Gossypium hirsutum
  Clone ID: GOSHI-09MAY01-C1496_1.pep
MPYYSRGGEDDVDEFDEFDPTPYGGGYNLELTYGRPLEPSDETCYPSATPSDGDFDYARPDFSSGYAHLAYADEALETEYSSYLKPKPRPGRFEPAPAFGDYGRKPEYEQFESGHGRKPEFGRPGSEFESDFGRRPEFEQPPEEFGSGHGRRPAYEHSHQPDFGSGRRSEFEQPPPPEFGTGYRRRPEFEQPPPPEFESGYGRRPEYGEQESEFGSEYGSKPEHGEYGSEYGRRPNYGEPESEYGSGFGRKAEYEGGGSEYGTGYGRRTEGEYGSGYGGRTETEYGSGYERKPSYGRSEEEEEGYRKPSYGRSEEEAEGYRKPSYGRSEEEGYGRKKHGDDDSDDDDEEKRHHHRYKAHHHKRHDDYDD

SEQ ID NO: 74190 - protein, 132 aa, Gossypium hirsutum
  Clone ID: uC-gsflnu33B092c05b1.pep
PTRSPTRTPTRPSEFVFGHGRKPEFGRPGSEFESDFGRRPELEQPPEESGSGHGRRPAYEHSHQPDFGSGRRSEFEQPPPPEFGTGYRRRPEFEQPPSPEFESGYGRRPEFGEQESEFGSEYGILIIARYNL

SEQ ID NO: 74191 - protein, 138 aa, Gossypium hirsutum
  Clone ID: LIB3166-038-P1-K1-B1.pep
PENPGRTNASVGNLRETIPYYSRGGENDVDKFDEFDPTPNGGGYNLELTYGRPLEPSDETCYPSATPSDGDFDYARPDFSSGYAHLAYADEALETEYSSYLKPKPRPGRFEPAPAFGDYGRKPEYEQFESGHGRKPEF

SEQ ID NO: 74192 - protein, 101 aa, Gossypium hirsutum
  unsure (1)..(101): unsure at all Xaa locations
  Clone ID: LIB3272-053-P1-K1-H2.pep
MPDYLRGGEDDVYELDEFDPTPYGGGYNVDLTYGRALVPYDETXFPYGTPYDGDFGYARTDYSCGYPHLADADEAVETECSLYVKPKPRPGRLGPAPAFGA

SEQ ID NO: 74193 - protein, 57 aa, Gossypium hirsutum
  Clone ID: LIB3083-116-Q1-L1-F11.pep
KKRSKVACLDHLFNSYYCRFPFVEGMASLTSRHSHRGAYGGGAYSGGGDASLHHHHH

SEQ ID NO: 74194 - protein, 74 aa, Gossypium hirsutum
  unsure (1)..(74): unsure at all Xaa locations
  Clone ID: LIB3189-043-P1-K1-A2.pep
FDECDPTPYGGGYNLELTYGRXLETLDETCYPFATPSDGDFDYARPDFSYXYAHLAYADEAIETEYSSYLKPKP

SEQ ID NO: 74195 - protein, 50 aa, Gossypium hirsutum
  Clone ID: uC-gsflnu33B099e06b1.pep
EFRHRVASVLISRSRQRHLRHPSSSTASFHLTVERKKLLLKMSGRVGGRV

SEQ ID NO: 74196 - protein, 249 aa, Gossypium hirsutum
  Clone ID: GOSHI-09MAY01-C1486_2.pep
MAAELVNFATSEKLAEMDWAKNIEICELVARDQRQAKDVVKAIKKRLGSKNPNTQLYAVLLLEMLMNNIGENVHKLVIDTGILPILVKIVKKKSDLPVRERIFLLLDATQTSLGGASGKFPQYYSAYYDLVSAGVEFPQRPHATPSNPPTSQPIKSNTLNGELASARQEAVAKEAEPQIVPESSIIQKASNALEVLREVLDAVDAQNPEAAKDEFTLDLVEQCSFQKQRVMHLVMSSRDEKVVSRAIEL

SEQ ID NO: 74197 - protein, 199 aa, Gossypium hirsutum
  unsure (1)..(199): unsure at all Xaa locations
  Clone ID: uC-gsronu33B004f05b1.pep
KKERKKKRKKKKKKKKQTEKKEKKEVKKXKKGRKRYEEKIEKEEREVKKKKKIKKKEKKENKEEKQKEKKRKKISRREKKXKKRRKXKNRIKRKNKKKESDKTDRKXKIIKMKDKKXIYKKQXKKKTRRRKRNNKKKKKKKEKREKNNEKTXKKKQKKNNKEXGREIGQTLKGKSQKEHKKEKKLRYRKIDKREDKKRH

SEQ ID NO: 74198 - protein, 99 aa, Gossypium hirsutum
  unsure (1)..(99): unsure at all Xaa locations
  Clone ID: LIB3585-024-P1-K1-E9.pep
MKLNAIQITGAGKRTEAAEMAAELVNSXATGDTLAEMDCAKNIEIGEKEAREQRLAQDVVKAIKKRWGSTNPNTEXYAALLXEMSMNNSGENVHKLVID

SEQ ID NO: 74199 - protein, 145 aa, Gossypium hirsutum
  Clone ID: uC-gsflmaxxa006e05b1.pep
MNLSSWFRRSVSRNSKNHKNPPDQPQPHHQEQEEFLGITQQLIDHVKSFTLETFKNFPIQDDGDIEAQTSYNVRKDLSDWQERHAVLVLSKVKELSQLRFKLCPRHLKEEKFWRIYFMLVNSYVAEYELHAIQRAKLQSIAMKDE

SEQ ID NO: 74200 - protein, 75 aa, Gossypium hirsutum
  Clone ID: LIB3585-024-P1-K1-D11.pep
HASENFPIQDDGDIEAQTSYNVRKDLSDWQERHAVLVLSKVKELSQLRFKLCPRHLKEEKFWRIYFMLVNSYVAE

SEQ ID NO: 74201 - protein, 74 aa, Gossypium hirsutum
  unsure (1)..(74): unsure at all Xaa locations
  Clone ID: LIB3582-055-P1-K1-C3.pep
MKPFRSIIFKLIGLIVYMFIERVVVFTKSPKSDKQYXWEVVADSSSYVNREETNLENLQVRGTQITLYLRSDDK

SEQ ID NO: 74202 - protein, 158 aa, Gossypium hirsutum
  unsure (1)..(158): unsure at all Xaa locations
  Clone ID: LIB3585-023-P1-K1-F4.pep
MAPVLSRSLATPSLASLPLTNPNKAFNLRTAFLPPNALNKAFSCSRLRWKLEKRNNRIAVRCEASAVAEKEAEETSXEKFEYQAEVSRLLDLIVHSLYSHKEVFLRELVSNASDALDKLRFLSVTEPSLLGEXGELEIRIKPDPDYGTITITDTGIGM

SEQ ID NO: 74203 - protein, 240 aa, Gossypium hirsutum
  unsure (1)..(240): unsure at all Xaa locations
  Clone ID: GOSHI-09MAY01-C1436_1.pep
QRPGGGSGGEGYPAEDMVVKLPGQPPVGFKQYAGYVDVDVKAGRSLFYYFVEADKNPEKQPLTLWLNGGPGCSSVGGGAFTELGPFYPRGDGRSLRINSMSWNKASNLLFVESPVGVGWSYSNTSSDYIRGDASTAKDMYIFMMKWYEKFPEFKSRELFLTGESYAGHYIPQLAEVLLDHNARSKGFKXFNIKGVAIGNPLLRLDRDVPATYEFFWSHGMISDEVGLTIMNECDFDDYVF

SEQ ID NO: 74204 - protein, 510 aa, Gossypium hirsutum
  unsure (1)..(510): unsure at all Xaa locations
  Clone ID: GOSHI-09MAY01-C1426_1.pep
MEIGSFTFLSPEDFSFNNNYNSDFSWFLDMETGFNRNTKKRGRKDFEESLVSEKSGFGDILSSILMLDEEAKQEQYQWVTNSDQDGAFFQANYKGNVQEMNGYFENQFSEMNQLDNSSNKRARKSGSPAAAATVSAGSDNVGPSQSGSGSGQQRRLWVKDRSKDWWTKCNHPDFPDEEFKRAFRMSKATFNMVCEELEPAVTKKNTMLRDAIPVRQRVAVCIWRLATGEPLRMPSLPPARPFSTCHKLVLEVCAAIKTVLMPKFVQXPDEHKMKSIKQAFESASGIPNVGGSMYTTHVPIIAPKVSAAAYFIKKHTERNQGDSYSITLQGVVDQAGAFTDLCIGWPGSMSDDQILEKSAFHQRATWGHLKDVCVVGNKGYPLMDWVLVPYSHQNLTWAQHAFNEKIGEIEKVAKEAFARLKGRWSCLQKRTEVKLQELPIVLGACCVLHNICEMRNEVMDPELKFELFDDEVIPDNNIRSMASAQARDHIAHNLLHHGLGGRGTSSTAFL

SEQ ID NO: 74205 - protein, 265 aa, Gossypium hirsutum
  Clone ID: GOSHI-09MAY01-C1796_1.pep
MAEEAHGNPAAEKEAKGAAAEMDDIESRITTAMRSRVGHFKEQSDSLTFEGVRRLLEKDLGLETFALDVHKRFVKQCLLKWLDDGNDNEGSSGTVEKNVSTTTEGTESPKGRQPKKEIKEPCSEDEKLEESPVLGLLSDNKTVKNDNKENKEVSESKIKKAITNRASYLKANSEKVTMAGLRRLLEEDLKLDKYTLDPYKKFIAEQLDQLLKSAEVSAPASEVKKKNLKKNSQSKTSEKLSKKVISASSRSENDEVGDEERDGDD

SEQ ID NO: 74206 - protein, 143 aa, Gossypium hirsutum
  Clone ID: uC-gsflmaxxa067f11b1.pep
MAKEAHGSLASDADAIEATAEDIESRITTAMHSRVGHFKEQADSLTFEGVRRLLEKDLGLETFALDVQKRFVKQCLLKCLDGANEDGSKSSCETVEKNVSTTTEGTESPKERESKKEVKEPCSEDEEKLDGSPVLGLLAGYKT

SEQ ID NO: 74207 - protein, 176 aa, Gossypium hirsutum
  Clone ID: GOSHI-09MAY01-C1786_1.pep
MTCDKRGQFGDTTFTKVFVGGLAWETQKDTMKKYFEQFGDILEAVVITDKATGRSKGYGFVTFREPEAAMRACVDAAPVIDGRRANCNLGFLGAQRSKPSTPKHGGRNLRGMRCFPTAIAFSSAATFPPHYYGIPQGLPFNLYGYSPCSPDSSCYATNYYILYGGATGHIQCMVVA

SEQ ID NO: 74208 - protein, 78 aa, Gossypium hirsutum
  Clone ID: GOSHI-09MAY01-C1746_2.pep
HSTFHASGYPNLRMDSQIKFAVVVKIMGRTGSRGQVTQVRVKFLDDQNRFIMRNVKGPVREGDILTLLESEREARRLR

SEQ ID NO: 74209 - protein, 69 aa, Gossypium hirsutum
  Clone ID: GOSHI-09MAY01-C1746_1.pep
PNLRMDSQIKFAVVVKIMGRTGSRGQVTQVRVKFLDDQNRFIMRNVKGPVREGDILTLLESEREARRLR

SEQ ID NO: 74210 - protein, 225 aa, Gossypium hirsutum
  unsure (1)..(225): unsure at all Xaa locations
  Clone ID: GOSHI-09MAY01-C1706_2.pep
ETQRHISAYFVGSPYTIVDHTYDAVVVGAGGAGLRAAIGLSEHGFNTACITKLFPTRSHTVAAQGGINAALGNMTEDDWRWHMYDTVKGSDWLGDQDAMQYMCREAPKAVIELENYGLPFSRTEDGKIYQRAFGGQSLDFGKGGQAYRCACAADRTGHALLHTLYGQAMKHNTQFCVEYFALDLLMNSNGSCQGVIALNMEDGSLHRXARLLKQLVAFGGYGRAY

SEQ ID NO: 74211 - protein, 161 aa, Gossypium hirsutum
  Clone ID: GOSHI-09MAY01-C1706_1.pep
MWRCVSRSLRAPYSNRSVAANSLRSNISSFFSTHAGSPYTIVDHTYDAVVVGAGGAGLRAAIGLSEHGFNTACITKLFPTRSHTVAAQGGINAALGNMTEDDWRWHMYDTVKGSDWLGDQDAIQYMCREAPKAVIELENYGLPFSRTEDGNIYQRAFGVKA

SEQ ID NO: 74212 - protein, 193 aa, Gossypium hirsutum
  Clone ID: GOSHI-09MAY01-C1726_1.pep
MASPFLSNTIISFSSSLSSSSSLPRLAPSIPFSAIRSKSTPRRILTVRSKIREIFMPALSSTMTEGKIVSWVKSEGDVLSKGESVVVVESDKADMDVETFYDGILAAIVVGEGETAPVGAAIGVLAETEDEIAEAKAKAASKSGASTPSAPPPAPAPAAASTPAPPKSTPAPAAPTVAEGPTKTVATPYAKKL

SEQ ID NO: 74213 - protein, 145 aa, Gossypium hirsutum
  Clone ID: GOSHI-09MAY01-C1686_1.pep
FEEIGGNPFEISVKSRVPRILCAQMSESYYPPLREWLHLDLIDGKVSISDMKPQIHLQCEDGQIISSIEFASYGTPHGSCQNFSNGNCHSPNSLSVVSEACVGRNSCSVEVSNSGFGSDPCRGVLKTLAVEARCVSTSTIGVSQF

SEQ ID NO: 74214 - protein, 462 aa, Gossypium hirsutum
  Clone ID: GOSHI-09MAY01-C1646_1.pep
MSSIAFKPFHGLRRSSAVPTPTSTTTTLYKPAVKFHVSAAKTSPKLSNRNLRVAIIGGGPAGGSAAETLAKAGIETFLIERKLDNCKPCGGAIPLCMVGEFDLPLDIIDRRVTKMKMISPSNIAVDIGQTLKPHEYIGMVRREVLDAYLRDRAKENGANVINGLFLKMDMPKHWDEPYVLHYTEYDGKKGAMGAKATLEVDAVIGADGANSRVAKAINAGDYDYAIAFQERIKIPDDKMVYYENLAEMYVGDDVSPDFYGWVFPKCDHVAVGTGTVTHKNDIKKFQLATRNRAKDKILGGKIIRVEAHPIPEHPRPRRLSGRVALVGDAAGYVTKCSGEGIYFAAKSGRMCAEAIVEGSQNGKKMVDEGDLRKYLEKWDKKYWPTYKVLDVLQKVFYRSNPAREAFVEMCADEYVQKMTFDSYLYKTVAPGNPLEDLKLAVNTIGSLVRANALRKEMEKLNV

SEQ ID NO: 74215 - protein, 97 aa, Gossypium hirsutum
  Clone ID: GOSHI-09MAY01-C1676_3.pep
PRVRLKNVRTQVLLKLIKPYTRIRIPFISKELNVPEKDVEQLLVSLILDNRIDGHIDQVNRLLERGNRSKGMKKYTAIDKWNTQLRSLYQTVNNRVY

SEQ ID NO: 74216 - protein, 410 aa, Gossypium hirsutum
  Clone ID: GOSHI-09MAY01-C1676_2.pep
PTRSSTRSETDSEGALVGLGEVVSMEPEKAEWGFKALKQTVKLYYRLGKYKEMMDSYREMLTYIKSSVTRNYSEKCINNIMDFVSGSASQNFGLLQEFYQTTLKALEEAKNERLWFKTNLKLCKIWFDMGEYGRMSKILKELHKSCQREDGTDDQKKGSQLLEVYAIEIQMYTETKNNKKLKQLYQKALAVKSAIPHPRIMGIIRECGGKMHMAERQWAEAATDFFEAFKNYDEAGNQRRIQCLKYLVLANMLMESEVNPFDGQEAKPYKNDPEILAMTNLIAAYQRNEIIEFEKILKSNRRTIMDDPFIRNYIEDLLKNVRTQVLLKLIKPYTRIRIPFISKELNVPEKDVEQLLVSLILDNRIEGHIDQVNRLLERGDRSKGMKKYTAIDKWNTQLRSLYQAVSNRVS

SEQ ID NO: 74217 - protein, 165 aa, Gossypium hirsutum
  Clone ID: GOSHI-09MAY01-C1676_1.pep
MASDADMEDYGFEYSDEEPEEQDVDIENQYYNSKGLVETDPEGALAGFAEVVSMEPEKAEWGFKALKQTVKLYYRLGRYKEMMEAYREMLTYIKSAVTRNYSEKCINNIMDFVSGSASQNFGLLQEFYQTTLKALEEAKNERLWFKTNLSYADLFDMVSMANDKI

SEQ ID NO: 74218 - protein, 73 aa, Gossypium hirsutum
  Clone ID: GOSHI-09MAY01-C1666_1.pep
MGKPLGSTGEFFKRRDEWRKHPMLSNQLRHATPGLGIALVAFGIYLVGEQVYNRIYAPSSSHHHQQQSSSHSH

SEQ ID NO: 74219 - protein, 163 aa, Gossypium hirsutum
  unsure (1)..(163): unsure at all Xaa locations
  Clone ID: GOSHI-09MAY01-C1606_11.pep
HFLKHTVLSVLFLEHLISVLNQTRVTKSSDPGKGENSSLVSETQLEDEILQAAIFALTSFFRHVDQLHLLKFILFLWSSXFMMFHLNFKGGGKVGKRAVEHGYSSVLAALVLQLGSCHGLATSGRHEPLRALLTAFKAFCECVGDLEMGKVHELFDNMNTCYC

SEQ ID NO: 74220 - protein, 329 aa, Gossypium hirsutum
  unsure (1)..(329): unsure at all Xaa locations
  Clone ID: GOSHI-09MAY01-C1606_6.pep
LRINESHVGMSSPEPMINTYANFRDDVLPRIKRLGYNAVKIMAIQEHSYYASFGYHVTNFFAPSSRFGTPDDLKSLIDKAHELGILVLMDIVHSHACNNVLDGLNMFDGTDGHYFHMGSRGQHSVWDSRLFNYGSWEVLRYLLSNARWWLEEYNFDGYRFDGVTSMMYIHHGLQVGFTGNYNEYFGYATDVDAVVYLMLVNDMIHGLYPEAVTIGEDVSGMPTFCIPVQDGXGVGFDYRLHMAIADKWIEILKKRDEDWKMGDIVHTLANRRWLEKCVAYAESHDQALVGDKTIAFWLMDKGMYEFMALDRPSSPLIDRGIALHTMIRL

SEQ ID NO: 74221 - protein, 148 aa, Gossypium hirsutum
  unsure (1)..(148): unsure at all Xaa locations
  Clone ID: GOSHI-09MAY01-C1606_5.pep
SRAFGGVGRLVHIDFGFILETSPGGNMRFESAHFKLSHEMTQLLDPSGVMKSETWDNFVSXVKGYLAARRHMNGIINTXLLMLDSGLPCFSRGDPIGNLRKRFHPEMSEREAAYFMKNVCTDAYNKWTTAGYDLIQYLQQGIEKWRHG

SEQ ID NO: 74222 - protein, 87 aa, Gossypium hirsutum
  unsure (1)..(87): unsure at all Xaa locations
  Clone ID: GOSHI-09MAY01-C1606_3.pep
TPCSSCCHALDNVLAGTDGHYFHTGSRAHHSVWDSRLFNYGSXEVLRYLLSNARWWLEEYKFDGYKIDSVTSMMYKISLINKCIISF

SEQ ID NO: 74223 - protein, 86 aa, Gossypium hirsutum
  Clone ID: GOSHI-09MAY01-C1606_2.pep
DQVVLDYNRETKVTKKMDIYGILGNRDSKLGKIKHTQETTISSRPFLPFRLLLLHSFFDSIVKFIAGKENRFKFFNKFMIFTENFI

SEQ ID NO: 74224 - protein, 352 aa, Gossypium hirsutum
  Clone ID: GOSHI-09MAY01-C1606_1.pep
LPYPTRAFDMAQCSRCLIPWTANDGMYLMEVDRVLRPGGYWVLSGPPINWKTYYQIWKRTKEDLKAEQKKIEELAHPPGWEKKYEKGDIAIFRKKVNDKSCRRNSANMCKPRGSDDVWYKKMETCITPFPKVSSASEVAGGELKKFPARLFAVPPRISKGLVEGVSVETYQEDNKLWKKHVNAYKRINRLIGTARYRNVMDMNAGLGGFAAALESPKSWVMNVVPTIGKDTLGVIYERGLIGIYHDWCEGFSTYPRTYDLMHANGVFSLYQDKCSFEDILLEMDRILRPEGAVIFRDDVDVLNKVRKIAGGMRWDTKMNDHEDGPLVPEKILVAVKQYWVGGIKGNSTSSAE

SEQ ID NO: 74225 - protein, 178 aa, Gossypium hirsutum
  Clone ID: LIB3582-025-P1-K1-A9.pep
RPDSDRSKWFGELPWEESLPDAHEFGKLVLFQNLDPAYSSAEVEDIVWNAFSETCRAKMVQQTAYSSPHFGQAFAIFKSREVAEDVIKKLDERCLLLPNRRPLVASIPNPCFSRKQSMFAGHLIVDKLKSQREMKEAVSTSHSSQPNTVEYDMAMEWFLMTERSNQFWKKLYEQQGKE

SEQ ID NO: 74226 - protein, 80 aa, Gossypium hirsutum
  Clone ID: LIB3829-033-Q1-N6-H8.pep
LPWEESLRDAHEFGKLVLFKNLDTAYSSAEVEDIVWNAFNETCRAKMVQQTAMYFLLPCNVYSHRQVQLVSLFLIMYYLF

SEQ ID NO: 74227 - protein, 58 aa, Gossypium hirsutum
  Clone ID: LIB3145-011-Q1-K1-C5.pep
FRDDVDVLTKVRKIAGGMRWDTKMNDHEDGPLVPEKILVAVKQYWVGGIKGNSTSSAE

SEQ ID NO: 74228 - protein, 78 aa, Gossypium hirsutum
  unsure (1)..(78): unsure at all Xaa locations
  Clone ID: LIB3829-015-Q1-N6-B4.pep
SSHASNNVLDGLNMFDETDGHYFHTGSRGHHSVWDSRLFNYGSWEVLRYLLSNAXEYKFDGYRFDGVTSMMYKISLIK

SEQ ID NO: 74229 - protein, 61 aa, Gossypium hirsutum
  Clone ID: LIB3543-033-Q1-K1-F8.pep
MSTEKLRRAALPPVQENIDKLEKAINEGNFYGAQQMYKSISARYDTMTACHHQFYFIIFKS

SEQ ID NO: 74230 - protein, 68 aa, Gossypium hirsutum
  Clone ID: LIB3582-051-P1-K1-B1.pep
MNEKITDDVLLQITSRGQGSLQCLSLVDCQRITDEGLKHVVENNPKLIKVIYLPIPLCLNMLVGLHLG

SEQ ID NO: 74231 - protein, 80 aa, Gossypium hirsutum
  Clone ID: LIB3825-028-Q6-K6-B1.pep
VFFFISIAFSIFFLRLFSVKEKKLEITHHFFSWKTRKKNKLNDKPIAVCHSDNPKRTAEISSANYPAREYGWFLSKLYFY

SEQ ID NO: 74232 - protein, 181 aa, Gossypium hirsutum
  Clone ID: LIB3829-014-Q6-K6-F11.pep
RKMVDFCDLLNIPFMRTSVRKEEVTAKLLEFLESPHATTGVLLADKEQKGKRRKATPSKNIGSAEASDTSAKKRRKTPQGVEKRKRSSKAEEEEDDDKVESPVTRDDSHEDDADTAPKEENDDEETKSEEEEEEPKKSSKKGTSKKVATESPESKSKDKFESEKNLTPAKSSKKSSGSTSK

SEQ ID NO: 74233 - protein, 101 aa, Gossypium hirsutum
  unsure (1)..(101): unsure at all Xaa locations
  Clone ID: LIB3148-054-Q1-K1-B11.pep
KLPEARGYMDMNAGLKRFATSLKSPNPWVINVVPTIGKDTLRVIYDRGLIGIYHDWCQGFSTYPRTYDLIHANGVFNLHQDXCSFEDILLEMDPILLPERA

SEQ ID NO: 74234 - protein, 98 aa, Gossypium hirsutum
  Clone ID: LIB3146-048-Q1-K1-D12.pep
RDFIIFKLLRIHFSFLFCFCFFDSANSRGQGSLQCLSLVDCQRITDEGLKHVVENNPKLIKVLRYLLSYARWWLEEYKFDGYRFDGVTSMMYKISLIK

SEQ ID NO: 74235 - protein, 69 aa, Gossypium hirsutum
  Clone ID: LIB3829-033-Q1-K6-H8.pep
ANHTSFSFSFHCTEFTHHRYSFSLDLLGFLLILGFQGNIQFPFNFNGDFYGDGNPRWQETGGRGGERED

SEQ ID NO: 74236 - protein, 103 aa, Gossypium hirsutum
  unsure (1)..(103): unsure at all Xaa locations
  Clone ID: LIB3148-030-Q1-K1-C12.pep
MMFHLNFKGGGKVGKRAVEHGYSSVLAALVLQLGSCHGLATSGRHEPLRALLTAFKAFCECVGDLGMGKILARDSEHNEXWINLIGDLADCISMKRPKEPCFQ

SEQ ID NO: 74237 - protein, 100 aa, Gossypium hirsutum
  Clone ID: LIB3083-110-Q1-L1-D9.pep
MSREKLRRAALPPVQENIDKLEKAINEGNFYGAQQMYKSISARYVSAERYSEALDLLESGACLQLKHGQVTCGAELAVLLVDTLVKGKISFYENISVRVR

SEQ ID NO: 74238 - protein, 106 aa, Gossypium hirsutum
  Clone ID: uC-gsflmaxxa042b02b1.pep
IFKGTYSFLLILLVISMATETLDDKKSEEEEVKDKENEEGSKEEVTAKLLEFLESPHATTDVLLADKEQKGKKRKATPSKNIGSAEALDTSAKNVKTFKDVKGCDD

SEQ ID NO: 74239 - protein, 76 aa, Gossypium hirsutum
  Clone ID: uC-gsronu33B089h09b1.pep
LGISVTQYPIYIHLFSYFGFYVVTQNYLVSPLYKLLQETLKVKKKLGETQFRVWIWLKNDSFLTIREEESVPFEEM

SEQ ID NO: 74240 - protein, 68 aa, Gossypium hirsutum
  Clone ID: LIB3147-011-Q1-K1-B9.pep
RDIHINLPLNEKITDDVLLQITERGQRSSQCSDLVDCQKITDESFKRVTENNPKLIKVIYLPIPLCLN

SEQ ID NO: 74241 - protein, 65 aa, Gossypium hirsutum
  Clone ID: uC-gsflmaxxa049e08b1.pep
EPMINTYARFRDDVLPRIKRLGYNAIQIMAIQEHSYYASFEYYLHRNISSNLFVSVYVCKFVNLY

SEQ ID NO: 74242 - protein, 57 aa, Gossypium hirsutum
  Clone ID: LIB3196-031-P1-M1-A2.pep
MSREKLRRAALPPVQENIDKLEKAINEGNFYGAQQMYKSISARETEGNLKNLMREKR

SEQ ID NO: 74243 - protein, 364 aa, Gossypium hirsutum
  unsure (1)..(364): unsure at all Xaa locations
  Clone ID: GOSHI-09MAY01-C1636_1.pep
HASGGDEISWYADGDKTVRNEYNPATAYAFDRVFGPHATSQEVYEIAARPVVQAAMEGVNGTVFAYGVTSSGKTHTMHGDQNAPGIIPLAIKDVFSIIQDTPGREFLLRVSYLEIYNEVINDLLDPTGQNLRVREDAQGTYVEGIKEEVVLSPGHVLSFIAAGEEHRHVGSNNFNLFSSRSHTIFTLMIESSAHGDEYDGVVFSQLNLIDLAGSESSKTETTGLRRKEGSYINKSLLTLGTVIGKLSEGKASHVPYRDSKLTRLLQSSLSGHGHVSLICTVTPASSNMEETHNTLKFASRAKRVEIYASXIIDEKSLIKKYQREISVLKEELDHLRQGMLIGVNHEELMTLRQKLEEGQVKMQS

SEQ ID NO: 74244 - protein, 191 aa, Gossypium hirsutum
  Clone ID: GOSHI-09MAY01-C1196_3.pep
MAAFALMSSVIFLLCCLASASTFEDTNPIQMVSDGLDSSVLRVIRHTRRAISFARFAYKHGKRYEDVEEIKLPFQIFKDNMDLIRSTNKKGLPYSLSVNQFADLTWDEFRKHRLGAAQNCSATKKGNHQLTDVVLPESKDWRESGIVSPVKNQGSCGSCWAFSTTGALEAAYHQAFGKGISLSEQQLVDCA

SEQ ID NO: 74245 - protein, 208 aa, Gossypium hirsutum
  unsure (1)..(208): unsure at all Xaa locations
  Clone ID: GOSHI-09MAY01-C1196_2.pep
MARLTLVSSIILMLCCVTAASTFEDSNPIRMVSDGLRGYESSVLRVIGHTRHAISFARFAYKHGRKYETVEEMKLRFQIFKENLDLIRSTNKKGLSYTLAVNRFADWSWDEFQKHRLGAAQNCSATTKGNHQLTDVVLPESKDWREADIVSPVKEQGSCGSCWTFSTTGALEAXAYHQAFGKGISLSXQQLVYCAGAFKTLVXHGGLP

SEQ ID NO: 74246 - protein, 355 aa, Gossypium hirsutum
  Clone ID: GOSHI-09MAY01-C1196_1.pep
MARLTLVSSIILLLCSVAAGSTFEDSNPIQMVSDGLSGFESSVLRVIGHTRHALSFARFAYKHGKRYENVEEMKLRFQIFKDNLDLIRSTNKKGLPYTLAVNQFADWSWEEFQKHRLGAAQNCSATTKGNHQLTDVVLPDSKDWREAGIVSPVKDQGSCGSCWTFSTTGALEAAYHQAFGKGISLSEQQLVDCAGAFNNFGCNGGLPSQAFEYIKYNGGLDTEEAYPYTAKDGQCKFSSENVGVQVLDSVNITLGAEDELKHAVAMVRPVSVAFEVVTSFRFYKSGVYTSKTCGSTPMDVNHAVLAVGYGVENGVPYWLIKNSWGAEWGDNGYFKMEMGKNMCGVATCASYPIVA

SEQ ID NO: 74247 - protein, 126 aa, Gossypium hirsutum
  unsure (1)..(126): unsure at all Xaa locations
  Clone ID: LIB3828-031-Q6-N6-B3.pep
GECKFSPENVGVQVIDSVTMTLGVEQKLKHAVXLVSPVSVAFQVIXSYGFYKSGVFTSGXCGSTTQYVNQRVQAVGRWCSVRCSXWLSKSSLEAQWGTNGYFNMLDGEKSCXGVAACASYPVDAWS

SEQ ID NO: 74248 - protein, 127 aa, Gossypium hirsutum
  unsure (1)..(127): unsure at all Xaa locations
  Clone ID: LIB3165-052-Q1-K1-B8.pep
MGARLTLVSSIILLLCSVAAGSTFEDSNPIQMVSDGLSGFESSVLRVIGHTRHALSFARFAYKHGKRYENVEEMKLRFQIFKGNLDLIRSTNKKGLPYTLAVNQFADWSLEEFQKHRLGAAXNCSAT

SEQ ID NO: 74249 - protein, 113 aa, Gossypium hirsutum
  unsure (1)..(113): unsure at all Xaa locations
  Clone ID: uC-gsronu33B041h08b1.pep
DGQCIFSSENVGVQVIDSVNITLGSEDELKHAVAMVRPVSVAFEVVPSFNFYKSGVYXSSDKCGNTSSDVXNHAVLACGYGXIRSSFWYWLIKNSVLIDLQHSVLCSCCIWAF

SEQ ID NO: 74250 - protein, 46 aa, Gossypium hirsutum
  Clone ID: LIB3147-046-Q1-K1-G3.pep
LKPMGSCTIRIQRHVRCKSYVHFFCLIFNYFMLVCFLFFFFLLFII

SEQ ID NO: 74251 - protein, 42 aa, Gossypium hirsutum
  Clone ID: LIB3148-016-Q1-K1-H5.pep
LWSTNVVVVVRGYGLVETDGFMYNKDPKTCKMQICCTQQRQV

SEQ ID NO: 74252 - protein, 90 aa, Gossypium hirsutum
  Clone ID: GOSHI-09MAY01-C1186_4.pep
RSSVVPPRAAVCADKIHLGSILGAIIIVSGLYTVVWGKSKDVKTPELEEKSNGLQELPITDNGRSMNVVDGAAKAVNIPDSKNTFSTRGT

SEQ ID NO: 74253 - protein, 240 aa, Gossypium hirsutum
  Clone ID: GOSHI-09MAY01-C1186_3.pep
MGDQMPCAALSNVWNKVKPFLAIISLQFGYAGMYIISLVSLKHGMSNFILCTYRHVVATIIIAPFAFVLERKIRPKMTLPIFLRIVVLGLLEPVLDQNLYYLGMMKTTATYSSAFVNMLPAVTFILAMIFRLEKINLKKIYSVAKIIGTAITVIGAMVMTWDKGPIIDFVKSGGATHHSTNTESADQHWVSGTIMLLGSIAGWSSFFILLSCTSKKYPAHLPFIVSIWVTFSPLFAILPF

SEQ ID NO: 74254 - protein, 331 aa, Gossypium hirsutum
  Clone ID: GOSHI-09MAY01-C1186_2.pep
PTRPPTRPPTRPAFVLERKIRPKMGLPIFLRIVVLGFLEPVLDQNLYYLGMKFTTATYSSAFVNMLPAVTFIMAMIFRLEKINLKKIHSIAKVVGTAITVGGAMVMTLYKGPIIDFVKSGGATHHSTNTESADQHWVSGTIMLLGSIAGWSSFFILQSFTLKKYPAELSLTAWICFMGTVQDAGLSFIMVRDLSAWKIGFDSRLLAASYSGIVCSGIAYYVQGIVIRQRGPVFVTAFSPLCMIITAALGTVILAEKIHLGSILGAIIIVSGLYTVVWGKSKDVKTPELEEKSNGLQELPITDNGRSMNVVDGAANAVNIPDSKNTFSTRGT

SEQ ID NO: 74255 - protein, 385 aa, Gossypium hirsutum
  Clone ID: GOSHI-09MAY01-C1186_1.pep
MGDQTSSASALSDVLNKAKPYLAIISLQFGYAGMYILSTICMKHGMSNFILATYRHVVATIVIAPFAFVLERKIRPKMTLPIFLRIVVLGFLEPVLDQNLYYLGMKFTTATYSSAFVNMLPAVTFIMAMIFRLEKINLKKIHSIAKVVGTAITVGGAMVMTLYKGPIIDFVKSGGATHHGTNTESADQHWVTGTIMLLASILSWSSYFILQSFTLKMYPAELSLTAWICLMGTIENAVASLIMVRGISAWKLGWDSRLLAASYSGIVCSGIAYYVQGVVIRERGPVFLTSFSPLCMIITAALGTFVLSEQVHLGSILGAIIIVSGLYTVVWGKSKDGKSPESDEKSKGLQELPITNNAKSINVDESIDGDAKIVKIPASNRPFST

SEQ ID NO: 74256 - protein, 54 aa, Gossypium hirsutum
  Clone ID: uC-gsronu33B046b01b1.pep
SLKSKLIRLLKKKKEYNQKMIIELQKCLIGRGWITYIVVFTALGRTTLLETYQF

SEQ ID NO: 74257 - protein, 105 aa, Gossypium hirsutum
  Clone ID: LIB3146-015-Q1-K1-B11.pep
GTFVLSEHVHLGSILGAIIIVSGIAYYVQRVVIRERGPVFLTSFSPLCMIITAALGTFVLSEHVHLGSILGAIIIVSGLYTVVWGKSKDGKSPKGDEKSKGLQEW

SEQ ID NO: 74258 - protein, 59 aa, Gossypium hirsutum
  Clone ID: uC-gsflnu33B024a06b1.pep
RRNVMTRLFCKVLTVFGFLVPFGSASILSWSSYFILQSFTLKIDPAELFFTVLICLMGT

SEQ ID NO: 74259 - protein, 77 aa, Gossypium hirsutum
  Clone ID: GOSHI-09MAY01-C1156_3.pep
FNFGGPKKKLLPCKPAEEKIDPLKPAPPFFFFFFFFFFFFFFFFFFFFFFFFFFFFFFFFFFFFRKVVANIKVKIKI

SEQ ID NO: 74260 - protein, 152 aa, Gossypium hirsutum
  Clone ID: GOSHI-09MAY01-C1156_1.pep
MSTPARKRLMRDFKRLQQDPPAGISGAPQDNNIMLWNAVIFGPDDTPWDGGTFKLTLQFTEDYPNKPPTVRFVSRMFHPNIYADGSICLDILQNQWSPIYDVAAILTSIQSLLCDPNPNSPANSEAARMFSENKREYNRRVREIVEQSWTAD

SEQ ID NO: 74261 - protein, 131 aa, Gossypium hirsutum
  Clone ID: LIB3543-055-Q1-K6-B2.pep
PCRPSVRYCGLFYHLFCAGISGAPQDNNIMLWNAVIFGLDDTPWDGGNKVNNIDDYYFDYLWCKDYKYIKVIFSDCRETSASQPRVHEDWITRNVADVVCIVFFITKIYLIKKMHCIFYYLAMCIVIGKFY

SEQ ID NO: 74262 - protein, 118 aa, Gossypium hirsutum
  Clone ID: LIB3585-051-P1-K1-H10.pep
MSTPARKRLMRDFKRLQQDPPAGISGAPQDNNIMLWNAVIFGPDDTPWDGGTFKLTLQFTEDYPNKPPTVRFVSRMFHPNIYADGSICLDILQNQWSPIYDVAAILTSIQSLLCDPNP

SEQ ID NO: 74263 - protein, 92 aa, Gossypium hirsutum
  Clone ID: uC-gsronu33B032d07b1.pep
WICRLMLMSIKFWCFGLKHQFFYVRLVDLFDFLFRRLPCSIYVDVIYLKFLSGFKIYFDYYVWLGNKGNNIDDYYFDYLWCEDYKYIKGDLF

SEQ ID NO: 74264 - protein, 91 aa, Gossypium hirsutum
  Clone ID: uC-gsflnu33B101h07b1.pep
GEPSAGISGAPQDNNIMLWNAAIFGPDDTPWDGGTFKLTLQFTEDYPNKPPTVRFVSRMFHPNIYADGSICLDILQNQWSPIYDVACILTS

SEQ ID NO: 74265 - protein, 77 aa, Gossypium hirsutum
  unsure (1)..(77): unsure at all Xaa locations
  Clone ID: uC-gsflnu33B101h01b1.pep
GEPSAGISGAPQDNXLCLRNAVIFGPDDTPWDGGTFKLTLQFTEDYPNEPPTVGFVSGMAHAKIYADGSICMDILQN

SEQ ID NO: 74266 - protein, 127 aa, Gossypium hirsutum
  Clone ID: GOSHI-09MAY01-C1146_2.pep
MSHFGRSGPPDITDTYSLLVLNITFRTTADDLFPLFDKYGKVVDIFIPKDRRTGDSRGFAFVRYKYADEAQKAVDRLDGRVVDGREITVQFAKYGPNAERIQKGRIIESFPKSRSRSPRRRHRDDHH

SEQ ID NO: 74267 - protein, 242 aa, Gossypium hirsutum
  Clone ID: GOSHI-09MAY01-C1146_1.pep
MSHFGRSGPPDISDTYSLLILNITFRTSADDLFPLFDKYGKVVDIFIPKDRRTGDSRGFAFVRYKYADEAQKAVDRLDGRVVDGREITVQFAKYGPNAERIHKGRIVESAPRSGHRSRSRSPRRRHRDDHYRDRDYRRSRSRSHDRYERDRYRGKDRDSRRRSRSRSASPDYSKGRGRGRYDDDRRSVSRSISASPARRSPSPRKSPSPRKTSPPRGESPGRRSRDGRSPSPRSVSPRAPPC

SEQ ID NO: 74268 - protein, 253 aa, Gossypium hirsutum
  Clone ID: GOSHI-09MAY01-C1176_1.pep
TAAYPAAIRLWRTLKGTSEGWRSVSWSVACFFPGIVFVILAVLNFILWGSKSTGAIPISLYFVLLSLWFCISVPLTLVGGFLGTRAEAIQYPVRTNQIPREIPARKYPSWLLVLGAGTLPFGTLFIELFFILSSIWLGRFYYVFGFLLIVLLLLIIGCAEVSVVLTYMHLCVEDWRWWWKAFFASGSVALYVFLYSINYLVFDLQSLSGPVSAILYLGYSMIMAIAIMLSTGTIGFITSFYFVHYLFSSVKID

SEQ ID NO: 74269 - protein, 156 aa, Gossypium hirsutum
  unsure (1)..(156): unsure at all Xaa locations
  Clone ID: GOSHI-09MAY01-C1106_5.pep
THGIIRTRYQNTQTQPLLKDNLLPKRLILSFMTHFFNDYLEDNSLDDLISLLKRGKIEDDLLQFFPSTKRSAESFSXHFTKACLLPLVEYNEKKIFDVXLKEXNSAVSTQIAEESDISAVIQTVKQRVKGAKLPDIEGGLILWDVIMDAVQWFGNT

SEQ ID NO: 74270 - protein, 124 aa, Gossypium hirsutum
  Clone ID: GOSHI-09MAY01-C1106_4.pep
FTRPVRILWDVIMDAVQWSGPRLRQNANSALRQVKTWAKLLNSFCSSGKLELELMYKVQMQCYEDAKLMKLFPEIVKSLYDQDVLAEDTILYWFRKGLNPKGRQTFVKALEPFVNWLEEAEEEE

SEQ ID NO: 74271 - protein, 192 aa, Gossypium hirsutum
  Clone ID: GOSHI-09MAY01-C1106_2.pep
MSSKEKPTLGGTRIKTRKRNIAAPLDPSAFADAVVQIYLDNAGDLELVARSIESSDLNFSRYGDTFFEVVFAGGRTQPGTLKPDEGECHPYSIIECEAKRDAILPSVIYIQKILRRRPFLIKNLENVMRRLLQSLELFEENERKKLAIFTALAFSQKLSGLPPETVFPPLLKDNLVAKGLVLSFMTDFFKDY

SEQ ID NO: 74272 - protein, 411 aa, Gossypium hirsutum
  Clone ID: GOSHI-09MAY01-C1106_1.pep
MSSKEKPTLGGTRIKTRKRNIAAPLDPAAFADAVVQIYLDNAGDLELVAKNLESSDLNFSRYGDTFFEVVFTGGRTQPGTIKPDEGERHPYSVIECEAKREAILPSVIYIQKILRRRPFLIKNLENVMRRFLQSLELFEDNERKKLAIFTALAFSQKLSGLPPETVFQPLLKDNLVVKGLVLSFITDFFKDYLVDNSLDDLISLLKRGKIEDDLLQFFPSTKRSAEGFSEHFTKAGLVPLVEYNEKKIFEVKLKEMKSALTTQIVEESDMSEVIETVKQRVKDAKLPDIEVIRILWDVIMDAVQWSGKNQQQNANSALRQVKTWAKLLNSFCTSGNIELELIYKVQMQCYEDAKLMKLFPEIVRSLYDQDVLAEDTILHWFRKGTNPKGRQTFVKALEPFVNWLEEAEEEE

SEQ ID NO: 74273 - protein, 112 aa, Gossypium hirsutum
  Clone ID: LIB3584-014-P1-K1-A4.pep
GNVSHLPSVIYIQKILRRRAFLIKNLENVMQRLLQSLELFEDNERKKLAIFTALAFSQKLSGLPPETVFQPLLKDNLVVKGLVLSFITDFFKEYLVDNSLDDLISILKRGEM

SEQ ID NO: 74274 - protein, 135 aa, Gossypium hirsutum
  unsure (1)..(135): unsure at all Xaa locations
  Clone ID: LIB3120-026-Q1-K1-C5.pep
TGVLYSPLGVSSTWFITSNEKPTLGGTRIKTRKRNISAPLDPSSFADALIHIYLDNAGDLASQSNTSCVLQELVARSIESSHLNFSKYGDTFFEVVFSGCPTQPGTLKPEXRECHPYSIIECEAKPNPFLLSVFT

SEQ ID NO: 74275 - protein, 80 aa, Gossypium hirsutum
  unsure (1)..(80): unsure at all Xaa locations
  Clone ID: LIB3196-059-P1-M1-E2.pep
MSSKEKPTLGGTRIKTRKRNIAAPLDPAAFADAVVQIYLDNAGDLELVAKNLESSDLNFSRYGDTFFEVGFTGGXTQPGT

SEQ ID NO: 74276 - protein, 126 aa, Gossypium hirsutum
  Clone ID: GOSHI-09MAY01-C1126_1.pep
MAISFGIYLLFLLNFFSFGAIFSSATSFTLENRCSFTVWPGSLTANGPPLGDGGFALAPGSSSRLHPPPGWSGRFWGRTGCNFDNSGSGKCVTGDCGGALKCNGGGIPPVSLIEFTLYGHDNKGLL

SEQ ID NO: 74277 - protein, 75 aa, Gossypium hirsutum
  Clone ID: LIB3585-044-P1-K1-C1.pep
HASAHASVFSSATSFTLENGCGVTVWPGSLTANGPPLGDGGFALAPGLLSRLHPSPGWSGRFWVLTGCNFLNSGF

SEQ ID NO: 74278 - protein, 423 aa, Gossypium hirsutum
  Clone ID: GOSHI-09MAY01-C1096_1.pep
MRDVHFSREKAGKGVVLFFFWMLSLISLSCAARLSVSRQKLQVQNHLNRLNKPAVKTIQSPDGDIIDCVHLSRQPAFDHPFLKDHKIQMRPSYHPEGLFDENKVSDTEKPKKGSNPITQLWHMNGKCPDGTIPIRRTKEEDVLRASSVKRYGRKKHRAIPQPKSADPDLINESGHQHAIAYVEGDKYYGAKATINVWEPKIQQPNEFSLSQLWILGGSFGEDLNSIEAGWQVSPDLYGDNNTRLFTYWTSDAYQATGCYNLLCSGFIQINSEIAMGASISPVSAYRNSQYDISILVWKDPKEGHWWMQFGNDYVLGYWPSFLFSYLADSASMIEWGGEVVNSEPDGHHTSTQMGSGRFPEEGFGKSSYFRNIQVVDDSNNLKAPKGLGTFTEQSNCYDVQTGSNGDWGHYFYYGGPGKNPNCP

SEQ ID NO: 74279 - protein, 89 aa, Gossypium hirsutum
  Clone ID: uC-gsflmaxxa060e11b1.pep
MRDVHFSREKAGKGVVLFFFWMLSLISLSCAARLSVSRQKLQVQNHLNRLNKPAVKTIQSPDGDIIDCVHLSRQPAFDHPFLKDHKIQM

SEQ ID NO: 74280 - protein, 128 aa, Gossypium hirsutum
  Clone ID: GOSHI-09MAY01-C1056_1.pep
MSWAGPEDIYLSTSLASYLDRKLLVLLRDGRKLMGTLRSFDQFANAVLEGACERVIVGDLYCDIPLGLYVIRGENVVLIGELDLEREELPPHMTHVSVAEIRRAQNAERHATDLKGTLRKRMEFLDLD

SEQ ID NO: 74281 - protein, 54 aa, Gossypium hirsutum
  Clone ID: LIB3828-027-Q6-N6-G2.pep
KKFIVPGFISEPSFLGGIGMVPNDMSNNVSPDAHYTYMHTYIYRFLVHFTYQLN

SEQ ID NO: 74282 - protein, 80 aa, Gossypium hirsutum
  Clone ID: LIB3165-050-Q1-K1-B12.pep
ISSGPAQDIDHFFFGLSKKNYAKNTPFKYQLPKYGIGYSNSSLLKLSRSSRNLTNKTPPRKTKATQSRKYHELSKNQIFQ

SEQ ID NO: 74283 - protein, 213 aa, Gossypium hirsutum
  Clone ID: GOSHI-09MAY01-C1046_1.pep
MAWITRFLTAVAFLAVGIIFSPETFGSKSDGTKSPNLSSFIKLAHLLSFSTAWGAALWVTFIGGIIMFKNLPRHQFGNLQSKMFPAYFSMVGVCCAISVAAFGYLHPWKSATMPEKYQLGFLVSAFAFNLSNLFVFTPMTIEMMKQRHKVEREANIGDEIGWSKNQEAAKTNPKLAAMNKKFGMIHGLSSLANIMSFGSLAMHSWFLAGKLNL

SEQ ID NO: 74284 - protein, 170 aa, Gossypium hirsutum
  unsure (1)..(170): unsure at all Xaa locations
  Clone ID: LIB3829-023-Q6-K6-F5.pep
AVAFLAVGIMXAPETFGSKSDGTKSPNLSSFFXFFHLLSFSGGGGAALWVTFIGGIIMFKNLPRHQFGNLQSKMFPAYFSMVGVCCAISVAAFGYLHPWKSATMPEKYQLGFLVSAFAFNLSNLFVFTPMTIEMMKQRHKVEREANIGDEIGWSKNQEAAKTNPKLAAMN

SEQ ID NO: 74285 - protein, 58 aa, Gossypium hirsutum
  Clone ID: GOSHI-09MAY01-C1076_10.pep
PTRPIVNVLRKADLSFCLQLNRVALCCCFLIFLLLRLEHMLSGISIQMSLAQEESTDS

SEQ ID NO: 74286 - protein, 72 aa, Gossypium hirsutum
  Clone ID: GOSHI-09MAY01-C1076_6.pep
MVSLATDQWPAQIGDQWSADMVQPPISGVPAGNWGDQVAVAVTSDVWDAAAPPAQTPGAPVDVSAPAATGWE

SEQ ID NO: 74287 - protein, 87 aa, Gossypium hirsutum
  Clone ID: GOSHI-09MAY01-C1076_5.pep
QGMFYGAPAVITFRIPTKAALQEAYSTPILPLDVLAERPPEKKFDWAKRLLAKYGSQISVISIVVLFIYLIVTPSKSSAAKASKKKR

SEQ ID NO: 74288 - protein, 161 aa, Gossypium hirsutum
  Clone ID: GOSHI-09MAY01-C1076_4.pep
MAATTVPAAARQLSPKEADIQMMLAAEVHLGTKNCDFQMERYVFKRRNDGIYIFNLGKTWEKLQLAARVIVAIENPQDIIVQSARPYGQRAVLKFAQYTGCHAIAGRHTPGTFTNQLQTSFSEPRLLILTDPRTDHQPIKEAALGNIPTIAFCDTDSPMRY

SEQ ID NO: 74289 - protein, 137 aa, Gossypium hirsutum
  Clone ID: GOSHI-09MAY01-C1076_3.pep
FLSIGCLFSLLARMVLQMRGTIAPGQKWDVMVDLFFYREPEEAKQQEEEEAIAAPDYGLPAADYGMGALAADQWPAQIGDQWSADMVQAPISGVPAGNWGDQVAVAVTSDVWDAAAPPAQTPGAPIDVSAPAATGWE

SEQ ID NO: 74290 - protein, 307 aa, Gossypium hirsutum
  Clone ID: GOSHI-09MAY01-C1076_2.pep
MATATVPAAARQLSPKEADIQMMLAAEVHLGTKNCDFQMERYVFKRRNDGIYIINLGKTWEKLQLAARVIVAIENPQDIIVQSARPYGQRAVLKFAQYTGCHAIAGRHTPGTFTNQLQTSFSEPRLLILTDPRTDHQPIKEAALGNIPTIAFCDTDSPMRYVDIGIPANNKGKHSIGCLFWLLARMVLQMRGTIAPGQKWDVMVDLFFYREPEEAKQQEEEEAVAAPDYGLPAADFGMSALGTDQWPSQMGDQWSADVVQPPISGVPAINWGDQVAVSADVWDPASAPPQIPGPGIDVSAPAPTGWE

SEQ ID NO: 74291 - protein, 195 aa, Gossypium hirsutum
  Clone ID: GOSHI-09MAY01-C1076_1.pep
MATLMTNLLLTACIALFLVSAATAVGDSPFIIAHKKASLTRLKSGAECVSVSIDIYNQGFSTAYDLSLVDYSWPQDAFDVISGNISQSWEKLDAGGILSHSFELEAKKQGMFYGAPAVISFRIPTKAALQEAYSTSILPLDVLSEIPPEKKFEWAKRLLAKYGSQVSVISIVGLFIYLMVTPSKSSGLKASKKKR

SEQ ID NO: 74292 - protein, 93 aa, Gossypium hirsutum
  Clone ID: LIB3146-046-Q1-K1-C11.pep
PIKEAALGNIPTIAFCDTDSPMRYVDIGIPANNKGKHSIGCLFWLLARMVLQMRGTIAPGQKWDVMVDLFFYREPEEAKQQEEEEAIAAPDYG

SEQ ID NO: 74293 - protein, 111 aa, Gossypium hirsutum
  Clone ID: uC-gsflnu33B091b09b1.pep
PRVRPRVRKLELVARVTVAIENPQDIIDQSARPYGQRAVLKFAQYTGCHAIAGRHTRGTFTNQLQTSCREPHLLILTDAMADHPPSQERVLRAVPTIALTNTDSPTGVDPT

SEQ ID NO: 74294 - protein, 103 aa, Gossypium hirsutum
  Clone ID: LIB3166-018-P1-K1-D12.pep
MKSTSIATATVPAAARQLSPKEADIQMMLAAEVHLGTKNCDFQMERYVFKRRNDGIYIINLGKTWEKLQLAARVIVAIENPQDIIVQSARPYGQRAVLKFAQY

SEQ ID NO: 74295 - protein, 230 aa, Gossypium hirsutum
  Clone ID: GOSHI-09MAY01-C1016_1.pep
NRWAEMFHCMIARTSTTDVISNGMGGTRNGALQLMNAELQILSPLVPVREVSFLRFCKQHAEGVWAVVDVSVDTIKESTTFVTCRRLPSGCVVQDMPNGYSKAIWVEHAEYDESQVHQLYRPLLSSGVGFGAQRWVAALQRQCECLAILMSSTVPTRDHTAITASGRPSMLKLAQPMTDNFCAGVCASTGHKWNKPYARNVDQDVRVMTRKSIDDPGEPPGIVLSAATSV

SEQ ID NO: 74296 - protein, 203 aa, Gossypium hirsutum
  Clone ID: GOSHI-09MAY01-C1376_1.pep
MATKVYIVYYSMYGHVEKLAEEIKKGAASVEGVEAKLWQVPETLSDEILGKMSAPPKSDVPIITPHDLPEADGFIFGFPTRFGMMSAQFKAFMDATGGLWRTQQLAGKPAGIFYSTGSQGGGQETTPLTAITQLVHHGMIFVPIGYSFGAGMFEMEQVKGGSPYGAGTYAGERTRMPSELELAQAFHQGKYIAGITKKLKTAA

SEQ ID NO: 74297 - protein, 66 aa, Gossypium hirsutum
  Clone ID: LIB3585-023-P1-K1-C4.pep
SNCGIHLVQVPETLSDEILGKMSAPPKSDVPIITPHDLPEADGFIFGFPTKIGMMSAQFKAFMDAT

SEQ ID NO: 74298 - protein, 99 aa, Gossypium hirsutum
  Clone ID: GOSHI-09MAY01-C1366_1.pep
MAFTWGSSLRITLLLLLIAAIGFACFTLPVEKILKDFLLWVDKDLGPWGPLVLAVAYIPLTVLAVPASVLTLGGGYLFGLPVGFVADSIGATLGAGAAF

SEQ ID NO: 74299 - protein, 78 aa, Gossypium hirsutum
  Clone ID: GOSHI-09MAY01-C1336_8.pep
VLQFAGIEDVFTSSRGSTKTLGNFVKATFECLLKTYGFLTPDFWKETRFTRSPFQEYTDLLGKPSKTLVLEDVERVDV

SEQ ID NO: 74300 - protein, 228 aa, Gossypium hirsutum
  Clone ID: GOSHI-09MAY01-C1336_4.pep
PRVRPRVRKAGKITSLEQIYLHSLPIKEYQIIDQLVGPSLKDEVMKITPVQKQTRAGQRTRFKAFVVVGDGNGHVGLGVKCSKEVATAIRGAIILAKLSVIPVRRGYWGNKIGKPHTVPCKVTGKCGSVTVRMVPAPRGAGIVAARVPKKVLQFAGIEDVFTSSRGSTKTLGNFVKATFECLLKTYGFLTPDFWKETRFTRSPFQEYTDLLGKPAKTLVLEDAERLDV

SEQ ID NO: 74301 - protein, 215 aa, Gossypium hirsutum
  Clone ID: GOSHI-09MAY01-C1336_2.pep
MAERGGGERGAFRRGFGGGRGDRGPRGRRRGRKDEEEKWVPVTKLGRLVKSGKITSLEQIYLHSLPIKEYQIIDQLVGPSLKDEVMKITPVQKQTRAGQRTRFKAFVVVGDGNGHVGLGVKCSKEVATAIRGAIILAKLSVIPVRRGYWGNKIGKPHTVPCKVTGKCGSVTVRMVPAPRGAGIVAAWVPKKVLQFAGIEDGFTPSRGSTMTLGTL

SEQ ID NO: 74302 - protein, 206 aa, Gossypium hirsutum
  Clone ID: GOSHI-09MAY01-C1336_1.pep
PRPYQGVAGGGELVGPSLKDEFMKITPVQKQTRAGQRTRFKAFVVVGDGNGHVGLGVKCSKEVATAIRGAIILAKLSVIPVRRGYWGNKIGKPHTVPCKVTGKCGSVTVRMVPAPRGAGIVAARVPKKVLQFAGIEDVFTSSRGSTKTLGNFVKATFECLLKTYGFLTPDFWRETRFTRSPFQEYTDLLGKPSKTLVLEDVERVDI

SEQ ID NO: 74303 - protein, 106 aa, Gossypium hirsutum
  unsure (1)..(106): unsure at all Xaa locations
  Clone ID: AI055020.1.pep
MAERGGGERGAFRRGFGGGRGDRGPRGRRRGRKDEEEKWVPVTKLGRLVKAGKITSLEQIYLHSLPIREYQIIDNSSALTEDEXMKIXXVQKQTAPGNDTLKASSS

SEQ ID NO: 74304 - protein, 81 aa, Gossypium hirsutum
  Clone ID: AW186848.2.pep
VEDLSIYVLLACELMFHNMIACFLSSLNSKEYGSFVNPKDWLEQALQNLSRPHFLKKFHMFHPVMKNIGLGELGLKSSRAE

SEQ ID NO: 74305 - protein, 55 aa, Gossypium hirsutum
  Clone ID: uC-gsronu33B047b07b1.pep
MPGLVNLVLLKGPPLFFFFFFFFFFFFFFFFFFFFFFFFFFFFFFFFFFFFFFLG

SEQ ID NO: 74306 - protein, 91 aa, Gossypium hirsutum
  Clone ID: AI726832.1.pep
RGAGIVAARVPKKVLQFAGIEDVFTFSRGSTKTFGNFVKATFECFLKTYGFLTPDFWRETRFTRSPFQEYTDLLGNPSKTLVLEDVERVDI

SEQ ID NO: 74307 - protein, 61 aa, Gossypium hirsutum
  Clone ID: LIB3145-040-Q1-K1-B10.pep
MVELLVISDYALILECKMQATFECLLKTYGFLTPDFWKETRFTRSPFQEYTDLLGKPTKTL

SEQ ID NO: 74308 - protein, 103 aa, Gossypium hirsutum
  unsure (1)..(103): unsure at all Xaa locations
  Clone ID: uC-gsronu33b112h10b1.pep
MAERGGGERGAFRRGFGGGRSDRGPRGRRRGRKDEEEKWVPVTKLGRLVKSGKITSLEQIYLHSLPXKEYQIIDQTRWPFTKDEVMKITPVQKQTRXGQRTRL

SEQ ID NO: 74309 - protein, 71 aa, Gossypium hirsutum
  unsure (1)..(71): unsure at all Xaa locations
  Clone ID: LIB3189-008-P1-K1-A1.pep
MAERGGGEHGAFKRGFGGGRSDRGPKCMRRGRKDXEEKWVPVTKLGRLFKAGKITSLEQIXLHSFPIKEYQ

SEQ ID NO: 74310 - protein, 67 aa, Gossypium hirsutum
  unsure (1)..(67): unsure at all Xaa locations
  Clone ID: LIB3147-049-Q1-K1-A9.pep
TSSRGSTKTLGNFVKATFECLLKTXGVLTPDFWKETRFTRSPFQEYTDLMGKPSKTLVLYDAERVDL

SEQ ID NO: 74311 - protein, 88 aa, Gossypium hirsutum
  Clone ID: GOSHI-09MAY01-C1286_3.pep
LAHEADGSVRFGHGDGSAYLFDPDIYTDGRISVQGIDGVLFPLEEKAKEEFCTIKVATVKPRRGKLLEAACRMLVAIGQDSRFTSCRL

SEQ ID NO: 74312 - protein, 313 aa, Gossypium hirsutum
  unsure (1)..(313): unsure at all Xaa locations
  Clone ID: GOSHI-09MAY01-C1286_2.pep
MEIMGFSLLFKFLLLLSGFGVSMALQETPLVAKNLGQISSNSVLVALLDSHYTELAELVEKALLLQSLEESVGKHNITIFAPKNEALERNLDPEFKRFLLEPGNLKSLQTLLLYHIVPTRIEPHSWPNSTSGSIIHRTLSNHNVELSSEDSMGVKFIGSAKVINPNAVNRPDGVIHGIEQLLIPQSVQQDFNSRRNLRSISAVKPEGAPEVDPRTHRLKKPAPPVKPGSPPVLPIYDAMAPGPSLAPAPAPGPGGPHHHFNGMRQVKDFIQTLIQYGGYNEMADILVNLTSLATEMGRLVSRGYVXTVLAPND

SEQ ID NO: 74313 - protein, 486 aa, Gossypium hirsutum
  Clone ID: GOSHI-09MAY01-C1286_1.pep
QPDPALFLGGDFLHFVNYILHLSPPVRPRVRFNSLLLLLLLLLQISCSRFSLALQENSSATVRSGQSSSNSVLVALLDSHYTELAELVEKALLLQTLEETVGKHNITIFAPKNEALERDLDPEFKRFLLEPGNLKSLQTLLLYHIVPARIDRHSWPKSTSALTHHFTLSNERVELSGDDSSGEKFIGSAKVISSNAVDRPDGVIHGIEQLLIPRSVQQDFNNRRSLRSISAVKPEGAPEVDPRTHRLKKPAPPVKPGAPPVLPIYDAMAPGPSLAPAPAPGPGGPHHHFNGMRQVKDFIQTLIQYGGYNEMADILVNLTSLATEMGRLVSEGYVLTVLAPNDEAMAKLTTDQLSEPGAPEQIIYYHIIPEYQTEESMYNAVRRFGKVSYDTLRLPHKVSAQEADGSVRFGHADGSAYLFDPDIYTDGRISVQGIDGVLFPPEEKTKEEKKTIKVATAKPRRGKLLEVACRMLVAIGQDSHFSTCQI

SEQ ID NO: 74314 - protein, 93 aa, Gossypium hirsutum
  Clone ID: uC-gsflnu33B139d04b1.pep
DTFAIKLNLTWVAFVKGRVFSQGYDITDLAPIDKAMAKLTTDQLSEPGAAEQTIYYHIMPEYQTEESMYNAARRLGKVSNDTSRLPDKELAKE

SEQ ID NO: 74315 - protein, 106 aa, Gossypium hirsutum
  Clone ID: GOSHI-09MAY01-C1246_1.pep
MAKVVDATGEPIPTSSVLMSSAKHIEIKCMSENVEFLKCKKKDPNPEKCLDKGRQATRCALGVLKDLYQRCKDPMEAYVGCMYYYTNEFDLCRKEQQAFEKACPLD

SEQ ID NO: 74316 - protein, 169 aa, Gossypium hirsutum
  unsure (1)..(169): unsure at all Xaa locations
  Clone ID: GOSHI-09MAY01-C1276_31.pep
MNICSNYLPSSLTTLHQLEDIVRKDKLVVSTSCSLLHTAVDLVNETKLDDEIKSWLAFAAQKVVEVNALAKALAGQKDEAFFAANAAAQASRKSSPRVTNEAVQKAAAALKGSDHRRATNVSARLDAQQKKLNLPVLPTTTIGSFPQTLELRRVRREFKAXKISEEDYC

SEQ ID NO: 74317 - protein, 109 aa, Gossypium hirsutum
  Clone ID: GOSHI-09MAY01-C1276_28.pep
MVKFPVINMEKLNGEERAATMELIKDACENWGFFEVLNHGIPYDFMDKIESLTKEHYKKCMEQRFKELVASKALEGLQAEVTDMDWESTFYLRHLPELNMAEIPDLTDE

SEQ ID NO: 74318 - protein, 207 aa, Gossypium hirsutum
  Clone ID: GOSHI-09MAY01-C1276_27.pep
AFFLVTLLIFNSGLIIVPISLGRALFNAIPLLPITHGIKCNDLYAFVIGSYVIWTAIAGARYSIEHIKTKRAAVLFGQISKWSAIVVKSSMLLSIWIFGIPVLIGLLFELLVIVPMRVPVDESPVFLLYQDWALGLIFLKIWTRLVMLDHMMPLVDESWRVKFERVREDGFSRLQGLWVLREIVFPIIMKLLTALCVPYVLARGVFP

SEQ ID NO: 74319 - protein, 138 aa, Gossypium hirsutum
  Clone ID: GOSHI-09MAY01-C1276_26.pep
VKKLDDEIKSWLAFAAQKVVEVNALAEALAGQKDEAFFTANASAQASRKSSPRVTNEAVQKAAAALKGSDHRRATNVTARLDAQQKKLNLPVLPTTTIGSFPQTLELRRVRREFKANKISEVDYGKAIKEGIKKVADL

SEQ ID NO: 74320 - protein, 163 aa, Gossypium hirsutum
  Clone ID: GOSHI-09MAY01-C1276_22.pep
QIDEAALREGLPLRKSEHAFYLKWAVHSFRITNCGVKDTTQIHTHMCYSNFNDIIHSIIDMDADVITIENSRSDEKLLSVFREGVKYGAGIGPGVYDIHSPRIPSTEEIADRINKMLAVLETNILWVNPDCGLKTRKYEEVKPALNNMVAAAKQLRTKLASAK

SEQ ID NO: 74321 - protein, 135 aa, Gossypium hirsutum
  Clone ID: GOSHI-09MAY01-C1276_21.pep
LSCPPTRPPTRPGASYTVASAALLLTLNLLFFTLVSSTYVPCPPPPKSHKPTHTSPPSAPKQPATCPKDTLKLGVCADLLGSVRVVVGPSRTKCCSLISGSADLDAAVCLCTAIKANVLRVNLNVPVSLSLLLNS

SEQ ID NO: 74322 - protein, 198 aa, Gossypium hirsutum
  unsure (1)..(198): unsure at all Xaa locations
  Clone ID: GOSHI-09MAY01-C1276_20.pep
PSVRPRVRDFETCYQIALAIKDEVEDLEKAGIPXVRIDEAALREGLPLRKSEHAFYQKWAVHSFRITNCGVQDITQIHTHMCYSNFNDIIHSIIDMDADVITIENSRSDEKLLSVFREGVKYGAGIGPGVYDIHSPRIPSTEEIADRINKMLAVLETNILWVNPDCGLKTRKYAEVKPALSNMVAAAKLLRTQLASAK

SEQ ID NO: 74323 - protein, 282 aa, Gossypium hirsutum
  unsure (1)..(282): unsure at all Xaa locations
  Clone ID: GOSHI-09MAY01-C1276_19.pep
DVLVHESLREXDMVEYFGEQLSGFAFTVNGWVQSYGSRCVKPPIIYGDVSRPKPMTVFWSSTAQSMTKRPMKGMLTGPVTILNWSFVRNDQPRFETCYQIALAIKDEVEDLEKAGINVIQIDEAALREGLPLRKSEHAFYQKWAVHSFRITNCGVQDITQIHTHMCYSNFNDIIHSIIDMDADVITIENSRSDEKLLSVFREGVKYGAGIGPGVYDIHSPRIPSTEEIADRINKMLAVLDARVGGRVPDCGLKTRKYAEVKPALSNMVAAAKLLRTQLASAK

SEQ ID NO: 74324 - protein, 211 aa, Gossypium hirsutum
  Clone ID: GOSHI-09MAY01-C1276_18.pep
CSLLHTAVDLVNETKLDDEIKSWLAFAAQKVVEVNALAKALAGQKDEAFFSANAAAQASRKSSPRVTNEAVQKAAAALKGSDHRRATNVSARLDAQQKKLDLPILPTTTIGSFPQTLELRRVRREFKANKISEDDYIKAIKEEIKKVVDLQEELDIDVLVHGEPERNDMVEYFGEQLSGFAFTVNGWVQSYGSRCVKPPIIYGDVSRPKPM

SEQ ID NO: 74325 - protein, 226 aa, Gossypium hirsutum
  Clone ID: GOSHI-09MAY01-C1276_15.pep
PASAQRPGCVRTYFADLTTEAYKTLVGLKGVTAYGLDLVRGTQTIDLVKAGFPEGKYLFAGVVDGRNIWANDLASSLSTLQQLEAIVGKDKLVASTSCSLLHTAVDLVNETKLDDEIKSWLAFAAQKVVEVNALAKALAGQKDEAFFAANAAAQASRKSSPRVTNEAVQKAAAALKGSDHRRATNVSARLDAQQKKLNLPVLPTTTFGSLPPPLGSGQFFLNPWLP

SEQ ID NO: 74326 - protein, 318 aa, Gossypium hirsutum
  unsure (1)..(318): unsure at all Xaa locations
  Clone ID: GOSHI-09MAY01-C1276_14.pep
MATFPVINLEKLNGDERSRIMEQIKDACENWGFFEVMNHGIPHDFMDTVERLTKEHYKKCMEQRFKELVASKALEGLEAEVTDMDWESTFHLCHLPESNMAEIPDLSDEYRKVMKEFAVKLEKLAEELVDLVCENIGLEKGYLKKAFYGAKGPTFGTKVSNYPPCPTPDKIKGLRAHTDAGGIILLFQDPVVGGLQLLKDGEWVDVPPLRHSIVXNLGDQLEVITNGKYKSVEHRVIAQTXDGTRMSLASFYNPGSDAVIYPAPALVEKEAEEKNKQVYPKFVFEEYMKLYAGLKFQAKEPRFEAMKAMEATAPIATA

SEQ ID NO: 74327 - protein, 171 aa, Gossypium hirsutum
  unsure (1)..(171): unsure at all Xaa locations
  Clone ID: GOSHI-09MAY01-C1276_13.pep
MASHIVGYPRMGPKRELKFALESFWDKKSSAEDLQKVAADLRSAIWKQMADAGIKYIPSNTFSYYDQVLDATSMLGAVPPRYGWNGGEIGFDTYFSMARGNASVPAMEMTKWFDTNYHFIVPELGPDVNFSYASHKAVDEYKEAKSLGVDTVPVLVXPVSYLLLSKPCKGV

SEQ ID NO: 74328 - protein, 133 aa, Gossypium hirsutum
  Clone ID: GOSHI-09MAY01-C1276_12.pep
PTRPGVLASAHARAHMCYSNFNDIIHSIIDMDADVITIENSRSDEKLLSVFREGVKYGAGIGPGVYDIHSPRIPSTEEIADRINKMLAVLETNILWVNPDCGLKTRKYAEVKPALSNMVAAAKLLRTQLASAK

SEQ ID NO: 74329 - protein, 412 aa, Gossypium hirsutum
  Clone ID: GOSHI-09MAY01-C1276_11.pep
AAQKVVEVNALAKALAGQKDEAFFTANASAQASRKSSPPRARPPVRKAAAALKGSDHRRATNVTARLDAQQKKLNLPVLPTTTIGSFPQTLELRRVRREYKANKISEDDYVKAIKEEIKKVVDLQEELDIDVLVHGEPERNDMVEYFGEQLSGFAFTVNGWVQSYGSRCVKPPIIYGDVSRPKPMTVFWSSTAQSMTKRPMKGMLTGPVTILNWSFVRNDQPRFETCYQIALAIKDEVEDLEKAGINVIQIDEAALREGLPLRKSEHAFYQKWAVHSFRITNCGVQDITQIHTHMCYSNFNDIIHSIIDMDADVITIENSRSDEKLLSVFREGVKYGAGIGPGVYDIHSPRIPSTEEIADRINKMLAVLETNILWVNPDCGLMTRKYAEVKPALSNMVAAAKLLRTQLASAK

SEQ ID NO: 74330 - protein, 167 aa, Gossypium hirsutum
  Clone ID: GOSHI-09MAY01-C1276_9.pep
LLWVVGRPPAGPERTGSDPRRAAFFLKWAVHSFRITNCGVQDTTQIHTHMCYSNFNDIIHSIIDMDADVITIENSRSDEKLLSVFREGVKYGAGIGPGVYDIHSPRIPSTEEIADRINKMLAVLETNILWVNPDCGLKTRKYAEVKPALNNMVAAAKLLRTQLASAK

SEQ ID NO: 74331 - protein, 452 aa, Gossypium hirsutum
  Clone ID: GOSHI-09MAY01-C1276_8.pep
EDIVGKDKLVVSTSCSLLHTAVDLVPASPPARPIKSWLAFAAQKVVEVNALAKALAGQKDEAFFAANAAAQASRKSSPRVTNEAVQKAAAALKGSDHRRATNVSARLDAQQKKLNLPVLPTTTIGSFPQTLELRRVRREFKANKISEDNYIKAIKEEIKKVVDLQEELDIDVLVHGEPERNDMVEYFGEQLSGFAFTVNGWVQSYGSRCVKPPIIYGDVSRPKPMTVFWSSTAQSMTQRPMKGMLTGPVTILNWSFVRNDQPRFETCYQIALAIKDEVEDLEKAGINVIQIDEAALREGLPLRKSEHAFYLKWAVHSFRITNCGVQDTTQIHTHMCYSNFNDIIHSIIDMDADVITIENSRSDEKLLSVFREGVKYGAGIGPGVYDIHSPRIPSTEEIADRINKMLAVLETNILWVNPDCGLKTRKYAEVKPALNNMVAAAKLLRTQLASAK

SEQ ID NO: 74332 - protein, 234 aa, Gossypium hirsutum
  unsure (1)..(234): unsure at all Xaa locations
  Clone ID: GOSHI-09MAY01-C1276_7.pep
MAKFPVINLEKLNGERAATMDLIKDACENWGFFEVLNHGIPYDFMDRVESLTKEHYKKCMEQRFKELVASKALEGLQAEVTDMDWESTFYLRHLPESNMAEIPDLTDEYRKVMKEFALKLEKLAEELLDLFCENLGLEKGYLKKAFYGAKGPTFGTKVSNYPPCPTPDKIKGLRAHTDAGGIILLFQDPQVGGLQLLKDGEWVDVPPWRHSIVVNLGDQLEVITHXKSKSVEHT

SEQ ID NO: 74333 - protein, 135 aa, Gossypium hirsutum
  Clone ID: GOSHI-09MAY01-C1276_6.pep
MASNTVASAALLLTLNLLFFTLVSSTYVPCPPPPKSHKPTHKSPPSAPKQPATCPKDTLKLGVCADLLGSVRVVVGPSRTKCCSLISGLADLDAAVCLCTAIKANVLGVNLNVPVSLSLLLNSCEKQMPAGYKCA

SEQ ID NO: 74334 - protein, 135 aa, Gossypium hirsutum
  Clone ID: GOSHI-09MAY01-C1276_5.pep
MASNTVASAALLLTLNLLFFTLVSSTYVPCPPPPKSHKPTHKSPPSAPEQPGTCPRDALKLGVCADLLGSVRVVVGPSRTKCCSLISGLADLDAAVCLCTAIKANVLGVNLNVPVSLSLLLNSCEKQMPAGYKCA

SEQ ID NO: 74335 - protein, 244 aa, Gossypium hirsutum
  unsure (1)..(244): unsure at all Xaa locations
  Clone ID: GOSHI-09MAY01-C1276_4.pep
RVKPPIIYGDVSRPKPMTAFWSSTAQSMTSRPMKGMLTGPVTILNWSFVRNDQPRFETCYQIALAIKDEAEDLEKAGINVIXIDEAALREGLPFRKSEHAFYLKWAVHSFRITNCGVKDTTQIHTHMCYSNFNDIIHSIIDMDADVITIENSRSDEKLLSVFREGVKYGAGIGPGVYDIHSPRIPSTEEIADRINKMLAVLETNILWVNPDCGLKTRKYAEVKPALNNMVAAAKLLRAQLASAK

SEQ ID NO: 74336 - protein, 449 aa, Gossypium hirsutum
  Clone ID: GOSHI-09MAY01-C1276_3.pep
MREVISIHIGQAGIQVGNSCWELYCLEHGIQPDGMMPSDTTVGACHDAFNTFFSETGSGKHVPRAIFVDLEPTVIDEVRTGTYRQLFHPEQLISGKEDAANNFARGHYTVGREIVDLCLDRVRKLADNCTGLQGFLVFNAVGGGTGSGLGSLLLERLSVDYGKKSKLGFTIYPSPQVSTAVVEPYNSVLSTHSLLEHTDVSVLLDNEAIYDICRRSLDIERPTYTNLNRLISQIISSLTTSLRFDGAINVDITEFQTNLVPYPRIHFMLSSYAPVISAAKAYHEQISVPEITSAVFEPSSMMAKCDPRHGKYMACCLMYRGDVVPKDVNAAVATIKTKRAVQFVDWCPTGFKCGINYQPPTVVPGGDLAKVQRAVCMISNNTAVAEVFARIDHKFDLMYAKRAFVHWYVGEGMEEGEFSEAREDLAALEKDYEEVGAEGVEDEEEPEDY

SEQ ID NO: 74337 - protein, 608 aa, Gossypium hirsutum
  Clone ID: GOSHI-09MAY01-C1276_2.pep
MASHIVGYPRMGPKRELKFALESFWDKKSSAEDLQKVAADLRSSIWKQMAAAGIKYIPSNTFSYYDQVLDATSMLGAVPPRYGWNGGEIGFDTYFSMARGNASVPAMEMTKWFDTNYHFIVPELGPDVNFSYASHKAVDEYKEAKALGVNTVPVLIGPVSYLLLSKPAKGVEKTFSLLSLLPKILPIYKEVISELKAAGASWIQFDEPTLVLDLDSHKLQAFTAAYDDLESTLSGLNVLIETYFADLTAEAYKTLIGLKGVTAYGLDLVRGAQTLDLVKSNFPKGKYLFAGVVDGRNIWANDLAASLSTLKELEAVVGKENLVVSTSCSLLHTAVDLVNETKLDDEIKSWLAFAAQKVVEVNALAKALAGQKDEAFFSANAAAQASRKSSPRVTNEAVQKAAAALKGSDHRRATNVSARLDAQQKKLNLPVLPTTTIGSFPQTLELRRVRREFKANKISEDDYVKAIKEEIKKVVDLQEELDIDVLVHGEPERNDMVEYFGEQLSGFAFTVNGWVQSYGSRCVKPPIIYGDVSRPKPMTVFWSSTAQSMTSRPMKGMLTGPVTILNWSFVRNDQPRFETCYQIALAIKDEVEDLEKAGINVIQIERLL

SEQ ID NO: 74338 - protein, 355 aa, Gossypium hirsutum
  Clone ID: GOSHI-09MAY01-C1276_1.pep
CTKRLTSWNACTPGVRVRDRRARAPTIGSCPQTLELRRVRREFKANKISEDDYIKAIKEEIKKVVDLQEHLRPDVLVHGEPERNDMVEYFGEQLSGFAFTVNGWVQSYGSRCVKPPIIYGDVSRPKPMTVFWSSTAQSMTARPMKGMLTGPVTILNWSFVRNDQPRFETCYQIALAIKDEVEDLEKAGINVIQIDEAALREGLPLRKSEHAFYLKWAVHSFRITNCGVQDTTQIHTHMCYSNFNDIIHSIIDMDADVITIENSRSDEKLLSVFREGVKYGAGIGPGVYDIHSPRIPSTEEIADRINKMLAVLETNILWVNPDCGLKTRKYAEVKPALNNMVAAAKLLRTQLASAK

SEQ ID NO: 74339 - protein, 168 aa, Gossypium hirsutum
  unsure (1)..(168): unsure at all Xaa locations
  Clone ID: AW187866.1.pep
GINVIQIDTGLVTNALSLIKTQCTSMGSWAFNSCTLHCCRVQESTHIHTLMCYSNFNDILHSIIYMDADMITIXNSRSHENLLSVFRERVNYGAGIGPGVYDIHSPTIPPTXEIADPIYKMLAVLXTNILWVNPHCGLNTPNYADVKPPLNNMVAAAYLLHNQLASST

SEQ ID NO: 74340 - protein, 174 aa, Gossypium hirsutum
  Clone ID: uC-gsronu33B178c11b1.pep
FRVRPRVRPRVRPRVRPMTVFWSSTAQSMTARPMKGMLTGPVTILNWSFVRNDQPRFETCYQIALAIKDEVEDLEKAGINVIQIDEAALREGLPLRKSEHAFYLKWAVHSFRITNCGVQDTTQIHTHMCYSNFNDIIHSIIDMDADVITIENSRSDEKLLSVFREGVKYGARIG

SEQ ID NO: 74341 - protein, 169 aa, Gossypium hirsutum
  unsure (1)..(169): unsure at all Xaa locations
  Clone ID: AW187869.1.pep
EQLSGFAFTVNGWVQSYGSRCVKPPIIYGDVSRPKPMTVFWSSTAQSMTKRPMKGMLTGPVTILNWSFVRNDQPRFETCYQIALAIKDEVEDLEKAGINVIQIDEAALRERLPLXKSEHAFYQKWAVHSFRITNCGVQDITQIHTHMCYSNFNDIIHSIIDMDADVLNI

SEQ ID NO: 74342 - protein, 139 aa, Gossypium hirsutum
  Clone ID: uC-gsflmaxxa047a07b1.pep
MASHIVGYPRMGPKRELKFALESFWDKKSSAEDLQKVAAGLRSSIWKQMADAGIKYIPSNTFSYYDQVLDTTAMLGAVPPRYGWNGGEIGFDTYFCMARGNAFLPGMEMTKWFDTNYHFIVSELGPDVRFFYASHKAGG

SEQ ID NO: 74343 - protein, 110 aa, Gossypium hirsutum
  Clone ID: uC-gsflmaxxa009a11b1.pep
GPTFGTKVSNYPPCTTPDKIKGLRAHTDAGGIILLFQDPQVGGLQLLKDGEWVDVPPLRHSIVINLGDQLEVITNGKYKSVEHRVIAHTDGDCMWIANLYNACIYCPVSR

SEQ ID NO: 74344 - protein, 171 aa, Gossypium hirsutum
  Clone ID: LIB3828-010-Q1-K6-H1.pep
MASHIVGYPRMGPKRELKFTLESFWDKKSSAEDLKKVAADLRSSIWKQMSGAGIKYIPSNTFSYYDQVLDTTSMLGAVPPRYNWTGGEIGYDTYFSMARGNASVPAMEMTKWFDTNYHFIVPELGPDVKFSYASHKAVDEFKEAKALGVDTVPVLIGPVSYLLLSKPAKGV

SEQ ID NO: 74345 - protein, 125 aa, Gossypium hirsutum
  Clone ID: LIB3584-031-P1-K1-F12.pep
PRVRPRVRPRVRPRVRIHSIIDMDADVITIENSRSDEKLLSVFREGVKYGAGIGPGVYDIHSPRIPSTEEIADRINKMLAVLETNILWVNPDCGLKTRKYAEVKPALNNMAAAAKLLRTQLASAK

SEQ ID NO: 74346 - protein, 142 aa, Gossypium hirsutum
  Clone ID: LIB3272-004-P1-K1-B9.pep
GPSRTKCCSLISGLADLDAAVCLCTAIKANVLEVDCPCVTPEVVLKASGHVDKFTDLMVKDEKTGTCYRADHLLKDFCNEKLQKDLTISAEKAAELKHVLATLDDLSAEALGAKIKEYGITAPDTKNPLSDPYPFNLMFQSK

SEQ ID NO: 74347 - protein, 145 aa, Gossypium hirsutum
  Clone ID: LIB3147-019-Q1-K1-H11.pep
MGVASLQDQYMASNTVASAALLLTLNLLFFTLVSSTYVPCPPPPKSHKPTHKSPPSAPKQPATCPKDTLKLGVCADLLGSVRVVVGPSRTKCCSLISGLADLDAAVCLCTAIKANVLGVNLNVPVSLSLLLNSCEKHMPAGYKCA

SEQ ID NO: 74348 - protein, 73 aa, Gossypium hirsutum
  unsure (1)..(73): unsure at all Xaa locations
  Clone ID: LIB3135-011-Q1-K1-H1.pep
SGRPRXRHAYDHAXAFLFHCLCSSIPAKSTCLLVTNVLKLISTVSSAMFGFFFYVFFFFWACLIWYFDMSRVR

SEQ ID NO: 74349 - protein, 31 aa, Gossypium hirsutum
  Clone ID: LIB3189-013-P1-K1-F1.pep
MASHIVGYPRMGPMRELKFALESFWDKKSSA

SEQ ID NO: 74350 - protein, 127 aa, Gossypium hirsutum
  unsure (1)..(127): unsure at all Xaa locations
  Clone ID: uC-gsflmaxxa040a01b1.pep
HSSAHASADAWVNLEKLNGERAATMDLIKDACENWGFFEVLNHGIPYEFMDRVESLTREHYKKCMEQRFKELVASKALEGLQAEVTDMDWESTFYLRHLPESNMAEIPDLTDEHKXVMKEFALKLEK

SEQ ID NO: 74351 - protein, 125 aa, Gossypium hirsutum
  Clone ID: LIB3197-052-Q1-M1-F10.pep
MASHIVGYPRMGPKRELKFTLESFWDKKSSAEDLKKVAADLRSSIWKQMSGAGIKYIPSNTFSYYDQVLDTTSMLGAVPPRYNWTGGEIGYDTYFSMARGNASVPAMEMTKWFDTNYHFIGPELG

SEQ ID NO: 74352 - protein, 49 aa, Gossypium hirsutum
  Clone ID: uC-gsronu33B104b08b1.pep
KILEFFFFFFFFFFFFFFFFFFFFFFFFFFFFFFFFLRKSIGLEGHIIC

SEQ ID NO: 74353 - protein, 112 aa, Gossypium hirsutum
  unsure (1)..(112): unsure at all Xaa locations
  Clone ID: uC-gsflmaxxa009a06b1.pep
LYLKKAFYGAKGPTFGSKVSNYPPCSTPDKIHGVQTLDEAKSNFPNGKYLFAGVXVDGRNIWANDLAASFSTMKELEAVAGKENPVVSTSCWLVHTAVDLANETKLDDEIKS

SEQ ID NO: 74354 - protein, 114 aa, Gossypium hirsutum
  Clone ID: LIB3165-030-P1-K1-A8.pep
PRVRLDIDVLVHGEPERNDMVEYFGEQLSGFAFTVNGWVQSYGSRCVLPTTTIGSFPQTLELRRVRREYKANKISEDDYVKAIKEEIKKVIAELKAAGALWVQFDEPTLVLDLD

SEQ ID NO: 74355 - protein, 108 aa, Gossypium hirsutum
  Clone ID: LIB3147-039-Q1-K1-B7.pep
LQQLEAIVGNYKLVASTSCSLLHTAVDLVNETKLDDEIKSWLAFAAQKVVEVNAAAQASRKSSPRVTNEAVQKAAAALKGSDHRRATNVSARLDAQQEKLNLPVLPTT

SEQ ID NO: 74356 - protein, 47 aa, Gossypium hirsutum
  Clone ID: LIB3493-055-P1-M1-A9.pep
GYTPQTRQYLTTHEHTKVLTHIVSYRLSMNQDINVKLFLTVTNLLNF

SEQ ID NO: 74357 - protein, 514 aa, Gossypium hirsutum
  Clone ID: GOSHI-09MAY01-C1266_1.pep
MAVAMSFRRLSSSIKSPTRPLFSGSSLYYMSTAAAEKEKARANRIHQLNAPLEEIDPEIATIIELEKARQWKGLELIPSENFTSLSVMQAVGSVMINKYSEGYPGARYYGGNEYIDMAESLCQTRALEAFGLDPAKWGVNVQSLSGSPANFQVYTALLKPHERIMALDLPHGGHLSHGYQTDTKKISAVSIFFETMPYRLNEGTGYIDYDQLEKSAVLFRPKLIVAGASAYARLYDYARIRKVCDKQKAIMLADMAHISGLVAAGVIPSPFEYADVVTTTTHKSLRGPRGAMIFFRKGLKEINKQGKEVMYDLEDKINQAVFPGLQGGPHNHTIAGLAVALKQVRTPEYKAYQEQVLSNCSKFSQRLLENGYELVSGGTENHLVLVNLRNKGIDGSRVEKVLESVHIAANKNTVPGDVSAMVPGGIRMGTPALTSRGFIEEDFEKVADFFDAAVKLALKIKAKTEGTKLKDFVATLQSDTYFQTEIAKLRQEVEEYAKQFPTIGFEKEAMKYKD

SEQ ID NO: 74358 - protein, 154 aa, Gossypium hirsutum
  unsure (1)..(154): unsure at all Xaa locations
  Clone ID: LIB3829-021-Q6-K6-C12.pep
RSRRGRPRGGLWGGXRKDSKRCNKQGKEVMYDLEDKINQAVFPGLQGGPHNHTIAGLAVAWGGVRTPEYKAYQEQVLSNCSKFSQRLLENGYELVSGGTENHLVLVNLRNKGIDGSRVEKVLESVHIAANKNTVPGDVSAMVPGGIRMGTPALT

SEQ ID NO: 74359 - protein, 141 aa, Gossypium hirsutum
  Clone ID: GOSHI-09MAY01-C1236_1.pep
MMSSSREREESLTFPTNPSSTSSPITVSDHLDRYLQDPSSHIGSASGSYSNEGPLAAETASPSNSDVEFGFSRHDFRQQSPISGTVQFYQRHVFLCYKSPSVWPPRIEAAEFDRLPRLLSAAVLARKADMIKETRLTICEG

SEQ ID NO: 74360 - protein, 57 aa, Gossypium hirsutum
  Clone ID: GOSHI-09MAY01-C2996_2.pep
KRIKLSAEKAIFVFVKNTLPPTAALMSAIYEENRDEDGFLYMTYSGENTFGSPLLLA

SEQ ID NO: 74361 - protein, 119 aa, Gossypium hirsutum
  Clone ID: GOSHI-09MAY01-C2996_1.pep
MAKSSFKLEHPLERRQAESGRIREKYPDRVPVIVEKAERSDIPDIDKKKYLVPSDLTVGQFVYVVRKRIKLSAEKAIFVFVKNTLPPTAALMSAIYEENKDEDGFLYMTYSGENTFGSP

SEQ ID NO: 74362 - protein, 118 aa, Gossypium hirsutum
  Clone ID: GOSHI-09MAY01-C2986_3.pep
MRFVISALFLFVVAAAYDPLDPNGNLTIKWDIVSWTPDGYVAVVTMNNFQMYRHIMSPGWTLGWTWAKKEVIWSMNGAQTTEQGDCSQFKGNVPHCCKKTPTVVDLLPGVPYNQQYSN

SEQ ID NO: 74363 - protein, 433 aa, Gossypium hirsutum
  Clone ID: GOSHI-09MAY01-C2986_1.pep
MKFFISVLFLFVLFSYAAAYDPLDPNGNVTIKWDIVSWTPDGYVAVVTMNNFQMYRHIMSPGWTLGWTWAKKEVIWSMVGAQTTEQGDCSKFKGNIPHCCKKTPTVVDLLPGVPYNQQFTNCCKGGVLAAWGQDPQSAVSAFQISVGLAGTSNKTVKLPKNFTLLGPGPGYTCGPAKVVPSTTFLTPDRRRKTQALMTWNVTCTYSQFLARKNPNCCVSFSSFYNETITPCPTCACGPRVRNNCVKSDSKFLKMVGLNTPRKDNAPLLQCTHHMCPVRVHWHVKLNYKEYWRVKVSITNFNYRMNYTLWSLVVQHPNLNNVTQVFSFDYKPLVPYESINDTGMFYGMKYYNDLLMEAGPLGNVQSEVLLRKDKDTFTFKQGWAFPRKVYFNGDECMLPPPDTYPFLPNSAHQHLSFTSFTFIAAMFFLFVTFW

SEQ ID NO: 74364 - protein, 177 aa, Gossypium hirsutum
  unsure (1)..(177): unsure at all Xaa locations
  Clone ID: LIB3584-048-P1-K2-H4.pep
CATGTEFQFRPRPTRPVTMNNFQMYRHIMSPGWTLGWTWAKKEVIWFMVGAXTTEQGVCSKFKGNIPHCCKKTPTVVDLLPGVPYNQQFTNCCKGGVLAAWGQDPQSAVSAFQISVGLAGTSNKTVKLPKNFTLLGPGPGYTCGPAKVVPSTTFLTPDRRRKTQALMTWNVTCTYSQ

SEQ ID NO: 74365 - protein, 148 aa, Gossypium hirsutum
  Clone ID: GOSHI-09MAY01-C2956_1.pep
MASKRINKELKDLQKDPPASCSAGPVGDDMFHWQATIMGPADSPFAGGLFLVSIHFPPDYPFKPPKVSFRTKVFHPNINSNGSICLDILKEQWSPALTISKVLLSICSLLTDPNPDDPLVPEIAHMYKTDRAKYESTARSWTQKHAMN

SEQ ID NO: 74366 - protein, 96 aa, Gossypium hirsutum
  unsure (1)..(96): unsure at all Xaa locations
  Clone ID: LIB3828-019-Q1-K6-G10.pep
QGWTLYEVLQYVPEHNWIAYEQALKAKLVIAKMAISGIVYSIGNXIAQCYEGKPXRSGLVGFTLHRSLSHYYYQFCEALFPFDDWWVVPAKLSLIK

SEQ ID NO: 74367 - protein, 117 aa, Gossypium hirsutum
  Clone ID: LIB3584-014-P1-K1-F1.pep
KNSHSHEPKKLLFPNGSKTLKASSSEVGGGHGDDGDGHDDVEKLSSRAINASIVLGFDTFVVSKLLIIDHDYWHGWTLYEVLQYVPEHNWIAYEQALKAKPVIAKMAIRGIVYSIGN

SEQ ID NO: 74368 - protein, 236 aa, Gossypium hirsutum
  Clone ID: GOSHI-09MAY01-C2916_1.pep
MATNEVKVLGSWPSPYAMRPRIALNLKSLTYEYIEEKLWEGKSELLLQSNPVYKKIPVLIHGDNKPICESLIIVQYIDEAWSSGPSILPSDPCERAVARFWAAYLDDKWFPAVKSIGVAKGEEAKKAAIAQVEAGLALMEEAYDKCSKGKGYFGGDEVGYLDIAFGSFLGWLRVTEKFNAMKLLDEGKTPGLVKWADRFCSHAAVKDVMPDTDKLAEFGKFVIAKIRAAGAAAEMH

SEQ ID NO: 74369 - protein, 140 aa, Gossypium hirsutum
  unsure (1)..(140): unsure at all Xaa locations
  Clone ID: uC-gsronu33B157c07b1.pep
MEEAYDKCSKGKGYFGGDEVLDFAFVCFFVLSYINFNKFYSLLFFLLYVFIIFLFFNTFLYFPYFLLYLXFITFLLFLFLISIFIFSFFLFTIIYLYFIIFIYFFIYFFLSILFLLYFFFILSSFSFFSYYFFFLFFSFF

SEQ ID NO: 74370 - protein, 114 aa, Gossypium hirsutum
  unsure (1)..(114): unsure at all Xaa locations
  Clone ID: LIB3197-014-P1-M1-D2.pep
MATNVWVLGSWPSAYAMRPRIALNLEGCDVRXXIXEKLWEGKSELLFQXXGVEMRXXVLIHGDNKPICESLIIVQYIDEAWXXRGVVFPSDPCERAVARFWAAYLDDEGFPAVK

SEQ ID NO: 74371 - protein, 56 aa, Gossypium hirsutum
  Clone ID: uC-gsronu33B114d03b1.pep
EPLALLLKCIITKISTSWMELMNILSLFLHFVMMNKDIYIYSSNKPFSLAIGLIGI

SEQ ID NO: 74372 - protein, 56 aa, Gossypium hirsutum
  Clone ID: GOSHI-09MAY01-C2906_1.pep
NSFLFPDSFHSSYCKAKECNRSFVSFVLFFPVLLKPLWEKECSRPCLKSNAMPGTT

SEQ ID NO: 74373 - protein, 364 aa, Gossypium hirsutum
  Clone ID: GOSHI-09MAY01-C2936_1.pep
MGPFAIAATVFAVLSLSYQLHGHGEKVERGLTVDGCDLFQGSWVYDESYPLYQSSSCSFIQNQFDCLKNGRPDKDYLKYRWQPTTCNLSRFNGEDMLSRIRGKSIMFVGDSLSLNQWQSLTCMLHTAVPHAQYKTITVQGLSTFTFLEYNAKVMFSRNAFLVDLVSLPIGRVLKLDSIEEGAKLWKGIDVLIFNTWHWWLHTGRKQPWDFIEEGNHTQVDMDRLVAYEKGLNTWAKWVDANVNTSKTIVFFQGVSPDHINSSDWGEPKAKNCEGQKEPIKGGDYPGGQHPAEKVVEKVLKTMSKPVYLLNVTTLSQLRKDGHPSVYGHGGHRDMDCSHWCLAGVPDTWNQLLYAALIKAELHSN

SEQ ID NO: 74374 - protein, 129 aa, Gossypium hirsutum
  Clone ID: GOSHI-09MAY01-C2886_1.pep
PGCRFTVNQRLGTYFYKGVLYGTVGFACGIIGQGIANLIMTAKRSMKKSEEDIPVPPLIKSAALWGVFLAVSSNTRYQIINGLERLVEASPLAKQVPPVAMAFTVGVRFANNIYGGMQFVDWARLSGVQ

SEQ ID NO: 74375 - protein, 72 aa, Gossypium hirsutum
  Clone ID: GOSHI-09MAY01-C2876_1.pep
RKNTSKVLRIRPEVGTDEDALTRVIVTRAEKDLKDVKELYYKRNSVPLDQAVAKDTSGDYKALLLTLLGKED

SEQ ID NO: 74376 - protein, 313 aa, Gossypium hirsutum
  unsure (1)..(313): unsure at all Xaa locations
  Clone ID: GOSHI-09MAY01-C2816_1.pep
NNIIGSGRTGTMYKGVLEDGTSLMIKRLQDSQHSDKEFTSEMATLGNVKHRNLVPLLGFCVAKKERLIVYRYMANGTLNDNLHPVDDANKAMEWSIRLKIGIGAAKGFAWLHHNCNPRILHRNISSKCILLDADFEPKISDFGLARLMNPIDTHLSTFVNGEFGDLGYVAPEYARTLVATPKGDVYSFGVVLLEWVTGEKPTHVSKAPESFKGSLVEWITQLSNDGKLQDAIDTSLLGXGVDNELFQFLKVACNCVLPPPKERPTMFEVYQLLRAIGERYNFTTEDEILMPSDTGDADYLEELIVAREVNESQ

SEQ ID NO: 74377 - protein, 250 aa, Gossypium hirsutum
  unsure (1)..(250): unsure at all Xaa locations
  Clone ID: GOSHI-09MAY01-C2806_1.pep
VPIFKLAMPDKLGMRYSGRXTVRPAPASSKKELAVELGVSVDAWWSDGWWEGVVTGVNSSGDDNFPGRPPPADLSMNIHKKGLRISRDWDGDHWIDIDARPDILSLISDVISPDMDTKVSMSTTIVMDAKHDGGTMPVEAVAAKIIAEGEKPELAFQDCFDNLVEDADCKEPASSKDEKDGDASDCKKPPPSENGKNADADDASTIHDKLNGMDGNDEINNNDDDEEGKIEAEDGKEQNSKSTELMEAAT

SEQ ID NO: 74378 - protein, 107 aa, Gossypium hirsutum
  Clone ID: uC-gsflmaxxa006a09b1.pep
PRVRPRVRPRVRDVQDEDGYGNLEEWVPIFKLAMPDKLGMRYSGRQTVRPAPTSSKKELAAELGVAVDAWRSDGWGKDAVNGSNSSGVHRPEEHRTSRGVRCAPSGP

SEQ ID NO: 74379 - protein, 80 aa, Gossypium hirsutum
  unsure (1)..(80): unsure at all Xaa locations
  Clone ID: GOSHI-09MAY01-C2836_3.pep
IPTIKSSFGSQKSGFFQNGFSMLSLTASGFVFNSRXFSIYARAATVKTLYDYTVKDIDGKDTPLSKXRGKVLLIANASPR

SEQ ID NO: 74380 - protein, 242 aa, Gossypium hirsutum
  unsure (1)..(242): unsure at all Xaa locations
  Clone ID: GOSHI-09MAY01-C2836_2.pep
MASMSFSATIPSPLLDFSQTKKNPVFSSSWPSMSFSIPSIKSSLGSSKSAFFQNGFSLPSLTASGFVFNSRSSGIYARAATDKTLYDYTVKDIDGKDTPLGKFKGKVLLIVNVASRCGLTTSNYSELSHIYDKYKNQGFEILAFPCNQFGGQEPGSNPDIKKFACTRFKAEFPIFDKVDVNGPNTAPVYQFLKSSAGGXFGDLIKWNFEKFLVDKNGXVVERYPPTTSPFQIEKDIQKLLAT

SEQ ID NO: 74381 - protein, 229 aa, Gossypium hirsutum
  Clone ID: GOSHI-09MAY01-C2836_1.pep
MVMEDNEGNKKRAREESEANSVPNTKLARVDSDNNKGPDSDSPEATRVEPDPDDGEDNLPETRHIPEELLNILDDSDPVSGPDPAIQGLDSVIRSFEEEILIPEQVALPETVLDSGESRPELGFLFEASDDELGLPPSLPAVEVEQRFETAFDVDEGGGSGGVGFGEMMGSEFPIPIYEPFEFGIGVDSDTNNNIHSNNTGDFVALGGLFEPAADISELTWRPESLSAL

SEQ ID NO: 74382 - protein, 60 aa, Gossypium hirsutum
  Clone ID: LIB3145-058-Q1-K1-A4.pep
LHKYTCGLDLVLSLKYQFLMVIIRHLFKNLPSICNLKKKKKKKKKKKKKQKKIKKIKKNK

SEQ ID NO: 74383 - protein, 201 aa, Gossypium hirsutum
  unsure (1)..(201): unsure at all Xaa locations
  Clone ID: GOSHI-09MAY01-C2826_1.pep
SPEIHAQNVDKLKVVAESLANSSVKAQKRISDHRLQKEEALTVRVVKANEPDEREKEIVAEISELEKQRDQLEAELKKVHISLVAANARLHNVREERDHFYEANDQIVAHLKTKEDELSKSISACKVKAKVLHTWINFLEDTWLLQSSYVETKNKQIVEELERTEEYFVNFGHNPLFTLQKELRPLINRFRXFVENLKKLS

SEQ ID NO: 74384 - protein, 105 aa, Gossypium hirsutum
  Clone ID: LIB3584-012-P1-K1-F1.pep
KVLHTWINFLEDTWLLQSSYVETKNKQVVEELERHEDYFVNFAITLLSAYKKELGPSISRISKFVENLKKLSESARNDDSKESNPRKHLEEEYLGYETKIITIFS

SEQ ID NO: 74385 - protein, 64 aa, Gossypium hirsutum
  Clone ID: GOSHI-09MAY01-C2556_2.pep
KINGHYGVESFIITHFREEPYDVMDLSLESIIILRSNAKLQAGIWGYPFSFAANVFTYSPHCHI

SEQ ID NO: 74386 - protein, 124 aa, Gossypium hirsutum
  Clone ID: LIB3584-004-P1-K1-F5.pep
KINGHYGLESFIIKPFREKPYHVMVLSLESIIILQNNAKLQAGIWGYPFFFSANVFTYSPHCHIPPFNYSYSCHQESFYGDMGRTQKLTSNRQIFYTSDWDYIWAHKGSANQVANSGRVGGRVG

SEQ ID NO: 74387 - protein, 326 aa, Gossypium hirsutum
  Clone ID: GOSHI-09MAY01-C2576_1.pep
MDTGGSSFQPDVAEQILQIPLAETEQEDLQVWRGEPTGEFSVRSAYKLLHGSNLDPNDLLLQTETKNFYNKLWKLHIPSKIQMTIWRISWDFIPSFVNLKIKRVVMNTLCPRCGCAEENSWHIFIQCPGFLIEVMKSSFNFSVVAFGSFGLAEIILHSSDNLQQIHKRGWTFIHFDAAYDRLEFRSASGIIVRNENREILASQAVIHSNIADPFTAEAYAGLHAIKLGIRLGVNKLTVLGDSKTVIKKCQSFFTDKSVIGAIITDIQSLKNRFQETEFTFVPKAQNIYAHTIANEALRRRESFYLETAVPEVVRRTVGNLWPNPSD

SEQ ID NO: 74388 - protein, 127 aa, Gossypium hirsutum
  Clone ID: uC-gsronu33B145e03b1.pep
VPWVFDRGNEEQLQLFCCSLWFIWFSRNHLIYGKRLMSGSEIARKISVYITELAVTKGRNLTLHSSGNLQQIYKRGWTSIHFDAASNAWGLDRLPYNSTEREQRDSCITGSHSLQHRRSIRKSGRTR

SEQ ID NO: 74389 - protein, 176 aa, Gossypium hirsutum
  Clone ID: LIB3584-003-P1-K1-H9.pep
LAPDAIEEVQEDSSLFKNLLQELMQKEGCPLPVYTTTRSGEAHASMFVSSVEVKGEAFTGQGARSKKQAEFLAAKVAYTKLKECKSNKVSTNITPAYHEQEVHVVSSSHSPTNVNAGTEQNLGSKSGSLLNSSSTLGADRQDDGVNVTFMDHHSAQFPQPEMTTDESSPSSLILSD

SEQ ID NO: 74390 - protein, 59 aa, Gossypium hirsutum
  Clone ID: LIB3135-055-Q1-K1-E12.pep
CEVEGPPHASRFRCKVTIDEKTYEGLEFFPTIKEAEHAAARVALSCLAPDAIEEVQVTD

SEQ ID NO: 74391 - protein, 217 aa, Gossypium hirsutum
  unsure (1)..(217): unsure at all Xaa locations
  Clone ID: GOSHI-09MAY01-C2486_2.pep
MGLQLWETLKEEITAYTGLSPATFFTGGALLWAIYYVVTGLFGSSDDHHQRSRAFEEQMEPLPPPVQVGEISEKELKQYDGSDPKKPLLMAIKGQIYDVSHSRMFYGPGGPYALVAGKDASRALAKMSFXKKRSGRLHIRGLCILNGHLXEWEFKFMSKYVKVGTIKKTTVSVTEGDASGEASGAAETDTKPTEDGASQTTVTGSEEKSSPADTKEE

SEQ ID NO: 74392 - protein, 218 aa, Gossypium hirsutum
  Clone ID: GOSHI-09MAY01-C2486_1.pep
MALQLWETLKEAITAYTGLSPATFFTVLALLWAVYYVATGLFGSSDDHIHQRSTAFEEQMEPLPPPVQLGEITEEELKQYDGSDSKKPLLMAIKGQIYDVSQSRMFYGPGGPYALFAGKDASRALAKMSFEEKDLTGDISDLGPFELDALQDWEYKFMSKYVKVGSIKKTMVPVTEGDASGEASGAAETDTKQTEDGPSQTPVTESEEKSSPADTKEE

SEQ ID NO: 74393 - protein, 201 aa, Gossypium hirsutum
  Clone ID: GOSHI-09MAY01-C2456_1.pep
PRVRAALQVALAQMEYQLPRLTKMWTDLERQAGGKVKGMGEKQIEVDKRILRTQIGVLKKELESVRKHRKQYRNRRFSVPVPVVSLVGYTNAGKSTLLNQLTGANVLSEDRLFATLDPTTRRVQMKNGSEFLLTDTVGFIQKLPTTLVAAFRATLEEISESSLLVHVVDISHPLAEQQIDAVEKVLAELDVSEIPKLMVWN

SEQ ID NO: 74394 - protein, 110 aa, Gossypium hirsutum
  Clone ID: LIB3146-055-Q1-K1-F8.pep
HASGQAGGKVKGMGEKQMEVDKRILRTQIGVLKKELESVRKHRKQYRNRRFSVPVPVVSLVGYTNAGKSTLLNQLTGANVLSEDRLFATLDPTTRRVQMKNGSEFLLTDT

SEQ ID NO: 74395 - protein, 243 aa, Gossypium hirsutum
  Clone ID: GOSHI-09MAY01-C2476_2.pep
MGRGRVELKRIENKINRQVTFAKRRNGLLKKAYELSVLCDAEVALIIFSNRGKLYEFCSSSSMMKTLERYQKCSHGAPETNVSTREALELSSQQEYLKLKARYEALQRSQRNLLGEDLGPLSTKELESLERQLDSSLKLIRSTRTQYMLDQLTDLQRKEHLLNEANKNLKQRLMEGYQVHSLQLNPNADDVGYGRQPTHQPQGDVFFHPLDCEPTLQIGYQPDTISAVTGGPSVNNYMTGWLP

SEQ ID NO: 74396 - protein, 246 aa, Gossypium hirsutum
  Clone ID: GOSHI-09MAY01-C2476_1.pep
MGRGRVELKRIENKINRQVTFAKRRNGLLKKAYELSVLCDAEVALIIFSNRGKLYEFCSSSSMIKTLERYQKCNYGAPEPNVSSREAALELSSRQEYLKLKARYDALQRSQRNLLGEDLGPLSSKELESLEKQLDSSLKLIRSTRTQYMLDQLNDLQRKEHLLNEANKTLKQRLVEGYQVNSLQLNPNATEDVGYGRQQVHHQPHGDAFFHPLDCEPTLQIGYQHDPMSVVTAGPSVNNYMTGWLP

SEQ ID NO: 74397 - protein, 65 aa, Gossypium hirsutum
  Clone ID: LIB3585-034-P1-K1-B6.pep
KNYKKTIGRGRVELKTIYGATTPGRVSFAKRTNGLLKKAYELSVLCDAEVALIIFSNRRKLFRWP

SEQ ID NO: 74398 - protein, 81 aa, Gossypium hirsutum
  Clone ID: LIB3584-003-P1-K1-E8.pep
HASGNGGFLQLMEGYQVHSLQLNPNADDVGYGRQPTHQPQGDVFFHPLDCEPTLQIGYQPDTISAVTGCPSVNNYMTGWLP

SEQ ID NO: 74399 - protein, 179 aa, Gossypium hirsutum
  Clone ID: LIB3585-033-P1-K1-A6.pep
PRVRPRVRPRVRPRVRPRVRPRVRINRQVTFAKRRNGLLKKAYELSVLCDAEVALIIFSNRGKLYEFCSSSSMMKTLERYQKCSHGAPETNVSTREALELSSQQEYLKLKARYEALQRSQRNLLGEDLGPLSSKELESLERHLDSSLKLIRSTRTQYMLDQLTDLAPKEHLLNEAYKSF

SEQ ID NO: 74400 - protein, 77 aa, Gossypium hirsutum
  Clone ID: LIB3145-043-Q1-K1-C9.pep
MGRGRVELKRIENKINRQVTFAKRRNGLLKKAYELSVLCDAEVALIIFSNRGKLYEFCSSSRYHQNYFTFFLFWDPL

SEQ ID NO: 74401 - protein, 67 aa, Gossypium hirsutum
  unsure (1)..(67): unsure at all Xaa locations
  Clone ID: LIB3197-014-P1-M1-H2.pep
GVWGXGRGRVELKRIDGVXRGGVAFXKRRNGLLKKAYELSVLCDAEVALIIXXXRGKLYEFCSSSSM

SEQ ID NO: 74402 - protein, 181 aa, Gossypium hirsutum
  Clone ID: GOSHI-09MAY01-C2406_1.pep
MGSGEWCLQKRDSFKSETLVGNETVPEIGCLSIIVLGASGDLAKKKTFPALFHLYCQGFLPPNEVHIFGYARTKISDDELRNRIRGYLVSERSASPSKDVSKFLQLIKYVSGSYDAAEGFQTLDKEISKHETSKYSLDGSSRRLFYLALPPSVYPSVCRMIRRYCMNKSNLGGWTRIVVEK

SEQ ID NO: 74403 - protein, 108 aa, Gossypium hirsutum
  unsure (1)..(108): unsure at all Xaa locations
  Clone ID: LIB3583-061-P1-K1-G2.pep
MGSGEWCLQKRDSFKSETLVGNETVPEIGCLSIIVLGASGDLAKKKTXPALFHLYCQGFLPPNEVHIFGYARTKISDDELRNRIRGYLVSERSASPSKDVSKFLQLIK

SEQ ID NO: 74404 - protein, 192 aa, Gossypium hirsutum
  Clone ID: GOSHI-09MAY01-C2436_2.pep
FWALIVTTLTLQLAITSAQTPAASPSSTPTTTTTTPPSTSPPPTTSAPPPSTTPPPTTSAPPPSTALPPPSPPPVSPAPAPAQKPPAPAPVKLPPAPAPITLPPAPAPAPTKHKRRHRHRHRRHHHAPAPAPTVPSPPAPPAVPTTDDTTPAPSPSLNLNGGDSLLVAGTKLWWARTGLTIAILIAITGYSF

SEQ ID NO: 74405 - protein, 248 aa, Gossypium hirsutum
  Clone ID: GOSHI-09MAY01-C2436_1.pep
MFWALIVTTLTLQLAITSAQTPAASPSSTPTTTTTTPPSTSPPPTTSAPPPSTTPPPTTSAPPPSTATPPPSTTPIAPAQPPATTPPPTVAPATSPTVPPPQTPPPQPPQTPPTTAPAQPPALPPPSPPPVSPAPAPAQKPPAPAPVKLPPAPAPITLPPAPAPAPTKHKRRHRHRHRRHHHAPAPAPTVPSPPAPPAVPTTDDTTPAPSPSLDLNGGDSLLVAGTKLWWARTGLTIAILIAITGYSF

SEQ ID NO: 74406 - protein, 115 aa, Gossypium hirsutum
  unsure (1)..(115): unsure at all Xaa locations
  Clone ID: LIB3083-109-Q1-L1-G12.pep
MRAQNMKAISSAQTPAASPSSTPTTTTTTPPSTSPPPTTSAPPPSTTPPPTTSAPPPSTATPPPSTTPIAPAQPPATTPPPTVAPATSPTVPPXQTPPPQPPQTPPTTAPAQPPA

SEQ ID NO: 74407 - protein, 108 aa, Gossypium hirsutum
  unsure (1)..(108): unsure at all Xaa locations
  Clone ID: LIB3083-002-Q1-L1-D4.pep
RVRVATRRAQTPSALPCTTRTTTTTPTPSTSPPPTTSAPPPXTTPTPTTSAPSASTATPPPSTTPTAPAHPPATTTTHTVSPATSPTVPPSHTLPPQPPQTPPTTCSA

SEQ ID NO: 74408 - protein, 190 aa, Gossypium hirsutum
  Clone ID: GOSHI-09MAY01-C2426_2.pep
MENCIGILASVLSENPDFHLDFFFRLLSRMIHFVLLISRQGKVRLTKWYSPYSQKERTKVIRELGGVILNRGPKLCNFVDWRGFKVVYKRYASLYFCMCIDQDDNELEVLEIIHHFVEILDRYFGSVCELDLIFNFHKAYYILDELLLAGELQESSKKTVARLIAAQDSLVETAKEQASSISNIIAQATK

SEQ ID NO: 74409 - protein, 142 aa, Gossypium hirsutum
  Clone ID: GOSHI-09MAY01-C2426_1.pep
MIHFVLLISPQRKVRFTKWFSPYSPKESTKVIRELRAVIPHPWPKHKWPSSLYFFHCTRFYLFSPNIIPFFFTFFNSPLLTLISSFFNTSPPSFLIPHYIFLAFPPFLFITPLSLCPLIFSLFSFFSFFPPIFPPHTPSPLF

SEQ ID NO: 74410 - protein, 83 aa, Gossypium hirsutum
  Clone ID: AI731727.1.pep
MIHFVLLISRQGKVRLTKWYSPYSQKERTKVIRELGGVILNRGPKLCNFVDWRGFKVVYKRYASLYFCMAISRGYGICKEVLK

SEQ ID NO: 74411 - protein, 85 aa, Gossypium hirsutum
  Clone ID: uC-gsflnu33B071h05b1.pep
SFLQKAPESTFINIQLSSQTKIQKEFSQQMRHQNQPQYKWQSATTLGHNLLCGLCNYIANGTGLLGRVGGRVGGRVGGRVGGRVK

SEQ ID NO: 74412 - protein, 46 aa, Gossypium hirsutum
  Clone ID: LIB3148-029-Q1-K1-B2.pep
AELMISYSNASLELFSCQHTIPFLSKYKLISVHLIKILKEDLSSCV

SEQ ID NO: 74413 - protein, 102 aa, Gossypium hirsutum
  Clone ID: GOSHI-09MAY01-C2776_5.pep
PRCLLRITFPYADYFVARYGQSNQTVKINFDAAYDERSSQAASGIVVRNTEGKALISCLEIHHQIGSAFAAEALACRRAVQIGIEMKWPKIIIEGDSLSIIK

SEQ ID NO: 74414 - protein, 270 aa, Gossypium hirsutum
  Clone ID: GOSHI-09MAY01-C2776_2.pep
AAWAAAWVEILVQALPRGRKDASSLHLLRFSLYEYCNLKSFITPKKSISIFNPRLFLFLYNSYTCEYESIFLFLRNQSSHLPSTSSGVFLERIFFYGKIKYLGEVFYNDFQNNLWLFKDPFIHFIRYQGKSILASKDTSLLINKWKYYFVDLWQYYFYLWSQSGRVRINQLSKYSLDFLGYLSSVRLNPSVVRSQMLENSFLIDNAVKTLDTRIPIISLIGPLSKAKFCNTLGHPISKPTWADSPDSDIIDRFVRISRNLSHYYSGSSKK

SEQ ID NO: 74415 - protein, 226 aa, Gossypium hirsutum
  Clone ID: GOSHI-09MAY01-C2776_1.pep
MQYRKLITNVICPRCESVVETMDDLFRECPRCLLRITFPYADYFVARYGQSNQTVKINFDAAYDERSSQAASGIVVRNTEGKALISCLEIHHQIGSAFAAEALACRRAVQIGIEMKWSKIIIEGDSLSIIKKCKENREDKSHIRAYIHDIQQIMSRSRNLTFEYIPRATNSLTHILARESMKKREEIYLVDSVPEYAEFQRVNDSVREPDRKWIEKKRKKGKPDAW

SEQ ID NO: 74416 - protein, 132 aa, Gossypium hirsutum
  Clone ID: LIB3583-052-P1-K6-C9.pep
EKIVNTFPHKVAEKILHIPLVKAPHDDFLAWSGELSGEYSIRSAYKQGWKILVLMLYRPTTTISIKNYGYLPSKIKITVWKISWNYLPTRANMQYRKLITNMQSALDVNQQWKQWTISSGNAWGLPRINFLV

SEQ ID NO: 74417 - protein, 71 aa, Gossypium hirsutum
  Clone ID: LIB3146-056-Q1-K1-F4.pep
LSSFYKKLWLLNLPSKIKITVWKTSLNYLPTRANMQYKKLITNVICPRCESVVETMDDLFRECPRCFKISP

SEQ ID NO: 74418 - protein, 98 aa, Gossypium hirsutum
  Clone ID: LIB3583-044-Q6-K1-H9.pep
NAICLRCESAVETMDHLFQECPGCFPRIIFPCVDYFVARYGQSDQTVKINFDAAYDETSSQAALGIVVRNSEGKALISCSEIHHQIGSAFAAEALAGG

SEQ ID NO: 74419 - protein, 113 aa, Gossypium hirsutum
  Clone ID: LIB3584-007-P1-K1-H10.pep
YKKLWLLNLPSKIKITVWKTSLNYLPTRANMQYKKLITNVICPRCESVVETMDDLFRHRPRCLLRITFPYADYFVARYGQSNQTVKINFDAAYDERSSQAASGIDLIAIVFFL

SEQ ID NO: 74420 - protein, 83 aa, Gossypium hirsutum
  Clone ID: LIB3196-028-P1-M1-G1.pep
RCLLRITFPYADYFFGRYGQSDQTVKINFYAAYDERSSQAASGIVVRNREGKALISCSEIHHQIGSAFAAKALACRRAVQTGG

SEQ ID NO: 74421 - protein, 348 aa, Gossypium hirsutum
  unsure (1)..(348): unsure at all Xaa locations
  Clone ID: GOSHI-09MAY01-C2706_2.pep
INKSLLALKECIRALDNDQIHIPFRGSKLTEXVLRDSFVGNSRTVMISCISPNAGSCEHTLNTLRYADRVKSLSKSGNPKKDQAVTSLPPGNTDASSASSLPAPADLEVVYEQQQEAKVVDTSQRVVEKDVYTVDFDKQLSKFPSGYSFNRREESGLTSGPTGRERFEVNNSYGSSTKRVYSSNSQNSADTEEKLQKVSPPPRKVTREEKSDKMTGIVAKKDGGGSDLSTTKSRQSNAVSYSNADNVGHRQYDPEPPDENINAILEEEEALIAAHRKEIEDTMGIGREEMKLLPEVDQPGSLIDNYVTQLSFVLSRKAAGLVGLQARLARFQHRLKEQEILSRKRVPR

SEQ ID NO: 74422 - protein, 260 aa, Gossypium hirsutum
  Clone ID: GOSHI-09MAY01-C2706_1.pep
TGNKDASSASSLLPTAVVERIYERQPEVKVVDTGRRVAEKDVYTTDIDKQPSTFSSGYPFNGREESGKASGPTDRERFEVNSNYGGSSSQRVYSSNSQNSADTEEKVPKVSPPRRKAIREEKLEKSRNWAKKDGGGSDSSASNSRQVNAVNNNETNTIGYRQYDPEPPTDENINAILEEEEALIAAHRKEIEDTMEIVREEMKLLAEVDQPGSHIDNYVTQLSFVLSRKAASLVSLQARLARFQHRLKEQEILSRKRVPR

SEQ ID NO: 74423 - protein, 99 aa, Gossypium hirsutum
  Clone ID: GOSHI-09MAY01-C2726_2.pep
YRNPVPLENFRGQERMIDLHGLHVSEALHMLKHELSVLRSTARAADQRLQVYICVGTGHHTRGSRTPARLPVAVQRYLLEEEGLDYTEPQPGLLRVVIY

SEQ ID NO: 74424 - protein, 141 aa, Gossypium hirsutum
  Clone ID: GOSHI-09MAY01-C2726_1.pep
RPPTRAICHCNKALAKELSVKGQMHNMHMKAAHGKAQESIYHQRNPVPLENFRGQERMIDLHGLHVSEALHMLKHELSVLRSTARAADQRLQVYICVGTGHHTRGSRTPARLPVAVQRYLLEEEGLDYTEPQPGLLRVVIY

SEQ ID NO: 74425 - protein, 132 aa, Gossypium hirsutum
  Clone ID: GOSHI-09MAY01-C2676_1.pep
RVLEAEPPEWLPDSSTTVCMQCRALFTAITRGRHHCRFWGGIFCRACSKGRGLLPVKFRDRNPQRACDSCYDRLDPLQGVLINSISNAAQVAKHDVMDWTCTRGWLNLPVGLSMEHEIYKASTTLRSYCQVA

SEQ ID NO: 74426 - protein, 334 aa, Gossypium hirsutum
  unsure (1)..(334): unsure at all Xaa locations
  Clone ID: GOSHI-09MAY01-C2636_1.pep
LLAMQIRFVGCQHVQSGEHMAAMGVFFLMQVFYFLDWVKHMLSDTKLFQAFLRITVTSAVAVGXVLLLGLGMVSGYISPWTGRFYSLLDPTYAKDHIPIIASVSEHQPTAWSSFMFDFHILLFLFPAGLYFCFKRLSDATIFIVMYGLTSMYFAGVMVRLILVATPAVCLISAIAVSATVKNLTVLLRSKNKVVQTGSTKGSGGSKSSSKALLDQSQPFQKNGAIALLFGAFYLLSRYATHCTWVTSEAYSSPSIVLAARGAHGNRVIFDDYREAYFWLPANTXKNAKVMSWWXYGYQITAMGNRTVIVDNNTWNNTHIATVGRAMSSYEDEAI

SEQ ID NO: 74427 - protein, 256 aa, Gossypium hirsutum
  Clone ID: GOSHI-09MAY01-C2126_1.pep
SFITSSKVSKNGFTINVFECPICGASYRSEEEVSIHVETCVNNTNSLDRKGTDDESGSNETALEESRGEVEVRVSSFLSGKPAEGSIEVVLKLLRNIVKEPGNDKFRKLRMSNPKIREAIGEVAGGVELLEFVGFELKEEGGEMWAVMDVPKEEQISVISKAIMLLEPGNMEKFKSENISPAAPPEKEETVESKKIDRKIRVFFSVPESVAAKIELPDSFYNLSSEELKREAEMRKKKIADFQLLIPKSYKEKQAK

SEQ ID NO: 74428 - protein, 357 aa, Gossypium hirsutum
  Clone ID: GOSHI-09MAY01-C2026_1.pep
MGITKICPWKSGDNSCQVHIPGSLEDEGKGKEDNPVYGADSGKDLDDCDLEGINCELCMVEGKICSIPYELFDLPDLREILSLETWNSCLTEEDRFCLSAYLPDMDEWTFWLTMKELFGGSDLYFGNPMDAFFKRVKGGFYPPKVCCLRESLRFLERRKYYHTLRSYHDKMAHMFTDMRRLWDECSVSTGVQERLYMWRTRRSCRDSNLLDLNAVPSDGYLLNEDANLDSVMCHLPKRMKTWETVSTKNIVASPSADGMTMIAPNYSTKSVLKVKTSGSNAIHNHNQKLVVGDKSEQCLSVPKVLLKAVTKVPSVLPPLSKVCSRRSQTALLVGAQVLRDPKPERTILGNAGCFSGS

SEQ ID NO: 74429 - protein, 175 aa, Gossypium hirsutum
  unsure (1)..(175): unsure at all Xaa locations
  Clone ID: GOSHI-09MAY01-C2396_6.pep
RTRGRTRGRARGRTRNHDQMGGDLVISIEELQEIQDELEKINEEASEKVLEVEQKYNEVRKPVYDKRIEIINSIPDFWVTAFLSHPALGDPLTEEDPKIFQYIXHFEVEDFKRPESWXPLITFNSNSNPYFEXSRLTRTFTFLDDGTKITATPIKWKEGKGLPNGVNHEKKETSD

SEQ ID NO: 74430 - protein, 52 aa, Gossypium hirsutum
  Clone ID: GOSHI-09MAY01-C2396_4.pep
DAWAVAWAVAWGSLMMIKTRMMTSTVRTKSLNSLNHSSCFSCSSKDLCKVVS

SEQ ID NO: 74431 - protein, 175 aa, Gossypium hirsutum
  Clone ID: GOSHI-09MAY01-C2396_3.pep
MVADRGKKAKLEEKGVEENSEQIDGALVFSIEKLQEIQDELEKINEEASEKVLEVEQKYNELRKPVYDKRHDIIKSIPDFWLTAFLSHPVLGELLTDEDQKIFTHINSLEVEDYKHLKSGYSITFNFTPNPYFEDTKLTKTFTFLDEGIKITATQIKWKEDMGLPNGVNHEKKGN

SEQ ID NO: 74432 - protein, 60 aa, Gossypium hirsutum
  Clone ID: GOSHI-09MAY01-C2396_2.pep
KVAEIIKEDLWPNPLTYFNNEADEEDFDGDEGDEEGKDDDDDSDDDQDDDDDEDDDDDED

SEQ ID NO: 74433 - protein, 249 aa, Gossypium hirsutum
  Clone ID: GOSHI-09MAY01-C2396_1.pep
MVADKGKKLKVAEKVEEENHEQIDGDLVISIEKLQEIQDELEKINEEASQKVLEVEQKYNEVCKPVYDKRNEIINSIPDFWLTAFLSHPALGDLLTEEDQKIFKYINSLEVEDFKDLKSGYTITFNFNSNPYFENTTLTKTFTFLDDGTKITATPIKWKEGKGLPNGVNHEKKGNKRQLAEESFFTWFADAQQKDDMDEIHDEVAEIIKEDLWPNPLTYFNNEADEEDFDALEGLKRVNDDEDPMKIPR

SEQ ID NO: 74434 - protein, 69 aa, Gossypium hirsutum
  Clone ID: LIB3493-043-P1-M1-E2.pep
MAADKGKKMDVADKVDEENHDQIDGDLVIFIEKLQEIHDELEKINAEASDKRLEVESNTLTLPLCIISE

SEQ ID NO: 74435 - protein, 120 aa, Gossypium hirsutum
  unsure (1)..(120): unsure at all Xaa locations
  Clone ID: LIB3196-027-P1-M1-B1.pep
ATPTVGGGGKNMKVVEKVEEENHEQIDGDLYIFIENCDYNHRAXLDKINEKANGRMLEVKHXYNEARKPVYDNSXEIINLIPXFCLTLFLSHTALGDLLTDNDHMIFKYFNSLEVVDFKD

SEQ ID NO: 74436 - protein, 196 aa, Gossypium hirsutum
  Clone ID: GOSHI-09MAY01-C2376_1.pep
MGDALFELEQNLRSRKEQLTRQEENIFQRCKSSALNHFTAGVIAGGGLVWAATWKLNRLLRVNLSGGAAVILGFWKFGNSLDSSVDHILALDGTRMQSELANIIVKKYRHDPWKMRLISKHFYLEEVLDDSTSGPNLRWRYRNFFGDNVDQDQGTHGDFQDVSHKGSPSDIHNNFDRKKTDLKSEQVPVKSGFDLM

SEQ ID NO: 74437 - protein, 93 aa, Gossypium hirsutum
  Clone ID: LIB3493-013-P1-M1-F1.pep
FPKSHVLCQLLYKGSTLVAYPATMSAAHATALQQVRDPLYDSVSTFYTFLKCFLLVRSIVPFRILDSVLARPELHPFSSSSSCCFHLSPYVLS

SEQ ID NO: 74438 - protein, 107 aa, Gossypium hirsutum
  Clone ID: LIB3583-061-P1-K1-D2.pep
DALFELEQNLRSRKEQLTRQEENIFQRCKSSALNHFTAGVIAGGGLVWAATWKLNRLLRVNLSGGAAVILGFWKFGNSLDSSVDHILALDGTRMQSELANIWMPNTE

SEQ ID NO: 74439 - protein, 200 aa, Gossypium hirsutum
  unsure (1)..(200): unsure at all Xaa locations
  Clone ID: GOSHI-09MAY01-C2316_1.pep
MVVTSGAGVHDDSNNYDREXELKAFDNSKAGVKGLVDAGITKVPRMFIRSDISSNTLETTKKTQYKIPVIDLQGIEDDPRRHKEISDQVRHASETWGCFQIVNHGITVSVLEEMKDGVRRFFEQDTEVKKKYYARESGSRFRYQSNFDLYTAPFANWRDTCFCMMAPDPPQPQELPEVLRDILVKYTKEVMRLGSCLFRV

SEQ ID NO: 74440 - protein, 53 aa, Gossypium hirsutum
  Clone ID: GOSHI-09MAY01-C2206_1.pep
IALSSTVLLDCSGVHPYPKPHSPTEKCSAVQVTGSRIEIHVVVTDPLLSYNGV

SEQ ID NO: 74441 - protein, 70 aa, Gossypium hirsutum
  Clone ID: GOSHI-09MAY01-C2236_1.pep
MASNAAVPFWRAAGMTYITYSNICANLVRNCLKEPYKTEALSREKVHFSISKWTDGKPEKPTLRSDSPEE

SEQ ID NO: 74442 - protein, 167 aa, Gossypium hirsutum
  unsure (1)..(167): unsure at all Xaa locations
  Clone ID: GOSHI-09MAY01-C3986_1.pep
ASLSNKSPIFPXPEPHHFSDYGFDPQFHYFQVLEQARKHKKGTRDSIDSLQFKLEKPISKDDPKSKTKKYWWRNARLFFNWKKWSPNSNNQHDDRTKAKALRASNSGPIYMIETSNNGSTTPYRTSSRPSSGPLTGISTPYISLRELNMEQQQHRVSTSSLPIYLVT

SEQ ID NO: 74443 - protein, 53 aa, Gossypium hirsutum
  Clone ID: LIB3585-068-P1-K1-G11.pep
MSNKSPIFPMPEPHHFSDYGFDPQFHYFQVLEQARKHTKGTRDSIDSLQFKLG

SEQ ID NO: 74444 - protein, 179 aa, Gossypium hirsutum
  Clone ID: GOSHI-09MAY01-C3976_1.pep
MANHHRTSRIDVGGGSPMFGGFGFTVRLLASAITVALCFFFLLSFFFTSHSHSPHLQTNFGFSTGIGSTRRSVLALKSDPLKPRLDQIRKQADDHRSLVLAYASYARKLKLENSKLVRVFADLSRNYSDLISKPSYRALFETDSLSIDEPLLRQFEKEVKERIKATRQVISEAKESSDN

SEQ ID NO: 74445 - protein, 100 aa, Gossypium hirsutum
  unsure (1)..(100): unsure at all Xaa locations
  Clone ID: GOSHI-09MAY01-C3906_4.pep
PFTGTGSMRGRILAGTCHSAKMIRTIIVRRNYLHYIKKYQXYEKRHSNIPAHISPCLRGKEGDHVIIGLCRPLSKTVRFNVLKVIPAGSSGGGKKAFTGM

SEQ ID NO: 74446 - protein, 174 aa, Gossypium hirsutum
  Clone ID: GOSHI-09MAY01-C3906_3.pep
SFISFLCFSFTGFFLICLQTEKAFLKQPKVFLSSKKTGKGKRPGKGGNRFWKSIGLGFKTPREAIEGTYIDKKCPFAGPVSVRGRILAGTCHSAKMMRTIIVRRNYLHYIKKYQRYEKRHSNIPAHISPCFRVKEGDHVIIGQCRPLSKTVRFNVLKVIPAGSSGGGKKAFTGM

SEQ ID NO: 74447 - protein, 159 aa, Gossypium hirsutum
  Clone ID: GOSHI-09MAY01-C3906_2.pep
MAEQTEKAFLKQPKVFLSSKKGGKGKRPGKGGNRFWKSIGLGFKTPREAIEGTYIDKKCPFTGTVSIRGRILAGTCHSAKMVRTIIVRRNYLHYIKKYQRYEKRHSNIPAHISPCFRVKEGDHVIIGQCRPLSKTVRFNVLKVIPAGSSGGGKKAFTGM

SEQ ID NO: 74448 - protein, 159 aa, Gossypium hirsutum
  Clone ID: GOSHI-09MAY01-C3906_1.pep
MAEQTEKAFLKQPKVFLSSKKSGKGKRPGKGGNRFWKSIGLGFKTPREAIEGTYIDKKCPFTGTVSIRGRILAGTCHSAKMIRTIIVRRNYLHYIKKYQRYEKRHSNIPAHISPCFRVKEGDHVIIGQCRPLSKTVRFNVLKVIPAGSSGGGKKAFTGM

SEQ ID NO: 74449 - protein, 100 aa, Gossypium hirsutum
  Clone ID: LIB3149-033-Q1-K1-B1.pep
PFTGPVSVRGRILAGTCHSAKMMRTIIVRRNYLHYIKKYQRYEKRHSNIPAHISPCFRVKEGDHVIIGQCRPLSKTVRFNVLKVIPAGSSGGGKKAFTGM

SEQ ID NO: 74450 - protein, 109 aa, Gossypium hirsutum
  unsure (1)..(109): unsure at all Xaa locations
  Clone ID: LIB3149-022-Q1-K1-A3.pep
KLSHFITADFSAAAPHSRESSSAMAEQTEIAFLKQPKVFLSSKKSSKGMRPGKGGNRFWNELRLXLMTIGEAIDGTYFYTKCPGAGTEAVRRASISESCHRAHIDRTLI

SEQ ID NO: 74451 - protein, 76 aa, Gossypium hirsutum
  Clone ID: uC-gsronu33B121g07b1.pep
TASRYEEPGTIRCFYVFFLYLSFFFFFSLFYYYLIFFHFFLFSFLIFFFYFFFYFFFYYLFSTFFFFFFNLLFIFS

SEQ ID NO: 74452 - protein, 40 aa, Gossypium hirsutum
  Clone ID: uC-gsronu33B121a07b1.pep
STMAEQTEKAFLKQPKVFLSSKKSGKGKRPGKGGNLFWKS

SEQ ID NO: 74453 - protein, 244 aa, Gossypium hirsutum
  Clone ID: GOSHI-09MAY01-C3926_1.pep
MASSSPLSPILLSLFLVFICGVSAQTAPAPAPSGPLNFTGILDKNGQYTYFLQLLAQTQVGSQVQTQLKTTTEGFTVFAPTDNAFNNLKPGTVNNLDPQQKVQLVLYHVIPKYYSLNDLQFVSNPVRTQAGEDFGLNVTGLNNQVNVSSGVVETQINNALYQKKPLAIYQADKVLLPEEFFEAKSPAAAPSPATKKSSTGSKSNSRASATADEPASADNSGSAGRNMGLGFVVGLALACMGFLS

SEQ ID NO: 74454 - protein, 177 aa, Gossypium hirsutum
  Clone ID: GOSHI-09MAY01-C3886_1.pep
MIMEIWYVWVFIISFLSVSVGNWIYRWRNPKCKGKLPPGSMGFPLIGETLSFFVTSNSIDMHPFVNERLKRYGPLFKTNIAGRPVAVSSDPEFNYFVLQQEGKLIELYYMDSFSQTVHNDNLSNLGGYFQRYLRRSILRHFGHEPLKRKLLSELEDVINHEVHKWTNLPEVDVKLQT

SEQ ID NO: 74455 - protein, 126 aa, Gossypium hirsutum
  Clone ID: LIB3585-047-Q6-K1-H2.pep
PTRPTPYPFHCCFDNGNIACGGGHNIVFECNSINCIYRWRNPKCKGKLPPGSMGFPLIGETLSFFVTSNSIDMHPFVNERLKRYGPLFKTNIAGRPVAVSSDPEFNYFVLQQEVKLIELYYHGFLF

SEQ ID NO: 74456 - protein, 135 aa, Gossypium hirsutum
  unsure (1)..(135): unsure at all Xaa locations
  Clone ID: LIB3585-067-P1-K1-A12.pep
LISTYISEQLGINCSVLMGANLASEIAEEKFSEATVGYGNNREIAEQWVQLFTTPYFMVTPVQDVEGVELCGTLKNVVAIAAGFGDGLDMGNNTKAAIIRFGLREMREFCKLVFSFGKDDTFFXSCGVADVITTC

SEQ ID NO: 74457 - protein, 56 aa, Gossypium hirsutum
  Clone ID: LIB3146-054-Q1-K1-D2.pep
AAIIRFGLREMREFCKLLFSSVKDDTFFESCGVADVITTCFGGRNRKVAEAFARNG

SEQ ID NO: 74458 - protein, 72 aa, Gossypium hirsutum
  unsure (1)..(72): unsure at all Xaa locations
  Clone ID: GOSHI-09MAY01-C3846_1.pep
SDDDNRVSLLTEAWGALLADREPEESEYSKRSGLSKSSLPNTPYSENCXLSAQVNNRLDTRSGAARFPSWTT

SEQ ID NO: 74459 - protein, 52 aa, Gossypium hirsutum
  Clone ID: LIB3582-003-P1-K1-H8.pep
TNQRNTQIKKKIRILLICHSQIVNHSLHKLITHSLALVVHRDLAPYRVVYKS

SEQ ID NO: 74460 - protein, 157 aa, Gossypium hirsutum
  unsure (1)..(157): unsure at all Xaa locations
  Clone ID: GOSHI-09MAY01-C3836_1.pep
MLETLKYLIGSTGVSGFGSKSTAEEVTETCPDLRSITVIITGATSGIGAETARVLAKRGARLVLPARNLKAAEEAKARIVSEFPESEIIVMALDLSSLTSVRNFVSELESLNLPVNILINNARKFAHEHAISEDGIQMTFATNXLGHFLVDEVLLTR

SEQ ID NO: 74461 - protein, 288 aa, Gossypium hirsutum
  unsure (1)..(288): unsure at all Xaa locations
  Clone ID: GOSHI-09MAY01-C3596_1.pep
AHFIAKAMVHADKATTVSHTYSKEVAGNPAIAPHLHKFHGILNGIDLDIWAPRPDXFIPVXYNSENVIEGKQAAKKALQQRLGLRKSDLPLVGIISRLTHQKGIHLIKHAIARALELNGQVVLLGSAPDPHIQNDFVNLANQLHSSHADRARLCLNYDEPLXSHLIYAGSDFILVPSIFEPCGLTQLTAMRYGSIPVVRKTGGLYDTVFDVDNDKARAEAQGLEPNGFNFDGADGSGVDYALNRAITAWYGARDWFNSLCKMVMEQXDWSWNRPALEYIELYHATKKY

SEQ ID NO: 74462 - protein, 138 aa, Gossypium hirsutum
  Clone ID: GOSHI-09MAY01-C3556_2.pep
PRVRPRVRPRVRPRVREKQTSTGKETVSSEENGSEKESPHCEDGNLPESLEHNLPDSPFASPGKASKEYLSFNNAVTEKDGTISANNNWIPSTLLPANNALDMSSFNSFNCQIPRFSSGQGTIGMYTGTGGPTCPVGI

SEQ ID NO: 74463 - protein, 405 aa, Gossypium hirsutum
  unsure (1)..(405): unsure at all Xaa locations
  Clone ID: GOSHI-09MAY01-C3556_1.pep
MDQCHELLRSKSARQQRLAAAAAAVGAAQIMGSGSFPYSPKSINLVLQQPQNDAQRAPVLVGGGWGRGDRSSPASRQIYLTFPADSTFREEDVSNYFSKYGPVQDVRIPYQQKRMFGFVTFIYPDTVKMILAKGNPHFVCDSRVLVKPYKEKGKIPDKKQPQQQNENGTLTGFDSRDPFDVQLGTRMFYNNRDILWRRKLGDETDLQQALELQNRRLMSLQLLDVKKHSPTLYGQSLVLPQENSSSPVPAISVTAAEKQTSTGKETVSSEENGSEXESPHCEDGNLPEXLEHNLPDSPFASPAKAYKEYLSFNNAVTEKDGTISANNNWIPSTLLAANNALDMSSFNSFNCQIPRFSSGQGTIGMYTGTGGPTCPWNIASDIIINIIFYLLVTTIKCSLKKHVPM

SEQ ID NO: 74464 - protein, 186 aa, Gossypium hirsutum
  unsure (1)..(186): unsure at all Xaa locations
  Clone ID: LIB3583-052-P1-K6-E10.pep
KRLGKLLLERGEGEGGGEEEEEEEIHQKSFCNFFFRAYLLGKDLLTIEKFGLVQYMILKTLCAFLALLLEVFGVYGDGEFKWYYGYPYITVVMNFSQMWALYCLVHFYNATHERLRPIKPLAKFISFKAIVFATWWQGVGIALLCAYGVLPKLGXQTALQDFFICIEMXIAAVAHVFVFSAEPYHF

SEQ ID NO: 74465 - protein, 169 aa, Gossypium hirsutum
  unsure (1)..(169): unsure at all Xaa locations
  Clone ID: LIB3582-028-P1-K1-B9.pep
HTFLNTSAGKLQMILKTLCAFLALLLEVFGVYGDGEFKWYYGYVXWFFVQSLVCFHIKPNKVGSYLLSCRYPYITVVMNFSQMWALYCLVHFYNATHERLRPIKPLAKFISFKAIVFATWWQGVGIALLCAYGVLPKHGKMQTALQDFFICIESKLCLINISVRTLGIF

SEQ ID NO: 74466 - protein, 235 aa, Gossypium hirsutum
  Clone ID: GOSHI-09MAY01-C3406_1.pep
MPANFPKEINHLNFRVEELTKGFSIRLLKDDGSSDLHDNNFWTRKLKLASDFDSSYKAISISSGQLRRARLDTYTTDIHWCSLDTEVHYRDITNFDGKFFMVNIYGVILGMDESFYTLDEVHTSLEQKDWECERYFVESCGHLYLVVRDFLICPTLVQYNYTLDAFMTEAKDANVPVKFKVYKRIPSGDQRSRFCWVEVNDLGDRAFFVSTDCSFSFLTRDTQGVVGTASSIVMK

SEQ ID NO: 74467 - protein, 202 aa, Gossypium hirsutum
  unsure (1)..(202): unsure at all Xaa locations
  Clone ID: GOSHI-09MAY01-C3436_1.pep
MAETVNLRGESPAVANPLXANQPSEIASNINYHAQFSPHFSPCKFEPEQAFFATAESVRDRLVKQWNETFLHYHKGDPKQTYYLSMEYLQGRAFTYAIGNLGIQNAYAGALNXLGHGPEEIAGPEKDAALGNGGLGRLASCFLDSMATLNLPAWGYGLRYKYGLFKQLVTKQGQEEIAEDWLEXFSPWEVVRHDIVFPVRFF

SEQ ID NO: 74468 - protein, 116 aa, Gossypium hirsutum
  Clone ID: GOSHI-09MAY01-C3776_2.pep
MASASLGNGGAGSSRSVNGFKSSSSSVDWLGREMLEMRLRDKVDHDEDRDSEPDVVDGVGAETGHVIRTTIGGRNGHSKQNVSYIAEHVVGTGSFGVVFQAKCRETGEIIAIKEVL

SEQ ID NO: 74469 - protein, 422 aa, Gossypium hirsutum
  Clone ID: GOSHI-09MAY01-C3776_1.pep
MASASLGNGGAGSSRSVNGFKSSSSSVDWLGREMLEMRLRDKVDHDEDRDSEPDVVDGVGAETGHVIRTTIGGRNGHSKQNVSYIAEHVVGTGSFGVVFQAKCRETGEIVAIKKVLQDKRYKNRELQIMQMLDHPNIVSLKHYFFSKTDKDELYLNLVLDYVPETVHRTARSYSRMNTRMPLIYVKLYTYQICRALAYIHNCIGICHRDIKPQNLLVNPHTHQLKLCDFGSAKMLVKGEPNVSYICSRYYRAPELIFGATEYTTAIDIWSTGCVMAELLLGQPLFPGESGVDQLVEIIKVLGTPTREEIKCMNPNYTEFKFPQIKPHPWHKVFQKRLPPEAVDLVCRFFQYSPNLRCTALEACIHPFFDELRDPNVRLPNGRPLPPLFNFKPQELSGIPPEVVKKLIPEHACKQNLFMALHT

SEQ ID NO: 74470 - protein, 70 aa, Gossypium hirsutum
  unsure (1)..(70): unsure at all Xaa locations
  Clone ID: LIB3826-001-Q1-N6-F3.pep
NLRCTALXACIHPFFDELRDPNTRLPNGRPLPPLXFNFKPQELSGVPPDVVKKLIPEHARKQNLFMALHA

SEQ ID NO: 74471 - protein, 102 aa, Gossypium hirsutum
  Clone ID: LIB3543-059-Q6-K6-C9.pep
EAICVFYHLLVSFRPVSQLSSSVRSKFGLWIKKLSLIKKKKKKKKKKKKKKKKKKKKKKKKKKKKKKKKKKKKKKKKKKKKKKKRGGPFKKTKFYTPGFEKI

SEQ ID NO: 74472 - protein, 157 aa, Gossypium hirsutum
  Clone ID: uC-gsflnu33B080b09b1.pep
HQSFPPTRTPTRPLYHDLDRDSEPEVVDGVGAETGHVIRTTIGGRNGQSKQNVSYIAEHAVGTGSFGVVFQAKCRETGEIVAIKKVLQDKRYKNRELQIMQMLDHPNIVSLKHYFFSKTDKDELYLNLGLDYVPETVHRTARSYSRMNTRMPLIFVK

SEQ ID NO: 74473 - protein, 99 aa, Gossypium hirsutum
  Clone ID: uC-gsflnu33B082a11b1.pep
MFCLEKVYERSSSCVDWLVREMLEMRLRDKVDHDEDRDSEPEVVDGVGAETGHVIRTTIGGRNGQSKQNVSYIAKHAVGTGSFGVVFQAKCRETGEIVA

SEQ ID NO: 74474 - protein, 76 aa, Gossypium hirsutum
  Clone ID: LIB3585-053-P1-K1-E7.pep
MASASLGNGGAGSSRSVNSFKSSSSSVDWLGREMLEMRLRDKVDHDEDRDSEPDVVDGVGAETGHVIRTTIGGRNG

SEQ ID NO: 74475 - protein, 106 aa, Gossypium hirsutum
  Clone ID: uC-gsflnu33B076a11b1.pep
MASATLGNGGVGSIRSVNGYKSSSSSVDWLGREMLEMRLRDKVDHDEDRDSEPEVADGVGAETGHVIRTTIGGRNGQSKQNVSNIAEHADGTGSFGVVFQAKCRET

SEQ ID NO: 74476 - protein, 76 aa, Gossypium hirsutum
  Clone ID: LIB3083-060-Q1-L1-E3.pep
FSQETLIDSLVFAIHHILCSAVAHPVQAPIFWKELEMLRVPGKGHHSRPISRDLKQNSSIQNPRQNQAVRRQYLEK

SEQ ID NO: 74477 - protein, 243 aa, Gossypium hirsutum
  unsure (1)..(243): unsure at all Xaa locations
  Clone ID: GOSHI-09MAY01-C3766_1.pep
ELESITARIWWQNSPSRRGIHWTEWRNLCHLKERGGLGFRNLCQFNIALLAKQGWRILFYPNSLLARVLKDKYFPHSDFLNASLGNLPSLTWKNVRXAKRLLQDGLCWRVGRGTRISVWDDCWVPGLDPGRGGTRNDNDVKLVVDLIDDTNRTWKTDLINHSFPVDVAQKILRIPLAETPHEDFKVWRGGGSGDFLVRSAYKLLQDVRLDPNFYLIQTDLKDFYGKLWNLQLPAKIAITIWRT

SEQ ID NO: 74478 - protein, 168 aa, Gossypium hirsutum
  unsure (1)..(168): unsure at all Xaa locations
  Clone ID: LIB3543-047-Q6-K6-H2.pep
MRNQNIFPVDVAQKILRIPPAETPHEDFKVWKGEQSGDFSVRGAYKLLQDARLDPNFYLIXANLKDFYGKLWNLQLPANIAITIWRISXNYIPTLANLKHKRVSNDAACPRCGRGEEDITHIFRYCPGFSTSTSEQCKIYCCGMWFIWNSRNKFIHEPHASADAGRTL

SEQ ID NO: 74479 - protein, 58 aa, Gossypium hirsutum
  unsure (1)..(58): unsure at all Xaa locations
  Clone ID: LIB3149-056-Q1-K1-B8.pep
REEEDITHIFRYCPGXSERVPLSXVRFTVVACGLFGTQGIISYMNRKQKQGGSISLXV

SEQ ID NO: 74480 - protein, 143 aa, Gossypium hirsutum
  Clone ID: GOSHI-09MAY01-C3736_1.pep
HASAHASDLLKRQYELIKADNDALQAHNKKLQAEIMALKGREPSVCINLNKETEGCCSNRSENSSDVKLDNDRPPPPAATISRPARTLFPTGLFQAASSNSSHDDHHQPPQMVKEESLITNMFCTIEEQTGFWPWLEQQQHFN

SEQ ID NO: 74481 - protein, 231 aa, Gossypium hirsutum
  Clone ID: GOSHI-09MAY01-C3696_1.pep
SPPPSESRSPTRPLYSHHHLLHPTTAPNLTTLIPLNGKRKFLSSPKHSSPSPFLCFSSKNNPSPSGDSVPSNFCIIEGPETVQDFVKMQLQEIEDNIKSRRNKIFLLMEEVRRLRIQQRIKNVKVINENGEEETDEMPDIPSSIPFLSHVTPKTMKQLYFTSLAFISGIIVFGGLIAPTLELKLGLGGTSYEDFICNMHLPLQLSQVDPIVASFLGGPGGSFCLMLLKPQC

SEQ ID NO: 74482 - protein, 154 aa, Gossypium hirsutum
  Clone ID: GOSHI-09MAY01-C3196_1.pep
PRVRKFERVREDGFSRLQGLWVLREIVFPIIMKLLTALCLPYVLARGVFPVLGYPLVVNSAVYRFAWLGCLGFSFLCFCAKRFHVWFTNLHNSIRDDRYLIGRRLHNFGEDSQEKKSEAGTPSEAPLVSNMRGTEIIRQLDRDADVGLRLRHVN

SEQ ID NO: 74483 - protein, 187 aa, Gossypium hirsutum
  Clone ID: GOSHI-09MAY01-C3146_1.pep
MEVERVQAIVSSSLAKDNIPLEFVRPEDEQPAITTFHGLIPDIPVIDFNHPDQDHIIHLIANASRDWGIFQVVNHGIPFHLIQKLQQVGKEFFDLPQEEKEVYAKPPGALTLEGYGSKIGKDVNGKKNWADHLFHKIWPASCINHQFWPKNPPSYRPVNEEYAQEVRKVVDKLFEWLSMGLGLETNV

SEQ ID NO: 74484 - protein, 121 aa, Gossypium hirsutum
  Clone ID: AW561918.1.pep
FPGFANMMVCSPISTCVKNVVHLSGRMSSSLRGIISCGSSSSCCYCLYSGTKVKYTGLSVSNTTSFGCQDFQASCFRSSRRSGKFQTLAINESISNKEKLKRQLEISWAGQSMKMRLLLPN

SEQ ID NO: 74485 - protein, 138 aa, Gossypium hirsutum
  Clone ID: LIB3583-016-P1-K1-B10.pep
TIIFHFLIPSGFANMMVCSPISTCVKNVVHLRGRMSSSLRGIISCGPSSSCCYCLYSGTKVKYTGLSVSNTTSVGCQEFQAGYFRSSRRSGKFQTLTINESISNKEKLKRQLEISWAGQSMKMRLLLSKHGTFQKFKC

SEQ ID NO: 74486 - protein, 188 aa, Gossypium hirsutum
  Clone ID: GOSHI-09MAY01-C3166_1.pep
MSSIVLRSRTISNNFSSKIISQRGLCSGVVSSSSDPSKGTTISSQSILSDQSTPPPLAPEVAPQVSGGKIWSFVKYGLIAGVTGTTGYAGYLSYKCSCEEVDHKAKALRAAASYTPSEDASAIDKYGGLLYSAAMTVPAKALESYLDLRRLVEEHLLEYTEPTSDKLLPDLHPLEQHVFTLVLDLNET

SEQ ID NO: 74487 - protein, 74 aa, Gossypium hirsutum
  Clone ID: GOSHI-09MAY01-C3116_1.pep
PRVRARRRSGDSLPPKTPNLRPNSDGCGVSKNMALRYLASLEVRRWPYGGMRGVRRHHAREEWLEGEPMRGNGG

SEQ ID NO: 74488 - protein, 84 aa, Gossypium hirsutum
  Clone ID: LIB3582-057-P1-K1-B11.pep
KNNSIFLFDFFLFSINGALKKPFEHCKWRDTHFSEYRNQKKFQKVIFGYLFFLRRSFSFFLFVFTYISHLLKEKRGNKREEGHT

SEQ ID NO: 74489 - protein, 244 aa, Gossypium hirsutum
  unsure (1)..(244): unsure at all Xaa locations
  Clone ID: GOSHI-09MAY01-C3136_1.pep
RRRRDDEGEEEEEEEEVKPKKKTLLREDKNSEGLKNGKYPTRPQRCLARKRSKHAERNSDDNSNEEDSGSVSDDGRSQSSSAKAVKRKESFCSXYGKRVEHLKSVIKSCGMSVPPSIYKRVKQVPENKREAQLIKELEEVLSKEGLSAKPSEKEIKDVRKRKERARELEGIDMSNIVSSSRRRSTTSFVPPPKPKIPDMSDDDESEESDEDDGDDDEDNDDEKAGDDGNSQSEESEEEEDGDSD

SEQ ID NO: 74490 - protein, 68 aa, Gossypium hirsutum
  Clone ID: GOSHI-09MAY01-C3096_7.pep
MHNPPPPDPHHPHHPHHPHPEPHAPPPGPPHADHPPPGHAPPPGPGPHAPPPGPGGPGHHPEPHKPRP

SEQ ID NO: 74491 - protein, 211 aa, Gossypium hirsutum
  Clone ID: GOSHI-09MAY01-C3096_6.pep
MVLANKEMVVYCFDTLIAHYNSEEAAPPAFDEGQHPLFVTWKKVVNGGEPRLRGCIGTLEACQLINGFRDYALTSALRDRRFPPIQAKELPNLECTVSILTDYETANNYLDWEVGKHGIIIEFVDDYNTRRSATYLPEVPAHEGWTRVEAIDSLIRKAGFSGPITESLRKHIKLTRYQSTLFTMHYSDYASHVKATRGAAPTIAGAKLGNH

SEQ ID NO: 74492 - protein, 68 aa, Gossypium hirsutum
  Clone ID: GOSHI-09MAY01-C3096_5.pep
MHNPPPPDPHHPHHPHHPHPQPHAPPPGPPHADHPPPGHAPPPGPGPHAPPPGPGGPGHHPEPHKPRP

SEQ ID NO: 74493 - protein, 436 aa, Gossypium hirsutum
  Clone ID: GOSHI-09MAY01-C3096_1.pep
MGLVSVFWEILKKPTIGDVVRELLIFIAPLWVAVIVGVLVGWAWKPKWANIGREMFMDCSGSKNSAPAESSESSSSGFGSLPSLNLIKFQLPSAISWISDDGPQKDSFFLSPTLHSNCSSSQNEKEKLGFLTDDDLEHLYKLVEEKDGGPAWIHMMDKSTPTMGYQAWQRDLEIGPTQYRSRTVFDDATPEMVRDFFWDDEFRSKLKWDEMLLSAETLESSPTDGTMMVQWVRKFPFFCSDREYLIGRRIWSCGRTYYCVTKGVPYPSIPRKTKPRRVDLYYSSWCIRAAESRKGDGQLTACEVLLFHHENMGIPWEIAKLGVKLGMWGTVRKIDPGLRAYQTERASGAPLSHSASMAQINTKVTQDYLTSLESNSNDSSELETHNSSEKPGKNNIPKLVVVGGAIAVACILDRGLLTKAVIFGVARRFAKIGRRL

SEQ ID NO: 74494 - protein, 45 aa, Gossypium hirsutum
  Clone ID: LIB3825-018-Q1-N6-A5.pep
GKNNIPKLVVVGGAIAVACILDRGLLTKAVIFGVARRFAKIGRRL

SEQ ID NO: 74495 - protein, 189 aa, Gossypium hirsutum
  unsure (1)..(189): unsure at all Xaa locations
  Clone ID: LIB3543-010-Q1-K6-H4.pep
EHIGSLTTTYNVKPGHYIRYDDHSLAMVRDFFWDDEFRPKLKWDELLFSAETLXSCPTDGTMMVQMGXKTTFFCSDRKYLISQPICFXVDPTYYCATKAVPYTSIARKTKPRHVDLYYSRRSILPSESTKGDGQLTVCEALLYHHENIRVPXEIAELGVKLCMWGTVRKIDTWLTCISNRKSSAAPLSH

SEQ ID NO: 74496 - protein, 91 aa, Gossypium hirsutum
  unsure (1)..(91): unsure at all Xaa locations
  Clone ID: LIB3493-041-P1-M1-F4.pep
RSKLKWDEMLLSAETLESSPTDGTMVVQWVXKFSFFCSDREYLIGRRFWSFCRSYICVSKCCTIFTFFFINYINSCVFLLYYFFIFCKSFS

SEQ ID NO: 74497 - protein, 78 aa, Gossypium hirsutum
  Clone ID: LIB3146-001-P1-K2-C10.pep
PQALQFPMVYPYFHGEKEVRHMLIILLQAMLLLLDQAPMRHRQDQVVQVIIPSHTSLVHDPYTVYPILCTLRLRTVLV

SEQ ID NO: 74498 - protein, 94 aa, Gossypium hirsutum
  Clone ID: LIB3146-025-Q1-K2-E3.pep
NKLRKRKLKAYTYLSSAFSRCPAPTSGTPCSRLQVRHMLIILLQAMLLLLDQAPMRHRQDQVVQVIIPSHTSARHDPYTVYPILCTLRLRTRLV

SEQ ID NO: 74499 - protein, 100 aa, Gossypium hirsutum
  unsure (1)..(100): unsure at all Xaa locations
  Clone ID: LIB3825-031-Q6-K6-E6.pep
MQKKKKKKKKKKKKKKKKKKKKKKKKKKKKKKKKKKKKKKKKKKKKKKKKKKKKKKXGGGGLKKKKIYKGGFKKNKFFFLGEKKKKKRGGVFKKGGRGEK

SEQ ID NO: 74500 - protein, 76 aa, Gossypium hirsutum
  Clone ID: LIB3582-015-P1-K1-G9.pep
MVLANKEMVVYCFDTLIAHYNSEEAAPPAFDEGQHPLFVTWKKVVNGGEPRLRGCIGTLEACQLINGFRDYALTRY

SEQ ID NO: 74501 - protein, 102 aa, Gossypium hirsutum
  Clone ID: LIB3197-040-Q1-M1-A6.pep
MDEACVARDDDLDHLVLAVAHGGLAQEEEHGIIIEFVDDYNSRRSATYLPEVPAHEGWTRVEAIDSLIRKAGFSGPITESLRKRIKLTRYQSTLFTMHYSDY

SEQ ID NO: 74502 - protein, 110 aa, Gossypium hirsutum
  Clone ID: GOSHI-09MAY01-C3056_5.pep
MAAVTAAQPRSSKTESYVDNKRKEDIRQANIKAARAVADAVRTSLGPKGMDKMISTANGEVIITNDGATILNKMEVLQPAAKMLVDLSKSQDSAAGDGTTTVVVIAGALL

SEQ ID NO: 74503 - protein, 142 aa, Gossypium hirsutum
  Clone ID: GOSHI-09MAY01-C3056_4.pep
SRVRERSLHDALCVVRCLVSKRFLIAGGGAPEIELSRQLGAWSKVMHGMEGYCARSFAEALEVIPYTLAENARLNPIAIVTELRNRHAQGEINAAINVRKGQMTNILEENVVQPLLVSTSAITLATECVRMILKIDDIVNVR

SEQ ID NO: 74504 - protein, 418 aa, Gossypium hirsutum
  unsure (1)..(418): unsure at all Xaa locations
  Clone ID: GOSHI-09MAY01-C3056_1.pep
PRVRGIHPTVISDSLHXASIKAVDVLTAMAVPLELSDRESLIKSASTPSRPPARPRSSTLLAPLAVDSVLSVVDPAKPDMVDLRDIKIVKKLGGTVDDTQLVKGLVFDKKASHAAGGPTRMENAKIAVIQFQISPPKTDIEQSIVVSDYTQMDRILKEERNYILGMIKKIKATGCNVLLIQKSILRDAVTDLSLHYLAKAKIMVVKDVEREDIEFITKTLNCLPIANIEHFRVEKLGHADLVEEVSLGDGKIVKVTGIKDMGRTTTVLVRGSNQLVLDEAERSLHDALCVVRCLVSKRFLIAGGGAPEIELSRQLGAWSKVLHGMEGYCVRSFAEALEVIPYTLAENAGLNRIAIVTELRNRHAQGEINAGINVRKGQITNILEENVVQPLLVSTSAITLATECVRVILKIDDIVNVR

SEQ ID NO: 74505 - protein, 184 aa, Gossypium hirsutum
  Clone ID: LIB3543-014-Q1-K6-F4.pep
MAAVTAAQPRSSKTESYVDNKRKEDIRHANINAARAVADAVRTSLGPKGMDKMISTANGEVIITNDGATILNKMEVLQPAAKMLVDLSKSQDSAAGDGTTTVVVIAGALLKQCLTLLSNGIHPTVISDSLHKASIKAVDVLTAMAVPLELSDRESLIKSASTSLNSKVVSQYSTLLAPLAVDSV

SEQ ID NO: 74506 - protein, 192 aa, Gossypium hirsutum
  Clone ID: LIB3584-046-P1-K2-B10.pep
GRVGGRVGGRVGGRVGAAGGPTRMENAKIAVIQFQISPPKTDIEQSIVVSDYTQMDRILKEERNYILGMIKKIKATGCNVLLIQKSILRDAVTDLSLHYLAKAKIMVIKDVEREDIEFITKTLNCLPIANIEHFRAEKLGHADLVEEVSLGDGKIVEVTGIKDMGRTTTVLIRGSNQLVIDEAERSLHDALC

SEQ ID NO: 74507 - protein, 59 aa, Gossypium hirsutum
  unsure (1)..(59): unsure at all Xaa locations
  Clone ID: LIB3189-015-P1-K1-E3.pep
MAAVTAAQPRSSKTESYVDNKRKEDILQANIKAARAVADSFRTSLXPNCMDKIISTAFC

SEQ ID NO: 74508 - protein, 234 aa, Gossypium hirsutum
  Clone ID: GOSHI-09MAY01-C3046_1.pep
MDSLSLDYGSVSSPMSDSGSGNGASRPPNFAGEDVMLASCYPKKRAGRKKFRETRHPVFRGVRRRNSGKWVCEVREPYKKSRIWLGTFPTEEMAARAHDVAALALRGRLACLNFADSAWRLPVPASTDPHASPHAAAEAAEVFRPVDSAGDSSKTAENTAVEGTKESEEVFFLDEEAVFGREKFLANMAAGMMMFSPHSGYVKDEQELEFVYYCEQLWCYSIYRLNVLDSIEIY

SEQ ID NO: 74509 - protein, 172 aa, Gossypium hirsutum
  Clone ID: GOSHI-09MAY01-C3066_1.pep
MLRLRSRGTSFLGSVDVPNLKRKALNSWAAVQDTYFSTKDTFERHKVVFTVGTSIASVATAWFGYSLRHYHESKVDQRLESIENAMRNSHHLEHADFKKLVDPGHSRAAAWVATAGTALIVGYGLGWRGGTWYANRKFRREQLKLLGQIKPKRWQLLGQMKPRGWQFRFLRS

SEQ ID NO: 74510 - protein, 44 aa, Gossypium hirsutum
  Clone ID: GOSHI-09MAY01-C3026_3.pep
MRRGKPLYLNEERYAALTNMVASHGLDRSSKVLGQTTIDTFFVV

SEQ ID NO: 74511 - protein, 304 aa, Gossypium hirsutum
  Clone ID: GOSHI-09MAY01-C3026_2.pep
EFKSSSEFTFSLLQRVVQNLSTTDSLHALQRFRGLQLFAESICSGLVFDNHSTTHNKEDKLLRILKHDDKEALYPDIQLWNRASHPVLARDPFSSLIWVVFCLPCPFISCEESLSSLVHIFYVVSVIQALIVCCQRHGCKTDGLDSHNRLVTDICGILGETGCAHWYFVSNSVDHSCDIKDMIRRLSFPYLRRCALLWKLLKSSSPAPFCERDDVWESSHATTDMMDTVESASVELNEIEELENMFKIPPIDVVLEDEVVLSFALKWFHHFNKVYEACSFRNVFYCNPAVPFKLMSLPHVYQDL

SEQ ID NO: 74512 - protein, 239 aa, Gossypium hirsutum
  Clone ID: GOSHI-09MAY01-C3026_1.pep
SCRLSSATSPFCDRDTIWESFHVTTDMMDTTESNSVELNEVQELETMFKIPPIDVILEDELSRSFALKWVHHFQKAYEACSFQNVFYCNPAVPFKLMTLPHAYQDLLQRYVKQCCPDCKAALVEPALCLLCGRLCSPSWKSCCRESGCMVHAMNCGAGIGVFLLIRRTTILLQRCARQAPWPSPYLDAFGEEDIEMHRGKPLYLNEERYAALTYMVASHGLDRSSKVLGQTTIGTFFMV

SEQ ID NO: 74513 - protein, 44 aa, Gossypium hirsutum
  Clone ID: LIB3166-013-P1-K1-H12.pep
MRRGKPLYLNEERYAALTNMVASHGLDQSSKVLGQTTIGTFFTV

SEQ ID NO: 74514 - protein, 102 aa, Gossypium hirsutum
  Clone ID: LIB3584-015-P1-K1-C1.pep
ARKTCCGESGCTVHAMTCGAGTGVFLLIRRTTILLQRCAQQAPWPSPYLDAFGEEDIEMHRGKPLYLNEERYAALSYMVASHGLDRSSKVLGQTTIGAFFMV

SEQ ID NO: 74515 - protein, 57 aa, Gossypium hirsutum
  Clone ID: uC-gsflmaxxa009h11b1.pep
SGTGFKEDNTMRKQFGFFYNFPCFFFSSLISRAINSNVKQLKSFSSSRAHIYITYWK

SEQ ID NO: 74516 - protein, 269 aa, Gossypium hirsutum
  Clone ID: GOSHI-09MAY01-C3366_1.pep
MQTRTVQVKNLSDLATEREIHEFFSFSGEIEHIDIISEASQSKTAYVTFKDPKALEIALLLSGATIVDKIVTIISVENYVPKLEIHESRAADNIVSIAPAGHSASNDEQGRTSPPGSGRMYVRRAQDVVSSMLAKGSAIRQDAVNKAKAFDEKHQLRASASAKVMSFDRRVGLTEKLTVGISVVNEKVKSVDQRLQVSDKTMAAIFAAERKINDTGSAVKSSRYVTAGTAWLNGAFSKVAKAGQVAGTKTKEKFNLAMSNLTAKDGIAV

SEQ ID NO: 74517 - protein, 120 aa, Gossypium hirsutum
  unsure (1)..(120): unsure at all Xaa locations
  Clone ID: GOSHI-09MAY01-C3246_2.pep
ELDKYLTEANEEFVEDFDILLWXKVNSTRFPTLSKMARDVLAIPVFTVASESTFSTGGRVLDQYRSSLTPKIVQALVCTQYWIQKSLSQEDIKKIKEQIQDLDKIENDFSWNASKPTLNS

SEQ ID NO: 74518 - protein, 105 aa, Gossypium hirsutum
  unsure (1)..(105): unsure at all Xaa locations
  Clone ID: GOSHI-09MAY01-C3246_1.pep
YPEARYCLSGSSDSMSRLWELGQQRCVHSYAVHTDSVWALASTPTFSHVYSGGRDLSLYLTDLTTRESXLLCTKEHPILQLALHDDSIWVATTDSSVHRWSGGGK

SEQ ID NO: 74519 - protein, 125 aa, Gossypium hirsutum
  Clone ID: uC-gsronu33B012b09b1.pep
ALFKNHELENGGKDKTSELDKYLAEANEEFVEDFDILWWKVNNPRFPTLSKMAKDVLAIPVSTVASESAFSTRGRVLDKYRSSLTPKIVQALGWTQDWIRKSLLQGRHQKDWRNKFKSLTRIEMI

SEQ ID NO: 74520 - protein, 117 aa, Gossypium hirsutum
  Clone ID: LIB3583-016-P1-K1-H5.pep
NQHYVLAEHLIKEYQFHRAHQHNLLDVTYEVLDIPIFTIASESAFSTGGRVLDPYRSSLTPKIVQALVCTQDWIRKSSSQEDIKKIEEQIQDLDKIENGLMQMEIFWREEMDINGEY

SEQ ID NO: 74521 - protein, 44 aa, Gossypium hirsutum
  Clone ID: LIB3146-033-Q1-K1-E3.pep
DAWESHNSQICNRVLNFSVLNLNLRFSDGKIHHFCYPFLFLHTN

SEQ ID NO: 74522 - protein, 70 aa, Gossypium hirsutum
  Clone ID: LIB3272-057-P1-N1-C8.pep
PILSKMARDVLAIPVSTVASESTFSTGGRVLDQYRSSLTPKIVQALVCTQDWIRKSSSQEDIKKIEEQIQ

SEQ ID NO: 74523 - protein, 120 aa, Gossypium hirsutum
  unsure (1)..(120): unsure at all Xaa locations
  Clone ID: GOSHI-09MAY01-C6_1.pep
MASEQYQAMRNAPQEEKEELDARAKQGETVVPGGTRGKSLDAQINLAEGRHKGGETRKQQLGTEGYQEMGRKGGLSNSDMSGGERAADEGVTIDESKFRTKXLNIISHDRTLATLFIYKP

SEQ ID NO: 74524 - protein, 109 aa, Gossypium hirsutum
  Clone ID: GOSHI-09MAY01-C86_38.pep
MNYDITPVFHACLVSVLVHLCWFIETSCENMISGKGMRPGDIVTASNGKTIEVNGTDAEGRLTLADASDYACNPVDLATLTGACVVALGPSMAGIYLTYEFLNIVGTSI

SEQ ID NO: 74525 - protein, 89 aa, Gossypium hirsutum
  Clone ID: GOSHI-09MAY01-C86_32.pep
MVYYENDFQADMLKSTAIYHSNTSVTFIIGGPHGDAGLTGRKIIIDTYGGWGAHGGGAFSGKDPTKVDRSGADNVRQSAKSIEANVLAR

SEQ ID NO: 74526 - protein, 274 aa, Gossypium hirsutum
  unsure (1)..(274): unsure at all Xaa locations
  Clone ID: GOSHI-09MAY01-C86_26.pep
EKREKRVVTGEADNFGCDFLGLLVNAYHEADEKNRLSIQDLVDECKTFYFAGHETVNSLLAWATLLLAIHTDWQDKARAEVIEVFGNQNPDSEGMAKLKTVSKLSHATGQATGSDHLYCLLDFFLSNTITMIINETLRLYPPLSGVIREVGREVQLGKLVLPTHSEVDMRIIALHHDPXLWGDDVNLFKPERFAEGIAKATKYNAAAFMPFGLGPRSCVGMSFAITEAKTALSMILQRYTVXVSPTYVHAPAPRLSLKPQHGIQMLFHSLHYDA

SEQ ID NO: 74527 - protein, 101 aa, Gossypium hirsutum
  unsure (1)..(101): unsure at all Xaa locations
  Clone ID: GOSHI-09MAY01-C86_20.pep
IVANGLAGRCLVQVSYAIGVSEPWSVFVDSXGTGKIPDKEILQIVKENFDFRPGMITNNLDLKRGGNNRFLKTAAYGHFGRDDPDFTWEVVKPLKWDESQS

SEQ ID NO: 74528 - protein, 86 aa, Gossypium hirsutum
  Clone ID: GOSHI-09MAY01-C86_19.pep
YAIGVPEPLSVFGDSYGTGKIPDKEILQIVKENFDFRPGMITINLDLKRGGNGRFLKTAAYGHFGRDDPDFTWEVVKPLKWDKPQS

SEQ ID NO: 74529 - protein, 155 aa, Gossypium hirsutum
  Clone ID: GOSHI-09MAY01-C86_17.pep
METFLFTSESVNEGHPDKLCDQISDAVLDACLAQDPDSKVACETCTKTNMVMVFGEITTKANVDYEKIVRDTCRSIGFVSDDVGLDADNCKVLVNIEQQSPDIAQGVHGHFTKRPEEIGAGDQGHMFGYATDETPELMPLSHVLATKLGARLTEV

SEQ ID NO: 74530 - protein, 436 aa, Gossypium hirsutum
  unsure (1)..(436): unsure at all Xaa locations
  Clone ID: GOSHI-09MAY01-C86_15.pep
SHVYSWINKYGSTFLSWNGIRAQLQITDPDLVKEVLKNSDKAFRKPKTSYFFVKLIGDGLASTEREKWARQRKLANYAFHGESLKNMTPAVVASVETMLEKWKSKEGKEIEVFQEFRLLTSEVISRTAFGSSYLEGEKDFEXMLMKLTVIAGRNILKAKIPIISKFWKSADEIESERIAQMIHDSVMRIVKKKGERVVNGEADNFGRDFLGLLVNAYHEADQENRLSIQDMVDECKTFYFAGQETVNSLLAWATLLLAIHTDWQDRARAEVIEVFGNQNPNCEGMAKLKTITMIINETLRLYPPVNGVIREVGREVQLGKLVLPTHLEVDMRIIALHHDPDLWGDDVNLFKPERFAEGIAKATKYNAAAFMPFGLGPRSCVGMSFAITEAKTALSMILQRYTVTVSPTYVHAPAPRLTLKPQHGMQLLFHSLHYDA

SEQ ID NO: 74531 - protein, 141 aa, Gossypium hirsutum
  Clone ID: GOSHI-09MAY01-C86_13.pep
MAPKAEKKPAEKKPAEEKKAEKVPAEKKPRAEKKLPKEAGDKKKKRSKKSIETYKIYIFKVLKQVHPDIGISSKAMGIMNSFISDIFEKLAQESSRLARYNKKPTITSREIQTAVRLVLPGELAKHAVSEGTKAVTKFTSS

SEQ ID NO: 74532 - protein, 339 aa, Gossypium hirsutum
  unsure (1)..(339): unsure at all Xaa locations
  Clone ID: GOSHI-09MAY01-C86_11.pep
FLLQLLLCVQELKYAEDVSSAIVFGRELVNSPANVLTPAALAEEASKIASSYSDVISANILTAEQCKELKMGSYLGVAAASDNPPYFIHLCYKPSSGPIKAKLALVGKGLTFDSGGYNIKTGPPTRADVMKIDMGGSAAVIGAAKALGQIKPPGVEDHYIDASCENMISGTGMRPGDILTASNGKTIEVNNTDAEGRLTLADALVYACNQGVXKIVDQATLTGACIVALGPSIAGVFTPSDELAKEVFEASEISGEKFWRMPLEESYWESMKSGVADMVNTGGRPGGAITAALFLKQFVDEKVQWMHIDLAGPVWNEKKRVATGFGVSTLVEWVLKNSS

SEQ ID NO: 74533 - protein, 180 aa, Gossypium hirsutum
  unsure (1)..(180): unsure at all Xaa locations
  Clone ID: GOSHI-09MAY01-C86_9.pep
MQNLIGEHKKMETMGKLLILLTAFLCLYLFVALLNVFYKYWWIPQRVQFIMNSQGIRGPPYEFIHGNNKEAAQMLMEASTKPMGLTHDIFPRVVPHVYSWINKYGSTFLSWNGIRAQLQITDPDLVKEVLKNSEKAFRKPKTSYFFDRLIXTGLASTEREKWARQRKLANYAYHGESLKN

SEQ ID NO: 74534 - protein, 356 aa, Gossypium hirsutum
  Clone ID: GOSHI-09MAY01-C86_8.pep
APTRPPTRPLKSLDILGLGTGPEIEKKIKYAEVVSCAIIFGRELVNSPANVLTPAALAAEASKIASLYSDVLSANILTEEQCRELKMGSYLGVAAASANPPHFIHLCYKPPSGPVKTKLALVGKGLTFDSGGYNIKTGPGSSIETMKVDMGGSAAVFGAAKALGQIKPSGVEVHFIVASCENMISGKGMRPGDIVTASNGKTIEVNNTDAEGRLTLADALVYACNQGVEKIVDLATLTGACVVALGPSIAGVFTPNDDLAKELFQASEASGEKLWRMPLEESYWESMKSGVADMVNTGGRQGGAINAALFLKQFVDEKVKWMHIDMAGPVLNDKKHVATGFGISTLVEWVLKNSSS

SEQ ID NO: 74535 - protein, 131 aa, Gossypium hirsutum
  unsure (1)..(131): unsure at all Xaa locations
  Clone ID: GOSHI-09MAY01-C86_6.pep
ENSQPREKKAEKAPAGEKPKSXKKLPKEAGHKKKKRSKKSIDTYKIYIFKVLKQVPPDIGISGKAMGIMNSFINDIFEKLAQESSRLARYNKKPTITSREIQTAVRLVLPGELAKHAVSEGTKAVTKFTSS

SEQ ID NO: 74536 - protein, 393 aa, Gossypium hirsutum
  Clone ID: GOSHI-09MAY01-C86_5.pep
METFLFTSESVNEGHPDKLCDQISDAVLDACLAQDPDSKVACETCTKTNMVMVFGEITTKANVDYEKIVRDTCRSIGFVSDDVGLDADNCKVLVNIEQQSPDIAQGVHGHFTKRPEEIGAGDQGHMFGYATNETPELMPLSHVLATKLGARLTEVRKNGTCPWLRPDGKTQVTVEYNNDNGAMVPVRVHTVLISTQHDETVTNDEIAADLKEHVIKPVIPEKYLDGKTIFHLNPSGRFVIGGPHGDAGLTGRKIIIDTYGGWGAHGGGAFSGKDPTKVDRSGAYIVRQAAKSIVANGLARRCLVQVSYAIGVPEPLSVFVNSYGTGKIPDKEILQIVKENFDFRPGMITIDLDLKRGGNGRFLKTAAYGHFGRDDPDFTWEVVKPLKWEKPQS

SEQ ID NO: 74537 - protein, 141 aa, Gossypium hirsutum
  Clone ID: GOSHI-09MAY01-C86_4.pep
MAPKAEKKPAEKKPAEEKKAEKAPAEKKPRAEKKLPKEAGDKKKKRSKKSIETYKIYIFKVLKQVHPDIGISSKAMGIMNSFINDIFEKLAQESSRLARYNKKPTITSREIQTAVRLVLPGELAKHAVSEGTKAVTKFTSS

SEQ ID NO: 74538 - protein, 393 aa, Gossypium hirsutum
  Clone ID: GOSHI-09MAY01-C86_3.pep
METFLFTSESVNEGHPDKLCDQISDAVLDACLAQDPDSKVACETCTKTNMVMVFGEITTKANVDYEKIVRDTCRSIGFVSDDVGLDADNCKVLVNIEQQSPDIAQGVHGHFTKRPEEIGAGDQGHMFGYATDETPELMPLSHVLATKLGARLTEVRKNGTCPWLRPDGKTQVTVEYYNDKGAMVPVRVHTVLISTQHDETVTNDEIAADLKEHVIKPVIPEKYLDEKTIFHLNPSGRFVIGGPHGDAGLTGRKIIIDTYGGWGAHGGGAFSGKDPTKVDRSGAYIVRQAAKSIVANGLARRCIVQVSYAIGVPEPLSVFVDSYGTGKIPDKEILQIVKENFDFRPGMITINLDLKRGGNGRFLKTAAYGHFGRDDPDFTWEGVKPLKWEKPQS

SEQ ID NO: 74539 - protein, 393 aa, Gossypium hirsutum
  Clone ID: GOSHI-09MAY01-C86_2.pep
METFLFTSESVNEGHPDKLCDQVSDAVLDACLAQDPDSKVACETCTKTNMVMVFGEITTKANVDYEKIVRDTCRSIGFVSDDVGLDADNCKVLVNIEQQSPDIAQGVHGHFTKRPEEIGAGDQGHMFGYATDETPEFMPLSHVLATKLGARLTDVRKNGTCPWLRPDGKTQVTVEYYNDNGAMVPVRVHTVLISTQHDETVTNDEIAADLKEHVIKPVIPEKYLDEKTIFHLNPSGRFVIGGPHGDAGLTGRKIIIDTYGGWGAHGGGAFSGKDPTKVDRSGAYIVRQAAKSIVANGLARRCIVQVSYAIGVPEPLSVFVDSYGTGKIPDKEILQIVKENFDFRPGMITINLDLKRGGNSRFLKTAAYGHFGRDDPDFTWEAVKPLKWDKPQS

SEQ ID NO: 74540 - protein, 299 aa, Gossypium hirsutum
  Clone ID: GOSHI-09MAY01-C86_1.pep
MMSTTHLLVFLLGVVTLTTPTFGTYESPNYGKPPTPVFKPPKVKPPPYEPKPPVYEPPKKEKPEPKPPVYAPPKKEKHGPKPPMYEPPKKEKPEPKPPVYTPPKKEEPKPKPPVYEPPKKEKPEPKPPIYTPPKKEKPEPKPPVYEPPKKEKPEPKPPVYTPPKKEKPEPKPPVYEPPKKPPMYEPKPPKPPVYTPPKKEKPEPKPPMYEPPKKPPMYEPKPPKPPVYTPPKKEKPEPKPPMYQPPNNPPIYEPKPPKPPVYAPPKEEKPKPKPPVYEPPAHEPPYGHYPGHPPLGKPQ

SEQ ID NO: 74541 - protein, 243 aa, Gossypium hirsutum
  unsure (1)..(243): unsure at all Xaa locations
  Clone ID: AI726536.1.pep
MMSTTHLLVFLLGVVTLTTPTFGTYESPNYGKPPTPVFKPPKVKPPPYEPKPPVYEPPKKEKPEPKPPVYAPPKKEKHGPKPPMYEPPKKEKPEPKPPVYTPPKKEEPKPKPPVYEPPKNEKPEPKPPIYTPPKTEIPEPKPPVYEPPKKEKPEPXPPVYTPPNKEKPEPKPPVYETPQKXPMYEPKPPNHGLFTPKKETLNPTTMFEPPKYLPXYEPKPPNPRVYTPPKNKKKFCRAPAVEL

SEQ ID NO: 74542 - protein, 145 aa, Gossypium hirsutum
  unsure (1)..(145): unsure at all Xaa locations
  Clone ID: AI730900.1.pep
KAKKAKPLKKTKHEPKPPVYEPPKKXPPMFEPKPPKPPVYTPPKKEKPEPKPPMYEPPKKPPMYEPKPPKPPVYTPPKKEKPEPKPPMYQPPNNPPIYEPKPPKPPVYAPPKEEKPKPKPPVYEPPAHEPPYGHYPGHPPLGKPQ

SEQ ID NO: 74543 - protein, 227 aa, Gossypium hirsutum
  unsure (1)..(227): unsure at all Xaa locations
  Clone ID: AI727708.1.pep
STTHLLVFLLGVVTLTTPTFGTYESPNYGKPPTPVFKPPKVKPPPYEPKPPVYEPPKKEKPEPKPPVYAPPKKEKHGPKPPMYEPPKKEKPEPKPPVYTPPKKEEPKPKPPVYEPPKKEKPEPKPPIYTPPKKEKPEPKPPVYEPPKKEKPEPKPPVYTPPKKEKPEPKPPVYEPPKKPPMYEPKPPKPPVYTPPKKEKXETKPPMYETPKKEKPXKATVYTPPKIE

SEQ ID NO: 74544 - protein, 189 aa, Gossypium hirsutum
  Clone ID: AI726420.1.pep
MMSTTHLLVFLLGVVTLTTPTFGTYESPNYGKPPTPVFKPPKVKPPPYEPKPPVYAPPKKEKHGPKPPMYEPPKKEKPEPKPPVYTPPKKEEPKPKPPVYEPPKKEKPEPKPPIYTPPKKEKPEPKPPVYEPPKKEKPEPKPPVYTPPKKEKPEPKPPVYEPPKKPPMYEPKPPKPPVYTPPKKEKPEP

SEQ ID NO: 74545 - protein, 144 aa, Gossypium hirsutum
  unsure (1)..(144): unsure at all Xaa locations
  Clone ID: uC-gsflnu33B083d07b1.pep
LPIYEPTKKEKPEPKPPVYTPPKKEKPEPKPPVCEPPKKPPVYEPKPPKPSVYTPPKKKKPEPKPPVCEPPKEPTVYEPKPPKPPVYTPTEREKPEPTPPMYQPPNNPPIYEPKPPKPPVYAPPEEEXPKPKPPVYEPSAYEPP

SEQ ID NO: 74546 - protein, 153 aa, Gossypium hirsutum
  unsure (1)..(153): unsure at all Xaa locations
  Clone ID: AI730247.1.pep
LLGLLRKPPTPVFKPPKVKPPPYEPKPPVYEPPKNEKPEPKPPVYAPPKKENHGPQPPMYEPPKKEKPDPNPPVYTPPNKQEPKPKPPLYEPPXNDKPEPKPPIYTPPNKYKPEPITSVYYPPIIDNPDPYPSVYTPPNQXKPESTPLMYEPS

SEQ ID NO: 74547 - protein, 87 aa, Gossypium hirsutum
  Clone ID: AI730343.1.pep
ILIFLVAQLLGMASRWEHFIEASPKVDFLDSDRMVAHVPEAHKLVVVTFGFWVTIFFIFFFFNFFPVWKFGFLSWMLFFGSMNGDLV

SEQ ID NO: 74548 - protein, 103 aa, Gossypium hirsutum
  Clone ID: LIB3145-035-Q1-K1-G5.pep
MCRTRMETFLFTSESVNEGHPDKLCDQVSDAVLDACLAQDPDSKVACETCTKTNMVMVFGEITTKANVDYEKIVRDTCRSIGFVSDDVGLDADNCKVLVNIEQ

SEQ ID NO: 74549 - protein, 174 aa, Gossypium hirsutum
  Clone ID: LIB3582-029-P1-K1-F5.pep
PTRTRPTRPVTNDEIAADLREHVIKPVIPEKYLDEKTIFHLNPSGRFVIGGPHGDAGLTGRKIIIDTYGGWGAHGGGAFSGKDPTKVDRSGAYIVRQAAKSIVANGLARRCIVQVSYAIGVPEPLSVFVDSYGTGKIPDKEILQIVKENFDFRPGMITINLDLKRGGNGRFLET

SEQ ID NO: 74550 - protein, 164 aa, Gossypium hirsutum
  Clone ID: uC-gsronu33B164h05b2.pep
PVFKPPKVKPPPYEPKPPVYTPPKKEKPEPKPPVYEPPKKEKPEPKPPVYEPPKKEKLEPKSPVYAPPKKEKPEPKPPIYEPPKKEKPEPKPPVYTPPKKEKPEPKPPMYEPPKKPPMYEPKPPKPSVYTPPKKKKPEPKPPMYEPPKKPSMYEPKPPKPPVYT

SEQ ID NO: 74551 - protein, 102 aa, Gossypium hirsutum
  Clone ID: LIB3543-043-Q6-K6-C11.pep
KSERKKNSNHILRTSFLFLFSISLYFSVPVRFYIQSSCGGRNAEKWLYIAKTKGLFDRGKIFSGIGFPHFPMFVWRKIFSFCKINSTTRVKSSHLSGKCLTP

SEQ ID NO: 74552 - protein, 152 aa, Gossypium hirsutum
  unsure (1)..(152): unsure at all Xaa locations
  Clone ID: uC-gsflnu33B059a01b1.pep
MITFLGVTKTKEAGAQGPMLGLAPNETLDLMPLSHVLATNLGGRLTDVRKNGTCPWXRPDGXTQVTVEYNNDNGAMVPVRXHTVLISTQHDETVTNDEIAADLKEHVIKPVIPGKHLDEKTIFHLNPSGRCVIGGPHGDAGLTGRKIIIDTY

SEQ ID NO: 74553 - protein, 44 aa, Gossypium hirsutum
  Clone ID: AI726351.1.pep
AKFSLSFATPTEEKPKPKPPVYEPPAHEPPYGHYPGHPPLGKPQ

SEQ ID NO: 74554 - protein, 44 aa, Gossypium hirsutum
  Clone ID: uC-gsflmaxxa091h02b1.pep
METFLFTSESVNEGHPDKLCDQVSDAVLDACLAQDPDSKVAVAM

SEQ ID NO: 74555 - protein, 88 aa, Gossypium hirsutum
  unsure (1)..(88): unsure at all Xaa locations
  Clone ID: LIB3493-029-P1-M1-D2.pep
LLLRFWCHVFIFCLHFFSFFFLHLLIFILFFLIFYFIFXSXFIYFFIYFFHLFFFFFFLLFLFFFFFYLFSFYFFYYLIFFFFFLLFL

SEQ ID NO: 74556 - protein, 136 aa, Gossypium hirsutum
  unsure (1)..(136): unsure at all Xaa locations
  Clone ID: LIB3148-038-Q1-K1-H11.pep
PRVRFPQLLSSPFPQLLSSPYRLQHHHLCLIFSASSPLLFACLVSVLVHLCWFIEASCENMISGKGMRPGDIVTASNGKTIEVNNTDAEGRLTLADALVYACNQXVDLATLTGACVVALGPSIAGGSKGVFTPNDD

SEQ ID NO: 74557 - protein, 136 aa, Gossypium hirsutum
  Clone ID: LIB3189-046-P1-K1-A3.pep
MSTTHLLVFLLGVVTLTTPTFGTYESPNYGKRPTPVFKPPKVKPPPYEPKPPVYEPPKKEKPVPNPPVYAPPKKEKHGPKPPMYEPPKKEKPEPKPPVYTPPKKEEPKPKPPVLRCQKSGKLWFVVKISSFLWVFL

SEQ ID NO: 74558 - protein, 104 aa, Gossypium hirsutum
  unsure (1)..(104): unsure at all Xaa locations
  Clone ID: LIB3083-009-Q1-L1-F2.pep
QGRRLITVTVIYEKPEPKPPVGTPXKKERPXPKPPVYEPPKKEKPEPKPPVYTPSKKEKPEPKPPVYEPSKKPPMYXPKPPKPPVYTPPKKEKPXPKPPMYEPF

SEQ ID NO: 74559 - protein, 147 aa, Gossypium hirsutum
  Clone ID: AI726913.1.pep
EEFFSTHSTKVETPKKEKPEPKPPVYTPPKKEEPKPKPPVYEPPKKEKPEPKPPIYTPPKKEKPEPKPPVYEPPKKEKPEPKPPVYTPPKKEKPEPKPPVYEPPKKPPMYEPKPPKPPVYTPPKKEKPEPKPPMYEPPKKPPMYEPK

SEQ ID NO: 74560 - protein, 158 aa, Gossypium hirsutum
  Clone ID: uC-gsflmaxxa076c05b1.pep
FTKLLGRIYYHKAGSSTPGYSLRTFSGHSGNVMSLDFHPTKDDLICSCDGDGEIRYWSINHGSCARVFKGGTAPGTAQLRFQPRFGKYLALAAENVVSILDAETQTCRHSLQGHTKLIIILFSPLIFFFFGYSEFVSCISVVLQKCMRILLYILMALE

SEQ ID NO: 74561 - protein, 163 aa, Gossypium hirsutum
  unsure (1)..(163): unsure at all Xaa locations
  Clone ID: LIB3147-026-Q1-K1-F7.pep
TRPPTRPPTFSPTRPQNPDSKKMAKLKTITMIINETLRLYPPLSGVIREVGREVQLGKLVLPTHSEVDMRIIALHHDPDLWGDDVNLFKPERFAEGIAKATKYNAAAFMPFGLGPLTCSGMSFSITEAKLHXSXSATLTFTVFPTYVHAPALRLTLKPQHGMH

SEQ ID NO: 74562 - protein, 130 aa, Gossypium hirsutum
  Clone ID: LIB3135-053-Q1-K1-B6.pep
PTRPPTRPPTRPGREVQLGKLGLPTHSEVDMRIIALHHDPDLWGDDVNLFKPERFAEGIAKATKYNAAAFMPFGLGPPSCVGMSFAITEAKTALMFTHLHYVLHSSHNMGCCCFIHYIMMLKILGCWSPI

SEQ ID NO: 74563 - protein, 94 aa, Gossypium hirsutum
  Clone ID: uC-gsronu33B149a04b1.pep
MYENFAYIDGTGSKQSSSYKKKKKKKKKKKKKKKKKKKKKKKKKKKKKKKKKKKKKKKKKKKKKKKKRGGPFKGTKFYSPGVGKNYFFFGAPKI

SEQ ID NO: 74564 - protein, 89 aa, Gossypium hirsutum
  Clone ID: uC-gsronu33B077h05b1.pep
LVSTDPDLWGDDGNHGQPLKTAAYGHFGRDDPDFTWECCESLNVGHAPILSSALLPCLSACLSIVLNNICLAAHLYSIFIPRMLLILFI

SEQ ID NO: 74565 - protein, 44 aa, Gossypium hirsutum
  Clone ID: uC-gsronu33B008a05b1.pep
IVLFLKRGGNGRFLKTAAYGHFGRDDPDFTWEVVKPLKWEKPQS

SEQ ID NO: 74566 - protein, 53 aa, Gossypium hirsutum
  Clone ID: LIB3189-028-P1-K1-G6.pep
FFGLGVVFNEPPKKEKPEPKPPVYAPPKKENHGPKPPMYEPSKKEKSEPKPPV

SEQ ID NO: 74567 - protein, 122 aa, Gossypium hirsutum
  Clone ID: LIB3196-021-P1-M1-A10.pep
DGEIRYWSINHGSCARVFKGGTAPGTAQLRFQPRFGKYLALAAENVVSILDAETQTCRHSLQGHTKLIHSVCWDLSGELLASVSEDSVRVWSFRSGSEGECVHEWSCNGNKFHSCVFNPTSP

SEQ ID NO: 74568 - protein, 76 aa, Gossypium hirsutum
  unsure (1)..(76): unsure at all Xaa locations
  Clone ID: LIB3147-029-Q1-K1-G9.pep
GKXALCSYNIVGTSYKKQRKTEQYSNNKLLIHETDLTEPNNLEQVVLLFRSATVTTEHVPSFHLRRRVLQNPFHQS

SEQ ID NO: 74569 - protein, 52 aa, Gossypium hirsutum
  unsure (1)..(52): unsure at all Xaa locations
  Clone ID: uC-gsronu33B154f01b2.pep
SLSPLIVSCQCRVAKMYENFAYIDATGSKQSSSYDCLMEFLATLIKXXKLKT

SEQ ID NO: 74570 - protein, 97 aa, Gossypium hirsutum
  unsure (1)..(97): unsure at all Xaa locations
  Clone ID: GOSHI-09MAY01-C56_2.pep
NTFLWNKECKKHTXHKVTQPNNDTIAMAAQDTHRYDRKQSCYGGQTKPLFHKKAKTTXKIVLRLQLPCYKHVSQHPIKRCLHSEIGGDNKGKGTSLF

SEQ ID NO: 74571 - protein, 105 aa, Gossypium hirsutum
  Clone ID: GOSHI-09MAY01-C56_1.pep
MVNVPKTKKTYCKSKECRKHTLHKVTQYKKGKDSLAAQGKRRYDRKQSGYGGQTKPVFHKKAKTTKKIVLRLQCQGCKHVSQHPIKRCKHFEIGGDKKGKGTSLF

SEQ ID NO: 74572 - protein, 53 aa, Gossypium hirsutum
  Clone ID: LIB3147-008-Q1-K1-B11.pep
MFISVCRFMCFQCFFQYFHMIFSKNVFGIVSFLSYINVFFSTVRKLQNIIRRN

SEQ ID NO: 74573 - protein, 203 aa, Gossypium hirsutum
  Clone ID: GOSHI-09MAY01-C46_2.pep
KRGDPRAWGISAQVQIYSTTTVEGITGFVPKDSAFKALTKPSLSNLTDDQFKSVLLYHALPRYYALADFNDLSEKGPISTLAGGQYTLQFNDESGTVRLDSGWSKAKVTSAVHTSKPVAVYQVDKVLLPEAIFGTDIPPTPAPAPALGISPSADTPSAAKSEETGSSSKPSSSGSSSPRIMMNSGIWTLLVLAFLGGWLVLFF

SEQ ID NO: 74574 - protein, 263 aa, Gossypium hirsutum
  Clone ID: GOSHI-09MAY01-C46_1.pep
MEFSMIFMISFSVLILCSSLAYGQVAMSTNPTPSPSPAPAPTPAYTNIKDLLSVAGPYHKFLGYLESTKLIDTFQIQANNTVEGITIFVPKDSAFKALTKPSLSNLTDDQFKSVLLYHALPRYYALADFNDLSEKGPISTLAGGQYTLQFNDESGTVRLDSGWSKTKVTSAVHTSKPVAVYQIDKVLLPEAIFGTDIPPTPAPAPALGIGPSADTPSAAKSEETGSSSKPSFSGSSSPRIMMNSGIWTQLVLAFLGGWLVLFF

SEQ ID NO: 74575 - protein, 129 aa, Gossypium hirsutum
  unsure (1)..(129): unsure at all Xaa locations
  Clone ID: GOSHI-09MAY01-C76_27.pep
NLSSFIETKAEKGKKKREMGLSFTKLFSRLFAKKEMRILMVGLDAAGKTTILYKLKLGEIVTTIPTIGFNVETVEYKNISFTVWDVGGQDKIRPLWRHYFQNTQGLXFVVDSNDRDRVVEXRDELHRML

SEQ ID NO: 74576 - protein, 167 aa, Gossypium hirsutum
  Clone ID: GOSHI-09MAY01-C76_25.pep
MGLSFTKLFSQLFSKKEMRILMVGLDAAGKTTILYKLKLGEIVTTIPTIGFNVETVEYKNISFTVWDVGGHDKIRPLWRHYFQNTQGLIFVVDSNDRDRVVEARDELHRMLNEDELRDAVLLVFANKQDLPNAMNAAEITDKLGLHSLRQRHWYIQSTCATSGEGLY

SEQ ID NO: 74577 - protein, 208 aa, Gossypium hirsutum
  Clone ID: GOSHI-09MAY01-C76_23.pep
RGRVGCLFQFSGHPSQIFQSLTIQNKRMGLSFAKLFSRLFAKKEMRILMVGLDAAGKTTILYKLKLGEIVTTIPTIGFNVETVEYKNISFTVWDVGGQDKIRPLWRHYFQNTQGLIFVVDSNDRDRVVEARDELHRMLNEDELRDAVLLVFANKQDLPNAMNAAEITDKLGLHSLRQRHWYIQSTCATSGEGLYEGLDWLSNNIANKA

SEQ ID NO: 74578 - protein, 125 aa, Gossypium hirsutum
  Clone ID: GOSHI-09MAY01-C76_21.pep
MAAGEEGEFVYRISTAEEWEALQKNGSAFGGDLDKCCGFIHLSSLHQVKPTLQNFFSNVKLDLYLLQIDAKKLGDGLIYEVVDGSNSFPHFYGSSRSFAPLPLDAVTKAEKLSVVDGQFSCSLLN

SEQ ID NO: 74579 - protein, 182 aa, Gossypium hirsutum
  unsure (1)..(182): unsure at all Xaa locations
  Clone ID: GOSHI-09MAY01-C76_20.pep
MGLSFTKLFSRLFAKKEMRILMVGLDAAGKTTILYKLKLGEIVTTIPTIGFNXVETGEYKNISFTVWDVGGQDKIRPLWRHYFQNTHGLIFVVDSNDRDRVVEARDELHRMLNEDELRDAVLLVFANKQDLPNAMNAAEITDKLGLHSLRQRHWYIQSTCATSGEGLYEGLDWLSNNIANKA

SEQ ID NO: 74580 - protein, 188 aa, Gossypium hirsutum
  unsure (1)..(188): unsure at all Xaa locations
  Clone ID: GOSHI-09MAY01-C76_19.pep
WQTSTRKKWGNPREKKSTGICQKEMRILMVGLDAAGKTTILYKLKLGEIVTTIPTIGFNVETVEYKNISFTVWDVGGQDKIRPLWRHYFQNMQXLIFVVDSNDRDRMVEAKDELHTMLNEDELKDAVLLVFANKQDLPNAMNAAEITDKLGLHSLRQRHWYIQSTCATSGEGLYQGLDWLSNNIANKA

SEQ ID NO: 74581 - protein, 149 aa, Gossypium hirsutum
  Clone ID: GOSHI-09MAY01-C76_18.pep
MGLSFAKLFSRLFAKKEMRILMVGLDAAGKTTILYKLKLGEIVTTIPTIGFNVETVEYKNISFTVWDVGGQDKIRPLWRHYFQNTQGLIFVVDSNDRDRVVEARDELHRMLNEDELRDAVLLVFANKQDLPNAMNAAEITDKLGLHSLR

SEQ ID NO: 74582 - protein, 172 aa, Gossypium hirsutum
  Clone ID: GOSHI-09MAY01-C76_17.pep
TGGLPQENHNRFQILLPSSAESTVSRKWKATMGLTFTKLFSRLFAKKEMRILMVGLDAAGKTTILYKLKLGEIVTTIPTIGFNVETVEYKNISFTVWDVGGQDKIRPLWRHYFQNTQGLIFVVDSNDRDRVVEARDELHRMLNEDELRDAVLLVFANKQDLSNAMNAAEITD

SEQ ID NO: 74583 - protein, 177 aa, Gossypium hirsutum
  unsure (1)..(177): unsure at all Xaa locations
  Clone ID: GOSHI-09MAY01-C76_14.pep
MGLTFTKLFSRLFAKKEMRILMVGLDAAGKTTILYKLKLGEIVTTIPTIGFNVETVEYKNISFTVWDVGGQDKIRPLWRHYFQNTQGLIFVVDSNDRDRVVEARDELHRMLNEDELRDAVLLVFANKQDLPNAMNAAEITDKLGLNSLRQRHWYIQSTCATSGXEGFIGLDWLSTTY

SEQ ID NO: 74584 - protein, 193 aa, Gossypium hirsutum
  Clone ID: GOSHI-09MAY01-C76_13.pep
TLHKEKGKKKREMGLSFTKLFSRLFAKKEMRILMVGLDAAGKTTILYKLKLGEIVTTIPTIGFNVETVEYKNISFTVWDVGGQDKIRPLWRHYFQNTQGLIFVVDSNDRDRVVEARDELHRMLNEDELRDAVLLVFANKQDLPNAMNAAEITDKLGLHSLRQRHWYIQSACATSGEGLYEGLDWLSNNIASQA

SEQ ID NO: 74585 - protein, 181 aa, Gossypium hirsutum
  Clone ID: GOSHI-09MAY01-C76_12.pep
MGLSFAKLFSRLFAKKELRILMVGLDAAGKTTILYKLKLGEIVTTIPTIGFNVETVEYKNISFTVWDVGGQDKIRPLWRHYFQNTQGLIFVVDSNDRDRVVEARDELHRMLNEDELRDAVLLVFANKQDLPNAMNAAEITDKLGLHSLRQRHWYIQSTCATSGEGLYEGLDWLSSNIASKA

SEQ ID NO: 74586 - protein, 198 aa, Gossypium hirsutum
  Clone ID: GOSHI-09MAY01-C76_10.pep
MAPKKAGVSKRVFNKGSWTAEEDRRLAKYIEIHGAKRWKTIAIKSGLNRCGKSCRLRWLNYLRPNIKRGNISDEEEDLIIRLHKLLGNRWSLIAGRLPGRTDNEIKNYWNSHLSKKMINHDVRTEQTSSSEQIVPHKAWETVQMEEEEVVKGSDEIENSEFSIDVDEFFDFSTEGCFGLDWVNKFLELDDQQDPLAMV

SEQ ID NO: 74587 - protein, 181 aa, Gossypium hirsutum
  Clone ID: GOSHI-09MAY01-C76_9.pep
MGLSFTKLFSRLFAKKEMRILMVGLDAAGKTTILYKLKLGEIVTTIPTIGFNVETVEYKNISFTVWDVGGQDKIRPLWRHYFQNTQGLIFVVDSNDRDRVVEARDELHRMLNEDELRDAVLLVFANKQDLPNAMNAAEITDKLGLHSLRQRHWYIQSTCATSGEGLYEGLDWLSNNIANKA

SEQ ID NO: 74588 - protein, 181 aa, Gossypium hirsutum
  Clone ID: GOSHI-09MAY01-C76_8.pep
MGLSFAKLFSRLFAKKEMRILMVGLDAAGKTTILYKLKLGEIVTTIPTIGFNVETVEYKNISFTVWDVGGQDKIRPLWRHYFQNTQGLIFVVDSNDRDRVVEARDELHRMLNEDELRDAVLLVFANKQDLPNAMNAAEITDKLGLHSLRQRHWYIQSTCATSGEGLYEGLDWLSNNIANKG

SEQ ID NO: 74589 - protein, 124 aa, Gossypium hirsutum
  Clone ID: GOSHI-09MAY01-C76_6.pep
MGLSFTKLFSRLFAKKEMRILMVGLDAAGKTTILYKLKLGEIVTTIPTIGFNVETVEYKNISFTVWDVGGQDKIRPLWRHYFQNTQGLIFVVDSNDRDRVVEARDELHRMLNEDELRDAVLLVF

SEQ ID NO: 74590 - protein, 181 aa, Gossypium hirsutum
  Clone ID: GOSHI-09MAY01-C76_4.pep
MGLSFAKLFSRLFAKKEMRILMVGLDAAGKTTILYKLKLGEIVTTIPTIGFNVETVEYKNISFTVWDVGGQDKIRPLWRHYFQNTQGLIFVVDSNDRDRVVEARDELHRMLNEDELRDAVLLVFANKQDLPNAMNAAEITDKLGLHSLRQRHWYIQSTCATSGEGLYEGLDWLSNNIANKA

SEQ ID NO: 74591 - protein, 181 aa, Gossypium hirsutum; identical to SEQ ID NO: 74587
  Clone ID: GOSHI-09MAY01-C76_3.pep

SEQ ID NO: 74592 - protein, 181 aa, Gossypium hirsutum; identical to SEQ ID NO: 74587
  Clone ID: GOSHI-09MAY01-C76_2.pep

SEQ ID NO: 74593 - protein, 181 aa, Gossypium hirsutum
  Clone ID: GOSHI-09MAY01-C76_1.pep
MGLSFTKLFSRLFAKKEMRILMVGLDAAGKTTILYKLKLGEIVTTIPTIGFNVETVEYKNISFTVWDVGGQDKIRPLWRHYFQNMQGLIFVVDSNDRDRVVEARDELHRMLNEDELRDAVLLVFANKQDLPNAMNAAEITDKLGLHSLRQRHWYIQSTCATSGEGLYEGLDWLSNNIANKA

SEQ ID NO: 74594 - protein, 132 aa, Gossypium hirsutum
  Clone ID: LIB3585-005-P1-K1-C4.pep
MGLSFTKLFSRLFAKKEMRILMVGLDAAGKTTILYKLKLGEIVTTIPTIGFNVETVEYKNISFTVWDVGGQDKIRPLWRHYFQNTQGLIFVVDSNDRDRVVEARDELHRMLNEDELRDAVLLVFANKQDLPN

SEQ ID NO: 74595 - protein, 145 aa, Gossypium hirsutum
  unsure (1)..(145): unsure at all Xaa locations
  Clone ID: uC-gsflmaxxa002f07b1.pep
MGLSFTKLFSRLFAKKEMRILMVGLDAAGKTTILYKLKLGEIVTTIPTIGFNVETVEYKNISFTVWDVGGQDKIRPLWRHYFQNTQGLIFVVDSNDRDRVVEARDELHRMLNEDELRDAVLLVFANKQDLXNAMNAAEITDQLGL

SEQ ID NO: 74596 - protein, 104 aa, Gossypium hirsutum
  unsure (1)..(104): unsure at all Xaa locations
  Clone ID: uC-gsronu33B132a05b1.pep
KRGLSFTKLFSRLFAKKEMRILMVGLDAAGKTTILYKLKLGEIVTTIPTIGFNVETVEYKNISFTVGMFGGQDXIRPLWRHYFQNTQXXFVVDSXDRDRVVELR

SEQ ID NO: 74597 - protein, 69 aa, Gossypium hirsutum
  Clone ID: LIB3120-011-Q1-K1-G1.pep
MGLSFTKLFSRLFAKKEMRILMVGLDAAGKTTILYKLKLGEIVTTIPTIGFNVETVEYMNICFTGRDVG

SEQ ID NO: 74598 - protein, 52 aa, Gossypium hirsutum
  Clone ID: LIB3825-031-Q6-K6-H6.pep
ACMPKYIHSTCLCNASRAVSSHDLRWLLSTTKNKSLCVLEVMSPQWSDLYQK

SEQ ID NO: 74599 - protein, 65 aa, Gossypium hirsutum
  Clone ID: LIB3825-031-Q6-N6-H6.pep
FANKQDLPNAMNAAEITDKLGLHSLRQRHWYIQSTCATSGQGLYEGLDWLSIQHCKQGKLMPHDF

SEQ ID NO: 74600 - protein, 142 aa, Gossypium hirsutum
  unsure (1)..(142): unsure at all Xaa locations
  Clone ID: uC-gsronu33B130c12b1.pep
EEVVNTIRSMSFNVGTGRAMDISLTVRVVGGPDKVRPVXSHCFQNAEVHIVVVDRNDRDRAVEARDELHRMLNEDELRDAVLLVFANKQDLPNAMNAAEITDKLGLHSLRQRHWYIQSTCATSGEGLYEGLDWLSSNIASKA

SEQ ID NO: 74601 - protein, 105 aa, Gossypium hirsutum
  Clone ID: LIB3585-050-P1-K1-G3.pep
MGLSFTKLFSRLFAKKEMRILMVGLDAAGKTTILYKLKLGEIVTTIPTIGFNVETGEIKNIIFTVWDVGGQNKVTSFSFYSNISPLTVKIKDCMKRKSGVSFEGL

SEQ ID NO: 74602 - protein, 100 aa, Gossypium hirsutum
  Clone ID: LIB3166-022-P1-K1-B9.pep
GREMGLTFTKLFSRLFAKKEMRILMVGLDAAGKTTILYKLKLGEIVTTIPTIGFNVETVEYKNISFTVWDVGGQDKIRPLWRHYFQNTQGLIFVVDSNDR

SEQ ID NO: 74603 - protein, 128 aa, Gossypium hirsutum
  unsure (1)..(128): unsure at all Xaa locations
  Clone ID: LIB3147-021-Q1-K1-A12.pep
IGFNVETVEYKNISFTVWDVGGQDKXHYFQNTQGLIFVVDSNDRDRVVEARDELHRMLNEDELRDAVLLVFANKQDLPNAMNAAEITDKLGLHSLRQRHWYIQSTCATSGEGLYEGLDWLSNNIANKA

SEQ ID NO: 74604 - protein, 75 aa, Gossypium hirsutum
  Clone ID: LIB3493-047-P1-M1-A3.pep
PAFLSDVKNSLSFTKLFSHLFANKEMRILMVVLDAAGKTTILYKLNLGEIVTTIPTIYFNVETVEYKNISFTVWD

SEQ ID NO: 74605 - protein, 111 aa, Gossypium hirsutum
  unsure (1)..(111): unsure at all Xaa locations
  Clone ID: uC-gsronu33B144g04b1.pep
MGLSFTKLFSRLFAKKEMRILMVGLDAAGKTTILYKLKLGEIVTTIPTIGFNVETVEYKNIRFTVWDVGGQDKIRSLWRHYFQNTQGLIFVVDXNDRDRVAEQGMTAQDVM

SEQ ID NO: 74606 - protein, 93 aa, Gossypium hirsutum
  unsure (1)..(93): unsure at all Xaa locations
  Clone ID: LIB3585-009-P1-K1-E12.pep
MVLSCAKVLILLYDNKEMQYQMEGLDAAGKTTIMYKLKLGEIVTTIPTIGYNVETVEYKNMSYTVXDVGGQDKIRALWRHYFENTQGLSFRVD

SEQ ID NO: 74607 - protein, 48 aa, Gossypium hirsutum
  Clone ID: LIB3272-059-P1-N1-H12.pep
MNAAEITDKLGFHSLRQRHWYIQSACATSGEGLYEGLDWLSNNIASKA

SEQ ID NO: 74608 - protein, 111 aa, Gossypium hirsutum
  Clone ID: LIB3189-041-P1-K1-B11.pep
GLHIKFCSGFNVETVEYKNISFTVWDVGGQDKIRPLWRHYFQNTQGLIFVVDSNDRDRVVEARDELHRMLNEDELRDAVLLVFANKQDLPNAMNAAEITDKLGLHSLRQRH

SEQ ID NO: 74609 - protein, 102 aa, Gossypium hirsutum
  Clone ID: LIB3083-022-Q1-L1-C1.pep
MGLSFTKLFSRLFAKKEMRILMVGLDAAGKTTILYKLKLGEIVTTIPTIGFNVETVEYKNISFTVWDVGGQDKIRPLWRHYFQNTQGLIFVVDSNDRDRVVE

SEQ ID NO: 74610 - protein, 75 aa, Gossypium hirsutum
  Clone ID: LIB3145-010-Q1-K1-C9.pep
HWCLCFEYILDLVRSVGFINKVLMEFVHLNYTPCFFFFFFFFDFLQRFVHCGGITSKTHKDSFLWLIAMIVIVWS

SEQ ID NO: 74611 - protein, 48 aa, Gossypium hirsutum
  Clone ID: LIB3135-014-Q1-K1-H2.pep
MGLSFTKLFSRLFAKKEMRILMVGLDAAGKTTILYKLKLGEIVTTIPT

SEQ ID NO: 74612 - protein, 72 aa, Gossypium hirsutum
  Clone ID: LIB3083-011-Q1-L1-A8.pep
CFFLNPYFFTIPSFYSIFYSFFILFVLYLLFFYFFFLFLLFFFFIIFYFFFFFFFIFLFFFIFYFLYFLYFF

SEQ ID NO: 74613 - protein, 108 aa, Gossypium hirsutum
  unsure (1)..(108): unsure at all Xaa locations
  Clone ID: LIB3149-053-Q1-K1-A8.pep
PLGFFSGGRKMGLSFTKLFSRLFAKKEMRILMVGLDAAGXTTILYKLKLREIATTMNTIGSXERTVLYYDYIFTVWDDRRQYKIRPLWRHXFQNMQRLIFVGDINDRY

SEQ ID NO: 74614 - protein, 76 aa, Gossypium hirsutum
  Clone ID: LIB3083-107-Q1-L1-E9.pep
GREMGLTFTKLFSRLFAKKEMRILMVGLDAAGKTTILYKLKLGEIVTTIPTIGFNVETVEYKNIRFTVWDVGGQDK

SEQ ID NO: 74615 - protein, 127 aa, Gossypium hirsutum
  Clone ID: GOSHI-09MAY01-C66_29.pep
HASAKLLNLTVLRRIDPFVEEILITAAHVAFYEFNIDLSQWSRKDVEGSLFAVKRNTQPRFQFIVMNRRNTDNLVENLLGDFEYEVQDKYLLYRNASQEINGIWFYDAHELEEVANLFSRILTAYSK

SEQ ID NO: 74616 - protein, 122 aa, Gossypium hirsutum
  Clone ID: GOSHI-09MAY01-C66_28.pep
PTSFGITIKPQTDRWVFPETNTGIIVLAEGRLMNLGCATGHPSFVMSCSFTNQVIAQLELWKEKATGKYEKKVYVLPKHLDEKVAALHLGKLGANLTKLTKDQADYISVPIEGPYKPPHYRY

SEQ ID NO: 74617 - protein, 135 aa, Gossypium hirsutum
  unsure (1)..(135): unsure at all Xaa locations
  Clone ID: GOSHI-09MAY01-C66_24.pep
CYSEMHMHRLETYPGVKRITIKPXTDRWVFPETKTGIIVLAEGRLMNLGXATGHPSFVMSCSFTNQVIAQLELWKEKATGKYEKKVYVLPKHLDEKVAALHLGKLGAKLTKLTKDQADYISVPVEGPYKPSHYRY

SEQ ID NO: 74618 - protein, 144 aa, Gossypium hirsutum
  Clone ID: GOSHI-09MAY01-C66_20.pep
MKVKNPEAHLPIAVFLVASVLKEKRTGESQKPCYVMRNRRVAQVSTSDDEDEVPMTRRRSRSEDKRPERKRKKMKLQDEDDEEVDEQMESEKKVYVLPKLLDEKVAALHLGKLGANLTKLTKDQADYISVPVEGPYKPPLYTYL

SEQ ID NO: 74619 - protein, 285 aa, Gossypium hirsutum
  unsure (1)..(285): unsure at all Xaa locations
  Clone ID: GOSHI-09MAY01-C66_19.pep
KEAHKARRGWGHPKSKITHLVFCTTSGVDMPGADYQLTKLLGLRPSVKRIMMXQQGCFAGGTVLRLAKDLAENNKDARVLVVXSEITAXTFRGPXDTHLDSLVGKXFADGAGAVIIGADPDSKSERPLFQFVSVAXSICSDFYFAIDGHLRDVGLNFHLLKDVXPGLISKNIEKSLVEAFPPIGIWDWNSIFWIAHPGGPAILDQIEAKLCLKEDKLRATRHVLSEFGNMSSACVLFIMDEMRKKSLDQGMPTTGEGYEWGVLFGFGPGLTVETVVLHSIPTRAN

SEQ ID NO: 74620 - protein, 36 aa, Gossypium hirsutum
  Clone ID: GOSHI-09MAY01-C66_18.pep
NLNHKNIVKYLGSLKTTTHLHIILEYVENGSLANII

SEQ ID NO: 74621 - protein, 65 aa, Gossypium hirsutum
  Clone ID: GOSHI-09MAY01-C66_16.pep
KPDAAKLDCTNGEISSPTQSPSPYSDPIWSSSSRDLISFPPKLTGRAGRKLLSKSKSNHLTTNHQ

SEQ ID NO: 74622 - protein, 112 aa, Gossypium hirsutum
  unsure (1)..(112): unsure at all Xaa locations
  Clone ID: GOSHI-09MAY01-C66_12.pep
LDISSKFKHISVCISILHPPGDDPNDYELASXRWMPVHTVESIVLSIISMLSSPNDESPANVEAVNDDLVENLLGDFEYEVQDKYLLYRNASQEINGIWFYDAHELEEKGIR

SEQ ID NO: 74623 - protein, 173 aa, Gossypium hirsutum
  unsure (1)..(173): unsure at all Xaa locations
  Clone ID: GOSHI-09MAY01-C66_11.pep
ALLLSIVYMASQASLLLQKQLKDLCKNPVDGFSAGLVDENNIFEWSVTIIGPPDTLYEGGFFNAIMSFPPNYPNSPPAVKFTSEVWHPNVYADGRGCISILHPPGDDPNGYELASERWMPVHTVESIVLSIISMLSSPNDESPANVEAXKEWRERRDEFEKVXRCVRRSQEML

SEQ ID NO: 74624 - protein, 244 aa, Gossypium hirsutum
  unsure (1)..(244): unsure at all Xaa locations
  Clone ID: GOSHI-09MAY01-C66_10.pep
GYALSRMLWIDTAVGYXQGMSHLCSPLIMLLEEESVALXCFTRLMRKLRGNFRCTDSSVGVETQLCSLATVTQVIDPKLHQHLETLGGGDYLFAFRMLMVLFRREFSFCDSLYLWEMMWALEYDPDLFYQYEDSGSDMEKTEGAKVRQKSTRKCGKYERENMKVKNPEAHLPISVFLVASVLKDKSSTLLQEARGLDDVVQILNDITGNLDAKKACIGAMKLHKKYLKKAQATPSTQKLFPFTL

SEQ ID NO: 74625 - protein, 322 aa, Gossypium hirsutum
  unsure (1)..(322): unsure at all Xaa locations
  Clone ID: GOSHI-09MAY01-C66_9.pep
SGPTSSDNAEFQIVLTIIKEGXDSKSEEITKMKERLVGVSEETTTGVKRLYQMQANGTLLFPAINVNDSVTKSKFDNLYGCRHSLPDGLMRATDVMIAGKVAVVCGYGDVGKGCASALKQAGARVIVTEIDPICALQALMEGLQVLTLEDVLSTADIFVTTTGNKDIIMVDHMKKMKNNAIVCNIGHFDNEIDMLGLENYPGVKRITIKPQTDRWVFPDTKTGIIVLAEGRLMNLGCATGHPSFVMSCSFTNQVIAQLELWKEKSTGKYEKKVYVLPKHLDEKVAALHLGKLGAKLTKLTKDQADYISVPIEGPYKPPHYRY

SEQ ID NO: 74626 - protein, 78 aa, Gossypium hirsutum
  Clone ID: GOSHI-09MAY01-C66_8.pep
MSCCGGNCGCGSGCKCGSGCGGCKMYPEMNFAEQTTTGTLVLGVAPRKVHFDGAEMETGAENGCKCGDNCTCNPCNCK

SEQ ID NO: 74627 - protein, 82 aa, Gossypium hirsutum
  Clone ID: GOSHI-09MAY01-C66_7.pep
MSCCGGNCGCGSGCKCGGGGGCGCGGCKMYPEMNFAEQTTTETLVLGVAPRKVNFDGAEMETGAENGCKCGDNCTCNPCNCK

SEQ ID NO: 74628 - protein, 110 aa, Gossypium hirsutum
  Clone ID: GOSHI-09MAY01-C66_6.pep
MALSVEKTNTGIIVLAEGRLMNLGCATGHPSFVMSCSFTNQVIAQLELWKEKATGKYEKKVYVLPKHLDEKVAALHLGKLGANLTKLTKDQADYISVPIEGPYKPPHYRY

SEQ ID NO: 74629 - protein, 197 aa, Gossypium hirsutum
  unsure (1)..(197): unsure at all Xaa locations
  Clone ID: GOSHI-09MAY01-C66_4.pep
GVPAYKFSFTFAILKSQSFFSALSLSLSSXYMASQASLLLQKQLKDLCKNPVDGFSAGLVDENNIFEWSVTIIGPPDTLYEGGFFNAIMSFPPNYPNSPPTVKFTSEIWHPNVYPDGRVCISILHPPGDDPNGYELASERWMPVHTVESIVLSIISMLSSPNDESPANVEAAKEWRETRDEFKRKVSRCVRRSQKML

SEQ ID NO: 74630 - protein, 166 aa, Gossypium hirsutum
  Clone ID: GOSHI-09MAY01-C66_3.pep
MASQASLLLQKQLKDLCKNPVDGFSAGLVDENNIFEWSVTIIGPPDTLYEGGFFNAIMSFPPNYPNSPPTVKFTSEIWHPNVYPDGRVCISILHPPGDDPNGYELASERWMPVHTVESIVLSIISMLSSPNDESPANVEAAKEWRERKDEFKRKVGRCVRRSQEML

SEQ ID NO: 74631 - protein, 485 aa, Gossypium hirsutum
  Clone ID: GOSHI-09MAY01-C66_2.pep
MALSVEKTAAGREYKVKDMSQADFGRLEIELAEVEMPGLMACRAEFGPAQPFKGAKITGSLHMTIQTAVLIETLTALGAEVRWCSCNIFSTQDHAAAAIARDSAAVFAWKGETLQEYWWCTERALDWGPTGGPDLIVDDGGDATLLIHEGVKAEEVYEKTGQLPDPSSTDNAEFQIVLTIIRDGLKADPKKYTRMKERLVGVSEETTTGVKRLYQMQANGTLLFPAINVNDSVTKSKFDNLYGCRHSLPDGLMRATDVMIAGKVAVVCGYGDVGKGCAAALKQAGARVIVTEIDPICALQALMEGLQVLTLEDVVSEADIFVTTTGNKDIIMVNHMRKMKNNAIVCNIGHFDNEIDMLGLENYPGVKRITIKPQTDRWVFPETNTGIIVLAEGRLMNLGCATGHPSFVMSCSFTNQVIAQLELWKEKATGKYEKKVYVLPKHLDEKVAALHLGKLGANLTKLTKDQADYISVPIEGPYKPPHYRY

SEQ ID NO: 74632 - protein, 485 aa, Gossypium hirsutum
  Clone ID: GOSHI-09MAY01-C66_1.pep
MALSVEKTAAGREYKVKDMSQADFGRLEIELAEVEMPGLMACRTEFGPAQPFKGAKITGSLHMTIQTAVLIETLTALGAEVRWCSCNIFSTQDHAAAAIARDSAAVFAWKGETLQEYWWCTERALDWGPTGGPDLIVDDGGDATLLIHEGVKAEEVYEKTGQLPDPASTDNAEFQIVLTIIRDGLKADPKKYRRMKERLVGVSEETTTGVKRLYQMQANGTLLFPAINVNDSVTKSKFDNLYGCRHSLPDGLMRATDVMIAGKVAVVCGYGDVGKGCAAALKQAGARVIVTEIDPICALQALMEGLQVLTLEDVVSEADIFVTTTGNKDIIMVDHMRKMKNNAIVCNIGHFDNEIDMLGLETYPGVKRITIKPQTDRWVFPETKTGIIVLAEGRLMNLGCATGHPSFVMSCSFTNQVIAQLELWKEKATGKYEKKVYVLPKHLDEKVAALHLGKLGAKLTKLTKDQADYISVPVEGPYKPPHYRY

SEQ ID NO: 74633 - protein, 147 aa, Gossypium hirsutum
  unsure (1)..(147): unsure at all Xaa locations
  Clone ID: LIB3585-005-P1-K1-F10.pep
MALSVEKTAAGREYKVKDMSQADFGRLEIELAEVEMPGLMACTTDFGPAQPFKGAKITGSLHMTMQTAILIXETLTALGAYHRERPCNTLYTNDYTDDDIRRDSAVVFAWKGETLQEYWWCTERALDWGPTGGPDLNVDDGGDAILL

SEQ ID NO: 74634 - protein, 164 aa, Gossypium hirsutum
  Clone ID: LIB3829-017-Q6-K6-B8.pep
MEQLRNQRTVQQQQQQEEELEEMHHGPFPVEQLQELGIASLDVKKLKDAGLCTVESIAYAPRKDLLQIKGISEAKVDKIMEAVSKLVPLGFTSASQLHAQRLEIIQITSGSSELDKILEGGIETGSITEIYGEFRSGKTQLCHTLCVTCQLPLDHRGGEGKAMY

SEQ ID NO: 74635 - protein, 148 aa, Gossypium hirsutum
  unsure (1)..(148): unsure at all Xaa locations
  Clone ID: LIB3543-028-Q1-K6-A11.pep
MEQQRNPKMAQQQQQQEELDEMQHGPFRGGEVHXXGIAALDVKKLKDAGLCTVESVAYTPRKDLLQIKGISEAKVDKIMEAASKLVPLGFTSASQLHAQRLEIIQITSGSSELDKILEGGIETXSITEIYGEFRXGKTQLCHTLCVTC

SEQ ID NO: 74636 - protein, 79 aa, Gossypium hirsutum
  unsure (1)..(79): unsure at all Xaa locations
  Clone ID: LIB3189-007-P1-K1-E8.pep
MSCCGGNCGCGCGXCKCGSGCGGCKMYPEMNFAEQTTTGTLVLGVAPRKAHFDGAEMETGAENGCKCGDNCTRNPCNCK

SEQ ID NO: 74637 - protein, 115 aa, Gossypium hirsutum
  Clone ID: uC-gsflnu33B028e12b1.pep
LVRLLASRRGQCTGATAPRPLILAEIWNPNVYADGRVSISNLHPPGDDPNGYELARERWMPVHTAESIVLSIISMLSSPNDESPANVEAAKEWRERKDEFKRKVGRCVRRSQEML

SEQ ID NO: 74638 - protein, 44 aa, Gossypium hirsutum
  Clone ID: LIB3493-022-P1-M1-D6.pep
LASERWMPVHTVESIVLSIISMLSSPNDESPANVEAAVSDCRLS

SEQ ID NO: 74639 - protein, 68 aa, Gossypium hirsutum
  Clone ID: LIB3828-002-Q1-N6-F4.pep
IAQLELWKEKSTGKYEKKVYVLPKHLDEKVASLHLGKLGAKLTKLTKDQADYISVPIEGPYKPPNYRY

SEQ ID NO: 74640 - protein, 71 aa, Gossypium hirsutum
  Clone ID: uC-gsflnu33B137d03b1.pep
GKYYIFFHTSLKTLLFQTIWSSSNKKRPNSPSFSHPLPFPYLFLFLFILLLSGSVLLYSKAFWFWFCLVVF

SEQ ID NO: 74641 - protein, 32 aa, Gossypium hirsutum
  Clone ID: LIB3829-017-Q6-N6-E2.pep
MYSQSEVLLQMCSSLLLLPLLIVNHRKKKTGA

SEQ ID NO: 74642 - protein, 124 aa, Gossypium hirsutum
  Clone ID: LIB3148-003-P1-K1-A4.pep
IKPNTIYSSTHPSKHFYFKPFGHLQTRRDQIPHHFPIPRHFPITQTQKRTLKIKQKPNHHEISVKQETIKPSGCFFFLIYNCKGCKCSYLHICSHFQPQFPFQLHQSALSKVPQKEQVSRLWFA

SEQ ID NO: 74643 - protein, 77 aa, Gossypium hirsutum
  Clone ID: uC-gsflnu33B062c08b1.pep
SQACNAGSLELLHTKAPVLHFVKLLVFPPVLNHIIGLVSSYVISSVISSTETLARAQRSSAPRTVRVSIRTTVWMVM

SEQ ID NO: 74644 - protein, 60 aa, Gossypium hirsutum
  unsure (1)..(60): unsure at all Xaa locations
  Clone ID: LIB3148-050-Q1-K1-F5.pep
HAFAYTFVHAFVHTFAHAYGRLVLGVAPLIEHFDXIXMETGAENGCKCGDNCTCILCNCK

SEQ ID NO: 74645 - protein, 72 aa, Gossypium hirsutum
  Clone ID: LIB3083-109-Q1-L1-H6.pep
AVIIKRIIILSSGKYNSFIFNTNSQNFSEGGFFNAIMSFPPDYPNSPPTMKFTTDVWHPNVYTDGTCCISIL

SEQ ID NO: 74646 - protein, 78 aa, Gossypium hirsutum
  Clone ID: uC-gsflnu33B066h11b1.pep
FVFPAINVNDFVTKSKFDNLYGCRHSLSDGLMRATDVMIAGKVAVVCGYGDVGKGCADALMQAGARVIVTAIDPIRAL

SEQ ID NO: 74647 - protein, 128 aa, Gossypium hirsutum
  Clone ID: LIB3135-031-Q1-K1-H6.pep
MDKLKTWLDEKEADIFVTTTGNKDIIMVDHMRKMKNNAIVCNIGHFDNEIDMLGLETYPGVKRITIKPQTDRWVFPETKTGIIVLAEGRLMNLGCATGHPSFVMSCSFTNQVIAQLELWKEKGTGKYE

SEQ ID NO: 74648 - protein, 118 aa, Gossypium hirsutum
  Clone ID: LIB3147-055-Q1-K1-F5.pep
GRPRLRPRLPPTLPPTLPPTRPPTRPGARPFDNEIDMLGLETYPGVKRITIKPQTDRWVFPETKTGIIVLAEGRLMNLGCATGHPSFVMSCSFTNQVIAQLELWKEKATGKYEKKVYV

SEQ ID NO: 74649 - protein, 76 aa, Gossypium hirsutum
  Clone ID: LIB3147-035-Q1-K1-B3.pep
ILILIGVMRVGWMVSFGGKETRSLLEEYQTGSDFGAGDCVGDDINASGGTKFDAVGVGLLSLLIEDVYLPMDLIDY

SEQ ID NO: 74650 - protein, 136 aa, Gossypium hirsutum
  unsure (1)..(136): unsure at all Xaa locations
  Clone ID: uC-gsronu33B127a02b1.pep
YLDVGKGPSGGGHYDSARGFHTEIDPILALQALMEGLQVLTXLEDVDSEADIFVTTTGHTDIIMVDHMRKMKNNAIVCNIGHSDNDIDMLGLETYPGVKRITIKPYTDWWAFPETNTGIIVLAVGPMMNLGCATGH

SEQ ID NO: 74651 - protein, 65 aa, Gossypium hirsutum
  Clone ID: uC-gsronu33B139h01b1.pep
LIENQMQQNWTAPMAKYHLPHNPHHLIQTPFGLLQAETSFLFHQNLPSIPHANRTRGRTSGRTRE

SEQ ID NO: 74652 - protein, 56 aa, Gossypium hirsutum
  Clone ID: LIB3149-016-Q1-K1-C7.pep
MIKKLRLSFMIPWTTLYERGFFSAIMSFPPNYPNSPPTVKFTSEIWHPNVYPGGRV

SEQ ID NO: 74653 - protein, 61 aa, Gossypium hirsutum
  Clone ID: LIB3493-043-P1-M1-H8.pep
FVLRVALWCFSNSISEVRGNVLLWWKLRLQLPLQVRRQCSCCKMYPPMTFFDQRHTHPLLL

SEQ ID NO: 74654 - protein, 168 aa, Gossypium hirsutum
  Clone ID: GOSHI-09MAY01-C16_1.pep
MAEVRDRNLPHQVQVHPQYRFDNTTGGGYGAKNYHSGPSTSQVLAVLTLLPIGGTLLALAGLTLAGTVIGLMLATPLFIIFSPVLVPAAIAIAMAVTGFLSSGAFGLTGLSSLSYVLNRLRYATGTEQLDLDHAKRRVQDMAEYVGQKTKEVGQKIENKAHEGQVGRT

SEQ ID NO: 74655 - protein, 146 aa, Gossypium hirsutum
  Clone ID: LIB3582-015-P1-K1-B11.pep
LVGVRLYNLPHQVQVHPQYRFDNTTGGGYGAKNYHSGPSTSQVLAVLTLLPIGGTLLALAGLTLAGTVIGLMLATPLFIIFSPVLVPAAIAIAMAVTGFLSSGAFGLTGLSSLSYVLNRLRYATGTEQLDLDHAKRRVQDMTEYVG

SEQ ID NO: 74656 - protein, 140 aa, Gossypium hirsutum
  unsure (1)..(140): unsure at all Xaa locations
  Clone ID: LIB3582-003-P1-K1-B3.pep
ALGSLAEVRDRNXLSHQDQVHTQYRINNTTGGGYGAXNYHSGPSTSQALAVLTLLKIGGTLLALAGLTLAGTVIGLMLATPMVMILRPDLVPADIAIAMAVTGFSSCGAVGLTRLDDLSYVLNRLMYATGTEQLDLDHAK

SEQ ID NO: 74657 - protein, 133 aa, Gossypium hirsutum
  unsure (1)..(133): unsure at all Xaa locations
  Clone ID: LIB3582-057-P1-K1-B1.pep
MAEVRXRNLPHQVQVHPQNRLDNTTGGGYRAKNYHRATXSTSQVLAGLTLAGTGIGLMLATPLFIMFRPNVGPAAIGIAMDWTEFLSADAFEITGLXTLSYALNXRLRYATGXEQVDLYHAKRRRQDMTEYVG

SEQ ID NO: 74658 - protein, 54 aa, Gossypium hirsutum
  Clone ID: GOSHI-09MAY01-C36_4.pep
EREVGKEKFKIGMYKEACKICTRQCTASTLDDFLTLDAYNYIVIHHPKDVSSKL

SEQ ID NO: 74659 - protein, 124 aa, Gossypium hirsutum
  unsure (1)..(124): unsure at all Xaa locations
  Clone ID: GOSHI-09MAY01-C36_2.pep
MNLQGSKEWNSVFDKAEKMAGIXEKGSIRATVLIETLPAVFQMDEILYELRDHSVGLNCGRWDYIFSYVKTFQGHPDRLLPDRGQVGMTQHFMRSYSDLLIRTCHRRGVHAMGGMVCMNLIMTF

SEQ ID NO: 74660 - protein, 573 aa, Gossypium hirsutum
  Clone ID: GOSHI-09MAY01-C36_1.pep
GFLVTKLIGLGSYGYTAPSSKKINAYDVPQGVDIRGRFDEEFAKILTKDALQFVADLQREFRNHIKYAMECRKEAKRRHNEGALPGFDPATRYIREGKWTCAPVPPAVADRRVEITGPVERKMIINALNSGAKVFMADFEDALSPSWENLMRGQINLKDAVEGTITFNDKARNRVYKLNNEIARLFVRPRGWHLPEAHIFIDGEPATGCLVDFGLYFYHNYATFRNTQGQGFGPFFYLPKMENSREAKIWNSVFDKAEKMAGIEKGSIRATVLIETLPAVFQMDEILYELRDHSVGLNCGRWDYIFSYVKTFQGHPDRLLPDRGQVGMTQHFMRSYSDLLIRTCHRRGVHAMGGMAAQIPIRDDPTANEAAFELVRKDKQREVKAGHDGTWAAHPGLIKTCMEVFTNTMGNSPNQIETVKREDASNLTEDDLLQRPRGVRTMEGLRLNTRVGIQYLAAWLTGSGSVPLYNLMEDAATAEISRVQIWQWLKYGVELDGDGLGVRVNHVFGRVVEEEMARIEREVGKEKFKKGMYKEACKIFTRQCTASTLDEFLTLDAYNYIVIHHPKDVSSKL

SEQ ID NO: 74661 - protein, 103 aa, Gossypium hirsutum
  Clone ID: LIB3826-002-Q1-K6-A3.pep
LMEDAATAEISRVQIWQWLKYGVELDGDGLGVRVNHVFGRVVEEEMARIEREVGKEKFKKGMYKEACKIFTRQCTASTLDEFLTLDAYNYIVIHHPKDVSSKL

SEQ ID NO: 74662 - protein, 38 aa, Gossypium hirsutum
  unsure (1)..(38): unsure at all Xaa locations
  Clone ID: LIB3135-014-Q1-K1-E4.pep
ACKIFTRQCTSSTLDEFLTLDAYNYIXIHHPKDVSSKL

SEQ ID NO: 74663 - protein, 289 aa, Gossypium hirsutum
  Clone ID: GOSHI-09MAY01-C26_1.pep
MGMGLRNGFLLILSCVVTLSLSVLGRPATFLEDFRITWSDSHIRQIDGGRAIQLVLDQNSGCGFASKRQYLFGRVSMKIKLIPGDSAGTVTAFYMNSVTDAVRDELDFEFLGNRTGQPYTVQTNIYAHGKGDREQRVNLWFDPAADFHTYSIMWNHHQIVFYIDEVPIRVYKNNEARNIPYPKLQPMGVYSTLWEADDWATRGGLEKIDWTKAPFLAYYKDFDIEGCPVPGPVNCATNSRNWWEGTAYQALNAMEAKRYRWVRMNHVIYDYCTDKSRYPVTPPECMSII

SEQ ID NO: 74664 - protein, 107 aa, Gossypium hirsutum
  Clone ID: LIB3148-051-Q1-K1-A10.pep
KFQPMGVYSTLWEADDWATRGGLEKIDWSKAPFLAYYKDFDIEGCPVPGPANCASNPRNWWEGTAYQALNAMEARRYRWVRMNHMIYDYCTDKSRYPVTPPECMASI

SEQ ID NO: 74665 - protein, 150 aa, Gossypium hirsutum
  unsure (1)..(150): unsure at all Xaa locations
  Clone ID: LIB3493-045-P1-M1-D2.pep
FVLLFSCVLAISFCVWGKPATFLDDWRITWSDSHIRQIDXGKAIQLVLDQNSGCGVASKRNYLFGRVSMKIKLIPGDSAGTVTAFYMNSDTDTVRDELDFEFLGNRSGQPYTVQTNIYAHGKGDREQKGNLWFDPSAEFHTYTINVKSSS

SEQ ID NO: 74666 - protein, 108 aa, Gossypium hirsutum
  Clone ID: LIB3166-019-P1-K1-G8.pep
MGMGLTYLFLLMPPPPLTLSLSFLGLPATFLEDFRITFSDSHIMQIYGVRAIQLVLYQNSSFGFASKMPHLFCRFNMNIILIPHDSVGAVTSFYINFFYIILFYIYLY

SEQ ID NO: 74667 - protein, 92 aa, Gossypium hirsutum
  Clone ID: LIB3120-048-P1-K1-H4.pep
AVLGVFIFSCFLACSISVSGRPTTFLEDFRITWSDSHIKQIDGGRAIQLILDQNSGCGFASKRQYLFGRVSMKIKLIPGDLAGTVTAFYIEF

SEQ ID NO: 74668 - protein, 174 aa, Gossypium hirsutum
  unsure (1)..(174): unsure at all Xaa locations
  Clone ID: GOSHI-09MAY01-C896_2.pep
MGEAEVGSKDKRWSLQGMTALVTGGTKGIGHAIVEELAGLGAIVHTCSRTETELNDCLLEWKAKGFRVTGSVCDVSNQAQRENLLSTVSSAFNGRLNILINNVGTNIGKMVTDYTAEDVSFLTSTNFESAYNISVLAHPXLKASAAASVVFISSIVGALPIYTAPILGATKEAM

SEQ ID NO: 74669 - protein, 286 aa, Gossypium hirsutum
  Clone ID: GOSHI-09MAY01-C896_1.pep
HASAHASAKTESSRWSLQGMTALVTGGTKGLGHAIVEELAGFGAVVHTCSRTETELNNCLLEWKAKGFRVTGSVCDVSDQTQRENLLNTVSSEFNGKLNILINNVGTNTSKLVTDYTAEDVSFLTSTNFESAYNISVLAYPLLKASGAGSVVFMSSMASLLPAYFGAIYASNKAAMNQLAKYLSCDWARDNIRVNAIVPSVVKTALFDECFEANKEGLEATLNRTPLGRVGQPKEVSPMVAFLCLPAASYVTGQVMSVDGGMSVNGLSFPKEIMKETKSHELKYVR

SEQ ID NO: 74670 - protein, 256 aa, Gossypium hirsutum
  Clone ID: GOSHI-09MAY01-C886_1.pep
GRVGPKIKSREKSWESVPPDKLTVVCNGMEGSYIPNLHLVVCECGACGSKKYTLSEWERHTGCRAKKWKYSVKVKDTMTTLEKWIVDYNAHGVHTLKLDKQKLIGFLQEKYEPVDAKWTTERCAVCRWVEDWDYNKIIICNRCQIAVHQECYGASNVQDLTSWVCRACETPDIERECCLCPVKGGALKPTDVESLWVHVTCAWFRPEVGFLDHEKMEPAVGVLRIPPTSFLKSCVICKQTHGSCTQCCKCSTYFHV

SEQ ID NO: 74671 - protein, 76 aa, Gossypium hirsutum
  Clone ID: GOSHI-09MAY01-C876_1.pep
LTILKLGFADKLCSDACTSVQQGFVTLTVKFLHFFISRCLQFRYLPAVFPAPSIMSLPFWVAFTRSISSMPDNPLQ

SEQ ID NO: 74672 - protein, 221 aa, Gossypium hirsutum
  unsure (1)..(221): unsure at all Xaa locations
  Clone ID: GOSHI-09MAY01-C866_2.pep
MTDASEEAKQIEKLYEFGERLNEAKDKSQNVKDYEGIIDATKTSIKAKQLAAQLIPRFFKFFPXLSSRALNAHFDLIEEEDLAVRVQAIRGLPLFCKDTKEYISKIVDILGQLLTADEIVERDAVHKALMSVLRQDVKELIGIIEGQADLDAQFDVSDADHIDRLISCLFMAIPFFVRGAPGSKFLNYLNKHIIPVFDKLPEERKLDLLKALTEIFSYTTP

SEQ ID NO: 74673 - protein, 298 aa, Gossypium hirsutum
  Clone ID: GOSHI-09MAY01-C866_1.pep
MTDSSDEAKQIEKLYEFGERLNEAKDKSQNVKDYEGVIDATKTSLKAKQLAAQLIPRFFKFFPNLSSRALNAHFDLIEEEDLAVRVQAIRGLPLFCKDTKEYISKIVDILGQLLTADEIVERDAVHKVLMSVLRQDVKESLTALFKHIWNVEEPSQDDTIRDKVLCFIRDKVFPLKADLLRPPEEMERHITDLIKKSLGDVTGAEFRMFMDFLKSLSIFGEKAPPERLKELIGLIDGQADLDAQFDVSDADHIDRLISCLFMAIPFFGKGAPGSKFLNYLNKHIIPVFDKLPEERKLD

SEQ ID NO: 74674 - protein, 199 aa, Gossypium hirsutum
  unsure (1)..(199): unsure at all Xaa locations
  Clone ID: GOSHI-09MAY01-C806_1.pep
MVRIEEKQGTIVPSSMPQQQNPLQQLQAKFKEVENGFRAWLSKQPLPVEATVVTTTGAAQGAAIGALMGTLTNDISSSLQTPPQASLNPQAMASFKQAQALSGGPLVQARNFAVMTGVNAGISCVMKRLRGKEDVQSSMAAAFGSGAMFSLVSGMGGPNQAANAVTSGLFFALVQGGLFXVGQKFSQPPGEDVNYTEQD

SEQ ID NO: 74675 - protein, 83 aa, Gossypium hirsutum
  Clone ID: uC-gsronu33B147g09b1.pep
MVRIEEKQGTKVPSSMPQQQNPLQQLQAKFKEAENGFRAWVSKQPLPVEATVVTTNGGSQGAGIGALMGTLTNDILASLQTPP

SEQ ID NO: 74676 - protein, 110 aa, Gossypium hirsutum
  Clone ID: LIB3582-049-P1-K1-H10.pep
VLLELLLKALDSSSSMDISEDSESGLDRHTALDDWQLVIRKFSNKEPELLLALLQRILYMIGTNEASKSETGKHKFILTWLYVPFECRTFYVIRFTFRFLFSRPSDSFRG

SEQ ID NO: 74677 - protein, 157 aa, Gossypium hirsutum
  unsure (1)..(157): unsure at all Xaa locations
  Clone ID: LIB3828-016-Q1-K6-H6.pep
NLESLVSLYSTSSSEVVSVLLELLLKALDSSSSMDISEDSXSGLDRHTALDDWQLVIRKFSNKEPELLLALLQRILYMIGTNEASKSETVGHPTASEGRPEACQVEHVSSLFAWLVRHLELKGKSVSNAILLELLRKCLLVASLRNNHLMDSALHLH

SEQ ID NO: 74678 - protein, 404 aa, Gossypium hirsutum
  Clone ID: GOSHI-09MAY01-C596_1.pep
PHPSVGPLVARLCLEWFQLLMSVFEGSSGNLAPSPFPSGFPVPVFDALVLTASRILHREPICFQINIPDSDSPVVVVGDLHGQLHDLPGPPQLPGFPAQNRIWGFVGDYVDRGAWGLETFLLLLAWKVFMPHRVFLLRGNHESKYCTSTYGFERGVRAMPGDKGKHVYRKCLGCFEGLPLASIIAERVYTAHGGLFRSISVTPSRRSKGKKNRRIYLIPEANALCLGSLEELSKARRSVLDPPWEGLNLIPGDVLWSDPSMKPGLSPNKERGIGLLWGPDCTVEFLKKFKLKLIIRSHEGPDAREKRPGLGGMDEGYTIDHDVESGKLITVFSAPDYPQFQATEERYNNKGAYVVLKPPGFDNPEFHSFEAITPRPKVNPYYDFEEVIDSDEDLDLASMVTTDL

SEQ ID NO: 74679 - protein, 55 aa, Gossypium hirsutum
  Clone ID: GOSHI-09MAY01-C556_5.pep
ILEEEVGLDRTGADRGEGIGLLMPLMNAFIISIICLEEEWFALIGLAAVLNKKPF

SEQ ID NO: 74680 - protein, 109 aa, Gossypium hirsutum
  Clone ID: GOSHI-09MAY01-C556_4.pep
MAKEPVRVLVTGAAGQIGYALVPMIARGVMLGADQPVILHMLDIPPAAEALNGVKMELVDAAFPLLKGVVATTDVVEACTGVNIAVMVGGFPRKEGMERKDVISKNVFI

SEQ ID NO: 74681 - protein, 332 aa, Gossypium hirsutum
  Clone ID: GOSHI-09MAY01-C556_1.pep
MAKEPVRVLVTGAAGQIGYALVPMIARGVMLGADQPVILHMLDIPPAAEALNGVKMELVDAAFPLLKGVVATTDAVEACTGVNVAVMVGGFPRKEGMERKDVMSKNVSIYKSQASALEQHAAPNCKVLVVANPANTNALILKEFAPSIPAKNITCLTRLDHNRALGQISEKLNVQVSDVKNVIIWGNHSSTQYPDVNHATVMTPSGEKPVRELVKDDAWLNGEFITTVQQRGAAIIKARKLSSALSAASAACDHIRDWVLGTPEGTWVSMGVYSDGSYNAPAGVIYSFPVTCKNGEWTIVQGLAIDEFSRKKLDLTGVELTEEKELAYSCLS

SEQ ID NO: 74682 - protein, 110 aa, Gossypium hirsutum
  Clone ID: LIB3148-021-Q1-K1-E6.pep
FTSRARSLVQVQDGPAAPRKRIEEASDSFMHAPLGSGDIAQLVELRSCNWVVAITGWVSNCPGGNDSILYLQSSKLGNSQVHYLLLVLHVITYVIGSLELQRAHGFPWGC

SEQ ID NO: 74683 - protein, 112 aa, Gossypium hirsutum
  unsure (1)..(112): unsure at all Xaa locations
  Clone ID: LIB3585-026-P1-K1-A8.pep
MAKEPVRVLVTGAAGQIGYALVPMIARGVMLGADQPVILHMLDIPPAAEALNGVKMELVDAAFPLXLKGVSCYNLMLVEACTXGVNVAVMVGGFPRKEGMERKDGCQRMCYL

SEQ ID NO: 74684 - protein, 58 aa, Gossypium hirsutum
  unsure (1)..(58): unsure at all Xaa locations
  Clone ID: LIB3197-033-Q1-M1-G3.pep
GSYNAPAGVIYSFPVTCRSGEWTIVQGLAIDEFSRKKLDLTGAELTEEKELXAYSCLS

SEQ ID NO: 74685 - protein, 94 aa, Gossypium hirsutum
  Clone ID: uC-gsronu33B100h06b1.pep
KTVLDELLVIGKRRPLIEIFIILVTCSWIFWIFSLLFLFFIFSISFFLSSTPFFLFLLLFLFSLFFLSFFFFFLYLILLLFFFYYLPSPPFSLF

SEQ ID NO: 74686 - protein, 66 aa, Gossypium hirsutum
  Clone ID: LIB3148-022-Q1-K1-B3.pep
FSKQEKINFVFLKRPPLFFFFFFFFFFFFFFIFFFFFFFFFFFFFFFFFFFFFFFFFFFLVTNSVD

SEQ ID NO: 74687 - protein, 58 aa, Gossypium hirsutum
  Clone ID: LIB3149-037-Q1-K1-F10.pep
KAVLDELLVIGKRRPLIEIFIILVTCSWIFWIFYRNPGFYAPILNGLIDTVGDLFKKK

SEQ ID NO: 74688 - protein, 43 aa, Gossypium hirsutum
  Clone ID: LIB3083-014-Q1-L1-E7.pep
MAKEPVRVLVTGAARQIGYALVPMIARGVMLGADQPVILHMLD

SEQ ID NO: 74689 - protein, 142 aa, Gossypium hirsutum
  Clone ID: GOSHI-09MAY01-C516_1.pep
GAAIMQSFISGSIRLGQRQGFCRWNSAHFKASTRAFLPTHSGNSLIHGTNDSIKSSENHLLQLLGTRFGSQTKELMFPSSSGGCLIPSLSPLAAMMSSSSSRYMTTAASPTMDSSESVTDVPTRIKFKRLDKTARHIMQIVE

SEQ ID NO: 74690 - protein, 216 aa, Gossypium hirsutum
  Clone ID: GOSHI-09MAY01-C506_2.pep
MYSKILVILDKLAVIAYQNRSLILDLYRCCACFGNLFWCGERGKMVSLQGPVICPAVRSKQCGVYMPPANGPFPRAKLYRSDIWGYRGITDGKNKARAIFRQLKLRKCRTTVQCTFSSSSDGNGSMAENFNENDEDYVNSSVLEAVEVRSGADGFMIKMRDGRHLRCVPNNPQGGHLPDYAPHPAIVLKMEDGTGLLLPIIVLEMPSVLLMATVRN

SEQ ID NO: 74691 - protein, 177 aa, Gossypium hirsutum
  unsure (1)..(177): unsure at all Xaa locations
  Clone ID: GOSHI-09MAY01-C506_1.pep
MVCLQGPVICPAVDSKQVGVYTLPFNGPFPRTRLHRSDIWGYRGIVDGKGKPRGISGHLKRRRRFNTTVQCMFSSSSDGNGSMAENFNENNEDYVNSSVVEAVEVRSGADGFMIKMRDGKHLRCVHNNPQGGHLPDYAPHPAIVLKXEDGTGLLLPIIVLEMPSALLMAALRNVQIA

SEQ ID NO: 74692 - protein, 78 aa, Gossypium hirsutum
  Clone ID: GOSHI-09MAY01-C536_1.pep
SISRYQSWFHLIAYANFSFYHYYFPFNGLSSYLFFSELRILRIFLVRVHILYCLCIVQALAWALGIHCVEGCSSFTSC

SEQ ID NO: 74693 - protein, 134 aa, Gossypium hirsutum
  Clone ID: GOSHI-09MAY01-C526_4.pep
MAEKAVTIRTRKFMTNRLLSRKQFIIDVLHPGRPNVSKAELKEKLARMYEVKDPNSIFVFKFTTHFGGGKSTGFGLIYDSVENAKKYEPKYRLIRNGLDSKVEKSRKQMKERKNRAKKIRGVKKTKASEAAKKK

SEQ ID NO: 74694 - protein, 134 aa, Gossypium hirsutum
  Clone ID: GOSHI-09MAY01-C526_3.pep
MADKALTIRTRKFMTNRLLSRKHFIIDVLHPARPNVSKAELKENLSRMYEVKDPNSIFVFKFRTHFGGGKSTGFGLIYDSVENAKKYEPKYRLIRNGLDTKVEKSRKQMKERKNRAKKIRGVKKTKASEAAKKK

SEQ ID NO: 74695 - protein, 134 aa, Gossypium hirsutum
  Clone ID: GOSHI-09MAY01-C526_2.pep
MADKAVTIRTRKFMTNRLLSRKQFIIDVLHPGRPNVSKAELKEKLARMYEVKDPNSIFVFKFRTHFGGGKSTGFGLIYDSVENAKKYEPKYRLIRNGLDTKVEKSRKQMKERKNRAKKIRGVKKTKASEAAKKK

SEQ ID NO: 74696 - protein, 134 aa, Gossypium hirsutum
  Clone ID: GOSHI-09MAY01-C526_1.pep
MADKAVTIRTRKFMTNRLLSRKQFVIDVLHPGRPNVAKAELKEKLSRMYEVKDPNSIFVFKFRTHFGGGKSTGFGLIYDSVESAKKYEPKYRLIRNGLDKKVEKSRKQMKERKNRAKKIRGVKKTKASESAKKK

SEQ ID NO: 74697 - protein, 134 aa, Gossypium hirsutum
  unsure (1)..(134): unsure at all Xaa locations
  Clone ID: AI055244.1.pep
MADKAVTIRTRKFMTNRLLSRKQFIIDVLHPGRPNVSKAELKEKLARMYEVKDPNSIFVFKFRTHFGGGKSTGFGLIYDSVENAKKYEPKYRLIRNGLDTKVEKSRKQMKERKNRAKKIRGVKKTKASEAAXKK

SEQ ID NO: 74698 - protein, 62 aa, Gossypium hirsutum
  Clone ID: uC-gsflnu33B023h03b1.pep
MADKAVTIRTRKFMTNRLLSRKQFIIDVLHPVRPNVSKAHLIVLPSLNLLFPFPFSSFLFFY

SEQ ID NO: 74699 - protein, 311 aa, Gossypium hirsutum
  Clone ID: GOSHI-09MAY01-C486_1.pep
NEYCIVPDWLHKMFWGYGHASAAQWINMPDLLETVDFKDTFLNAGHLKESFSHYQVCFVDSDGMETLDPRPPFRIKLPRSLKSDTHAPSENGRSDTGVSDAKMVDACVEKEKLIGEAYIPADPGPYPQDQPKQNSVRFTPTQIGAIISGIQPGLTMVVGPPGTGKTDTAVQILNVLYHNCPSQRTLIITHSNQALNDLFEKIMERDVPARYLLRLGQGEQELATDLDFSRQGRVNAMLVRRLELLSEVERLARSLQLPEDVGYTCETAGYFWLLHVYSRWEQFIAACAGNEDKPAFVQDHFPFKEFFSNTF

SEQ ID NO: 74700 - protein, 73 aa, Gossypium hirsutum
  Clone ID: GOSHI-09MAY01-C446_8.pep
VYKKTASVLCLTTVKNEDKMEFSKILEAIKANFPARPDEYRKKWGGGIMGSKSQARTKAKEKLLAKEAAQRMT

SEQ ID NO: 74701 - protein, 48 aa, Gossypium hirsutum
  Clone ID: GOSHI-09MAY01-C446_6.pep
IMSDCLMHARQNLYPIASCVFEKRVIALILPQLKFYSFVRGLLIYFVV

SEQ ID NO: 74702 - protein, 107 aa, Gossypium hirsutum
  Clone ID: GOSHI-09MAY01-C446_5.pep
DVDPIELVVWLPALCRKMEVPYCIVKGKSRLGSIVHKKTASVLCLTTVKNEDKSHASEILEAIKANFNDKYDEYRKKWGGGIMGSKSQARTKAKEKLLAKEAAQRMT

SEQ ID NO: 74703 - protein, 81 aa, Gossypium hirsutum
  Clone ID: GOSHI-09MAY01-C446_4.pep
GKSRLGSIVHKKTAAVLCLTTVKNEDKLEFSRVLEAIKANFNDKYEENRKKWGGGVMGSKSQARTKAKERLLAKEAAQRMT

SEQ ID NO: 74704 - protein, 259 aa, Gossypium hirsutum
  unsure (1)..(259): unsure at all Xaa locations
  Clone ID: GOSHI-09MAY01-C446_3.pep
MAPKRGGKVVVPAKKKXREVVNPLFEKRPKQFGIGGALPPKKDLHRFVKWPKVVRIQRKKRILKQRLKVPPALNQFTKTLDKNLATSLFKLLLKYRPEDKAAKKERLLKKAQAEAEGKAPETKKPIVVKYGLNHVTYLIEQNQAQLVVIAHDVDPIELVVWLPALCRKMEVPYCIVKGESTFGXSIVHKKTASVLCLTTVKNEDKMEFSKILEAIKANFNDKYDEYRKKWGGGIMGSKSQARSKAKEKLLAKEAAQRMT

SEQ ID NO: 74705 - protein, 259 aa, Gossypium hirsutum
  Clone ID: GOSHI-09MAY01-C446_2.pep
MQGPKRGGKVAVPAKKKQEKVVNPLFEKRPKQFGIGGALPPKKDLHRFVKWPKVVRIQRKKRILKQRLKVPPALNQFTKTLDKNLATSLFKLLLKYRPEDKAAKKERLLKKAQAEAEGKAPESKKPIVVKYGLNHVTYLIEQNKAQLVVIAHDVDPIELVVWLPALCRKMEVPYCIVKGKSRLGSIVHKKTASVLCLTTVKNEDKLDFSKILEAIKANFNDKYDEYRKKWGGGIMGSKSQARTKAKEKLLAKEAAQRMT

SEQ ID NO: 74706 - protein, 258 aa, Gossypium hirsutum
  Clone ID: GOSHI-09MAY01-C446_1.pep
MGPKRGGKVAVPAKKKQEKVVNPLFEKRPKQFGIGGALPPKKDLHRFVKWPKVVRIQRKKRILKQRLKVPPALNQFTKTLDKNLATSLFKLLLKYRPEDKAAKKERLLKKAQAEAEGKAPESKKPIVVKYGLNHVTYLIEQNKAQLVVIAHDVDPIELVVWLPALCRKMEVPYCIVKGKSRLGSIVHKKTASVLCLTTVKNEDKLEFSKVLEAIKANFNDKYDEYRKKWGGGIMGSKSQARTKAKEKLLAKEAAQRMT

SEQ ID NO: 74707 - protein, 136 aa, Gossypium hirsutum
  Clone ID: LIB3582-030-P1-K1-B10.pep
MAPKRGVKVAAPAKKKQEKVVNPLFEKRPKQFGIGGALPPKKDLHRFVKWPKVVRIQRKKRILKQRLKVPPALNQFTKTLDKNLATSLFKLLLKYRPEGKAAKKERLLKKAQAEAKGKAPESKKPIVVKYGLNHVT

SEQ ID NO: 74708 - protein, 92 aa, Gossypium hirsutum
  Clone ID: LIB3147-046-Q1-K1-B5.pep
MGPKRGGKVVAPAKKKQPEKVVNPLFEKRPKQFGIGGALPSKKDLHRFVKWPKVVRIQRKKRILKQRLKVPPALNQFTKTLDKNLATSLFKL

SEQ ID NO: 74709 - protein, 129 aa, Gossypium hirsutum
  Clone ID: GOSHI-09MAY01-C476_1.pep
PGATLPLYGSYLDSIPRSSQPPIQKADPNGDWGNGRTMNNLDFSIGSRARGRFANMGVYVNLRKPLISQLFINGSLRKIESENLLVVSFSCECYGHNQESRVNPPHLPEPVKEVESTIQASPHSTHGQR

SEQ ID NO: 74710 - protein, 95 aa, Gossypium hirsutum
  Clone ID: GOSHI-09MAY01-C466_3.pep
PRVRPRVRPGGAAVGAGFFPARPPSPPVLVKSRMMGDSGCKNTLDCFIRTLRNEGFLAFYKGFVPNFTRLGSWNVVMFLTLEQAKKAFRGELYYD

SEQ ID NO: 74711 - protein, 127 aa, Gossypium hirsutum
  Clone ID: GOSHI-09MAY01-C466_2.pep
MADLKFSFAETFLCSAFAACFAEFCTIPLDTAKVRLQLQKKAAGDEVNLPKYRGLLGTMATIANEERLSALWKGIGAGLHRQCIYGGLRIGLCEPGKTLLGGADYVGDIPVYQKIIAALLTGALAIT

SEQ ID NO: 74712 - protein, 276 aa, Gossypium hirsutum
  Clone ID: GOSHI-09MAY01-C466_1.pep
MGAEDAVSLLPHLHSSQLPIPHLQFLMADLKFSFAETFLCSAFAACFAEFCTIPLDTAKVRLQLQKKAVGDEVNLPKYRGLLGTMATIAKEERLSALWKGIVAGLHRQCIYGGLRIGLYEPVKTLLVGADYVGDIPLYQKIIAALLTGALAITVANPTDLVKVRLQAEGKFPAGIARRYYGTLDAYYTIVREEGLAALWTGLGPNIARNAIVNAAELASYDQVKQTILKIPGFSDNVPTHLLAGLGAGFFAVCIGSPIDVVKSRMMGDSGYKNTLD

SEQ ID NO: 74713 - protein, 141 aa, Gossypium hirsutum
  unsure (1)..(141): unsure at all Xaa locations
  Clone ID: uC-gsflnu33B090c11b1.pep
MVANEAIFLITQFHTSQLPIPHLQFLMADLKFSFAETFLCSAFAACFAEFCTIPLDTAKVRLQLQKKAVGDEVNLPKYRGLLGTMATIAKEERLSALWKGIVAGLHRQCIYGGLRIGLYEPVKTLLVGADXVGDIPLYQKI

SEQ ID NO: 74714 - protein, 207 aa, Gossypium hirsutum
  Clone ID: GOSHI-09MAY01-C796_3.pep
RLDSGIFSREAAERFGDENERSRAMTEMNGVYCSSRPMRIGVATPKKASGYRQQYSSQAVVLAGGHASNGAVAQGSQYDNDSNNATIFVGGLDSDVSDDDLRQPFSQFGEIVSVKIPPGKGCGFVQFVNRKNAEEAIQSLNGPTIGKQTVRLSWGRNVNKQWRADSGNQWNGGYYQGQVYGGYGYGYAMPSNQDPSMYAAAAIPGAS

SEQ ID NO: 74715 - protein, 434 aa, Gossypium hirsutum
  unsure (1)..(434): unsure at all Xaa locations
  Clone ID: GOSHI-09MAY01-C796_2.pep
MQSTNGTDLSSKQEQKQQPPPQQPPQWVANQWMGAMQYPTTAAMVMMQQQQMMMYPHHYMAYNNHFQYQQYQQQQGKQQYQQQQQSYSTKQQQHGSNSDEVKTIWVGDLXHWMDESYLHSCFSHTGEVSSVKIIRNKQTGQSEGYGFVEFYSREAAEKVLQSYNGSLMPNTEQPFRLNWASFGVNERRSDAGSDLSIFVGDLAADVTDTVLHETFSSKFQSVKGAKVVIDSNTGRSKGYGFVRFGDENERSRAMTEMNGVYCSSRPMRISVATPKKAFGYQQQYYSQGRQASNGAVEQGLHSHNDSNNATIFVGGLDSDVSDDDLRQPFSQFGEIISVKIPPGKGCGFVLFANRKDAEEAIQSLNGTTIGKQTVRLSWGRSIGNKQRRADSGNQWNGGYYRRQGYGGYGYGYGATPPSPGPSMYAAAAAVPSAS

SEQ ID NO: 74716 - protein, 434 aa, Gossypium hirsutum
  Clone ID: GOSHI-09MAY01-C796_1.pep
MQSTNGSDLSSKHQKQQPPPPPQPQQPQWMPNQWMGAMQYPAAAMAMMQQQQMMMMYPPHHYMAYNNPHFHYQQQYQQQQLHKQQQGSNSDEVKTIWVGDLLHWMDETYLHSFFSQSGEVSSIKIIRNKQTGQSEGYGFVEFSSRATAEKVLQSCNGSLMPNTEQPFRLNWASFGVNERRSDAGSDLSIFVGDLAADVTDTVLHETFSSKFQSVKGAKVVIDSNTGRSKGYGFVRFGDENERSRAMTEMNGVYCSSRPMRIGVATPKKASGYQQQYSSQAVVLAGGHASNGAVAQGSQYHNDSNNATIFVGGLDSDVSDDDLRQPFSQFGEIISVKIPPGKGCGFVLFANRKDAEEAIQSLNGTTIGKQTVRLSWGRSIGNKQRRADSGNQWNGGYYRRQGYGGYGYGYGYGYATPPSPGPSMYAAAAAGPSAS

SEQ ID NO: 74717 - protein, 153 aa, Gossypium hirsutum
  Clone ID: GOSHI-09MAY01-C746_1.pep
DAWARFVKRKKKKKEGKEKSSLVSEMEAGKGTGSSSPSITTQLFGSREPPSSSNEGFKGLYYLLNLRCQEEGIFALVRVALPQDSRNVPQNAKPTTNGNHSKGHAGEVRSAENGRVGFHLSGANSRTMSSKVLRSTMVAKTYTFDPTVTRTLA

SEQ ID NO: 74718 - protein, 129 aa, Gossypium hirsutum
  Clone ID: LIB3582-047-P1-K1-F2.pep
DLQQHTSNEVLRALLSPQSKVSGGRYFRPGMVALPQDSLNVPRNAKPTTNGNHSKGHAGEVRSAENGRVGSIYQEQIEPCHLSSSIYYGGQDIYIRSCSDQDSGLNDDSERDQSRICLLLRVHLPIYVH

SEQ ID NO: 74719 - protein, 140 aa, Gossypium hirsutum
  unsure (1)..(140): unsure at all Xaa locations
  Clone ID: GOSHI-09MAY01-C776_1.pep
KPLAIIWAYLNSGLQSSSQVHAEDGPVCGGGLSQNGKFSYGYASSPGKRSSMEDFYETRIDGVDGELVGLFGVFDGHGGARAAEYVKQNLFSNLIRHPKFISDTKSAIADAYSHTDSEFXKSENNQNRDAGSTASTAILV

SEQ ID NO: 74720 - protein, 400 aa, Gossypium hirsutum
  unsure (1)..(400): unsure at all Xaa locations
  Clone ID: GOSHI-09MAY01-C716_1.pep
QSGRFYDSLAKXLVDQGHVLDLFASALDQVGVAEMKVAIERTGGLVVLAESFGHSVFKDSFKRVFEDGEQSLGLCFNGMLEIGCSKEIKVQGIIGPCTSLEKKGPNVSDTVIGEGNTTTWKMCGLDKSTCLTVIFDLSSTDQSNVPETVNPQFYLQFLTSYQDPEGKTLIRVTTVTRQWADISVSTEELIHGFDQETAAIVMARITSLKMETEEGFDATRWLDRNLIRFCSKFGNYRENDPSSFSLNPCFSLFPQFIFNLRRSQFVQVFNNSPDETAYFRVLLNKENITNAAVMAQPSLISYSFNSPPQPALLDVASISADRILLLDSYFSIVVFHGMTIAQWRNMGYQNQPEHQAFALLLQAPQDDAQMIIRXRFPVPRLVVCDQHGSQARFLLAKLNP

SEQ ID NO: 74721 - protein, 170 aa, Gossypium hirsutum
  Clone ID: LIB3582-047-P1-K1-C4.pep
PRVRFDATRWLDRNLIRLCSKFGDYRKDDPSSFTLNPWFSLFPQFMFNLRRSQFVQVFNNSSDETAYFRMLLNRENITDAAVMIQPSLISYSFNSLPQPALLDVASISADRILLLDSYFSIVIFHGMTIAQWRNMGYQNQPEHHVCSFWSCLLNLVLNVYLFRTLTFIMW

SEQ ID NO: 74722 - protein, 166 aa, Gossypium hirsutum
  Clone ID: GOSHI-09MAY01-C706_4.pep
LTSTTSKFKSICCAVSELERDERGKIAPDGNEARKRSEKGDSKSLNAYFKQRKSRTEDFKCRDLEGENQKQIRESGNENKGKPGKGFFACYLLTSLSPRHKGHTYIGFTVNPLRRIRQHNGEMGCGAWRTKSRRPWDMVGCIYGFPTNVSALQGRWAWQLPRVSEA

SEQ ID NO: 74723 - protein, 114 aa, Gossypium hirsutum
  unsure (1)..(114): unsure at all Xaa locations
  Clone ID: GOSHI-09MAY01-C706_3.pep
LIPATAAEYLLTLEGELVPALTIKDSVASPLXLQVFSHVLSQLFSSILAGKPESRGLVVVSFSWNPXFYLDLLKNKGTDVASSDKRIPILNCYSDPPGWKDQLTRSGNFTPLPH

SEQ ID NO: 74724 - protein, 71 aa, Gossypium hirsutum
  Clone ID: LIB3582-047-P1-K1-B2.pep
TIYITAVLPNCRFTVNPLRRIRQHNGEIGSGAWRTKSRRPWEMVVCIYGFPTNVSALQVVYIIYILYFIYL

SEQ ID NO: 74725 - protein, 143 aa, Gossypium hirsutum
  Clone ID: LIB3583-046-P1-K1-C7.pep
KIQADQTVCSLNYLSNGSVAQLLIYCEPTALNKTAQWGNREWCLEDKEPTPVGNGYVHLWFSNQCICSSATAAEYLLTLEGELVPALTIKDSVASPLPYKCFLTCFLSSSPPFWQENLSHEALSSFHFPGIHVLFGFAEKQRN

SEQ ID NO: 74726 - protein, 95 aa, Gossypium hirsutum
  Clone ID: GOSHI-09MAY01-C726_5.pep
MSLVANEDFQHILRVLNTNVDGKQKIMFALTSIKGIGRRFANIVCKKADVDMNKRAGELTAQELDNLMTIVANPRQFKIPDWFLNRQKDYKDGKY

SEQ ID NO: 74727 - protein, 152 aa, Gossypium hirsutum
  Clone ID: GOSHI-09MAY01-C726_3.pep
MSLVANEDFQHILRVLNTNVDGKQKIMFALTSIKGIGRRFANIVCKKADVDMNKRAGELTAQELDNLMTIVANPRQFKIPDWFLNRQKDYKDGKYSQVVSNALDMKLRDDLERLKKIRNHRGLRHYWGLRVRGQHTKTTGRRGKTVGVSKKR

SEQ ID NO: 74728 - protein, 152 aa, Gossypium hirsutum; identical to SEQ ID NO: 74727
  Clone ID: GOSHI-09MAY01-C726_2.pep

SEQ ID NO: 74729 - protein, 152 aa, Gossypium hirsutum; identical to SEQ ID NO: 74727
  Clone ID: GOSHI-09MAY01-C726_1.pep

SEQ ID NO: 74730 - protein, 142 aa, Gossypium hirsutum
  Clone ID: LIB3583-041-P1-K1-A2.pep
HILRVLNTNVDGKQKIMFALTSIKGIGRRFANIVCKKADVDMNKRAGELTAQELDNLMTIVANPRQFKIPDWFLNRQKDYKDGKYSQVVSNALDMKLRDDLERLKKIRNHRGLRHYWGLRVRGQHTKTTGRRGKTVGVSKKR

SEQ ID NO: 74731 - protein, 69 aa, Gossypium hirsutum
  Clone ID: LIB3272-005-P1-K1-F1.pep
MESDELNRINSGGQVVSNALDMKLRDDLERLKKIRNHRGLRHYWGLRVRGQHTKTTGRRGKTVGVSKKR

SEQ ID NO: 74732 - protein, 100 aa, Gossypium hirsutum
  unsure (1)..(100): unsure at all Xaa locations
  Clone ID: LIB3149-042-Q1-K1-H5.pep
HFQHILRVLSTNVAGKLKIMFAXTYIKGIGRRFANIVCKTADVDMNKRAGELTAQELDNLMTIVANHRQFKITDWFLNRQKDYKDGKYSQVASNALDMKL

SEQ ID NO: 74733 - protein, 69 aa, Gossypium hirsutum
  Clone ID: LIB3148-028-Q1-K1-D10.pep
VLYCLIAIFKFLVFSFFVIASFFFLLSFFFGKPTQIPKTIIIQTKLNSVTQVFLIATDKDPTLLVLPLV

SEQ ID NO: 74734 - protein, 375 aa, Gossypium hirsutum
  Clone ID: GOSHI-09MAY01-C696_5.pep
MAPNDPKQSGGFFASIASSISNFGSAMTKSVNGLMGYEGLEVVNPEGGTEDAEEEARRGRWKQEDRESYWKMMQKYIGSDVTSMVTLPVLIFEPMSMLQKMAELMEYSYLLDLADECEDPYMRLVYTTSWAISVYYAYQRTWKPFNPILGETYEMVNHGGITFIAEQVSHHPPVRAGQAENEHFIYDISSKVKTKFLGNSIDIYPLGRTRVTLKRDGTVFDLVPPLTKVNNLIFGRTWVDSSGEMIMTNLTTGDKAVLYFQPCGWFGAGRYEIDGYVYNSAEEPKILMTGKWNESMSYQPCDSEGEPLPGTELKEAWKLADAPKNDKFQYTHFAHKINSFDTAPKKLLASDSRLRPDRYALEQGDLSKAGFEKTV

SEQ ID NO: 74735 - protein, 191 aa, Gossypium hirsutum
  unsure (1)..(191): unsure at all Xaa locations
  Clone ID: GOSHI-09MAY01-C696_4.pep
SLELYTIFFTFSAFKTLSCSLFLFRRAGRYEIDGYVYNSAEEPKILMTGKXNESMSYQPCDSERELLPSTELKEEWKLANAPKNDKFQYTHFVHKINSFDTAPNKLLASDSHLRPDRYALEQGDLSKAGFEKSSDGETFISADDLRINLWNLEISNQTFNIVDVKPVNMEDLTDQEQKKTKLDRGKLKVVE

SEQ ID NO: 74736 - protein, 225 aa, Gossypium hirsutum
  unsure (1)..(225): unsure at all Xaa locations
  Clone ID: GOSHI-09MAY01-C696_2.pep
TSAEFHPTHCNTLAYSSSKGSIRVIDLRQSALCDSHAKLFEEPEAPGSRSFFTEIIASISDIKFXRDGRYILSRDYMTLKLWDINMDSGPVATFQVHEYLRPKLCDLYENDSIFDKFECCLSGDGLRVATGSYSNLFRVFGCAPGSTEATTLEASKNPMRRQVQTPSRPSRSLNSITRVVRRETLGVDANGNSLDFTTKLLHLAWHPTENLIACVAANSLYMYYA

SEQ ID NO: 74737 - protein, 283 aa, Gossypium hirsutum
  unsure (1)..(283): unsure at all Xaa locations
  Clone ID: GOSHI-09MAY01-C696_1.pep
TKINSISNPRVRPPVRSADDLRINLWNLEISDQSFNIVDVKPANMEDLTEVITSAEFHPTHCNTLAYSSSKGSIRLIDLRQSALCDSHAKLFEEPEAPGSRSFFTEIIASISDIKFXRDGRYILSRDYMTLKLWDINMDSGPVATFQVHEYLRPKLCDLYENDSIFDKFECCLSGDGLRVATGSYSNLFRVFGCAPGSTEATTLEASKNPMRRQVQTPSRPSKSLSSITRVVRRGPITGAENPGVDANGNAFDFTTKWLHLAWHPTENSIACAAANSLYMYYA

SEQ ID NO: 74738 - protein, 179 aa, Gossypium hirsutum
  unsure (1)..(179): unsure at all Xaa locations
  Clone ID: LIB3826-002-Q1-K6-G4.pep
GRVGGRVGPNGKYYLVDSGYPQMKGYLGPYRGQRYHLPDFRRGRPISGKEEIFNHSHSSLRSVIERTFGVXKKWAILRDMPSYSFEKQTMIVVDTMTIHNFIRKHVSRNDADFMEYEDINWPYENNIDSENAHGRENDDDDDDDDDDDDSDDDGESNNSSGFEMELTRDAIASSLMNSL

SEQ ID NO: 74739 - protein, 142 aa, Gossypium hirsutum
  unsure (1)..(142): unsure at all Xaa locations
  Clone ID: LIB3828-013-Q1-K6-H9.pep
RSFPLSWLFGAVYPIFFTFSAFKTLSCSLFIFRRAGRYEIDGYVYNSAEELKILMTGKWNESXQPCDSEGEPLPSTELNEAWKLANAPKNDKFQYTHFAHKINSFDTTPKKLLASDSRLRPDRHALEQGDLSKAGFEKSSLK

SEQ ID NO: 74740 - protein, 136 aa, Gossypium hirsutum
  Clone ID: LIB3145-038-Q1-K1-A4.pep
KVKKISEMNLDPPKAVGNGRVASSSNSNSPTLCLANGGSSGNDFSFPPGGLPSLRLPVVTSQETNLVARCRRVYAHAHDYHINSISNNSDGETFISADDLRINLWNLEISNQSFNIVDVKPANMEDLTEVITSAEF

SEQ ID NO: 74741 - protein, 80 aa, Gossypium hirsutum
  Clone ID: uC-gsflmaxxa094a09b1.pep
EKRRERLEKGRRKEGEGTTALFGVIRRHLSLLFCKNKNRKSQLETEEEEEGRFKGRRDFGVYKVKLVLFSPGEYLLSIFN

SEQ ID NO: 74742 - protein, 188 aa, Gossypium hirsutum
  unsure (1)..(188): unsure at all Xaa locations
  Clone ID: GOSHI-09MAY01-C686_1.pep
MMAQGASNCLFLSPLFLLLLICSSVEISTRVAAFYVEVSTMVDFVGKRLIGEEKKGFVYSRRELIGVKKTAQHDLIIPPPATFPTPNIITVPATNPVETPAAIPATTPVTVPSTNPNNATTVPVTNPVTTPAPITVPGAGAQQPVTNPVTXNPAPTGGVPASTPVTTNPLPPPVSTNAPAVPGQEWCV

SEQ ID NO: 74743 - protein, 166 aa, Gossypium hirsutum
  Clone ID: GOSHI-09MAY01-C656_2.pep
NKLASFMGLSSIGTATEGMQLCIFDLRRGQHEGQELDKILYFFPPDLPFSTQLSVVGLSEGLITFTRIFSPEAACDVIEAERHSHVFYEAEPDIWMVMIVEKSKEPEAIWRIDALREVLKEIHSLFIMFHGSIRALLDKEPGGGLTRAHLYPFIMDYLRDFWLGRN

SEQ ID NO: 74744 - protein, 226 aa, Gossypium hirsutum
  Clone ID: GOSHI-09MAY01-C656_1.pep
NKLASFMGLSSIGTATEGMQLCVFDLRRGQHEGQELDKILYFFPPDLPFSTQLSVIGLSEGLITFTRIFSPEAACEVIEAERHSHVFYEAEPDIWMVMIVEKSKEPEAIWRIDALREVLKEIHSLFMMFHGSIRALLDKEPGGGLTRAHLYPFIMDYLRDFLVGKKLLLPSFRDCLKERRTVQMLTVGREAAIEVQTLVRLLESSAGNAPCSSLVLFQDLLVSTTL

SEQ ID NO: 74745 - protein, 265 aa, Gossypium hirsutum
  unsure (1)..(265): unsure at all Xaa locations
  Clone ID: GOSHI-09MAY01-C606_1.pep
MATIYRLATLMLFCFIQLSFSELVQEQPLVLKYHNGPLLKGKITVNLIWYGKFTPIQRSIIVDFINSLSSDKATMVPSTSSWWKITEKYKGGSSTLAVGKQILLENYPLGKFLENPHLRALASKFNGVDTINVILTSKDVAVEGFCMRCGTHGSTRVGRGPVRGTYIWVGNSETQCPGQCAWPFHQPIYGPQTPPLVAPNGDVGVDGMIINLATLLGNTVTNPFNNGYFQGPANAPLEAVSACSGMFGSGSYPGYXGKVLVEKRQ

SEQ ID NO: 74746 - protein, 136 aa, Gossypium hirsutum
  unsure (1)..(136): unsure at all Xaa locations
  Clone ID: uC-gsflnu33B022f11b1.pep
LVLDVVLRGYSGYNTRWALKVLDRVFPTVGHDGAACCVDSXAGTVFFVANDACLPDRFAALQHDPLDELMQNSTLYSALTLGGFMQLSHFLSRLPMVPFTTLWWKITEKYKGGSSTLAGGKTNPSRKLPARVISLF

SEQ ID NO: 74747 - protein, 394 aa, Gossypium hirsutum
  Clone ID: GOSHI-09MAY01-C636_1.pep
MACVSFAKLNAPSSSWIGGQQSLPQRSGSSARLATRRVSLPIRAGAYTDELIKTAKTIASPGRGILAIDESNATCGKRLSSIGLDNTEPNRQAYRQLLLTTPGLGEYISGAILFEETLYQSTTDGKKFVDVLHDQKIVPGIKVDKGLVPLPGSNNESWCQGLDGLSSRSAEYYKQGARFAKWRTVVSIPCGPSALAVKEAAWGLARYAAISQDNGLVPIVEPEILLDGDHPIERTLEVAEKVWAEVFYYLAENNVIFEGILLKPSMVTPGAEHKERANPETIAKYTLTMLKRRVPPAVPGIMFLSGGQSEMEATLNLHAMNQSPNPWHVSFSYARALQNTVLKTWQGRPENVEAAQKALLVRAKANSLAQLGKYSAEGESEEAKKGMFVKGYTY

SEQ ID NO: 74748 - protein, 179 aa, Gossypium hirsutum
  unsure (1)..(179): unsure at all Xaa locations
  Clone ID: AI054483.1.pep
MACVSFAKHNAPSSSWIGGQQSLPQRSGSSARLATRRVSLPIRAGAYTDELIKTAKTIASPGRGILAIDESNATCGKRLSSIGLDNTEPNRQAYRQLLLTTPGLEEYIFGAILFEETTFQSTTDGKKFVDVLHHQKIVPGIKVNNGLGSLPASNNESWCHXLDGLSSRFPISPTSLGCQ

SEQ ID NO: 74749 - protein, 92 aa, Gossypium hirsutum
  unsure (1)..(92): unsure at all Xaa locations
  Clone ID: LIB3147-054-Q1-K1-A9.pep
HASAEMEATLYLHAMNQSPKPCHVSFSYARSLQNTVLKTWQGRPENVEAAQKALLVRAKANSLAQLGKYSXEGESEEAMKGLFVLGYTYLCV

SEQ ID NO: 74750 - protein, 144 aa, Gossypium hirsutum
  unsure (1)..(144): unsure at all Xaa locations
  Clone ID: LIB3083-052-Q1-L1-H7.pep
NGLVPIPGSNREGWCQSXAGLSSRSAEYYKQGAQFAKWKSIFSIPCGPSALAVNEASLXTLSLCYHFFTHKGLVPIXEPRILLDRHHPIDKTLEVTDICCTXVFYYFEDNNDTFVGILLNPNLVTTSSEHNERSNPDTIAKYTP

SEQ ID NO: 74751 - protein, 285 aa, Gossypium hirsutum
  Clone ID: GOSHI-09MAY01-C626_1.pep
MKFCRSLSILIEKALPDGRDKFFPYKDLKNPLNLIYPKDASEKHPNKRPKLDSLDGGDGVDSEVSKEVMDFVLLLENEVEKFNTFFVEKEEDYVIKWRELQDRAEKAKASDGGLMNVGREIVDFHGEMVLLENYSALNYTGLVKIIKKYDKRSGALVRLPFIQKVLQQPFYRTDVLNELVKECEMVLDRLFSTNEPSALPDVTNEKDHKPDTSSRSNENLLKVPKELAEIKDMENMYMKQTLSALHVLKEIRSGSSTVSVFSLPPLQNRALDDQKKITVLEQAAK

SEQ ID NO: 74752 - protein, 157 aa, Gossypium hirsutum
  Clone ID: LIB3825-003-Q1-K6-B11.pep
MKFCKSLSILIEEALPDWRDKFLPYKDLKKQLKLIYPKDGSEKQPNKRPRLDSMDGGDGEDSEVSKEVMDFVLLLENEVEKFNTFFVEKEEDYVIKWRELQDRAEKAKASDGGLMNVGREIVDFHGEMVLLENYSALNYTGTNLFSFHLSPSFQQMT

SEQ ID NO: 74753 - protein, 76 aa, Gossypium hirsutum
  Clone ID: GOSHI-09MAY01-C196_4.pep
SRVRPLVRPRVRSDFSKLIGLSYVCDRTFLIGITARLFLFGSERFLSKFKVRYSIKCTLSLIILFPSCGCLNYWFR

SEQ ID NO: 74754 - protein, 109 aa, Gossypium hirsutum
  Clone ID: GOSHI-09MAY01-C196_3.pep
IRRSHYFVLFQIMGSARAAMIHFQKLSHAAVSIGKGQEIKESVLIGFLLKADYLPRNEWVVSNQLGLYSTKNLLVVGDFLVELDFVREMIKFQIRSIISEDLPSQVIRM

SEQ ID NO: 74755 - protein, 110 aa, Gossypium hirsutum
  Clone ID: GOSHI-09MAY01-C196_2.pep
MSFSMEEVEIKHSGAEELSYQQQNESCEAFEEEARGSFSSQSGGICVDKQESNDAEATELLDKGFMEYGCPHYRRRCRIRAPSCGEIFDCRHCHNEAKNNINVDQKLRHD

SEQ ID NO: 74756 - protein, 315 aa, Gossypium hirsutum
  Clone ID: GOSHI-09MAY01-C196_1.pep
MSFSMEEVEIKHSGAKELSRPRQNESFEAFVEEARGSFSPQSGGNRVDKQESNDAEATELLDKGFMEYGCPHYRRRCRIRAPCCGEIFDCRHCHNEAKNNINVDQKLRHDLPRRQISKVICSLCGTEQEAQQVCINCGVCMGKYFCNSCKLFDDDTSKRQYHCDGCGICRIGGQENFFHCHKCGCCYSILLKKSHPCVEGAMHHDCPICFEFLFESRQNVTVLPCGHTIHTNCFKEMRDHFQYACPLCSKSVCDMSKVWEKFDEEIAAAPMPEQYHNKMVSILCNDCETKSLVRFHVLAQKCPNCKSYNTRQTRG

SEQ ID NO: 74757 - protein, 128 aa, Gossypium hirsutum
  Clone ID: GOSHI-09MAY01-C186_3.pep
ACFSFLAFPIWDSLFELVFSQRISIKDIKSHPWFLKNLPRELTEAAQAAYYRKENPTFSLQSVDEIMKIVEEAKVAPPVSRSIGGFGWGGEEDGDAREEDTEQEEEEEEDEYEKTVKEVHASGEVHVS

SEQ ID NO: 74758 - protein, 161 aa, Gossypium hirsutum
  unsure (1)..(161): unsure at all Xaa locations
  Clone ID: GOSHI-09MAY01-C186_2.pep
MDKYELVKDIGSGNFGVARLMRNKETKELVAMXKYIDRGQKIDENVAREIINHRSLRHPNIIRFKEVVLTPTHLAIVMEYAAGGELFERICNAGRFSEDEARYFFQQLISGVSYCHAMQICHRDLKLENTLLDGSPAPRLKICXFGYSKSSLLHSRPSQLL

SEQ ID NO: 74759 - protein, 356 aa, Gossypium hirsutum
  Clone ID: GOSHI-09MAY01-C186_1.pep
MEKYELVKDIGSGNFGVARLMRNKETKELVAMKYIDRGHKIDENVAREIINHRSLRHPNIIRFKEVVLTPTHLAIVMEYAAGGELFERICNAGRFSEDEARYFFQQLISGVSYCHAMQICHRDLKLENTLLDGSPAPRLKICDFGYSKSSLLHSRPKSTVGTPAYIAPEVLSRREYDGKMADVWSCGVTLYVMLVGAYPFEDQEDPKNFRKTISRIMSVQYKIPDYVHISQDCRHLLSRIFVASPSRRISIKDIKSHPWFLKNLPRELTEAAQAAYYRKENPTFSLQSVDEIMKIVEEAKVAPRVSRSIGGFGWGGEEDGDAKEEDAEEEVEEDDEEDEYEKTVKEVHASGEIHVS

SEQ ID NO: 74760 - protein, 146 aa, Gossypium hirsutum
  Clone ID: uC-gsflnu33B061e06b1.pep
QKIDENVAREIINHRSLRHPNIIRFKEVVLTPTHLAIVMEYAAGGELFERICNAGRFSEDEARYFFQQLISGVSYCHAMQICHRDLKLENTLLDGSPAPRLKICDFGYSKSSLLHSRPKSTVGTPAYIAPEVLSLRFLSLLVWQPI

SEQ ID NO: 74761 - protein, 263 aa, Gossypium hirsutum
  Clone ID: GOSHI-09MAY01-C176_1.pep
ILHAVGQMEMRSDLMDAHMYAFKRSVLQEVLDIKDTFQSLKEDVLPYLVRSQLKSEALLNRTPQGEENSNEKVSSQNNQAFISRILANASTPSFHGLYSENPDGSSSTRKTHKCCVYIASSSSYCVRLNSIQAFMDINRYVTGDADHLLSPNNIIGPSPKLGTKTTVGPNCRLGEGSEMGDKCQVKRSIIGRHCRIGSHVKAVNSVVMNHVTIGDGCIIQGSVICSNVQLQERVVLKDCQVGAGFVVTAGSEYKAESLAKKEK

SEQ ID NO: 74762 - protein, 148 aa, Gossypium hirsutum
  Clone ID: GOSHI-09MAY01-C166_2.pep
MDLIHKFLNLVAPTFTFFSFVFLLPPFYFFNFFLSILRSVFSENVARKVIVITGASSGIGEHLAYEYGRRGARLALTARREKSLQEIADRARDLGSPDVIVIRADVSKVDDCRRLVEETVNHFGRCKSITYVCACINNSGQSRSRDHS

SEQ ID NO: 74763 - protein, 349 aa, Gossypium hirsutum
  Clone ID: GOSHI-09MAY01-C166_1.pep
MDLIHKFLNLVAPTFTFFSFVFLLPPFYFFNFFLSILRSVFSENVARKVIVITGASSGIGEHLAYEYGRRGARLALTARREKSLQEIADRARDLGSPDVIVIRADVSKVDDCRRLVEETVNHFGRLDHLVNNAGINTVCMFEDAPPDMSLFRAIMDTNFWGSVYTTRFAVPHLKNSKGKIVVMSSAASWMNDPRTSVYNASKAALTAFFDTLRIELGSEVKITIVTPGFIESEITQGKFLQRDGNMEVQQDMRDVQVSSIPVASASGCAQAIVNSASKGDRYLTQPSWFRVTYLWKMFFPELVEWGYILSHFSRPGAPHQQAPSKKILDFTGLKNVVYPSSIQSPEIKN

SEQ ID NO: 74764 - protein, 41 aa, Gossypium hirsutum
  Clone ID: LIB3583-029-Q6-K1-H6.pep
EMSLQEIADRARDLGSPDVIVIRADVSKVDDCRQLVEETVN

SEQ ID NO: 74765 - protein, 316 aa, Gossypium hirsutum
  Clone ID: AF155124.pep
MASTIPIVTLLIVMLSCHAANAQLSPNFYASSCPNLQTIVRNAMSRAVNRETRIGASILRLFFHDCFVNGCDGSILLDDTATFTGEKNAVPNRNSARGFEVIDTIKTNVEAACSATVSCADILALAARDGVALLGGPTWQVPLGRRDARTASQSAANNQIPSPFANLATLTSSFAAKGLSTRDLTALSGGHTIGLARCTTFRGRIYNDTNIDANFAATRRANCPASGGDNNLAPLDIQTPTRFDNDYFRNLVARRGLLHSDQELFNGGSQDALVRTYSNNPATFSADFAAAMVKMGNISPLTGTQGEIRRNCRVVN

SEQ ID NO: 74766 - protein, 95 aa, Gossypium hirsutum
  unsure (1)..(95): unsure at all Xaa locations
  Clone ID: LIB3272-009-P1-K1-H2.pep
ANLSALSARDEIALLGRPTWQVPVGRTDALSCSLSALCIEIPSPYANLTALTYLVAAKGLSTRDLTALSGXHTIGLARCTTFRGRIYNDTNIEAY

SEQ ID NO: 74767 - protein, 383 aa, Gossypium hirsutum
  Clone ID: GOSHI-09MAY01-C106_1.pep
MGAGGRMSVPTSPKKPEFNSLKRVPYSKPPFTLSEIKKAIPPHCFQRSVLRSFSYLLYDFILASLFYHVATNYFPNLPQALSNVAWPLYWAMQGCILTGVWVIAHECGHHAFSDYQWLDDTVGLILHSSLLVPYFSWKYSHRRHHSNTGSLERDEVFVPKKKSGLRWWAKHFNNPPGRFLSITIQLTLGWPLYLAFNVAGRPYDRFACHYDPYGPIFSDRERLQIYISDAGVLAVAYALYRLVLAKGVGWVISVYGVPLLVVNAFLVMITYLQHTHPSLPHYDSSEWDWMRGALSTVDRDYGILNKVFHNITDTHVAHHLFSTMPHYHAMVATQAIKPILGGYYQFDGMPVYKAIWREAKECLYVEPDEGDKDKGVFWFRNKL

SEQ ID NO: 74768 - protein, 174 aa, Gossypium hirsutum
  Clone ID: GOSHI-09MAY01-C136_3.pep
MVNATKGLVDARDISMPQYYMDVRAVPPTDLNKNTEWFTYPGVWTAYILIVFFSWLMVLSVFGTSPGIAWTIVHLTHFFVTYHFFHWKKGTPFADDQSIYNGLTWWEQIDNGKQLTPNRKFLTVVPVVLYLIASHTTGYQNPLLFFNTLAVFVLVVAKFPNMHKVRIFGINADH

SEQ ID NO: 74769 - protein, 70 aa, Gossypium hirsutum
  unsure (1)..(70): unsure at all Xaa locations
  Clone ID: GOSHI-09MAY01-C136_2.pep
MVHATNGLCRSCDIPMAQFIVNLNASLPAAHKFIIHVLDSTHXFVQPDVAGMIRSAISQFRDQNSYEKPT

SEQ ID NO: 74770 - protein, 102 aa, Gossypium hirsutum
  Clone ID: GOSHI-09MAY01-C136_1.pep
MKKKPTALIDTASWYCSVTLLALILIGSIRANSVSDEPVRGSQLRNRPCDEIYVVGEGETLHSISDKCGDPFIVERNPHIHDPDDVFPGLVIKIIASTDRKL

SEQ ID NO: 74771 - protein, 55 aa, Gossypium hirsutum
  Clone ID: LIB3149-036-Q1-K1-F11.pep
VQRPEFIREANLILELNILSLMELIYEKPIKNNKEILMYEYVQFLASYFHFDFRP

SEQ ID NO: 74772 - protein, 64 aa, Gossypium hirsutum
  unsure (1)..(64): unsure at all Xaa locations
  Clone ID: uC-gsflmaxxa009b10b1.pep
MGKKGTGWFSTAKKVFQSSSKDLPEKKEESVEKWPYEAPEVVSFEHFPAEESPDITKDESXTST

SEQ ID NO: 74773 - protein, 79 aa, Gossypium hirsutum
  Clone ID: uC-gsflmaxxa009b04b1.pep
CTRGSIGANSVSDEPVRGSQLRNRPCDEIYVVGEGETLHSISDKCGDPFIVERNPHIHDPDDVFPGLVIKIIASTDRKL

SEQ ID NO: 74774 - protein, 70 aa, Gossypium hirsutum
  unsure (1)..(70): unsure at all Xaa locations
  Clone ID: LIB3584-030-P1-K1-G6.pep
MYVRAVPPTDLNKNTEWFTYPGVWTAYILIVFFSWLMVLSVFGTSPGIAXTIVHLTHFXCTYHFFXWKKG

SEQ ID NO: 74775 - protein, 249 aa, Gossypium hirsutum
  unsure (1)..(249): unsure at all Xaa locations
  Clone ID: GOSHI-09MAY01-C386_1.pep
QRPPTRPAQLGSFIFIGQGTKIGNDTKISHSVIGERCTIGSNVTIEGSYIWNNVTIEDGCQLRNAIVCDGVILKSGAGLQPGVILSFTVVVGRHLGVPAYSXVSLLQQPTQQDSDEELEYADSTSGTGELRSDKLNGDIAPDLSETASELGTGGVGYIWTVFEGAYDEEWRHSVAPIPTDKLVKLMLDKDEDEELLTQDGNVISASRELKTDSDGNGSEDDDNEDSRDDYVSFEKEVEATXLRAVHENV

SEQ ID NO: 74776 - protein, 105 aa, Gossypium hirsutum
  Clone ID: GOSHI-09MAY01-C356_1.pep
VEQKPDGAVYAFKPKDIMMSRKSLSPIEVAKLTESEIKQRINRLSQIYANKITILRLPDKGAKIEKQIAELNAELQKMKTAEVTEKETEVGVDDITGQLQKVLNV

SEQ ID NO: 74777 - protein, 213 aa, Gossypium hirsutum
  Clone ID: GOSHI-09MAY01-C306_1.pep
EIDKLNSAMDETAKVVQELKTTLWKRKSSCNLHVSSSASEVAASSKKFSGKNSQLLLGKSGTGTRDHNETKVCSLPVFDDGEYASSVLTEEPEPELEVVEMDQLEAELELELQKLSETEVSAKSLHEPGGERFDSYQSKGVLPSELDQKLCHVLIEQQENQIEELESELNSAQSKLREKEAELQALKDCLKRLTNFSPTTASDDDTEAQGDQK

SEQ ID NO: 74778 - protein, 108 aa, Gossypium hirsutum
  Clone ID: GOSHI-09MAY01-C286_91.pep
MATKKSVRDLKEADLKGKKVFVRVDLNVPLDAHAFAPADARIRAAVPTIKYLMGHGSKVILSSHLVICYGILLVLMAVGNFINTIQTLVTKSMFKAKMKRSKSKPELD

SEQ ID NO: 74779 - protein, 129 aa, Gossypium hirsutum
  Clone ID: GOSHI-09MAY01-C286_79.pep
REGEGSLDISRALSAKVLISLRIGSSENRVASITHEESHDKLYLPSSQQLILMSPSGVQKERMEPEDMYVLSGDGAIISSPSPKPYPHKPPKCSDCAPLFMKAYHMRNAGAVIHSHGMESCLATMINPH

SEQ ID NO: 74780 - protein, 186 aa, Gossypium hirsutum
  unsure (1)..(186): unsure at all Xaa locations
  Clone ID: GOSHI-09MAY01-C286_73.pep
MEGLVNSRIIPIRTSCRRHYSVFLPTFSLQLRNKNLNKGQVWMMRRPKSLDSVAASIQPLEASTTGNTDNRQPSKEVLELWRSADAVCFDVDSTVCVDEGIDELAEFCGAGKAGAEWTARAMGGSVPFEEALSARLSLFKPSLTXVQDFLDKRPPRISPGIEELVKKLMARNTDVYLISGGFRQMI

SEQ ID NO: 74781 - protein, 81 aa, Gossypium hirsutum
  Clone ID: GOSHI-09MAY01-C286_72.pep
NGLLAERHAFGHEGVGGFEVKEQAKAQLEATCPGVVSCTDIVALAARDAIALANGPSYEVPTGRRDGRVSDVSLAANMLDN

SEQ ID NO: 74782 - protein, 91 aa, Gossypium hirsutum
  Clone ID: GOSHI-09MAY01-C286_70.pep
RNWREEEKIMKNCSWQKGYERIWVIKSNGERDIISLLCASVFSLRHARNLTSRMVQLKDASLYSFSSCLYFPMLSSSRILRISCTILSDCL

SEQ ID NO: 74783 - protein, 224 aa, Gossypium hirsutum
  Clone ID: GOSHI-09MAY01-C286_67.pep
RNEPWEMGVHKRNGVVYLDVHKLPERPRSELDRRKCYWGYCFESLATEDPRREDGEGIHHVDANVEYCSVIKTKLGAHRILMGAEMDCCDSPDEGRRFYVELKTSRELDYHTEERYEREKLLKFWIQSFLAGVPYIVIGFRDDAGRLVRTERLRTKDITHRVKMKNYWQGGVCLAFADEVLCWLYGTVPENEDYILQFAPPFNRLELPQAQSCPDAITNHVEQS

SEQ ID NO: 74784 - protein, 118 aa, Gossypium hirsutum
  unsure (1)..(118): unsure at all Xaa locations
  Clone ID: GOSHI-09MAY01-C286_65.pep
IQRVFCSDYLFKLLLFGDSGVGKSCLLLRFAWXDSAGQERFRTITGSYYRGARGIIIVYDVTDQESFNNVKQWLSEIDRYASDNVNKLLVGNKCDLTANKVVSYETAKAFANEIGIPF

SEQ ID NO: 74785 - protein, 148 aa, Gossypium hirsutum
  Clone ID: GOSHI-09MAY01-C286_64.pep
PRVRRLRVFSSLLFPPFYLSSSFSSSSSSSSYSSRLFPAKRCQIFVIYSRKFHFEFDDLILRSFHFLQPTMNPEYDYLFKLLLIGDSGVGKSCLLLRFADDSYVESYISTIGVDFKIRTVEQDGKTIKLQIWDTAGQERFRTITSSYY

SEQ ID NO: 74786 - protein, 68 aa, Gossypium hirsutum
  Clone ID: GOSHI-09MAY01-C286_63.pep
FQQSVGDLKEADLKGKKVFVRVDLNVPLDDNFNITDDTRIRAAVPTTKYLMGHGSKVILSSHLDFARH

SEQ ID NO: 74787 - protein, 305 aa, Gossypium hirsutum
  unsure (1)..(305): unsure at all Xaa locations
  Clone ID: GOSHI-09MAY01-C286_62.pep
NDMSVFHLMKNEVIISLFKALEDYSIDNRXDVGSWVRXAAIEGLERCTYILCKRDSMSSTGKADILESMSKQPNNNVVEENQMCLFFDXNLATNLVGGISKQAVEKMDKLREVAAKVLQRILYHKEIFVPFIPYREKIEEIVPNETDLKWGVPTFSYPRFVQLLQFSCYSRPVLSGLVISIGGLQDSLRKASLSAFLEYLNVDQDVNEELKLCKLPTDILWILQQYKRCDRVIIPTLKTIEILFSKRIFLDMEAHTSAFCSGVLDSLAVELKASKDFSKLYAGIAILGYICSVSDPINARAFSHL

SEQ ID NO: 74788 - protein, 100 aa, Gossypium hirsutum
  Clone ID: GOSHI-09MAY01-C286_61.pep
QGKSKTGKKPKPEPSREEIHEVVVDILKKVDFNTATLSDILRQLGTHFDLDLMHRKAEVKDIITDVINNMSDEDEEGDESEENADTGGGADKDGDGDDDA

SEQ ID NO: 74789 - protein, 159 aa, Gossypium hirsutum
  unsure (1)..(159): unsure at all Xaa locations
  Clone ID: GOSHI-09MAY01-C286_60.pep
MQDDSYIDSYMSTIGVDFKIRTVEQDGKTIKLQIWDTAGQEXFRTITSSYYRGAHGIIVVYDVTDQESFNNVKQWLSEIDRYASDNXVNKLLVGNKCDLTANKVVSYETAKAFANEIGIXFLETSAKDATNVEQAFMDCGFRKEMACARAWLSLRSSAG

SEQ ID NO: 74790 - protein, 213 aa, Gossypium hirsutum
  Clone ID: GOSHI-09MAY01-C286_59.pep
GILPIARKKYAPDLLIVISPLYIWLAFMSLQPHKEERFLYPIYPLGCVAASAVIESFPDLFRDKYNPYDNSIIVMMAKFLRPVALSLILCASHSRTFSLINGYAAPMEVYKILEHHDDAGSGSVLCVGSEWHRYPSSFFVPDYIGEVRWIDDGFRGLLPFPFNDTLGGTAAAPPYFNNKNKASNEQYLRNIEACTFLVELQLERPFPYRGNEL

SEQ ID NO: 74791 - protein, 94 aa, Gossypium hirsutum
  Clone ID: GOSHI-09MAY01-C286_58.pep
LQGNKQFKIWRNWREEEKTLTNCCWQKGYERIWVIKSNRERDLMSLLCAGVFSPEHRPRTLAPQGIGLTLKRWLPLYSFSPSLYFPIAFFKVGY

SEQ ID NO: 74792 - protein, 176 aa, Gossypium hirsutum
  unsure (1)..(176): unsure at all Xaa locations
  Clone ID: GOSHI-09MAY01-C286_57.pep
LKLSPFLWPFWLLGVQKERIEPEDMYVLSGDGAIISSLSPKPYRHKPPKCSDCASLFMKAYRMRNAGAVIHSHEMESCLATMINPHXERITHMEMIKGIQGHGYYDELVNPIIENTAYENELIDSLAKAIEAYPKTTAVLVRNHGIYVWEDSWISAKTQVHIWLSILVFWILWRLN

SEQ ID NO: 74793 - protein, 156 aa, Gossypium hirsutum
  Clone ID: GOSHI-09MAY01-C286_56.pep
MAKNVGILAMDIYFPPTFVQQEALEAHDGVSKGKYTIGLGQDCLAFCTEVEDVISMSLTVVTSLLEKYKIDPKQIGRLEVGSETVIDKSKSIKTFLMQIFEKCGNTDIEGVDSTNACYGGTAALFNCVNWVESSSWDGRYGLVVCTDSAVYAGRKC

SEQ ID NO: 74794 - protein, 175 aa, Gossypium hirsutum
  Clone ID: GOSHI-09MAY01-C286_55.pep
MGNLFCCVQVDQSTVAIKERFGRFEDVLEPGCHCLPWFLGSQLAGHLSLRLQQLDVRCETKTKDNVFVNVVASIQYRALADKASDAFYKLTNTRTQIQAYVFDVIRASVPKLNLDDVFEQKTEIAKAVEEELEKAMSAYGYEIVQTLIVDIEPDEHVKRAMNEINAAARLRVAAN

SEQ ID NO: 74795 - protein, 121 aa, Gossypium hirsutum
  Clone ID: GOSHI-09MAY01-C286_54.pep
GLSPPVRSSWHCVWGGIEQRLQNCDFELSYALAFSNVLASKRKFTGEQPVQDLKEVLFLGELEEVLEATQSVEFQRCMVPLFRQIARCLNSLHFQRITIPEILQDEWFKGTSHQNLSKMRM

SEQ ID NO: 74796 - protein, 72 aa, Gossypium hirsutum
  Clone ID: GOSHI-09MAY01-C286_52.pep
PTNRIWSVNSAKNKRILATNYKLNFRTMSNFPRKLLVNKNFEKAVQKLQHSNKLHMKTTDKLFKIRIDVSVS

SEQ ID NO: 74797 - protein, 75 aa, Gossypium hirsutum
  unsure (1)..(75): unsure at all Xaa locations
  Clone ID: GOSHI-09MAY01-C286_50.pep
MLPLQIWEASFSCTSWFSSGARNLIKRILDPSPXRRITIPEILQDEWFKKGFKPPKFEQDEDVNLDDNILYFTWL

SEQ ID NO: 74798 - protein, 198 aa, Gossypium hirsutum
  unsure (1)..(198): unsure at all Xaa locations
  Clone ID: GOSHI-09MAY01-C286_49.pep
MERYEILKDIGSGNFGVAKLVREKWTGDLYAVKYIERGPKIDEHVQREIMNHRSLKHPNIIKFKEVLLTPTHLAIVMEYAAGGELFERICNAGRFGEDEARXFFFQQLISGVSYCHAMKICHRDLKLENTLLDGSSTPRLKICDFGYSKSSVLHSQPKSTVGTPAYIAPEVLSKKEYDGKIADVWSCGVTLYVMLVGA

SEQ ID NO: 74799 - protein, 98 aa, Gossypium hirsutum
  Clone ID: GOSHI-09MAY01-C286_47.pep
MVKTATWLYRFTIGEVLAVKVTDQNLDVWANSLASVPDALCHYYYQYLSSSSEAAEGILCIGFLKRSRQQKEITREQAVQDLEIIREELEQLLLAERV

SEQ ID NO: 74800 - protein, 160 aa, Gossypium hirsutum
  Clone ID: GOSHI-09MAY01-C286_46.pep
MATKKSVGDLKEADLKGKKVFVRVDLNVPLDDNFNITDDTRIRAAVPTIKYLMGHGSKVILSSHLGRPKGVTPKYSLKPLVPRLSELLGVEVKMANDCIGEEVEKMVAALPDGGVLLLENVRFYKEEEKNDPEFAKKLASLADLYVNDAFGTAHRAHAST

SEQ ID NO: 74801 - protein, 105 aa, Gossypium hirsutum
  Clone ID: GOSHI-09MAY01-C286_43.pep
NRSCFDLLWILVLNILLKTIEILFSKRIFLDMEVHNLAFCSGVLDSLVVELKASKDFSKLYAGFAILWLHLSLNQPSDVYRFFFFSDLFSLIPARPCIIWLSISY

SEQ ID NO: 74802 - protein, 49 aa, Gossypium hirsutum
  Clone ID: GOSHI-09MAY01-C286_40.pep
LISLFCSIRGTRFLTIFFIAGTSLNQHQDQSTALSYICNHCNTLASSKA

SEQ ID NO: 74803 - protein, 176 aa, Gossypium hirsutum
  Clone ID: GOSHI-09MAY01-C286_37.pep
MGANSSPTDLTTDLDEQISQLMQCKPLSEQQVRALCDKAKEILMKESNVQPVRSPVTICGDIHGQFHDLAELFRIGGKCPDTNYLFMGDYVDRGYYSVETVTLLVALKVRYPQRITILRGNHESRQVSHVPGLRGLHSLFKQVHMCKSLALYGVIFLQFAHLDLSKEFDLNSTIIG

SEQ ID NO: 74804 - protein, 172 aa, Gossypium hirsutum
  unsure (1)..(172): unsure at all Xaa locations
  Clone ID: GOSHI-09MAY01-C286_36.pep
AFILLWGGWTTTQLNSRSDHVLXTSMTGWIMAIVMALXSGFAGVDTEAIIKKRPSRNINVQNFWLDIFGMTFNAIAILIQDFGAVMNKGFFHGYSIITTLMILNHALSGIAVSMVMKYADNIVKVYSTSVALLLTAVVSVLLFGFNLTLAFFLGATVVSVSVYLHSAGKLQR

SEQ ID NO: 74805 - protein, 139 aa, Gossypium hirsutum
  unsure (1)..(139): unsure at all Xaa locations
  Clone ID: GOSHI-09MAY01-C286_35.pep
ISPNIEELVKKLKVRNTDVYLILGAFPKXDNVCTMLLMLEDLSINLSVSIMGSXAFYMHFNEPXTSWSGGIATAVQLVPMVNGYKALVMIGDGATDLEARKPGGANLFICYAGVQHRESVAAKANWLVFSFTDLITALE

SEQ ID NO: 74806 - protein, 282 aa, Gossypium hirsutum
  unsure (1)..(282): unsure at all Xaa locations
  Clone ID: GOSHI-09MAY01-C286_32.pep
APKKRAEAKGRVCLAFANEVLCWLYGTVKENEDYILQFAPPFNRLELLQAQSCPDAITNHVEQSSVLIRKIPRDLTEASISGAWLSIATPAAAFSLLGRGDGLLHTACGTPNYVAPEVLKDKGYDGXSSDIWSCGVILFVLMAGYLPFDEPNLITLYNKIGKAVFTCPSWLSPGAKKFIKRILDPNPLTRITIHDILNDEWFKKGYKPPKFEEEEDVNLDDVDAAFNDSTEHFVTERKEKPESLNAFEFISRSQSFSLDKLFEKPTGHVKRETRFASHCPPN

SEQ ID NO: 74807 - protein, 247 aa, Gossypium hirsutum
  unsure (1)..(247): unsure at all Xaa locations
  Clone ID: GOSHI-09MAY01-C286_30.pep
MAKNVGVLAMEIYFPPTCVQQEALETRDGASKGKYTIGLGQDCMAFCTEVEDVISMSLTAVTSLLEKYTIDPKQIGRLXEVGSETVIDKSKSIKTFLMQIFEKCGNTDIEGVDSTNACYGGTAALFNCVNWVESSSWDGRYGXLVCTDSAVYAEGPARPTGRAAAIAMLIGPDAPIAFESKFRGSHMSHAYDFYKPNLAREFRVVEGKLFTRASGALDTGINLVSMLETWRAAFSFSRLLLGFNFLL

SEQ ID NO: 74808 - protein, 87 aa, Gossypium hirsutum
  Clone ID: GOSHI-09MAY01-C286_29.pep
FYVFAILGMIMGAAASTDKYLCRSGAGQSRSSAGIKLTSNCSMLVVEVSYSEHHVVYSAEVSKILLFRRKCIVVIRLGFQRLIMLTF

SEQ ID NO: 74809 - protein, 211 aa, Gossypium hirsutum
  Clone ID: GOSHI-09MAY01-C286_27.pep
MQPCLSFISLQGKVKDNVFVNVVASIQYRALADKASDAFYKLTDTRKQIQSYVFDVIRASVPKLNLDDVFEQKTEIAKAVEEELEKAMSAYGYEIAQTLIVDIEPDVHVKRAMNEINAAARMRVAANEKAEAEKIQQIKRAEGEAESKYLSGLGIARQRQAIVDGLRCRTVATVDSLVNSLPVVYCKGCHEYMVLVTPRFSSLFHLGYTWL

SEQ ID NO: 74810 - protein, 97 aa, Gossypium hirsutum
  unsure (1)..(97): unsure at all Xaa locations
  Clone ID: GOSHI-09MAY01-C286_26.pep
MATKKSVGDLKENDLKGKKVFVRVDLNVPLDDNFNITDDTRIRVAVPTIKXLIGHGSKVILSSHLDEQPKVQGPAVLVSTERGSTISPIGFCPALKN

SEQ ID NO: 74811 - protein, 157 aa, Gossypium hirsutum
  Clone ID: GOSHI-09MAY01-C286_24.pep
LFKEGKFELARAKYENVSNVMLDMFTSRKIKRNLTHWLSQTFSPAKGNYKGSCGPCSGASSSRSGGKNRRDEEKNLYTCCWQKGYERMWLIKSNGERDIMSLLCASVFSLRQARNLTSRMVQLKDASLYSFSSSLYFSMLSSSRILRISCTILSDCL

SEQ ID NO: 74812 - protein, 136 aa, Gossypium hirsutum
  unsure (1)..(136): unsure at all Xaa locations
  Clone ID: GOSHI-09MAY01-C286_23.pep
MRRHKEDGLLHTACGTPNYVAPEVLKDKGYDGTSSDIWSCGVILFVLMAGYLPFDXEQCLLGLYKKIWEASFSCPSWVASGARNLINRILDPSPLTRITIPEILQDEWFKKGYKPPKFEQDEDVNLDDNILYFTWL

SEQ ID NO: 74813 - protein, 204 aa, Gossypium hirsutum
  unsure (1)..(204): unsure at all Xaa locations
  Clone ID: GOSHI-09MAY01-C286_21.pep
MNPEYDYLFKLLLIGDSGVGKSCLLLRFADDSYVESYISTIGVDFKIRTVEQDGKTIKLQIWDTAGQERFRTITSSYYRGAHGIIIVYDVTDQESFNNVKQWLSEIDRYASDNVNKLLVGNKCDLTANKVVSYETAKAFADEIGIPFLETSAKDATNVEQAFMAMAASVKDRMASQPTANNAKPPTVQIXRGQPVAQQSGCCSS

SEQ ID NO: 74814 - protein, 204 aa, Gossypium hirsutum
  unsure (1)..(204): unsure at all Xaa locations
  Clone ID: GOSHI-09MAY01-C286_20.pep
MNPEYDYLFKLLLIGDSGVGKSCLLLRFADDSYVESYISTIGVDFKIRTVEQDGKTIKLQIWDTAGQERFRTITSSYYRGAHGIIIVYDVTDQESFNNVRQWLSEIDRYASDNVNKILVGNKCDLTANKVVSYETGKALADEVGIPFMETSAKDSTNVEQXFMAMAASIKDRXMASQPAMNNAKPPTVQIRGQPVAQKGGCCSS

SEQ ID NO: 74815 - protein, 122 aa, Gossypium hirsutum
  Clone ID: GOSHI-09MAY01-C286_19.pep
GFPKLVREGYVGIHSSGFRDFLLKPELLRSIVDSGFEHPSEVQHECIPQAILGMDVICQAKSGMGKTAVFVLSTLQQIEPVAGQVAALVLCHTRELAYQICHEVERLSPVLPLQSRFIGILS

SEQ ID NO: 74816 - protein, 310 aa, Gossypium hirsutum
  Clone ID: GOSHI-09MAY01-C286_18.pep
MGAPTDSALDLDEQISQLMQCKPLSEQQVRALCDKAKEILMEESNVQPVKAPVTICGDIHGQFHDLQELFRIGGKCPDTNYLFMGDYVDRGYYSVETVTLLVALKVRYPQRITILRGNHESRQITQVYGFYDECLRKYGSANVWKIFTDLFDYFPLTALVESEIFCLHGGLSPSIETLDNVRNFDRVQEVPHEGPMCDLLWSDPDDRCGWGISPRGAGYTFGQDISEQFNHTNSLKLIARAHQLVMDGFNWAHEQKVVTIFSAPNYCYRCGNMASILEVDDCKNQSFIQFEPAPRRGEPDVTRRTPDYFL

SEQ ID NO: 74817 - protein, 87 aa, Gossypium hirsutum
  unsure (1)..(87): unsure at all Xaa locations
  Clone ID: GOSHI-09MAY01-C286_17.pep
AFCDNKIYHYHLNLGGSVSTRRLTRLPSIPKNDAKFRGYVGIHSSGFRNFLLKLELLXSIVDSGFEHPSEGKVLNSCLMLTFVNSMN

SEQ ID NO: 74818 - protein, 101 aa, Gossypium hirsutum
  Clone ID: GOSHI-09MAY01-C286_16.pep
TDLTSYCIVSLFRSLQVRALCDKAKEILMEESNVQDWTGLNFQEVMDEAEKIRVTVCGIFYVAFFLNEPLSGRTLYSPISMSMLTGAYFGFLFQYFGFSGG

SEQ ID NO: 74819 - protein, 121 aa, Gossypium hirsutum
  unsure (1)..(121): unsure at all Xaa locations
  Clone ID: GOSHI-09MAY01-C286_14.pep
RPPIFRPASGIPXGWMGLDIGPDSIKTFSESLDTTQTIIWNGPMGVFEFEKFAAGTEAVAKKLAELSGKGVTTIIGGGDSVAAVEKAGLADKMSHISTGGGASLELLEGKQLPGVLALNDA

SEQ ID NO: 74820 - protein, 416 aa, Gossypium hirsutum
  unsure (1)..(416): unsure at all Xaa locations
  Clone ID: GOSHI-09MAY01-C286_13.pep
MLDCGYKAQYMSGRREKFVRLDDLDSRCXSSSDTGLKKCGFNIDGLGRSGHANNTTSRSFKRGIRKGSEGLKSIGRSLGFGVSRVVFPEDLKVSEKKISDPQDKFLLLCNKLFFISCILAVSVDPLFFYLPVINDLQKCLTIDRKLAVSATTLRTIIDAFFLIRLALQFRTAYXLPSSRVFGRGELVIDPAQIAKRYLQRYFIIDFLAVAPLPQIVVWRFLQSSNGSDVLATKQALFFVVLLQYIPRFLRVLPLTSEMKRTAGVFAETAWAGAAYYLLLYMLCSHIVGAFWYLVAVERNDTCWQNACKDIGSDCNKDFLYCGNQQMKGYNIWKGMRDSVLNEKCPADENDDNPPFDFGIFTQALSSGIVSSTKFFSKYFYCLWWGLQNLRCVNIFLLTADQEIQNNKKKIAVDSVM

SEQ ID NO: 74821 - protein, 98 aa, Gossypium hirsutum
  Clone ID: GOSHI-09MAY01-C286_12.pep
MVEPKSKIESIREWVVDHKLRTVGCLWLSGIAGSIAYNWSQPGMKTSVKIIHARLHAQALTLAALAGAAAVEYYDHRNRAKADPYAKFLPADGYSHKD

SEQ ID NO: 74822 - protein, 118 aa, Gossypium hirsutum
  Clone ID: GOSHI-09MAY01-C286_11.pep
MVAPKSKIVSIWEWVVDHRLRTVGCLWLTGIAGSIAYNWSQPAMKTSVKIIHARLHAQALTLAALAGAAAVEYYDHRNRAKADPYANVLPADGYSHKDYKTLDRRLKSVHRYLELCHN

SEQ ID NO: 74823 - protein, 465 aa, Gossypium hirsutum
  unsure (1)..(465): unsure at all Xaa locations
  Clone ID: GOSHI-09MAY01-C286_9.pep
MAKNVGILAMEIYFPPTCVQQEALEAHDGASKGKYTIGLGQDCMAFCTEVEDVISMSLTAVTSLLAKYKIDPKQIGRLEVGSETVIDKSKSIKTFLMQIFEKSGNTDIEGVDSTNACYGGTAALFNCVNWVESSSWDGRYGLVVCTDSAVYAEGPARPTGGAAAIAMLIGPDAPIAFESKFTGSHMSHAYDFYKPNLASEYPVVDGKLSQTCYLMALDTCYKYFCHKYEKLEGKQFSLSDAXYFVFHSPYNKLVQKSFXRLLFNDFLRNASSVDEITKEKLAPFSTLTGDESYQSRDLEKASQQASKSLYDAKVQPTTLIPKQVGNMYTASLYAAFASLIHNKNSELAGKRVILFSYGSGLTATMFSLRFHEGQHPFSLSNIASVMNVAGKLKSRHEFPPEKFVETMKLMEHRYGAKDFVTSKDCSLLSPGTYYLTEVDSMYRRFYAKKDGDFAACDNGSVANGH

SEQ ID NO: 74824 - protein, 69 aa, Gossypium hirsutum
  Clone ID: GOSHI-09MAY01-C286_8.pep
HLNSFEFCYPLFFFQAMSAYGYEIVQTLIVDIEPDEHVKRAMNEINAVVLCVEIQKKGESIETLSKFDG

SEQ ID NO: 74825 - protein, 60 aa, Gossypium hirsutum
  Clone ID: GOSHI-09MAY01-C286_6.pep
PGSSVYHVFRQITEHATVALQYFLGIRSKTALHSLLHWICSYQTLFTKVCNKCGRPWVAM

SEQ ID NO: 74826 - protein, 103 aa, Gossypium hirsutum
  unsure (1)..(103): unsure at all Xaa locations
  Clone ID: GOSHI-09MAY01-C286_5.pep
ICYYFVSFYWLIRMGEIKDNDAYKEELLDYEEEDEKALDSASIKAADSAKXGYVGIHSSGFRGSLLKPELLRSIVDSGFEHPSEGKVLNSCNHDSGNHYNGRF

SEQ ID NO: 74827 - protein, 166 aa, Gossypium hirsutum
  Clone ID: GOSHI-09MAY01-C286_4.pep
MYESLRFAYGLLEVLIFVTSITIWNKGIISQIILSFPISVFTGRNMFAERSKQGISDNKIYHYHLNLGGSVSTRRLTRIPSIPKNDAKFRTHLSRMGRRWHQCFILIAAVSKHFLRGYVGIHSSGFRNFLLKPELLRSIVDSGFEHLSEGKVLNSCLMLTFVNSMN

SEQ ID NO: 74828 - protein, 259 aa, Gossypium hirsutum
  unsure (1)..(259): unsure at all Xaa locations
  Clone ID: GOSHI-09MAY01-C286_3.pep
AYAWKRQLAGQAGASAVDRTRLALKAFTDQKRRFFPHLDDEEDGEGTDTVSKKHRNLPALAEDNQDNLSDCKTLSDVLTNLEKEIPNLKVSTYERLDWLKRASSLPASANDNTMEAPKHNFHGTSILRPAPHNVAAMDKVAVIELFFPSIFRAVVSLHPAGSTDPDSVAFFSPDEGGGCLPMLAFXSVYHVFRQITEHATVALQYFLGIRSKTALHSLLHWICSYQTLFTKVCNAIXRLTLTAHWLLAMDRQSALILPL

SEQ ID NO: 74829 - protein, 230 aa, Gossypium hirsutum
  unsure (1)..(230): unsure at all Xaa locations
  Clone ID: GOSHI-09MAY01-C286_2.pep
MGEKWVLMKTAQTPTNIAVIKYWGKRDETLILPVNDSISVTLDPAHLCTTTTVAVSPAFQQDRMWLNGKEISLSGGRYQNCLREIRKRAREVEDKERGIKIEKKDWEKLHLHIASYNNFPTAAGLASSAAGFACLVFALAKLMNVSEDESQLSAIARQSSGSAWPNLLGXFVKWIMGXEDSGSDXLAVQXVDEKHWEDLFIIMAEXGSRQNETSYTFGMRERVEQSRFTA

SEQ ID NO: 74830 - protein, 390 aa, Gossypium hirsutum
  Clone ID: GOSHI-09MAY01-C286_1.pep
MATKKSVGDLKEADLKGKKVFVRVDLNVPLDDNFNITDDTRIRAAVPTIKYLMGHGSKVILSSHLGRPKGVTPKYSLKPLVPRLSELLGVEVKMANDCIGEEVEKMVAALPDGGVLLLENVRFYKEEEKNDPEFAKKLASLADLYVNDAFGTAHRAHASTEGVAKYLKPSVAGFLMQKELDYLVGAVANPKKPFAAIVGGSKVSTKIGVIESLLAKVDILILGGGMMFTFYKAQGHAVGSSLVEEDKLDLATSLLEKAKAKGVSLLLPSDVVVADKFAADANSKVVPASGIPDGWMGLDIGPDSIKTFSESLDTTQTIIWNGPMGVFEFEKFAAGTEAVAKKLAELSGKGVTTIIGGGDSVAAVEKAGLADKMSHISTGGGASLVGATNS

SEQ ID NO: 74831 - protein, 106 aa, Gossypium hirsutum
  Clone ID: uC-gsflnu33B081g08b1.pep
YASGSRSRAAAIYLGWIIFTGCCEYHEDDESDEEFSPKKIGGIAISMVMKYADNIVKVYSTSVAMLLTAVVSVFLFGFNLTLAFFLGATQVTEIPFNNFLYCWNKS

SEQ ID NO: 74832 - protein, 64 aa, Gossypium hirsutum
  unsure (1)..(64): unsure at all Xaa locations
  Clone ID: AI054682.1.pep
NLVAAYSVQKRMQCCFTXYSKEILEGSSSVLLPSFPAGKQLIXHRCHCNMLDLMDSPKVAFNRV

SEQ ID NO: 74833 - protein, 89 aa, Gossypium hirsutum
  Clone ID: LIB3825-009-Q1-N6-F12.pep
CICAQTNISALSLKEQDEGVYRKSRNAIQTRLQMAMEVRDSLEIAHTPEEFSKLYAGIVILWLHLSLNQPSLVYCFFFFSDLFPLINES

SEQ ID NO: 74834 - protein, 98 aa, Gossypium hirsutum
  unsure (1)..(98): unsure at all Xaa locations
  Clone ID: LIB3543-032-Q1-K1-A1.pep
QQTSLGKVSLLVPNVFVLAKLMNVSEDESQLSAIARQGLGSACRSLFGGFVKWIMGKEDDGSDSLAVQLVDEKHWXDLFIIIVLRDRVAKLLGLRACN

SEQ ID NO: 74835 - protein, 141 aa, Gossypium hirsutum
  Clone ID: LIB3543-050-Q6-K6-A5.pep
IGIANTYSLAEHVAAVIQDAKPLLTKIEAMAEDVQPLLSELRDSGLLQEVENLTRSLTQASEDLRTHLSRMGRRWHQCFILIAAVSKHFLRGYVGIRSSGFRNFLLKLELLRSIVDSGFEHPSEGKVLNSCLMLTFVNSMN

SEQ ID NO: 74836 - protein, 76 aa, Gossypium hirsutum
  Clone ID: AI055251.1.pep
PMTCPPNFVAISCASLTLCQIIKELWCIIQYPESASFRTITTPMVVKTNFINHETYNTKKNQLTRNFSTCKNIISI

SEQ ID NO: 74837 - protein, 51 aa, Gossypium hirsutum
  Clone ID: LIB3493-006-P1-M1-A11.pep
QILMRFKLLEMLILMEVDPCEGLTDDDIRTAIQRSSSIYTWLIRFIGILSL

SEQ ID NO: 74838 - protein, 82 aa, Gossypium hirsutum
  unsure (1)..(82): unsure at all Xaa locations
  Clone ID: LIB3825-031-Q6-N6-E10.pep
IARQRQAIVDGLRXSVLGFSVNVPGTTAKDVMDMVLVTQYFDTMKEIGAAFKSSAVFIPHGPGAVRDVATQIREGLLQAAHQ

SEQ ID NO: 74839 - protein, 69 aa, Gossypium hirsutum
  unsure (1)..(69): unsure at all Xaa locations
  Clone ID: uC-gsflnu33B004b06b1.pep
SRVRFQQLISGVSYCHAMKICHRDLKLENTLLDGSTVPRLKIXDFGYSXGTPTYIAPEVLSRKQYDVKT

SEQ ID NO: 74840 - protein, 66 aa, Gossypium hirsutum
  Clone ID: LIB3543-045-Q1-K6-B6.pep
HAMRDVPFSTLGPLKANERKDLNCAVKEYLLIDGYRLTAMTFCEEVSVTFSSVFVLLLLFYSVNLH

SEQ ID NO: 74841 - protein, 128 aa, Gossypium hirsutum
  unsure (1)..(128): unsure at all Xaa locations
  Clone ID: LIB3120-007-Q1-K1-F10.pep
WVDILSLXKLCIDLMGSADQRCRLSEDLCRLSVVLKSSPPIIRVSISDTGTGTCLEEFQDLKCNREGIGTEKWDGLLSIKTTSISDNKIYHYHLNLRRSVSARRLTRLPSILKNDAKFKGTRSMSVHI

SEQ ID NO: 74842 - protein, 57 aa, Gossypium hirsutum
  Clone ID: LIB3148-053-Q1-K1-E10.pep
DVKVLQIEVFKCYKLKCLNVVNWHLFVGSLASSPDESVVYQALNFALSSEVLEFLVQ

SEQ ID NO: 74843 - protein, 86 aa, Gossypium hirsutum
  Clone ID: LIB3583-017-P1-K1-D7.pep
EEALEAHDGASKGKYTIGLGQDCMAFCTEVEDVISMSLTAVTSLLAKYKIDPKQIGRLEVGSETVIDKSKSIKTFLMQIFEVVNKH

SEQ ID NO: 74844 - protein, 53 aa, Gossypium hirsutum
  Clone ID: uC-gsronu33B158h04b2.pep
VICRHCNTLASSMNIVLEIVILCECVCVCFFYVLNYILNQCLCIKFKFINFYI

SEQ ID NO: 74845 - protein, 55 aa, Gossypium hirsutum
  Clone ID: LIB3148-056-Q1-K1-A11.pep
HASGIFKETTDHLYNAATQERETTLNQLLIELDGFDTDKGAYFGFLFRCFGFSGG

SEQ ID NO: 74846 - protein, 84 aa, Gossypium hirsutum
  Clone ID: LIB3828-005-Q1-K6-A4.pep
ILFLLLITCNLLKLATSDYIVRDTGNCTPRYMRCTTNQVVDFGESGPVRCSHCKGYINPFMKFIDQERKFICNLCVPPEFRSIA

SEQ ID NO: 74847 - protein, 74 aa, Gossypium hirsutum
  Clone ID: uC-gsflnu33B084f09b1.pep
LRSIFVACCINPWNSARKQFLGFDANELTSRSRGKATAVQQIRKVKGYKALDMIGDGATDLEVSKFILPFFRYS

SEQ ID NO: 74848 - protein, 79 aa, Gossypium hirsutum
  unsure (1)..(79): unsure at all Xaa locations
  Clone ID: LIB3145-011-Q1-K1-A1.pep
ARIVVWQFLHGSNGSDVLATKXALFFIVLFQYIPRFLRVIHLTSEMKRTTDVFAETAWAGAAYYLVLYMLCSHVRSCPL

SEQ ID NO: 74849 - protein, 158 aa, Gossypium hirsutum
  unsure (1)..(158): unsure at all Xaa locations
  Clone ID: LIB3585-059-P1-K1-D9.pep
LFYTRNSSQLVLLFYFSVCSLISRNPKHPLLPPFLRGCNRATVYPVFRRLATLPSSELSLRKYVLRLSRGSWKKDTLFTQLRGIWIPCTADLLTTSSMQLALLVQPMALPHPSEDPIQVLDFGESGHVRCSRCKGYINPFMKFIDXGMKFICNLCGQY

SEQ ID NO: 74850 - protein, 114 aa, Gossypium hirsutum
  unsure (1)..(114): unsure at all Xaa locations
  Clone ID: LIB3831-002-Q1-N6-E12.pep
ASGIPNGWMGLDIGPDSIKTFSEFLGPTQTIIWNGPMGVFEFXKFSAGTEAVAKKLSELSGKGVATIIGGGDFVAAVEKAGLADKMSHISTGGGASLELFXGKQLPGVLAFNDA

SEQ ID NO: 74851 - protein, 163 aa, Gossypium hirsutum
  unsure (1)..(163): unsure at all Xaa locations
  Clone ID: LIB3543-060-Q6-K6-C5.pep
MNPEYDYLFKLLLIGDSGVGKSCLLLRFADDSYVESYISTIGVDFKIRTVEQDGKTIKLQIWDTAGQERFRTITSSYYRGAHGIIVGDLPSRYFSRSLFVLLMKFYFFFLFFFPFYCWILCXIVYDVTDQESFNNVKQWLSEIDRYASDNVNKLLVGNKCDLT

SEQ ID NO: 74852 - protein, 78 aa, Gossypium hirsutum
  Clone ID: LIB3828-006-Q1-N6-C12.pep
CWSPPKGGSPTPFLHGMGHMGPHNVGRGPYSYGGDRHGHGPMFDGPSSLGSWTPQAGTPRNCYLITLLQEWLLTPSLR

SEQ ID NO: 74853 - protein, 166 aa, Gossypium hirsutum
  Clone ID: LIB3585-065-P1-K2-C1.pep
EIPGPPHASAHASAHASVLLENVRFYKEEEKNDPEFAKKLASLADLYVNDAFGTAHRAHASTEGVAKYLKPSVAGFLMQKELDYLVGAVANPKKPFAAIVGGSKVSTKIGVIESLLAKVDILILGGGMMFTFYKAQGYAVGSSLVEEDKLDLATSLLEKANAKGVS

SEQ ID NO: 74854 - protein, 85 aa, Gossypium hirsutum
  unsure (1)..(85): unsure at all Xaa locations
  Clone ID: LIB3135-037-Q1-K1-G10.pep
RTRGRLTSFTGRVIHGLLLSTLDDPNKKLCIAISMVVAAIAVYDWPESWPDLVPFXLKLIGDQTSMNRGVEKERGCNSTGDRDSV

SEQ ID NO: 74855 - protein, 121 aa, Gossypium hirsutum
  Clone ID: uC-gsronu33B167d04b1.pep
IPAIASIFFFSFNLYATMNPEYDYLFKLLLIGDSGVGKSCLLLRFADDSYVESYISTIGVDFWDTAGQERFKTITSSYYRGAHGIIIVYDVTDQEKLNNVKQWLSEIDRYASDNVNKLLVE

SEQ ID NO: 74856 - protein, 93 aa, Gossypium hirsutum
  Clone ID: LIB3828-032-Q6-N6-D2.pep
QPHKEERFLYPIYPLVCVAASAVIESFTDLFRDKYNPYDNSIKVMMAKFLRPVALSLILCASHSRTFSLINGYAAPMEVYKILEHHDDAGTVR

SEQ ID NO: 74857 - protein, 53 aa, Gossypium hirsutum
  Clone ID: LIB3147-013-Q1-K1-A6.pep
LLLLIVSALTEDTKALNQLNTLIQDGKEMASVLYTYRSCVKFTSPTVCWNSQF

SEQ ID NO: 74858 - protein, 84 aa, Gossypium hirsutum
  Clone ID: LIB3272-037-P1-K1-B6.pep
AGVDGQLWVLCPILFVMQGFEAYVGLLLLKTAFVGVVTEWQVICCGILLVLMAVGNFINTIQTLMTKSRFKAKMKRSKSKAELD

SEQ ID NO: 74859 - protein, 204 aa, Gossypium hirsutum
  unsure (1)..(204): unsure at all Xaa locations
  Clone ID: LIB3584-004-P1-K1-F4.pep
SLXXVSQQVSKSLYDAKVQPTTLIPKQVGNMYTASLYAAFASLIHNKHSELAGKRVILFSYGSGLTSTMFSLRLHEGQHPFSLSNIATVMNVAGKLKWRHEFPPEKFVQTMKLMEHRYGAKDFVTSKDCGLLSPGTYYLTEVVSMYRRFYSKKDGDYTXCEFGSLAYGHLKTVRKTALAWLRCVSSLCMLQKNCFISAVPPVFF

SEQ ID NO: 74860 - protein, 87 aa, Gossypium hirsutum
  Clone ID: LIB3135-056-Q1-K1-E6.pep
IVIVGALLHSLLHDIAAFFFQAFADEIGIPFLETSAKDATNVEQAFMAMAASVKDRMASQPTANNAKPPTVHIRGQPVAQQSGCCSS

SEQ ID NO: 74861 - protein, 52 aa, Gossypium hirsutum
  Clone ID: LIB3146-044-Q1-K1-F4.pep
MHHQSEVVDFDESGPVRCSHCKGYINPFMKFIDQERKFIYNLCVPPAFRYIA

SEQ ID NO: 74862 - protein, 76 aa, Gossypium hirsutum
  Clone ID: LIB3147-055-Q1-K1-B9.pep
NNVTRILYTTLKTIEILFNKRIFLDMEAHTSTFCSGVLDSLANELKSSNDFSKLYAGIAILGYICSVSDPINPRSF

SEQ ID NO: 74863 - protein, 52 aa, Gossypium hirsutum
  Clone ID: LIB3145-052-Q1-K1-B1.pep
FTYRYGNANVWKIFTDLFDYFPLTALVESEIFCLHGGLSPSIETLDNIRNFD

SEQ ID NO: 74864 - protein, 67 aa, Gossypium hirsutum
  Clone ID: LIB3585-018-P1-K1-H8.pep
DQNCWSLYFWLLILNIRQSNYIVLDELLQMTKEDDFRATTHQIVDGRHSSMDPCVICMERSDRPHAS

SEQ ID NO: 74865 - protein, 67 aa, Gossypium hirsutum
  Clone ID: LIB3145-007-Q1-K1-H12.pep
FYVFAILGMIMGATASTNKDLCRSGAGQSRSSAGIKLTSNCSMLVVEVSYSEHHVVYSTKVSKNLLF

SEQ ID NO: 74866 - protein, 48 aa, Gossypium hirsutum
  Clone ID: LIB3149-050-Q1-K1-G1.pep
FILVRNYNAKSSSHLINQRKKIRKEEETIYNRGLVQALDEAKVLQCLK

SEQ ID NO: 74867 - protein, 41 aa, Gossypium hirsutum
  Clone ID: uC-gsronu33B032h07b1.pep
CLYDADYFVFHSPYNKLVQKSFARLVFNDFVRNASFVGDIA

SEQ ID NO: 74868 - protein, 52 aa, Gossypium hirsutum
  Clone ID: LIB3048-012-Q1-L1-B10.pep
SHPMGVTLKYSLKPLVPRLSELLGVDVKMANDCIGEEVEKMVAALPDGGVLL

SEQ ID NO: 74869 - protein, 91 aa, Gossypium hirsutum
  Clone ID: LIB3584-026-P1-K1-G4.pep
GSDINKILLAFYSLSCLSYIAILKILVELTKLRSKGESQWRVCNLEPLCNQSMEKFFKFSTMKLDRNMNHIMITSAYHFCSYRGHTSSQSA

SEQ ID NO: 74870 - protein, 93 aa, Gossypium hirsutum
  unsure (1)..(93): unsure at all Xaa locations
  Clone ID: LIB3166-017-P1-K1-G12.pep
GRVGVNPQTEFLKTIHKLADTVIRGLFKYWPLTNCXKEVLFLGELEEVLEATQSVEFQRCMVPLFRQIARCLNSLHFQGNEIPNNFLYCWNKS

SEQ ID NO: 74871 - protein, 64 aa, Gossypium hirsutum
  Clone ID: LIB3584-033-P1-K1-G2.pep
HSKNLNKEAHFIIISMKTLGLFYPRKIQTKYGPIPHKSILQICLPFYMPPNVHQHHLFELDKTG

SEQ ID NO: 74872 - protein, 43 aa, Gossypium hirsutum
  Clone ID: LIB3083-060-Q1-L1-B8.pep
LEARKPGGANLFICYGGVRHRESVAAKANWLVFSFTDLITALE

SEQ ID NO: 74873 - protein, 113 aa, Gossypium hirsutum
  Clone ID: LIB3166-040-P1-K1-E7.pep
IRYYFVSFWGLIRMGEIKDNDAYEEELIDYEEEDEKAPDSACTKAADSAKKGYVGIHSSGFRDFLLKPELLRSIVDSGFEHTSEVFALAKLMNVSEDESQLSAIARQGLCSAC

SEQ ID NO: 74874 - protein, 79 aa, Gossypium hirsutum
  unsure (1)..(79): unsure at all Xaa locations
  Clone ID: LIB3197-020-Q1-M1-G12.pep
NCLYIDKFQIWEASFSCPSXFSSGARNLIKRILDPNPLTRITIPEILQDEWFKKGYKPPKFEQDEDVNLDDNILYFTWL

SEQ ID NO: 74875 - protein, 51 aa, Gossypium hirsutum
  Clone ID: LIB3584-017-P1-K1-C12.pep
KCKGLFIKDKLLSFELGILIPRRTMQSLKLHQLHSHQDKMPINSFLKSFAN

SEQ ID NO: 74876 - protein, 58 aa, Gossypium hirsutum
  unsure (1)..(58): unsure at all Xaa locations
  Clone ID: LIB3148-017-Q1-K1-E2.pep
KKFIPLQARVFNFLSFKXXXLFFFFFFFFFFFFFFFFFFFFFFFFFFFXAAKEGYSFL

SEQ ID NO: 74877 - protein, 39 aa, Gossypium hirsutum
  Clone ID: LIB3145-033-Q1-K1-D9.pep
FGFSSLSIRDAFELDVFFVILIVNDKIAVVLVLLKNYKY

SEQ ID NO: 74878 - protein, 87 aa, Gossypium hirsutum
  Clone ID: LIB3146-027-Q1-K1-E12.pep
GETSGVDGQLWVLCPILFAMQGFEAYVGLLLLKTAFVGVVTEWQVICCGILLVLMAVGNFINTIQTLMTKSRFKAKMKRSKSKPELD

SEQ ID NO: 74879 - protein, 135 aa, Gossypium hirsutum
  Clone ID: LIB3272-037-P1-K1-A5.pep
LLRVVFISTSAFFSIIFHPCFHLLSADFSGKSVLDLCGLLPEFSFGFRRPQSSILFSLQSRMNPEYDYLFKLLLIGDSGVGKSCLLLRFADDSYIDSYISTIGVDFKIRTVEQDGKTIKLQIWDTAGQERFRTIT

SEQ ID NO: 74880 - protein, 73 aa, Gossypium hirsutum
  Clone ID: LIB3145-042-Q1-K1-E7.pep
SISTKTDFSQFSSSISAFSTATYNGFQQSVGDLKEADLKGKKVFVRVDLNVPLDDNFNITDDTRIRAAVPTTK

SEQ ID NO: 74881 - protein, 61 aa, Gossypium hirsutum
  Clone ID: LIB3166-022-P1-K1-C10.pep
SFGTELGYREVLLLSFGLAALALASVISNLDMEMDPKTGDYKALTELLPLILVTLALVILI

SEQ ID NO: 74882 - protein, 36 aa, Gossypium hirsutum
  Clone ID: LIB3120-028-Q1-K1-C5.pep
MATKKSVGDLKEADLKGKKVFVRVDLNVPLDDNFNI

SEQ ID NO: 74883 - protein, 62 aa, Gossypium hirsutum
  unsure (1)..(62): unsure at all Xaa locations
  Clone ID: LIB3493-043-P1-M1-D10.pep
IFLLILQIGSLILFSGVAVVIPLGWGEKXLLPLLQKKSGDFKEAYFKRKKKGGGGQFNLFFL

SEQ ID NO: 74884 - protein, 112 aa, Gossypium hirsutum
  Clone ID: GOSHI-09MAY01-C256_3.pep
MGFEDPDRVSRHIKIREVWSDNLDSEFELISQAIDEYPFISMDTEFPGLVFRPKVDPTRPYGAQFRPSDHYKILKSNVDALNLIQVGLTLTDSSGNLPTLGTDDEQFIWEFN

SEQ ID NO: 74885 - protein, 201 aa, Gossypium hirsutum
  Clone ID: GOSHI-09MAY01-C256_1.pep
MGFLRSVKIREVWSDNLESEFELISRVIDDFPFVSMDTEFPGLVFRPKVDLTRPYHEQLLRPSDHYKILKSNVDALNLIQVGLTLSDSSGNLPVLGTDDSQFIWQFNFCDFDVERDAHAPDSIELLRRQGVDFEKNKENGIDSVRFAELTMSSGLVFNDSVSWVTFHSAYDFGYLVKILTRRDLPEGLDEFSRILRVFFGN

SEQ ID NO: 74886 - protein, 172 aa, Gossypium hirsutum
  unsure (1)..(172): unsure at all Xaa locations
  Clone ID: LIB3543-029-Q1-K6-G11.pep
SVIRGSLRIILESEFEXLISRVIDDFLFVSMDTXFGGGGVFLLLDXTXXXHEQRGPRFDPPTLLXXNVDALNLIQVGLTLYNSSGNLPVLGTDDTQFIWQFNFCDFDVERDAHAPDSIELLRRQGVDFEKNKENGIDSVRFAELTMSSGLVCNDFMSWVTFHSAYDFGYLVK

SEQ ID NO: 74887 - protein, 230 aa, Gossypium hirsutum
  unsure (1)..(230): unsure at all Xaa locations
  Clone ID: GOSHI-09MAY01-C246_1.pep
HASARIGRGGDNSSEENDGSEEGEIQPGVMKFTDGVRAFRLAFKNIIKRNVADDSLGPVFPRVXGHKQLVAKKLAEEEXAERKVKGEAKKEKHLVAEKGHFKPANYLDSHEKFLIGIATKGVVKLFNAVNKAQKAQKGLDPSRSKDAKVIRRRRKEAFFSELGKTSLPARDSSSKGNTSDSRNDEGPAWAPLRDNYMLTNPKLKDWDKMADSAIVDDVGMMSEDSGSDDD

SEQ ID NO: 74888 - protein, 72 aa, Gossypium hirsutum
  Clone ID: LIB3148-023-Q1-K1-D8.pep
AFFSELGKTSRDSSSKGNTSSDPRNEEEPAWAPLRDNYMLTNPKLKNWDKTAEAGIADDAGRMSEDSGSDDD

SEQ ID NO: 74889 - protein, 126 aa, Gossypium hirsutum
  Clone ID: GOSHI-09MAY01-C276_1.pep
MASSSSLVSPLCNQSQSPLLHWIGDRRKAFISPPCNGGSATSKDGGAFEPCNEYYSSKNGSFSSFFGSKNVSFNINHKHPRLNRGVARSGQAMAVAVEPAREIRTKQKPPTKQRRVVVTGMGVVTP

SEQ ID NO: 74890 - protein, 128 aa, Gossypium hirsutum
  Clone ID: GOSHI-09MAY01-C216_1.pep
TRKDEAVLRTADNSPQVHSASSRPGSSARRSPFTPTRSECSARASGGYSGYPNYMANTESSRAKYRSQSAPRQRLELDKYGSTRRTYQGLWDSGTNSERDFPHHVDFRYRAHPTSDCLNWPSSANRGE

SEQ ID NO: 74891 - protein, 587 aa, Gossypium hirsutum
  Clone ID: GOSHI-09MAY01-C206_1.pep
MAATTTTTSFKAALLSTPSISSSTKSTVLKPRFTSSSSSRYSPIPKSLIAHHVSTKTNAIVAKMGTVPSPVSETTSLDFHTSVFQKEKISLAGHEEYIVRGGRHLFPLLDDAFKGIKQIGVIGWGSQGPAPPPELRGSLAEAKSDVVVKIGLRKGSRSFAEARAAGFTEENGTLGDIWETVAGSDLVLLLISDSAQADNYEKVFSHMKPNSILGLSHGFLLGHLQSLGLDFPKNISVIAVCPKGMGPSVRRLYVQGKEINGAGINASFAVHQDVDGRATDVALGWSVALGSPFTFATTLEQEYKSDIFGERGILLGAVHGVVECLFRRYVEDGMSEELAYKNTVECITGIVSKTISTKGMLAVYNSLSEEGKKRFEAAYSASYYPCMEILYECYEDVASGSEIRSVVLAGRRFYEKEGLPAFPMGKIDQTRMWKVGERVRATRAKDDLGPLCPFTSGVFVALMMAQIEVLRKKGHSYSEIINESLIEAVDSLNPFMHARGVSFMVDNCSTTARLGSRKWAPRFDYNLTQQAFVAVDSGAPINQDLISNFLSDPVHEAIEVCAKLRPTVDISVPPDADDARPELRQSS

SEQ ID NO: 74892 - protein, 237 aa, Gossypium hirsutum
  unsure (1)..(237): unsure at all Xaa locations
  Clone ID: GOSHI-09MAY01-C236_6.pep
MMLNNKFLFLSALFCIAVAGALGQAPPTPSNPPTSTPVPSTPPASTPPPTTQPPSTPTTTSPPPASTPPPTSSPPPVTASPPPVSTPPPATPPPVSSPPPASPPPATPPPATPPTATPPPASPPQATPPPASPPPATPPPATPPPAPLASPPATAPAPAPSKTKAKSPALSPSASSPPSPSTAAPTPSLGASSPGPAGTDTSGAEKTCSIRKMAXSLGIGSRILTLMLYTMKSSLHH

SEQ ID NO: 74893 - protein, 376 aa, Gossypium hirsutum
  unsure (1)..(376): unsure at all Xaa locations
  Clone ID: GOSHI-09MAY01-C236_2.pep
QVFVPMLSLIIGFEAKSSPAISKCMIMGAAASTVYYNLKLRHPTLDMPIIDYDLALLIQPMLMMGISIGVTFNVLFADWMVTVLLIILFLGTSTKAFFKGVETWKKETILKKEAARRLEPTETGSGDVAYKPLPSGPSSDPPKDDSDKEVSILENVCWKELGLLCFVWIAFLVLQITKNNTTTCSALYWVLNLLQIPVSLGVSLYEAVSLYKGYRVIASKGEHGPTRPVAQLVTYCAFGVLAGVGGRLLGLGGGFIMGPLFLELGVPPQVSSATATFAMTVPPSMSVVEYYLLKRFPVPYALYFTGVATVAAFIGQHVVXKRLLILFGRASLIIFILASTIFVSAISLGGVGISNMIGKIERHEYMGFENLCKYES

SEQ ID NO: 74894 - protein, 216 aa, Gossypium hirsutum
  Clone ID: GOSHI-09MAY01-C236_1.pep
MMLNNKFLFLSALFCIAVAGVLGQAPPTPSNPPTSTPAPPTPPASTPPPTTQPPPTPTTTSPPPASSPPPTSSPPPVSTPPPATPPPVSSPPPASPPPATPPPATPPPASPPPATPPPASPPPATPPPATPPPAPLASPPATVPAPAPSKTKAKSPALSPSASSPPSPSNEAPTPSLGASSPGPAGTDTSGVEKTWSIRKMVWSLVIGWGILSLML

SEQ ID NO: 74895 - protein, 145 aa, Gossypium hirsutum
  unsure (1)..(145): unsure at all Xaa locations
  Clone ID: uC-gsronu33B109e07b1.pep
MMLNNKFLFLSALFCIAVAGALGQAPPTPSNPPTSTPVPPTPPASTPPPTTQPPPTXPPPASPPPATPPPATPPPATPPPASPPQATPPPASPPPATPPPATPPPAPLASPPATVPAPAPSKTKAKSPALSPSVCSPPSPSTEAP

SEQ ID NO: 74896 - protein, 84 aa, Gossypium hirsutum
  Clone ID: uC-gsronu33B178e07b1.pep
ARLRFGEERRWSIIFHSLHNPHFSLSVPFYIYEIHLLTIFRNCLDEWNYSFLLKKKIKKHIKKLKKKQQYTIKISNNYSSLKIK

SEQ ID NO: 74897 - protein, 166 aa, Gossypium hirsutum
  unsure (1)..(166): unsure at all Xaa locations
  Clone ID: LIB3582-058-P1-K1-C2.pep
MISETGSGDVAYKPLPSGPSSDPPKDDSDKEVSILENVCWKELGLLCFVWIAFLVLQITKNNTTTCSALYWVLNLLQIPVSLGVSLYEAVSLYKGYRVIASKGEDGTSFRVAQLVTYCAFGVLAGVVGGLLGLGGGFIMGPLFLELGVPSXVLSATATFAMTFSLY

SEQ ID NO: 74898 - protein, 150 aa, Gossypium hirsutum
  unsure (1)..(150): unsure at all Xaa locations
  Clone ID: uC-gsflnu33B112h02b1.pep
RDPCLGYSSLRNYPHRYSRPPATPPAACSTTATTGTATPSPDSMALPHVTVSAAGVIKTKAKPTALSHRGSSPTATXMSACTPSLGASSPGPAGTDTSGVEKTWCIRKMVWSLVIGWRIPSLMLKTKKSFLHHLCLSYGFLFQCLNSIIY

SEQ ID NO: 74899 - protein, 98 aa, Gossypium hirsutum
  Clone ID: LIB3585-018-P1-K1-F2.pep
VAGVLGQAPPTPSNPPTSTPAPPTPPASTPPPTTQPPPTPTTTSPPPASSPPPTSSPPPVSTPPPATSPPVSSSPPSSPSPATSPFVTLLLFSINRVM

SEQ ID NO: 74900 - protein, 75 aa, Gossypium hirsutum
  Clone ID: GOSHI-09MAY01-C38965_1.pep
HASEEIYFLFFFAIFPSYSVIATSRVFCCCYFSCILLQVWPYGGIGPGDVEVVRGKPLMGARSWLAAALVYSRNL

SEQ ID NO: 74901 - protein, 268 aa, Gossypium hirsutum
  unsure (1)..(268): unsure at all Xaa locations
  Clone ID: GOSHI-09MAY01-C38825_1.pep
HASAHASGSFENVDVIGKPDRFSSMGSTHIAATLHAAAMLMKLDRGWDWFIALSALDYPLVTQDDLSHVFSSVRRDLNFIDHTSDLGWKEDQRVLPIVVDPGIYLARRTKIFHATQKRLMPDAFKVFTGSPWVVLSRSFLEFCLFGXFKNTTVNGDLRYMIWDSPPKTEPHFLNGSDYDQMAQSGAAFARQFQKDDPVLDMIDEKILKCGRNRAVPGAWCTGRRSWWVDPCSQWGDVNVLKPGPQAKKLEETILNLLDDWNSPSNQCT

SEQ ID NO: 74902 - protein, 154 aa, Gossypium hirsutum
  unsure (1)..(154): unsure at all Xaa locations
  Clone ID: GOSHI-09MAY01-C38505_2.pep
RKSTRAEMERQKLEEMAKXRVRTGRLIXKAYWTGRKKCSIARVWVEPGDGKFIINDKEFDVYFPMLDHRAALLRPFSETKTLGLWDIKCTVXGGGLSGQVGAIQLGISLALQNFEPELRAPLRAAGFLTRDSRVVERKKPGIAKAWKSFQWVKR

SEQ ID NO: 74903 - protein, 132 aa, Gossypium hirsutum
  unsure (1)..(132): unsure at all Xaa locations
  Clone ID: GOSHI-09MAY01-C38505_1.pep
MRLRTGLKLVEEEKQRTAGLKGPNRAFGDLIAASGITDAMLDSLIALKDLEGVEGLPPLSVIEDMRYEKNTRKSTXAEMERQKLEEMAXERVRQVDDKGRAYGTXGRRKCSPAPGWVVPPGGLGIINDKEFD

SEQ ID NO: 74904 - protein, 85 aa, Gossypium hirsutum
  Clone ID: GOSHI-09MAY01-C38415_1.pep
AQNPSPLSTNRQPSKKQKTLGAPHLGRLLTPPSSAECHFSATCAAPPRHVSDVLNHVRIAKNVDPRSLNLLDVVYGGGSAFKGRD

SEQ ID NO: 74905 - protein, 209 aa, Gossypium hirsutum
  Clone ID: GOSHI-09MAY01-C38405_1.pep
MVSLRRRKLLGLCSGKNSVLTPLHRFFGNGNALETSSQNAKSVSVHPIPLDSINHVHGKSIPMVSCGSPNVSGSGSSKEHHNQPFPGQLIKRRKRHRRKHVQNQEPCLMRGVYFKNMKWQAAIKVDKKQIHLGTVGSQEEAARLYDRAAFMCGREPNFELSEEEKQELRNFKWDEFLAYTRHSITNKKSKRRLGIRPQKSFEPAIENGQ

SEQ ID NO: 74906 - protein, 66 aa, Gossypium hirsutum
  Clone ID: LIB3147-001-Q1-K2-E6.pep
YFFHTNIWMTSEIIMKMIIYIKSPKMRKILKNQHNTTQTPTKSYVPPRLQDLKQKDCITSLYHYKL

SEQ ID NO: 74907 - protein, 53 aa, Gossypium hirsutum
  Clone ID: LIB3147-001-Q1-K1-E6.pep
TKKIALPVYITTNCEMRFLRVKRKRKGGTRISSASLDQSSSQIAREIADLPLF

SEQ ID NO: 74908 - protein, 237 aa, Gossypium hirsutum
  Clone ID: GOSHI-09MAY01-C38765_1.pep
PRVRKKRKKDNVVWDEQTGAWKRRFGYDRVNDDKDIPIIEAKMTDEPGEDPFAKRQDDKKKRVEKQEKNRLQNLKQAAKLGALPSHVQLAATALPITGTQAPPKKVTKDELGNVAGMAATSTASGGKFDRKLPGEKPAKKQGKHRKFLPVVEGSGIGSREKEQTENVLNKLISKHSHEILNVDKAVTMYNVKKEKKARNRKNQEGRSSSTSNELKPKKQLHKKGAKRGPGSSRKGKA

SEQ ID NO: 74909 - protein, 73 aa, Gossypium hirsutum
  Clone ID: GOSHI-09MAY01-C38725_1.pep
CNFKSHILFCSYLKSHHDADPDHDADPDHDADPVSFGVYIFFKFNLLRFGVRSDCLLDIGCSVYEFERLWWWF

SEQ ID NO: 74910 - protein, 88 aa, Gossypium hirsutum
  Clone ID: GOSHI-09MAY01-C38655_1.pep
DEKLDTHITLNLLVTIQPLLPQLSLRMEQHDRVPEMKMKGECAVDLGKNIGRNLEQRRRKQVILGKFFLPLVLNSDSAPPPRNTYCSM

SEQ ID NO: 74911 - protein, 46 aa, Gossypium hirsutum
  unsure (1)..(46): unsure at all Xaa locations
  Clone ID: uC-gsronu33B039b03b1.pep
MSRSGQPPDLXKIKLNANRLVVGTLRGFDQFMNLVVANTVEVIVYV

SEQ ID NO: 74912 - protein, 80 aa, Gossypium hirsutum
  Clone ID: LIB3145-051-Q1-K1-D8.pep
MSRSGQPPDLKKYMDKKLQIKLNANRLVVGTLRGFDQFMNLVVDNTVEVNGNEKTDIGMVVIRGNSVVTVEALEPVGRMQ

SEQ ID NO: 74913 - protein, 181 aa, Gossypium hirsutum
  unsure (1)..(181): unsure at all Xaa locations
  Clone ID: GOSHI-09MAY01-C38165_1.pep
MYNFWLEISMQGGAIRQELYYLLKDEKDVHFAFGTIQGNGVNQAGHGMASSKFCLNIAGDTPSSNRLFDAIVSHCVPVIVSDEIELPFEDVIDYSQIXIFVRASDAVKKGYLLNLLRGISRDQWTKMWEKLKETVRHFQYQYPSQLCDAVDMIWEAVARKVPMVQLKTHRENRYRRSERIK

SEQ ID NO: 74914 - protein, 84 aa, Gossypium hirsutum
  Clone ID: GOSHI-09MAY01-C38115_2.pep
PTRPSHIACIESTDIWKRVQHLCFLLVSFGRSRFFVNKVVDLSICEVSICFVVSSLSCSLFASVAAQLKDFRVCKCFRYHVACK

SEQ ID NO: 74915 - protein, 55 aa, Gossypium hirsutum
  Clone ID: LIB3828-027-Q6-N6-C4.pep
RTGACRCYWRKDNRTTDYLLRLLVLSPCLLFFLFLGSSMNVVLTVYLVGFLQDTL

SEQ ID NO: 74916 - protein, 272 aa, Gossypium hirsutum
  unsure (1)..(272): unsure at all Xaa locations
  Clone ID: GOSHI-09MAY01-C38045_1.pep
KKQDGVIGANEKVVQQFLASVSESRSSIRLLSRSLTMQLRHMGSKVYERISVLLQPYDMKISHSKNPKSLLLYLEALLNKAFFEDFESTGFQKNAVNQILNPIDRCEANYKSFNELQGLTWEEVLNKGTRHFSQEFSQFCDRKMNEIVAMLGWNRAWPEPLLQAFFGASKSVWLVHLLANSVHPGLPIFRVEXKGVRFDSVYMEEHGGRKSQEFGSSLVPVMNHPGFYFYGHVIQFQVICPVLPTMWKISLNYKGFNLLHLPYCLKFKLGIE

SEQ ID NO: 74917 - protein, 219 aa, Gossypium hirsutum
  Clone ID: GOSHI-09MAY01-C38395_1.pep
RSLQHYPWGGGYLTAEGQAKLREENPGNALLELRGNAGSHDLPFSVETLTALTKLTKERGGVKLPRYDKSAYRGKGDRADPSVWPEVEGPLTVILYEGWMLGFKSLPAEVVKAVDPQLETVNKNLEAYYDAWDKFIKAWIVIKIQDPSCVYRWRLQAEVAMREAGKPGMSDEEVEDFVSRYLPAYKAYLPTLYSEGPNGSDPNHLLVIEIDEGRNPILF

SEQ ID NO: 74918 - protein, 75 aa, Gossypium hirsutum
  Clone ID: GOSHI-09MAY01-C38345_1.pep
KDEEEEAEFKAQTKELVNAPQDLPPQLLFVHQGQKDLKELHWHAQIPGMIVSTAADGFNILMPSNIQSTLPSNGS

SEQ ID NO: 74919 - protein, 152 aa, Gossypium hirsutum
  Clone ID: GOSHI-09MAY01-C38305_1.pep
MAFASQAMISTNSCAFTSPNLLFLKKCSKINNKTRQFHFFTVRASSDESDDCNEEECAPDKEVGKVSVQWLAGDKTKVVGTFPPRRRGWTGYVEKDTAGQTNIYSIEPAVYVAESAISSGTAGSSADGAENTAAVAAGFALIFCAAASSIGL

SEQ ID NO: 74920 - protein, 118 aa, Gossypium hirsutum
  Clone ID: GOSHI-09MAY01-C38265_1.pep
MAVSTPSPVSYLTRIEHTNLFPSKKLQFNPFSPAKKPLTVVSMAPKKKVNKYDSEWEKQWFGAGIFYEGSEEIEVDVFKKLEKRKVLSNVEKAGLLSKAEELGFTLSSIEKLGVFSKA

SEQ ID NO: 74921 - protein, 77 aa, Gossypium hirsutum
  Clone ID: GOSHI-09MAY01-C39545_1.pep
CLKKARRETIKEKPMAAVETPTENPAPASGDGDGASLTCAEATVRIAITKANKKAFNMLTWAISRREEKLKILGFFF

SEQ ID NO: 74922 - protein, 70 aa, Gossypium hirsutum
  Clone ID: LIB3147-020-Q1-K1-C2.pep
QLLCLLSMTQVGMLKPFLLALVMAILTVASAQVSEAPSPSPDAGAGFSAGVSTATVGLSLIVSLIAFFKH

SEQ ID NO: 74923 - protein, 103 aa, Gossypium hirsutum
  Clone ID: uC-gsflnu33B146g09b1.pep
PCVRPRVRFSFLLSSSIKLKGLFGSPLCVAVFHIYVYVCMYVFMTPFFLSKMNCDELDFMNKTLHVCFLEREEHLDAAFRYFDGDGSWSIPADELQHASAELF

SEQ ID NO: 74924 - protein, 206 aa, Gossypium hirsutum
  Clone ID: GOSHI-09MAY01-C39565_1.pep
AATVAADSIRASSFGLKIANAWRGLGWPDEAVVFTLATLPILELRGAIPLGYWMQLKPTLLTILSILGNMVPVPFIVLYLKRFTTFLAGKNQVASQLLNSLFERARQKAGPVEEFQWLGLMLFGAVPFPGTGAWTGAIVASILEIPFWSAVSPNFVGVVFAGLLVNLLVNLGLKYAIVTGIFLFFISTFMWQILRNFKNVSSSASN

SEQ ID NO: 74925 - protein, 111 aa, Gossypium hirsutum
  Clone ID: LIB3147-055-Q1-K1-F10.pep
AQASLDPKIHRPASPKNLNPNRNPRASPTLRRSQATASMRLQHRTTTTRASVRLTPSPSTAMYTSHAYSVPAKRTKAQQNKDKNKEYCIFFLFSSIILIPSAIKPRYFFSS

SEQ ID NO: 74926 - protein, 62 aa, Gossypium hirsutum
  unsure (1)..(62): unsure at all Xaa locations
  Clone ID: LIB3147-006-Q1-K1-B10.pep
GFNFLGLLGCEFLGLDLFGLVLGLYWVWDLGYVIGHFNGLLTFDLXKKRLNFLFPHKYNKRK

SEQ ID NO: 74927 - protein, 261 aa, Gossypium hirsutum
  unsure (1)..(261): unsure at all Xaa locations
  Clone ID: GOSHI-09MAY01-C39155_1.pep
SRARKHVYTDDGSKESKLAQIKSGYEWAQKEYVLAAKRYEEALNIKPDFHEALLALGQQQFEQAKLCWYHAAGSKLDLAAGPSQEVLQLYNKAEDXMEKGMQLWEEMKEKRLNGLSKFDKYKAHLQKMSLDGLFQDVSSEEAAEQAANMCSQIYLLWGTLLYERSVVEYKLELPTWEECLEVSIEKFELAGASPTDIAVMIKNHCSNVTASDGVGFKIDEIVQAWNEMYDVKRWQIGVPSFRLEPLFRRRAPKLQSALEQV

SEQ ID NO: 74928 - protein, 51 aa, Gossypium hirsutum
  Clone ID: GOSHI-09MAY01-C39165_1.pep
FVILKTVIKCCLITCYYYCYFTLRLSHVMLLLYMNGCVQIEISTFKLLLHS

SEQ ID NO: 74929 - protein, 110 aa, Gossypium hirsutum
  Clone ID: GOSHI-09MAY01-C39105_1.pep
MVFEKDLNLDATELRLGLPGSSEESLRISNKRALPDMNDDSGVAAAKKCDQETAPPTKAQVVGWPPIRSYRKNSLQTKKTEAETSGMYVKVSMDGAPYLRKDDLKVYKDT

SEQ ID NO: 74930 - protein, 51 aa, Gossypium hirsutum
  Clone ID: GOSHI-09MAY01-C39045_1.pep
QVIPSLGSQGKSEDGKPPWEGVRTRCKKEWSMFQNRLANADKAYLAQLGKE

SEQ ID NO: 74931 - protein, 93 aa, Gossypium hirsutum
  unsure (1)..(93): unsure at all Xaa locations
  Clone ID: GOSHI-09MAY01-C39365_1.pep
MGCVGSTPAKGDGNAKKIREPKPWKHPQPITKSELEQMRDEFWDTAPHYGGQKEIWDALRAAAAEPDLSQAQVIVDXCGVIVQNTDLTICYDE

SEQ ID NO: 74932 - protein, 55 aa, Gossypium hirsutum
  Clone ID: LIB3147-008-Q1-K1-D12.pep
KKIRKPKPWLHPQPITKSEREQMRDEFWDTAPHYGGQKGGFLCNLLPFRLTCLRL

SEQ ID NO: 74933 - protein, 210 aa, Gossypium hirsutum
  Clone ID: GOSHI-09MAY01-C39325_1.pep
MSKEEMKIGRRFEGKVAIVTASTQGIGFSIAERLGLEGAAVVVSSRKQKNVDEAVEKLKNKGIQVLGVVCQVSNAQQRKDLINKTVEKYGKIDVVVSNAAANPTVSLLLETPESVLDKVWEINVKASVLLLQEAAPYLQKGSSVVLISSIMGYHPQIAMAMYGITKTALLGLTKALAKEMAPDTRVNCVAPGLVPTNFAAFLTKDEVLKK

SEQ ID NO: 74934 - protein, 179 aa, Gossypium hirsutum
  Clone ID: GOSHI-09MAY01-C39245_1.pep
MGEARDGVKVKRVVFVTVGTTCFDALVKVADSQEVKDELYRRGYTDLLIQMGRGSYLPIKSTGDDGSLAVDYFTFSSSIADYLRSASLVISHAGSGSIFETLQLGKPLIVVVNEDLMDNHQSELAEELAERKHLYCARPLTLHQTIAGMDLNSLVPYSPGDATPVAKLINRFLGFPEES

SEQ ID NO: 74935 - protein, 53 aa, Gossypium hirsutum
  Clone ID: GOSHI-09MAY01-C39215_1.pep
GSNTDTTGNQSIFDESHSHLLLVLRVSLFSFSPAPACSCSLGFIYPIYLSPLV

SEQ ID NO: 74936 - protein, 74 aa, Gossypium hirsutum
  Clone ID: GOSHI-09MAY01-C34865_1.pep
MLYSLPVENVQALASKNLNRIPSRYIRPEVEFDVVSIDESQQIPVIDMSKLDHDAEQKKLHQACKDWGFFQVPN

SEQ ID NO: 74937 - protein, 114 aa, Gossypium hirsutum
  Clone ID: LIB3145-046-Q1-K1-H3.pep
METKVQSTDMLYSLPVENVQALASKNLNRIPSRYIRPEVEFDVVSIDESQQIPVIDMSKLDHDAEQKKLHQACKDWGFFQLINHGIADEVIEKMKTDTQEFFNFAFEEKMAYSR

SEQ ID NO: 74938 - protein, 268 aa, Gossypium hirsutum
  unsure (1)..(268): unsure at all Xaa locations
  Clone ID: GOSHI-09MAY01-C34805_1.pep
HASGGSGCVFDKYASFSDCVWGPEKEIRIIQYPYVKRRDNLPEPKEKEKPVGLWSIIKDNIGKDLSGVCLPVYFNEPLSSLQKCFEDLEYSYLVDRALEWGKQENDLMRILNVAAFAVSGYASTEGRQCKPFNPLLGETYEADYPDKGLRFFSEKVSHHPMIVACHCEGKSWKFWADSHLQRKFWGTIYPLHPVGIXTLHFEDGETFQWSRVTTSIYNIILGKIYCDHYGTMRIXKGMGNYSCKLKFXEQSIINRIPIRFHGFVPKHN

SEQ ID NO: 74939 - protein, 111 aa, Gossypium hirsutum
  Clone ID: GOSHI-09MAY01-C34555_1.pep
PFQRHFFTQTRTSKAYPLYFDRFHQLFRPNEQLHTQLSRHSIELILLKYFLIYQLMLVPHTPPILLGQATTVEGVPRPMPTRPVTSQHAHPQQRANQDCAKAFILLLSIMQ

SEQ ID NO: 74940 - protein, 220 aa, Gossypium hirsutum
  unsure (1)..(220): unsure at all Xaa locations
  Clone ID: GOSHI-09MAY01-C34545_1.pep
MMEKGKEPAAANEDGEVGKAESEEIQEALEIVLFQVSECYVYLIPPRKTAASYRADEWNVNKWAWEGTLKVISKGEECIIRLEDKNTGELYARAFLRDGEPHPVESVIDSSRYFVLRIEENIXGRLRHAFIGIGFRERTEAYDFQAALHDHMKYLNKKKTAEEMEQQFQKSSSVDYSLKDGETIVLQLKIKGGSSLMSNAPELGIDKMFGCHAFGKTFFI

SEQ ID NO: 74941 - protein, 104 aa, Gossypium hirsutum
  Clone ID: GOSHI-09MAY01-C34505_1.pep
RNPFVCLKRLNQSLASHWTLHGKNIFLSSCFISGQSVIGWREESSTLGFHHSFFITHKIHGSNANFICFRYMSHSEKLLDIEHVGLRTFLGTPSTIERPKLQGS

SEQ ID NO: 74942 - protein, 143 aa, Gossypium hirsutum
  unsure (1)..(143): unsure at all Xaa locations
  Clone ID: GOSHI-09MAY01-C34495_1.pep
PTRPFAGTSCSYCLVSALXAVSLFFISLKDVGLQEVQKVVGLQVCIASLAFATLSTSYSNLPSAPSSQANIDLPYFTTEITKESRPFALSLARHLHSIXAKMYGAFWCSHCLEQKEMFGREAAKLLDYIECFPDGYKTGTKMI

SEQ ID NO: 74943 - protein, 104 aa, Gossypium hirsutum
  Clone ID: GOSHI-09MAY01-C34445_1.pep
MKSVVGIVVSNKMHKSVVVAVDRLFHNKIYNRYVKRTSKFMAHDEKDECNIRDRVKLDPSTPVSKRKHCVVAEILKKARIYTPPSVDTAANASAKNEAPLSSTS

SEQ ID NO: 74944 - protein, 112 aa, Gossypium hirsutum
  unsure (1)..(112): unsure at all Xaa locations
  Clone ID: AW187640.1.pep
MKRQGTTHSSRAGLSRVRGPIRSTSDRFTEQGVKQGPGXLXKNLAEVSVVFNSTPRVGWLEGIAFCRLSFPSLSSLSKXRFKSNFWLATSWAQGLQSAASPVVVSSFLTDPI

SEQ ID NO: 74945 - protein, 83 aa, Gossypium hirsutum
  unsure (1)..(83): unsure at all Xaa locations
  Clone ID: LIB3135-021-Q1-K1-G11.pep
MKRQGTTHSSRDGLSRVRGPIRSTSDRFTDHGVKQGPGXLXKNLAQVSVVFNSPPRLDWLAQDCRTRGRTSARTPCRTRTRAR

SEQ ID NO: 74946 - protein, 107 aa, Gossypium hirsutum
  Clone ID: GOSHI-09MAY01-C34435_1.pep
MALQKAKDIVSTNPVVVFSKSYCPFCVDVKQLLQQLGASFKAIELDRESDGSDIQAALAEWTGQRTVPNVFIGGKHIGGCDSTMALHKEGKLVPLLTEAGAITKSSV

SEQ ID NO: 74947 - protein, 48 aa, Gossypium hirsutum
  Clone ID: LIB3146-008-Q1-K1-H12.pep
RKKWPPQRLRTLYVSKPENVFRKIKRTELRGSKAIAIKTWSFFQGHRT

SEQ ID NO: 74948 - protein, 160 aa, Gossypium hirsutum
  unsure (1)..(160): unsure at all Xaa locations
  Clone ID: GOSHI-09MAY01-C34755_1.pep
RSKIPIKEQTSVLLVAKIGGIYWWYQTLSQPXELTAGSCATALRDGYDPVVSVLSRHGAALHIPCLEMMDSETPPTYLCSPEGLLKQMQSVSKKRIVNLIGRNTTERLDKTGLWKIRSNCYNPQAEVVRSFTYFRMNDSIFRVENWNNFVPFVRMMSTDL

SEQ ID NO: 74949 - protein, 95 aa, Gossypium hirsutum
  Clone ID: GOSHI-09MAY01-C34715_6.pep
KAWNSVCDGCRRQSASVKLIKLNDVLISGITSVNSKGFHMMISVCSNFVITNVNISAPDESPNTDGIHMSKTNKVRISDSFIGTGDDCVSMIHGT

SEQ ID NO: 74950 - protein, 89 aa, Gossypium hirsutum
  Clone ID: GOSHI-09MAY01-C34715_2.pep
QEYATIKGSVDSKVLISDVEFSNIRGTTISKIAIVLACSPTFPCQGITLKDIHLEYSGPPDHNEDTPFSSNCTNVKVNYIGEQMPPPCA

SEQ ID NO: 74951 - protein, 449 aa, Gossypium hirsutum
  Clone ID: GOSHI-09MAY01-C34715_1.pep
MASMRPRVRPLYLRLINNKEKKIEGLSFKMASMRLLAIIAILVQGLVNGDSHELPSFDPELAVAKVWEVAEGKVGPDVKVFNVVDFGAKPDGTTISTINFIRAFKAACNHNGRAMLVIPEGNFLLGSMLLSGPCTFQPPLMVQFNGNLLPQGSTSTAENADWITFINFNGLFISGKGTINGLGEKEAWKAVCDGCRRKAANLKLIKLNDVLISGITSVNAKGFHMMISVCSNFVITNVNISAPDESPNTDGIHMSKTNKVRISNSTIGTGDDCVSMIHGTTNVTIENVKCGPGHGFSIGSLGHYEAEFDVFGITVRNCSLAHTENGARIKTYRNESPSKASGIIFQDLTMDHVKNPILIDQEYATIPGSVDSKVLISDVEFSNIRGTTISKIAVVLACSQSFPCKGITLKDIHLEYTGDPDHNEDTPFSSNCTNVKVNYIGEQLPPPCA

SEQ ID NO: 74952 - protein, 111 aa, Gossypium hirsutum
  Clone ID: LIB3828-003-Q1-K6-D11.pep
FRSGTSRSQVWEVAEGKVGPDVKVFNVVDFGAKPDGTTISTINFIRAFKAACNHNGRAMLVIPEGNFLLGSMLLSGPCTFQPPLMVQFNGNLLPQVQRPRRKCRLDHIHKL

SEQ ID NO: 74953 - protein, 194 aa, Gossypium hirsutum
  Clone ID: LIB3584-010-P1-K1-G1.pep
FHASAHASAHASADAWVLPQGSTSTADNADWITFMNFNGLFISGKGTINGLGEKEAWKAVCDGCRRKAANLKLIKLNDVLISGITSVNAKGFHMMISVCNNFVITNVNISAPDESPNTDGIHMSKTNKVRISNSTIGTGDDCVSMIHGTTNVTVENVKCGPGHGFSIGSLGHYDAEFDVFGITVRNCSLAYTEN

SEQ ID NO: 74954 - protein, 65 aa, Gossypium hirsutum
  Clone ID: LIB3145-012-Q1-K1-D7.pep
RLINNKEKKIEGLSFKMASMRLLAIIAILVQGLVNGDSHELPSFDPELAVAKVWEVAVGKVGPDV

SEQ ID NO: 74955 - protein, 148 aa, Gossypium hirsutum
  unsure (1)..(148): unsure at all Xaa locations
  Clone ID: GOSHI-09MAY01-C34095_1.pep
MVGQWTATKPSRSDEALDSDQQQRITNQVRAQFDSRVPKRPTKPNRSEPDLTSSNPPSDVDQNIPELDKXRSLQSQSQAKISEGGATVEQEEFVETQYYREMNSIDKLHPTTGSGFIRVMIGGGEGNGYDIQLESGQDAIKKPIFKSN

SEQ ID NO: 74956 - protein, 141 aa, Gossypium hirsutum
  Clone ID: GOSHI-09MAY01-C34315_1.pep
KLVAMNPMNLSRCRSPLALPFNKLHSRSSLRNHLQRRKSKNIRKRMKRLRSDMQEISREQGKIKEGQRQVREKFEAVESECELLRKETNIIMQQSMSTQLRLAFMLQILKARENHDLDQAAKLTSALRELIARENQQKETM

SEQ ID NO: 74957 - protein, 93 aa, Gossypium hirsutum
  unsure (1)..(93): unsure at all Xaa locations
  Clone ID: GOSHI-09MAY01-C34295_2.pep
KHKKHKDRDKDKDKEHKKHKHRXKIKIGVKIKTRXKKKDSSGHHDSGADHSRKHHEKKRKHDGDEDLSDVHRHKKSKHKSSKIDEVGAIKVAG

SEQ ID NO: 74958 - protein, 67 aa, Gossypium hirsutum
  Clone ID: LIB3829-024-Q6-N6-G1.pep
HKKHKHRHKDKDRSKDKDKEKKKDRSGHYDSGADHLKKHHEKKRKHDGDEDRNDINRHKKSKSKLVN

SEQ ID NO: 74959 - protein, 248 aa, Gossypium hirsutum
  unsure (1)..(248): unsure at all Xaa locations
  Clone ID: GOSHI-09MAY01-C34285_1.pep
MEMRDIDDLPKNAANYMALTPLWFLERAATVHPTRKAGGHGARXYTWLQTYQRCRRLASALSKRSIGVGSSVAIIAPNVPALYEAHFGIPMSGAVVNTINIRLNASTIAFLLGHSQSTVVIVDQEFFNLAEDALRIMKEKSQGNFTPPLVIVIADESCNPETLKYALGQGAIEYEKFLESGDPDFAWKPPQDEWQSIALGYTSGTTASPKGVVLHHRGAYLMALSNPIIWEMNEGAVYLWTLPMFHCN

SEQ ID NO: 74960 - protein, 186 aa, Gossypium hirsutum
  Clone ID: GOSHI-09MAY01-C35995_1.pep
MGVLSSVMGVFGFGIGTSVGIVIGYYMFIYFLPTDVKDPKIRPLVEEDSKTLQQLLPEIPLWVKNPDFDRVDWLNKFIETMWPYLDTAICTTAKNIAKPIIGEQIPKYKIQSVEFETLTLGTLPPTFQGMKVYVTDEKEIIMEPSLKWAGNPNIIIAVKALGLKATVQVVDLQVFAVPRITLKPLL

SEQ ID NO: 74961 - protein, 212 aa, Gossypium hirsutum
  unsure (1)..(212): unsure at all Xaa locations
  Clone ID: GOSHI-09MAY01-C35965_1.pep
MGRGAGEVGCVKPMIQGKPTVEVSHEKQKLAASLFGGSXQKPEKSPASGHKAAKASGEGVEKSHVPKSSLEVASEKATPAQQPPDLLDLGEPTATSTALQLDPFKQLEGLLDATEVASAVNGAPAASRSPDIMALYADTAAGVHNKNDADLLSGLSNPSVTNMPGTTAMPQVTQSSSKRPNPKDSLEKDALVRQMGVNPSSQNPNLFKDLLG

SEQ ID NO: 74962 - protein, 83 aa, Gossypium hirsutum
  Clone ID: GOSHI-09MAY01-C35575_1.pep
SFFIYRNPEVDSVMCLRPNPTSELLTLHIPGRASGQREGLFRMSCVRGSNEGLRLMSGLIVGFLSIKHSVKNSKDSFSRDRTC

SEQ ID NO: 74963 - protein, 82 aa, Gossypium hirsutum
  Clone ID: uC-gsronu33B149f08b1.pep
SFFIYRNREVDSVMCLRPNPTSELLTLQNREKGNEVSTSCLVSSCNKNYTYLIFSIQYNKHSYIHSMHYYPNMHKLNIQAHA

SEQ ID NO: 74964 - protein, 441 aa, Gossypium hirsutum
  unsure (1)..(441): unsure at all Xaa locations
  Clone ID: GOSHI-09MAY01-C35565_1.pep
KGKIPDKLSNSLSAFNVSNNDLSGPVPENLRGFPRSAFSPGNSLLIFPKGMPPTGLSQDHTLDHVRHHSSKGSIRVAIIVASVVAAVMIVFVFLACHRAQLKEFRGRCGFSDTTTGGNAKSGGLARPSRFKFHSTAQAPQTSLSFSNDHLLTSNSRSVSGQQEFAAEIVEHGAAERVTTSSASVNPNLLDNDPVSSGRKSSPGSPLASSPRVIETFEQPVTWDVYSPDRLAGELFFLDTSLSFTIEELSRASKKFLGRGSHGTLYKATLRNGICAVXKWWRVGXLVKHKKRIVGKLKXIGSVRHSNFVPXRAYYXWGPREQERLLLSDYIPXIAWLLHLYETTPRRYHPLSFSQRLKVPVEVAKCLVHLHDRGLPHGNLNPTFLPLADPDYHACLTDYCLHRLMTPTGIAEQILNLGALGYRAPELAFTSKPVPSFKADVY

SEQ ID NO: 74965 - protein, 72 aa, Gossypium hirsutum
  unsure (1)..(72): unsure at all Xaa locations
  Clone ID: LIB3145-016-Q1-K1-C11.pep
GPVWHFNFAPDRAYYWGGWXQERLLLSNYIQCDSLAFHLYETTPQRYHPLSFIQRLNVPAEVAKCYVTTFMI

SEQ ID NO: 74966 - protein, 66 aa, Gossypium hirsutum
  Clone ID: GOSHI-09MAY01-C35515_1.pep
CEPDFHPPRIAKLGNLNYKLNHQTPPRLVLSGNSSYSSCRAQRLKISSIIVIYSSFACSSTTSRLI

SEQ ID NO: 74967 - protein, 59 aa, Gossypium hirsutum
  Clone ID: GOSHI-09MAY01-C35495_1.pep
HASAHAFGKVSVINIVVLILLVIFYVIGCAAARASESIDNDEPYGEARMTKAQPSRIQL

SEQ ID NO: 74968 - protein, 203 aa, Gossypium hirsutum
  Clone ID: GOSHI-09MAY01-C35725_1.pep
MAGREVREYTNLSDPKDKRWGKGKDKLDDEDIAFQRMVAKMQEVAGERGGYLHGRGALDSDDLLYLKEQMEAEEDAERLLRRTEKRAFAAFKKAASLADSSPASFPLPLRVEPKPKSGIRQQDLLKKVVEVKPKRPKISSPSSSEPEGNQSNLQSQGQESNHEKKIGHCVSESNTAEKQNKVEKSTKSLLGLAYASSDDDDDD

SEQ ID NO: 74969 - protein, 66 aa, Gossypium hirsutum
  Clone ID: GOSHI-09MAY01-C35685_1.pep
FSSLHQARVQRITEKAASSFLLSYRHESQVEEEAHEKTEAEAPKDETEIQVDRTTSPSVIRGFSMS

SEQ ID NO: 74970 - protein, 169 aa, Gossypium hirsutum
  Clone ID: GOSHI-09MAY01-C35645_1.pep
PTRPPTRPERSALGGSTRVSGSGRSGSENVGLSNANIGEQVGSAEAHDEISEPISNIGKTALSPNLSFQGTSLMQSDHFLLPSSIEYYEGRDFGSVQDEQKESLIRLPQPSSIDVNGVLGQILFDVCVPKDVEGWDMKSSDSSSRHPYTSSLWRNSHFNPIKCIRRSRL

SEQ ID NO: 74971 - protein, 397 aa, Gossypium hirsutum
  unsure (1)..(397): unsure at all Xaa locations
  Clone ID: GOSHI-09MAY01-C35165_1.pep
PRPVLCKICGDGGHPTIDCPMKGTTGKKMDDEYQNFLAELGGTVPDSANKQNSSSVSSGSNPPWASSTGGAGSAHPGLGSNAVKPPKEYDDTNLYIGYLPPSLDDDGLISLFSAYGDIVMAKVIKDRVTGLSKGYGFVKYASVDMANNAIKGMNGSLLEGRTIAVRVAGKPPQPAVPPGPPTLSMPSYPVSSQPVGAYPSRQFTTGGPIPNAASASYAGNPVPWGPPVPPPPPYAPYAPPPPPPPGSTIYPPVHGQPMPPYGLQYPPQMQTVPPGVAPPPPPVTSSETAQSFPPGVQSENSTSAPAMPANIYGNSMTAMPPNSQSAYPTSSLGYSSYYNAVPPPXPPPLPTSSTDNSQSLSNVPWAPNPLLTPAASSGEKTTYGADTEYEKFMAEMK

SEQ ID NO: 74972 - protein, 173 aa, Gossypium hirsutum
  unsure (1)..(173): unsure at all Xaa locations
  Clone ID: GOSHI-09MAY01-C35105_1.pep
MASLITNPVTNTNSDRSKRKKKKNSMVKQNLQRSQKEDHARRGSEAQQQIYSSKLLQALSQVSLGTPSPSAPRGGRAVREAADRVLAVAAKGRTRWSRAILTSRLKLKFRKQKRSQRGSAAAVAAATRTSRSKKPRVSVLKLKAESVPNVHRKVXVLGRLVPGCRKQPLPVIL

SEQ ID NO: 74973 - protein, 140 aa, Gossypium hirsutum
  Clone ID: GOSHI-09MAY01-C35015_1.pep
MVFNCPNLKEVSLEFSRQETRPTDLTTMVDAMGRSCPRLQNIHIVSVRLSHAVVLSLTAANLRGLRMLSLVLGSEITDASVAAIASSYSKLELLDLSGSSISDSGIGMICNVLPNTLSRLLLALCPNITSSGIQFATAQL

SEQ ID NO: 74974 - protein, 92 aa, Gossypium hirsutum
  Clone ID: GOSHI-09MAY01-C35395_1.pep
LPIIPQSYVTHALRVEGLRGIITVPAKLESTTLVFAHGVDLFFTQLAPSRTYDSLTEDFSYALLLITIVALVAAIFVTWRLSERKELQEKWR

SEQ ID NO: 74975 - protein, 301 aa, Gossypium hirsutum
  unsure (1)..(301): unsure at all Xaa locations
  Clone ID: GOSHI-09MAY01-C35385_1.pep
DQALSQQNGSLTKVDPQHPSANLLSDLLGPLAIEGPPGATVQSEHNAVSGLEGGPDAVDGSAIVPVEEQRNTVHPIGNIAERFHALCLKDSGVLYEDPYIQIGIKAEWRAHHGRLVLFLGNKNTAPLVSVQALMLPPAHLKMELSLVPDTIPPRAQVQCPLEVVNLRPSRDVAVLDFSYKFGTNMVNVKLRLPAVLNKFLQPIPVPAEEFFPQWRSLSGPPLKLQEVVRGVRTMPLPEMGNLLHNFRVXICPGLDPNPXNLVGNTTFYSESTLGMLCLIRNGTDSAERTHLRMNLASGNPT

SEQ ID NO: 74976 - protein, 161 aa, Gossypium hirsutum
  Clone ID: GOSHI-09MAY01-C35225_8.pep
IMTSLFWRGLIILPLLFVYVNGEHFLYPKRHTGKAELAGYKGPDSLAVDGGGFYSGPLIADDDGSTADGNPGGTTEVKVENLGKADGDNTNGSANSVESTQVAAKNGIGNGNIFEAKTTFKGSWELFVENAGVSAMHLILLSKINPALMFDATVWKNLTDE

SEQ ID NO: 74977 - protein, 134 aa, Gossypium hirsutum
  Clone ID: GOSHI-09MAY01-C35225_7.pep
ALFPTEVRVEKFSPPYLDPNLAMFRQEIITEKSDIQLKYGQIFSVQIRGNGVIDPQKLQVTIFSPPFVTHGICMNQRLIQLGILEFNKDVAPNSDNIVLQAPMNGNIAQPGYYMLFVNYNGVPCLRSMWVQILP

SEQ ID NO: 74978 - protein, 162 aa, Gossypium hirsutum
  Clone ID: GOSHI-09MAY01-C35225_5.pep
MYHSSFAVLPDAKVLIAGSNTNPGYLDDALFPTEVRVEKFSPHYLDPNLAMFRQEIIVDKSNSQVKYGKKFTVQIRGNGEIDQQKLQVTIYSPPFVTHGISMNQRLIQLGIVEFNKNVTSNTNNIILQAPMNGNIAPPGYYMLFVNYNGVPCRQSMWVQFLP

SEQ ID NO: 74979 - protein, 168 aa, Gossypium hirsutum
  unsure (1)..(168): unsure at all Xaa locations
  Clone ID: GOSHI-09MAY01-C35225_4.pep
MMKIKDASMIEAATTFKGSWELFLENGGVSAMHLQLLPKINQALMFDATVWKISKIKLPPPCRHVEGTNEEDCFAHSVLMDIETGKLRPLRLHYDTWCSSGALDINGRLVSTGGFNNGSDTVRILDLCDTCGWEEYPGALANXRWYATQVTLGDGRFMVFGGRDFPTY

SEQ ID NO: 74980 - protein, 224 aa, Gossypium hirsutum
  Clone ID: GOSHI-09MAY01-C35225_3.pep
ARLLGDMAVLPTGDVLIVNGAKTGSAGWDDAREPNLNPVLYKYQTDGTGSKFTVLNPSNIPRMYHSSFALLPDAKILIAGSNTNPGYLDDALFPTEVRVEKFSPHYLDPNLGMFQQEIIVENSNNQVKYGQKFTVQIRGNVEIDQQKLQVTIYSPPFVTHGVAMNQRLIQLGIVEFNKNVAINTNNIVLQAPVNSNIAPPGYYMLFVNYNGVPCRRSMWVRILP

SEQ ID NO: 74981 - protein, 499 aa, Gossypium hirsutum
  Clone ID: GOSHI-09MAY01-C35225_2.pep
SFVFEPGWKGQTELPGPPCRHVEGTNEEDCFAHSILLEVETAHIRPLRLNYDTWCSSGALDINGRLVSTGGYNNGSDTVRILDLCDTCGWEEFPGALGNGRWYATQVTLADGKFMVFGGRDFPTYEFVPPEGQKNTINEVINFPFLKETHDPVENNLYPFVFLSTDGNLFIFANNRSVLLNTQTHTIIHEFPVLPGGARNYPSSGCASLLPIMLKPNEDRKSIPAEVLVCGGTPHDAYTKADLQRPKVFLPGNTDCARIDITKRNGKWKIQNMPSARLLGDMVVLPTGDVLLVNGAKTGSAGWDDARDPNLHPVLYKFQTDGTGSKFTVLNPSNIPRMYHSSFALLPDAKILIAGSNTNPGYLDDALFPTEVRVEKFSPHYLDPNLAMFRQEIIVEKSNNQVKYGQKLTVQIRGNGEIDQQKLQVTVYSPPFVTHGISMNQRLIQLGIVEFNKNVAPNTNNIVLQAPMNGNIAPPGYYMLFVNYNGVPCRQSMWVQFLP

SEQ ID NO: 74982 - protein, 94 aa, Gossypium hirsutum
  unsure (1)..(94): unsure at all Xaa locations
  Clone ID: uC-gsflmaxxa076d08b1.pep
REKKKMKKKKKDREKRKKEKGRKERKKRKEKKERRKGEKNEKEESKKEKIKKKEEEXEKKIIERKNKNKKKKKGIRNKKKKRIERRDKKKRKEK

SEQ ID NO: 74983 - protein, 196 aa, Gossypium hirsutum
  Clone ID: LIB3828-007-Q1-K6-C11.pep
RVSWFQGPTLATDGGGFFSGPLVVDNDATATIGNQGGTTEVTVGKPEDDTLVASLDNDGIRYANLIEAATTFKGSWELFLENGGVSAMHLILLPKINQALVFDATVWKISKIKLPGPPCRHVEGTNEEDCFAHSVLMDIETGKLRPLRLNYDTWCSSGGLDINGRLVSTGGFNNGSDTVRILDLCDTCDWKEYPGA

SEQ ID NO: 74984 - protein, 156 aa, Gossypium hirsutum
  unsure (1)..(156): unsure at all Xaa locations
  Clone ID: uC-gsflmaxxa045e06b1.pep
MGLFWRVLIILPLFFAYVNCEYFTYPSRHTGKAELAGFKGPDSLATDGGGFFSGPLVVNDDVTATPGNQGGTTEVTVEKPGDDILDASLADGNDGVGKANMIEAATTFKGSWELFLETGGVSAMHLILXSKINQALMFDATVWKISKIKLPGPPCR

SEQ ID NO: 74985 - protein, 77 aa, Gossypium hirsutum
  Clone ID: uC-gsflmaxxa012b01b1.pep
KMGLFWRVLVALPFFFAYVNGEHFTYPSRHPGKAELAGFKGPDSLATDGGGFFSGPSIVDDRCSCYYRQPRRNYRGL

SEQ ID NO: 74986 - protein, 127 aa, Gossypium hirsutum
  Clone ID: LIB3145-023-Q1-K1-D5.pep
MIEAATTFKGSWELFLENGGVSAMHLILLPKINQALMFDATVWKISKIKLPGPPCRHVEGTNEEDCFAHSVLMDIDTGKLRPLRLKYDTWCSSGGLDINGRLVSTGGYNNGSDTVRILDLCDTCDWK

SEQ ID NO: 74987 - protein, 67 aa, Gossypium hirsutum
  Clone ID: LIB3828-032-Q6-K6-H4.pep
WVQKKCKQSTSYIYIYIKNKIIIYSVFDDSMLPMKYLWQNLYPHRSKARHPIVVHKEHVITRFFKLP

SEQ ID NO: 74988 - protein, 104 aa, Gossypium hirsutum
  Clone ID: GOSHI-09MAY01-C36815_1.pep
TFGINCPQENFPIPEFPSNEEVVGVITMEDVIEELLQEEILDETDEYVNIHNRIKINMHAPYENASIPTPASSSPLAAPGPTPTLSVSTSTSNTGSPAATLFPI

SEQ ID NO: 74989 - protein, 99 aa, Gossypium hirsutum
  unsure (1)..(99): unsure at all Xaa locations
  Clone ID: GOSHI-09MAY01-C36555_1.pep
THHFDACXFMDIQMPEMDGFEAARRIRDVEQNINNHIKFGEISVDDYNNVSNWHVPILAMTADVIQATHEECLRCGMDGYVSKPFEAEQLYPEVSRFFH

SEQ ID NO: 74990 - protein, 173 aa, Gossypium hirsutum
  Clone ID: GOSHI-09MAY01-C36535_1.pep
SRGQSSSWSQAGGWSKEGGNGGTSGGGAKTWIQSTADQGGQSSSWSQSGGWNKGSSSTNEGGGSQDNNRKSSNSSDGDKWSSWNQSSGSKEVTGSNNQGNGWGKSSTTSAGGWGNQGSGSGDQSQSKTADEATSSGWNKLKDGGENSGNQDPWGKASSTSTWGQGSGGSKGGW

SEQ ID NO: 74991 - protein, 77 aa, Gossypium hirsutum
  unsure (1)..(77): unsure at all Xaa locations
  Clone ID: GOSHI-09MAY01-C36475_1.pep
TASMQQLKERLEKDLLEESPQAARVKVLASGNATERRFSGWIGGSILASXLGSFQQMWLSKSQYEEHGASYIQRKCP

SEQ ID NO: 74992 - protein, 145 aa, Gossypium hirsutum
  Clone ID: GOSHI-09MAY01-C36465_1.pep
LMGIGTATVKTRARDAALNAIQSPLLDLGIERATGIVWNITGGSDLTLFEVNTAAEVIYDLVDPTANLIFGAVIDPSISGQVSITLMAAGFKRRVVTVGRHLQAGQLAQGDTGLGINQRPSFNQGSSFDIPEFLKKKGRSRYPRA

SEQ ID NO: 74993 - protein, 164 aa, Gossypium hirsutum
  Clone ID: GOSHI-09MAY01-C36795_1.pep
VVMGNIGKIKRTAKELDFAIGSWVNEHRERRLDKGIEGNQDFIDAMLSIMDENNVPIQEADVTIKANCLTLALGGIDTNVSTLSWAISLLLNNRHVLKTAQEELDIHVGKQRQVEESDIANLVYLQAIIKETLRLYPATPVSVAREAMDDCTVAGFHIPAGTQL

SEQ ID NO: 74994 - protein, 259 aa, Gossypium hirsutum
  unsure (1)..(259): unsure at all Xaa locations
  Clone ID: GOSHI-09MAY01-C36715_1.pep
AVPNCAFFMGLQRKEGVSGLEGQQFDIRGTVDEFRQEISMYMYWXKPGMDIYVSHVRRRQLPAFVFPDGYRRPRSLRHPSQQTGKTCEDVTTSPPGPPASPIKRKRDDETVDEKLNKPEKRASISPLRMESVSPDIITSKSVGTSHNSNGQAVKVEHRGTVDLDSLRGQTSLDIDDSSVVRSVELAEQIGLPFRQELLSPCEVSDFETREACKAGLNQEKTADSTSAFINDPEIGSSRRILNWKGVGAEVDREVVKACN

SEQ ID NO: 74995 - protein, 306 aa, Gossypium hirsutum
  unsure (1)..(306): unsure at all Xaa locations
  Clone ID: GOSHI-09MAY01-C36705_1.pep
HASAANLGIPLSTPPTGPPPRXQVTFQPPLPPPPTLPQSAQPLPPGTSGNMPHDSTSKELAQVPTVLPPPPPGMPPKLATNQGEGAPSEADTNNHTAISKMVPPPPPPPRQPPVPGPAMVPALKPDVLPPGIPGFPPPPLPDMRAALSATGLPSQTAPPGMMVPLIPKPPLGPPPGPPPMMRPPLPPGPPPAALDDYNLANRPPLPQKPSYVKSAASTVVKRPLAQHQPELTAMVPASVRVRREITAPKARPKPSHLIMTSTTKPVATTIVKPESASTSSAPKAQSIDDSYTAFLEDMKALGALDS

SEQ ID NO: 74996 - protein, 101 aa, Gossypium hirsutum
  Clone ID: LIB3145-031-Q1-K1-C5.pep
MMRPPLPPGPPPAALDDYNLANRPPLPQKPSYVKSAASTVVKRPLAQHQPELTAMVPASVRVRREITAPKARPKPSHLIMTSTTKPVATTIVKPESASTSS

SEQ ID NO: 74997 - protein, 142 aa, Gossypium hirsutum
  Clone ID: GOSHI-09MAY01-C36655_1.pep
MPRRSSGGRSAPRPAARAPSSNVPSKPASSAPPPAPVQSGNGLGAAIVDGIGWGAGTAMAHRAVDAVIGPRVIKHETVASSEPAAAASAPAPNTNSMNMDACGVQSKVLSDCLTNFGSDISKCQFYMDMLQECRKSSGALGA

SEQ ID NO: 74998 - protein, 61 aa, Gossypium hirsutum
  Clone ID: GOSHI-09MAY01-C36155_1.pep
YNAAFKRLSRLEGIIPMLETSCALAYLEKLCPTLPNGTKFVVNCSGRGDKDVQTANKHLQV

SEQ ID NO: 74999 - protein, 303 aa, Gossypium hirsutum
  unsure (1)..(303): unsure at all Xaa locations
  Clone ID: GOSHI-09MAY01-C36145_1.pep
MAGICCEVVGESEAAAPVEPTSRASRRRIMELLPFKLVAEAAVRPPLENGRKRQKLDLVRPTSRDCDNAVQNSDTDKLEKDQELNGSLKFNGAVKSEAVEEEKESPKFGLTSVCGRRRDMEDAVSIHPSFCKQSRQVQMSSDIHFYGVFDGHGCSHVAMKCKDRFHEMLKEEIEACGGEKAVDWRRTMERSFERMDKEVQKWTVDAKERSSCRCELQTPQCDAVGSTAVVAVVTPDEIIVXNCGDSRAVLCRNGVALPLFDDHKPDRPDEMLRIQEAGGRVIYWDGPRVLCVLAMSRANGDNY

SEQ ID NO: 75000 - protein, 429 aa, Gossypium hirsutum
  unsure (1)..(429): unsure at all Xaa locations
  Clone ID: GOSHI-09MAY01-C36115_1.pep
MNTSQFMDKQIMDLTLSSSSPPHNSHKDFIDLMSHPQNEDNHYQFSGFSASSNGASKVEMFTDYDFQPIRPVSTSLDAAGVFSNPRSWSSIDSKAKNYGSLDSLEPAKGILDKDQSAFDTSILAEIDRTMKKHTDNLMHMMEKVSDRLTQLESRTRHLENSLDDLKVSVVNNHGSTDRKMKQLENILTEVQTGVHDLKEKQEIMEAQLQLAKLQVSKVDQPSETQNTVRTESVQQVASAPFQSHQQLPLAASFPQSLPSVPPLALPQPSLPPPVQHANQFPQSHVPSVPQQDPYYPPPGQTQETPSQQFPMPPTQQPQLPPATPPHQPYQPAPPPQYSQPPQPLQLQPSVGHHPEEAPYPLSQIYPPNLRQPPSQPPSGGPPSQQYYGAPPQCVXPSPSSRPGPGFSTGYIPQSGPSEPYAYGGSPSQY

SEQ ID NO: 75001 - protein, 175 aa, Gossypium hirsutum
  Clone ID: GOSHI-09MAY01-C36305_2.pep
PLRAFYYSKDEKLLVSDFMRDGSLSALLHGSRGSGRTPLGWDNRMRIALSTARGLAHRRVAGKVVHGNIKASNVLLRPDQDACISDFGLNPLFGNSTPPSRVAGYRAPEVLETRKVTFKSDVYSCGVLLLELLTGKAPNQASLGEEGIDRPRGRPPGRPRGWTAEVFDVELMRYH

SEQ ID NO: 75002 - protein, 222 aa, Gossypium hirsutum
  unsure (1)..(222): unsure at all Xaa locations
  Clone ID: GOSHI-09MAY01-C36305_1.pep
LSTGASIGIAVGSAFAALLLLLFLILCLRKRXGSPSKQQKPVAAGARAVPPAEAGTSSSKDDITGASTEGERNKLVFFEGGVYSFDLEDLLRASAEVLGKGSVGTSYKAVLEEGTTVVVKRLKDVAVSKKEFEMQMETLGKIRHENVVPLRAFYYSKDEKLLVSDFMRDGSLSALLHGNFSRFISLFHSFIYLTFSGFPFLKQPNNSFKFMLNIIFVGTFWN

SEQ ID NO: 75003 - protein, 125 aa, Gossypium hirsutum
  unsure (1)..(125): unsure at all Xaa locations
  Clone ID: LIB3145-025-Q1-K1-D11.pep
PPHLSVAGYRAPEVLETQKVXFKSDVXSFGVLLLESTGKAPNQASXGEEGIIFLVGPIRVREEWTAXVFDVELMRYHSIEEEMVQLLQIAMTCVSTVPDQRPSMQEVVRMIEEMNRVETDDGLRQ

SEQ ID NO: 75004 - protein, 373 aa, Gossypium hirsutum
  Clone ID: GOSHI-09MAY01-C36325_1.pep
KLEQQKHQSLTLDPQRHHHHQQQQQQHQNPSHIEGGEEEEIPRNQQQILFLHHQQQQEQQLYARLETQVLREQQGQQQQQEYPQPPKKRSYLPSASTSTFGSKSTQHARKMGDSHHQAATSSRLGLRHSGGEIVEVQGGHIVRSTGRKDRHSKVCTAKGPRDRRVRLSAHTAIQFYDVQDRLGYDRPSKAVDWLIKKAKSAIDELAELPPWNPQTLKTTTSTTKQNNQQDQNIITAVDNEKPRRTATLMGNQVQILQQQGTGDNPNSNSGFLPSSLVSDEIADTMKSSFPLGASSEAPSSSIQFQNYPPDFLSKTSSHSQDLRLSLQSFPEPVLLHHHHQAAAAQAHQTESGLFSAGTNPLTCFEGSSAGWEK

SEQ ID NO: 75005 - protein, 142 aa, Gossypium hirsutum
  Clone ID: GOSHI-09MAY01-C36295_1.pep
HMFVIKDLVVDVTNFYNQYKSIEPWLKRKNPPPTAGKEIPQSKKDRAKLDGMYECILCACCSTSCPSYWWNPESYLGPAALLHANRWISDSRDEYTKERLEAINDEFKLYRCHTILNCARACPKGLNPGKQIAHIKHLELTA

SEQ ID NO: 75006 - protein, 102 aa, Gossypium hirsutum
  unsure (1)..(102): unsure at all Xaa locations
  Clone ID: uC-gsflmaxxa043c01b1.pep
YHAVRWISNGGDEDTKERLEAIDDEFKLYRCHTVLNXARAWTQGLNPSKPNTHMKHFELTAGRINLHIYNVQTSELKWAIICDDNLSNLQRFNNWIISHNRA

SEQ ID NO: 75007 - protein, 178 aa, Gossypium hirsutum
  unsure (1)..(178): unsure at all Xaa locations
  Clone ID: GOSHI-09MAY01-C36275_2.pep
KHGVKLGLMSGFVKAAVSALQNQPIVNAVIDGDDIIYRDYIDISIAVGTPKGLVVPVIRNADRMNFAEIEKGINILAKKANDGSLSIDEMAGGSFTISNGGVYGSLLSTPIINPPQSAILGMHSIVSRPMVVSGXVFPRPMMYIALTYDHRLIDGREAVFFLRRIKDVVEDPRRLLLD

SEQ ID NO: 75008 - protein, 60 aa, Gossypium hirsutum
  Clone ID: LIB3493-048-P1-M1-F2.pep
VNHESTNSKFLLVCIEFSYHNNRFLKQVFLLPHLKASDAPKKLDIIFRWNFEGINGILKE

SEQ ID NO: 75009 - protein, 280 aa, Gossypium hirsutum
  unsure (1)..(280): unsure at all Xaa locations
  Clone ID: GOSHI-09MAY01-C36215_1.pep
LRVRGRVGKEPDEVVIFRGGTYLTLKEVFESLDLTGYDLNVDLLDVHADKSTFXRFDKFNLKYNPCGQGGLREIFLKQDNLIQGRFLGELTKEVFSDLAASKYQMAEYRISIYGRKQSEWDQLASWIVNNDLYSENVVWLIQIPRLYNVYKEMGIVTSFQNILDNIFIPLFEVTCXPDSLPQLPVFLIPVVCLDSVDDESKPERRPTKHMPSPDQWTNVFNPAFSYYAYYSYSYLYTLNKLRESKGMTSIKFRPHSGEACDIDHLAATFLTAHYFAHGIN

SEQ ID NO: 75010 - protein, 91 aa, Gossypium hirsutum
  Clone ID: GOSHI-09MAY01-C36205_1.pep
PTTTAMEVDDPPRAQQPTAIGSLERIEAFKAIFGQHMRVNHKDTISISEVENVVNAGADGHYSRAEIFAILEKLQDDNILMIAGETVHMIV

SEQ ID NO: 75011 - protein, 91 aa, Gossypium hirsutum
  Clone ID: LIB3582-032-P1-K1-C10.pep
FVEDPLNEVKSSSHNPHREDEEGGIWFLFLLLSVFKVQFLYFAYLIFGFSCFSIPNFQPQYKNHVLVFYQMHFPQLPIPNRRLQSLSLTSV

SEQ ID NO: 75012 - protein, 63 aa, Gossypium hirsutum
  Clone ID: LIB3145-048-Q1-K1-E10.pep
LLVRAREITGLLISYPQFLDCFFYLQGKGSVFRFLANLHNPHREDEKGGIRFWFLVNSTFKTR

SEQ ID NO: 75013 - protein, 399 aa, Gossypium hirsutum
  Clone ID: GOSHI-09MAY01-C37975_1.pep
ALGRTRGCAAVSFLAFVPLGELFFFHIILIRKGITTYEYVVAMRTQSEPPGQSADGGGRQSMPSSPTSSAVTAISGRSSLGKSLQYKGAWCTPPRIFMEHQDEIVPHLDPGRLPSTVDPDAVQPPDKGKRLPQRPVRISAWKLAKLDSNEAVKAATKARASSSVLRPIGARQHPCSADQVSSSTISGRSSPISTDHGFRTKTARAGILNSYPSSHASREDAESCARSVDEISSAHLSSITPSPMAQQHSNREHFNPMYETSGNQSPLSTKQSEGIEHAAGYPIRKNSSSIESSKTSVFWDPEAGRFVSSSSRNAGSLQAPGSELLYSGQSIFFGSPLMNELANRGTRSTSSMSVRLGRGSTLSHHYHQQGRLQRGAQLPVFVPTDSPLNQSNFHEHQNK

SEQ ID NO: 75014 - protein, 184 aa, Gossypium hirsutum
  Clone ID: GOSHI-09MAY01-C37965_1.pep
MSEDNHTFFYKTGCKNKAKVALEESFGIVSERLRKTMEENRIVRQRTKMQHEQNKEEMDFQEQFFKERIKFIHEARDEKEESFEKLQQQQREKVKQSNPNPSNTEEYRRRADEIAKFIKFQDEEMQAFVAERDKLIKAHEEKMVGMRERHWQEEVELEKEFDAELSHLMEKYTPDGSKVNPGNT

SEQ ID NO: 75015 - protein, 108 aa, Gossypium hirsutum
  Clone ID: uC-gsronu33B130g11b1.pep
RIGVRLLYLLTLCCCSFSKLSSFSALASWINLIRSLKNCSWKSIWMKEEPEEVLDQTDLQPKGRGRGKERTTVTKHTEKPEEYMGKRGKEKATGVAKFSPEQKAPVWN

SEQ ID NO: 75016 - protein, 129 aa, Gossypium hirsutum
  Clone ID: LIB3083-061-Q1-L1-E8.pep
MRSYQEMVVKEMGQMSEDNQQLIFYKNKVAKEQRQKVALEESFGIASERLRKTMDENRIVRQRTKMQYEQNKEEMDFQEQFFKERIKFIHEARDEKEESFEKLQQQQREKVKQSNPNPLNTEEYMRRAD

SEQ ID NO: 75017 - protein, 90 aa, Gossypium hirsutum
  Clone ID: LIB3196-037-P1-M1-F7.pep
PSASLGVFCEAPFFFFFFFVVFFFFFFFFFFFFRFNFFLPIYSNLLTYYFKSCQDGEIFTVITEVSSGNREIKVFFTTCVHTIAFPYNST

SEQ ID NO: 75018 - protein, 319 aa, Gossypium hirsutum
  Clone ID: GOSHI-09MAY01-C37925_1.pep
WEHKSKVPGKMHACGHDAHGAMLLGAAKMLQEHRNDLQGTVVLIFQPAEEGGGGAKKMLDAGAVDNVDAIFALHVSIKFPIGVVASRPGPTLPPSGFFEAVIHGKGGHAALPQHTGDPILAASNVIVSLQHLVSREADPLDSQVVSIAKFQGGGAFNVIPDSVTIGGTFRAFSKESFLQLRQRIEEVISKQASVQRCNATVIFDERSMYPVNSNNKELHEHFRKVAGEILGFENIIEMQPQMGGEDFAFFSESIPGLFFFLGMKETEGAVHSGHSPYFRVNEDVFPYGAALHASLATTYLLQNPTKHISPPEVSYRDEL

SEQ ID NO: 75019 - protein, 132 aa, Gossypium hirsutum
  unsure (1)..(132): unsure at all Xaa locations
  Clone ID: GOSHI-09MAY01-C37855_1.pep
ELVKQIWVCEGAVIMGPSGTPYHDGLSFFDCXFPRKICLIEPSDGLIVYVRRSSGYNPNLFSCGKACLSLLGTWHGEETEMWGSGQSTMLQXLGAIQALNLNAKPFFNEPGFETPHVGAAGEKRCMKSNEDA

SEQ ID NO: 75020 - protein, 92 aa, Gossypium hirsutum
  Clone ID: LIB3145-048-Q1-K1-G3.pep
YPKEYAKRIQEEWKILESGLPETIYVRVCEANMGLLRAVIMGPSGTPYHDGLFFFDCFFPPKYPNEPPMVYFYSGGLRLNPNLIAVVKMPNL

SEQ ID NO: 75021 - protein, 71 aa, Gossypium hirsutum
  Clone ID: GOSHI-09MAY01-C37825_2.pep
GFNTANFGVFPSPYLTIRLPHSAIEIDGRWLPMELFHSPILSLTSKGKIFSPKTHLKLQFRRRRDGPRWLV

SEQ ID NO: 75022 - protein, 90 aa, Gossypium hirsutum
  Clone ID: GOSHI-09MAY01-C37825_1.pep
PNFKPKYRPDRPKIFYNFGTLGLSLRAAALSRRTAPTPLMPPCQQPLHASTASYTCHASVPAKRNKRQQREWQLIGNYFVFFSFGFSFRL

SEQ ID NO: 75023 - protein, 120 aa, Gossypium hirsutum
  unsure (1)..(120): unsure at all Xaa locations
  Clone ID: GOSHI-09MAY01-C37475_1.pep
RVRPTRTAYSIEATCLAPKLEEVYAEGVRVLKPGSLYVSYEWVTTDRYRGDNPEHVEVIQGIERGDALPGLRNYKDISEVAKKVGFXEVVKEKDLAKPPALPWGTRLKMGRIAYWRNHFF

SEQ ID NO: 75024 - protein, 50 aa, Gossypium hirsutum
  Clone ID: GOSHI-09MAY01-C37755_1.pep
FCNVIYTNLSLSLSLTDFVFTHGPQSSFHSQYQTTLQLQLEGKYMHAQKL

SEQ ID NO: 75025 - protein, 434 aa, Gossypium hirsutum
  Clone ID: GOSHI-09MAY01-C37775_1.pep
GASPQPPTANGSGLAMPMYWQGYYASPNALPHLHQQTLLRPSPGLSVPPSMPQPMQYPNFNASLPAGSANLHSSSLPEIPPSLLPASTSSHMFTSSSLSSATSSSLPPAPSATLASETLSASLPNKAPSPAPPPATLSASSPALAPLTSSSPELNSIAPPIANKRSEIPTLPYQSASQVASSVIGVSNSIHVETSTQSLVTPGQLLQSGSTVVPSSQPAVTAHKDVEVVQVSSSLSPEPSVPVVSEAQPPLLSLPVSSHVAPKPNGASFQPRHGYRGYERGRGRGRGRGTGSSRPVTKFTEDFDFVAMNEKFKKDEVWGHLGNSSKSHTKDKEADAVDEYGSQDEDDAEIPKIQTKPVYNKDDFFDTLSCNALDNDSQNGRPRFSEQMKLDTETFGDFSRHRGGRGRGTGRGRGGRYRGGYYGRGYGYVGRGRG

SEQ ID NO: 75026 - protein, 73 aa, Gossypium hirsutum
  Clone ID: LIB3825-012-Q1-N6-C4.pep
TFGDFSTQQGERGRGGGPGRWWSLSLWVLCKRVSLCGKGSCCRVMHLQCPLAVLDFFSSCRLLSVLVELSFLF

SEQ ID NO: 75027 - protein, 64 aa, Gossypium hirsutum
  Clone ID: LIB3583-034-P1-K1-E10.pep
IVKNVKFYMLLINSLNGLPEFSRRVRHPSAGSSAAHYGLSGEIAMLGFIRTGRTRGRTRGRTRG

SEQ ID NO: 75028 - protein, 71 aa, Gossypium hirsutum
  Clone ID: LIB3145-045-Q1-K1-C8.pep
IITVKKWRKPPDWIVKINFDGAYDDRQNRSAVGIVARDREGTVLLSFEENHHRISSAFEAEAVACRKALQL

SEQ ID NO: 75029 - protein, 171 aa, Gossypium hirsutum
  unsure (1)..(171): unsure at all Xaa locations
  Clone ID: GOSHI-09MAY01-C37665_1.pep
RHQFRNRPTRPVLKNYYITSVAGANIGSSLVVMSKGTPYTQQSYKVSESFPFKWINKKWKEGFYVTSMTTAGTRWGVVMSRNAGFSDQVVELDFLYPSEGIHRRWEXSGYRITSVAATVDQAAFILSIPKRKTTDDTQETLRTTAFPSTHVKEKWAKNLYIASICYGRTVR

SEQ ID NO: 75030 - protein, 184 aa, Gossypium hirsutum
  unsure (1)..(184): unsure at all Xaa locations
  Clone ID: GOSHI-09MAY01-C37615_1.pep
MSSSLAISSSSLRLTHVFPTNGNAILFNAISSCRISSLKSPSLNSIFIRIPYGSFKKASFFTSSRPFSPVMEWQDCTAKMEIDVPASVAYKCYSDREAIPNWMPFISSVQVLEDKPDLSRWSLKYXAFGRDLEYSWLARNMQPIPNQKIHWRSLEGLPNXGAVRFYPKGPSSCLIEVRLLYTIL

SEQ ID NO: 75031 - protein, 191 aa, Gossypium hirsutum
  unsure (1)..(191): unsure at all Xaa locations
  Clone ID: GOSHI-09MAY01-C37605_1.pep
MKMEGIEGDASVGGAGRYILNPTRINSEDIIFCVDVDAESLVEMKTAGVTRLDSIKQAILLFVNSKLSINPDHRFAFATLSKTASWLRKEFSSDVESTIGAVRALSATTVSTGQADLTNLFRLAAHEAKKSRAQNRILRVILIYCRSSIRPHHQWPVNQKLSPRGVVYXHDKPGPDXCPQASYDALVDALN

SEQ ID NO: 75032 - protein, 78 aa, Gossypium hirsutum
  unsure (1)..(78): unsure at all Xaa locations
  Clone ID: LIB3582-015-P1-K1-C7.pep
NKDDLLLHDVDSPKRFDYASVVSMNIFXVALLCACIVIGHLLEENRWMNESITALIIGVFTGVIILLTSGGKSSHLLV

SEQ ID NO: 75033 - protein, 106 aa, Gossypium hirsutum
  unsure (1)..(106): unsure at all Xaa locations
  Clone ID: LIB3829-020-Q6-K6-G1.pep
NLIKKEINKVAPQLTTVFTKLQTLSTSNHASVVSINMFVALLCACIVIGHLLEENRWMNESITALIIGVFTGVIILLTXSSHLLVFGEDLFFIYLLPPIIFNARFQ

SEQ ID NO: 75034 - protein, 45 aa, Gossypium hirsutum
  unsure (1)..(45): unsure at all Xaa locations
  Clone ID: LIB3585-025-P1-K1-H12.pep
MVAPHLAAVFTKLQTLSISDYASVVSMNIFXVALLCACIVIGHLL

SEQ ID NO: 75035 - protein, 101 aa, Gossypium hirsutum
  unsure (1)..(101): unsure at all Xaa locations
  Clone ID: GOSHI-09MAY01-C37635_1.pep
KVFAIDPNTQQVVVVDPKGYTYDDEVLKKVXAMGKPGLVEIYAKKDSFIFTVESPGAIKASQLVFNAIEILKQKLDAVRLSEDTVEADDQFGELGAHMRGG

SEQ ID NO: 75036 - protein, 162 aa, Gossypium hirsutum
  unsure (1)..(162): unsure at all Xaa locations
  Clone ID: GOSHI-09MAY01-C37195_1.pep
MAAVWRVGVAVDFSPSSKNALKWAVDNIMRKGDYLILVAVQPEGHYEEGEMQLWAISGGSPLIPLSEFSDPATMKKYGVKPDPETLDIANTAAKQKEVMVVMKIYWGDPREKLCEAIDSIPPSCMAVGNRGLGTLTRAIMGSVSNXVVNNGSLPVTVVKHHG

SEQ ID NO: 75037 - protein, 193 aa, Gossypium hirsutum
  Clone ID: GOSHI-09MAY01-C37175_1.pep
MDNAEVPENNSSQNPASMQRDIEASGHSVRSNNAEHQNHSLLHQVQAVRNIEVDPSNRSIKRFKGPPADSSFDSQQVSSPGAEQLSYGSNSLMRDGLGNNPLVPSGDSKMLSCLSNIGDNHETQLSANTLAFLRDNSQHFSNSNNSAANIRGEHSQISLQMVLSWFDPDWAIKNGKMVPIHDAPKTGLDGTEK

SEQ ID NO: 75038 - protein, 81 aa, Gossypium hirsutum
  Clone ID: GOSHI-09MAY01-C37125_1.pep
MPNLSKEIEKHDTNSGHHPREDSEYVRLVISNEPTAAGVDILQPQPPTRSETFSWWIKAFIFCIFAGILILVFLKWGVPVL

SEQ ID NO: 75039 - protein, 121 aa, Gossypium hirsutum
  Clone ID: GOSHI-09MAY01-C37025_1.pep
KGILNDFYNAFGRYYFNNFSDGTKQDAIDLLQGHYIVSVSRDMIPPSQKGGLEAVAHFPAAFCLVSLGLFFTILSLSQARYDLRHLFFSALWATISIGIATVVKANGRIFCNRPRLHKPRR

SEQ ID NO: 75040 - protein, 143 aa, Gossypium hirsutum
  Clone ID: GOSHI-09MAY01-C37315_1.pep
MVYEITEQQKVGLGLIGFGISFTFLGVSLFFDRGLLALGNILWLAGVVILIGWYSTLQLFRKNYKGTACFILGLFFLFVRWPIVGIILEIYGCFVVFSGFWPSVSGFLCHIPVVGWVIQYPVTFLESVEKGLGSSEYRMKYAM

SEQ ID NO: 75041 - protein, 123 aa, Gossypium hirsutum
  Clone ID: GOSHI-09MAY01-C37305_1.pep
FSHFTLKKSNFPENKKLSSKMSGRGKGGKGLGKGGAKRHRKVLRDNIQGITKPAIRRLARRGGVKRISGLIYEETRGVLKIFLENVIRDAVTYTEHARRKTVTAMDVVYALKRQGRTLYGFGG

SEQ ID NO: 75042 - protein, 75 aa, Gossypium hirsutum
  Clone ID: LIB3145-040-Q1-K1-G1.pep
RHRTVLTVLFQGITKPAIRRLARRGGVKRISGLIYEETRGVLKIVLENVIRDAVTYTEHAKMKTVTAMDVVYALK

SEQ ID NO: 75043 - protein, 104 aa, Gossypium hirsutum
  Clone ID: GOSHI-09MAY01-C37295_1.pep
MVRRPNDPEHSRFASLVLLLVSLFSCLLVYAVVSTLLNPTVNPQDSSFESLESVAGIDFGEKKGECCRGIENLELWGAAVKWGSDFKFNSSVECCQACKAMCSG

SEQ ID NO: 75044 - protein, 63 aa, Gossypium hirsutum
  Clone ID: GOSHI-09MAY01-C30935_1.pep
VTKTSVPRFLFLGKRKRHCAYLSMPSLFTHQSPELTKHVSVLSSSIKSRVNQLVVLQNQSPLM

SEQ ID NO: 75045 - protein, 137 aa, Gossypium hirsutum
  Clone ID: GOSHI-09MAY01-C30865_1.pep
AYVMIGVGCNDELRESSTGAIDLIDSFDKQPMATFAISSLSDGAKKLEFSPQLELSLRRPCSRSAKSQGTNEKHILNHSDASPFSWYNSRKSLLPIFLTLDGNREEGNSNPRQDLERMRMDDVHAGCNDVSPHFYHA

SEQ ID NO: 75046 - protein, 112 aa, Gossypium hirsutum
  Clone ID: GOSHI-09MAY01-C30495_1.pep
MDDVTDLTGDGGVIKKIVARAKVGALAPSEDLPMVDVHYEGTLAETGEVFDTTHEDNSVFSFELGKGTVIQAWDIALKTMKVGEVAKITCKPEYAYGAAGSSPDIPPNATLI

SEQ ID NO: 75047 - protein, 131 aa, Gossypium hirsutum
  unsure (1)..(131): unsure at all Xaa locations
  Clone ID: GOSHI-09MAY01-C30455_1.pep
MSILKQHMCPSRSLTHISTSPRLHLVARLTCSATTTTTKPKSSQNQLVIEPRLETKPDSITPIIPSVGPPLSNDPSLQSTWSHRAWVASGCTXTLFFSLPKTGTGAADTHMGVEPINRSFCGYCLTYPLSG

SEQ ID NO: 75048 - protein, 105 aa, Gossypium hirsutum
  Clone ID: GOSHI-09MAY01-C30415_1.pep
MALQAEGTQQIQSPPLMNLDGLLCEEEDLGVYSFEENGSEIPAEKENFVPLFLNEHDLFWEDDELISLMSKEKQTHQGYVDGCPDESLVLARKEALDWVFKVKAH

SEQ ID NO: 75049 - protein, 106 aa, Gossypium hirsutum
  Clone ID: GOSHI-09MAY01-C30735_1.pep
MEMELSPPVSFTAPIILLTLAIVFAGTFALRPKPKSSLAKEPPPGSLGWPIAGETLEFLFGNPENFVFNRMRKYAPRIFKTRILGEETVVICGPEGHKFLFSNEQK

SEQ ID NO: 75050 - protein, 187 aa, Gossypium hirsutum
  unsure (1)..(187): unsure at all Xaa locations
  Clone ID: GOSHI-09MAY01-C30695_1.pep
MAEATSTERSTGTVKWFSAQKCFGFIAPDDGGDDLFVHQTSILSQGFRTLSDNQPVEFFVDVGEDGRAKAVDVTPMPRXGRPSRGGGRGGYFGGRGRGGGGYRRGGYGGGGGGGGGSGACYNCGRTGHIARDCYQGGGSGSTRYSGGRGDGGGNRRYGGDSGDGRGAGGRCFNCGDEGHFARDCPNK

SEQ ID NO: 75051 - protein, 205 aa, Gossypium hirsutum
  unsure (1)..(205): unsure at all Xaa locations
  Clone ID: AI054623.1.pep
MYYYDLIHWNSAARIRHETKLSGLVELWFDWNSLTGPIPDFTGCVDLRIIHLENNHLTGELPSSLMNLPNLRELYVQNNMLTGRVPSGLLSKNLALNYAGNINLHEGGGRAKHLSTIIVGSSVGAAFLLISTILSCIILRKGKKNHEQXNFIIPLPIQGQRIASSLSNAPTGTANCFTLPEIYXATYNFEKXIGSGGFGXVYYGK

SEQ ID NO: 75052 - protein, 212 aa, Gossypium hirsutum
  unsure (1)..(212): unsure at all Xaa locations
  Clone ID: LIB3543-065-Q6-K6-H8.pep
PSVRLFWWDVGVSCIILRRGRKKHEQEQFHHPLPIQGQRIASSLSNAPTEAANCFTLRXVEDATNNFEKKIGSGGFGVVYYGKMKDGKEIAVKVLTSNSFQGKREFTNEVSLLSRIHHRNLVQFLGYCQEDGRSMLVYEFMHNGTLKEHLYGPLTRERGIGWIKRLEIAEDAAKGIEYLHTGCIPAIIHRDLKTSNILLDKHMRAKVSDFGL

SEQ ID NO: 75053 - protein, 70 aa, Gossypium hirsutum
  Clone ID: LIB3120-009-Q1-K1-F11.pep
FFQFLYSGIEYLHTGCIPAIIHRDLKTSNILLDKHMRAKVSDFGLSKLAVDGASHVSSIVRGTVGNLDPE

SEQ ID NO: 75054 - protein, 230 aa, Gossypium hirsutum
  Clone ID: GOSHI-09MAY01-C30395_1.pep
MAIGVKALHLSFVPHALAIAGAVMVLVWCIHFRGGLAWESSNKNLIFNLHPVLMLIGFIILGGEAIMSYKSLPLKKEVKKVIHLVLHATALILGIIGIYTAFKNHNESSIPNLYSVHSWLGIGIITLYGIQWIYGFLIFFYPGGSTGLRSESLPWHVLLGLFVYILAVGNATLGFLEKLTFLENSGLDKYGAEAYLVNFTAIVTILYGAFVIFTVLSQGPQEDDYSYSAI

SEQ ID NO: 75055 - protein, 119 aa, Gossypium hirsutum
  unsure (1)..(119): unsure at all Xaa locations
  Clone ID: LIB3543-038-Q1-K1-B3.pep
NLYGGGGGLRLESLRVYGIQWIYGFLIFFYPGGSSGLRSESLPWLVLLGLFVYMVAXGTATLGFLEKLTFLENSGLVQYGAEAYLVNFTAIVTILYGAFVIFTVLSQGPQEDDYSCSAV

SEQ ID NO: 75056 - protein, 124 aa, Gossypium hirsutum
  Clone ID: LIB3493-003-P1-M1-E9.pep
PTRSANMAIGVKALHLSFEPHALAIAGAVMVLVWCIHFRGGLAWESSNKNLIFNLHPVLMLIGFIILGGEAIMSYKSLPLKKEVKKVIHLVLHATALILGIIGIYTAFKNHNESSIPNLYSVHS

SEQ ID NO: 75057 - protein, 312 aa, Gossypium hirsutum
  unsure (1)..(312): unsure at all Xaa locations
  Clone ID: GOSHI-09MAY01-C30315_1.pep
FFFVISTGTLMAVTVLVYPPRPVGRSWGYGIXSASMFIALLIFFSGTKRYRYKKCSGSPIVHICQVVSAASGKKTAKLPSDISLLYEDLPEASRIHHTDQFRFLDKASVVTEDDYRQGSFMMNPWKLCAVTRVEEVKKMIRLLPIWATTIIFWTTYAQMITFSVEQATTMERTIGHFQIPAGSLTVFFVGAILISLAVYDRFIIPLCKKWRGEPGFTNLQLIGIGLFLSAMGMAAAAVVEVKRLSVAKKYNETTTLPITVFYLIPQFFLVGAGEGFIYTGQLDFFITQSPKGMKTMSTGLFLTTLSLGSSLV

SEQ ID NO: 75058 - protein, 204 aa, Gossypium hirsutum
  unsure (1)..(204): unsure at all Xaa locations
  Clone ID: GOSHI-09MAY01-C31595_1.pep
MANRPDPDIDDDFSEIYKEYTGPLGSAVSKAEDRVKENKRSHAASNEEEEQRDPNAVPTDFTSREAKVWEAKSKATERNWKKRKEEEMICKICGESGHSTQGCPSTLGANRKSQDFFERVPAKDPHARELFTEKVIQRIEKDIGCKXKMDEKFIIVSGKDRLILKKGVDAVHQIKDESDPKGSSNSPMSRSRSPERSPVGAPVR

SEQ ID NO: 75059 - protein, 99 aa, Gossypium hirsutum
  Clone ID: LIB3120-021-Q1-K1-C7.pep
VVGIKMAAATVLHVVAAAFLRPPHSLPRTKAKEPILKPGLALPHLYDNKLPVLGRGYGAGNRTFITCYVDPSTESRVSVLWVSQIKEKCSKWQWKGRYF

SEQ ID NO: 75060 - protein, 63 aa, Gossypium hirsutum
  Clone ID: LIB3120-021-Q1-K1-C3.pep
MVTLCGLEQSISGDFLGGGGVFFDPPIFIVLSQRLKTHTETKTCFSSHYIQQTYRSPPWLLGW

SEQ ID NO: 75061 - protein, 65 aa, Gossypium hirsutum
  Clone ID: GOSHI-09MAY01-C31785_1.pep
GRVGKVLNIGLLCTSPLPINRPSVRRVVKMLQEAGADSLPKTAAKRDGKLTPYYYEDGSDQGSVA

SEQ ID NO: 75062 - protein, 120 aa, Gossypium hirsutum
  Clone ID: GOSHI-09MAY01-C31745_1.pep
TPHPKAIADLKEGILKLLGFQADDVELSGLDSRDALVGHSVAYEFDVEIDRKVIPVKLLEDVNRWEYVDLPFLRVEELARPGVDNGLVEQKRIFDDGLPVLAPFQLAGPMELWIRDAKDI

SEQ ID NO: 75063 - protein, 150 aa, Gossypium hirsutum
  Clone ID: LIB3135-019-Q1-K1-E9.pep
TRAPTRPPTRPGMAKATSFTAFLWMASLFLSSHFSVSKADNSAPIVSGLSWTFYKTSCPKVESIIRKQLQKVFKKDICQAAGLLRLHFHDCFVQGCDASVLLDGSASGPSEQDAPPNLTLRGFEIINDLRARVHKECGRVVSCADIAALA

SEQ ID NO: 75064 - protein, 64 aa, Gossypium hirsutum
  Clone ID: LIB3120-023-Q1-K1-H6.pep
TTRPSHFSGAKPDNSTPIMSGLSWTFYKTSCSKVESIIRKQLQKVFKKDISQAVGLLRLHFHDC

SEQ ID NO: 75065 - protein, 101 aa, Gossypium hirsutum
  Clone ID: GOSHI-09MAY01-C31685_1.pep
TNPSSPFLGFVTSQLSGIKISCNLPVVVAPLKPISAPFTPALQPVARRICPFTGKKANKANEVSVSNHKTKKLQFVNLQYKKVWWEAGKRYVKLRLSTKAL

SEQ ID NO: 75066 - protein, 135 aa, Gossypium hirsutum
  Clone ID: GOSHI-09MAY01-C31615_1.pep
MAGLSVNLCWLQHTSINPLILRCTPLNLRTPSQKPFSIRSQAAPVLSQDDLKKLAADKAVESVKSGMILGLGTGSTAAFVVDKIGQLLSTGQLSNIVGIPTSKRTQEQAASLNIPLSTLDLHPRIDLAIDGADEG

SEQ ID NO: 75067 - protein, 312 aa, Gossypium hirsutum
  Clone ID: GOSHI-09MAY01-C31175_1.pep
DLGQTYNSLSTLEHYMESGAQSVLFVGDLSYADRYKYNDVGIRWDSWGRFVEKSTAYQPWIWSAGNHEIKDMPYMNEVTPFKSYLHRYPTPYLASKSSSPMWYAIRRASAHIIVLSSYSPFVKYTPQCKWLEEELNRVDRKKTPWLIVLVHVPIYNSNEAHFMEGESMRAVFEEWFIHHKVDVIFAGHVHAYERSYRISNIRYNVSSGERFPVPDESAPVYITVGDGGNQEGLAGKFRDPQPDYSAFREASYGHSTLEIMNRTHAVYHWNRNDDGKKVAIDSFVLNNQYWSSNVRERKLKRHYLNGMRMIAS

SEQ ID NO: 75068 - protein, 100 aa, Gossypium hirsutum
  Clone ID: LIB3145-046-Q1-K1-B10.pep
HFEILHFQAMKLHLLQTRCRIYIYICQQKDDCKRSQTRCRIYIYIFLFLFLSLLAFSSLAMKLHQALPEMIYLHIIFSLRSNHPHPIQIMPLQFPFSNVT

SEQ ID NO: 75069 - protein, 174 aa, Gossypium hirsutum
  unsure (1)..(174): unsure at all Xaa locations
  Clone ID: GOSHI-09MAY01-C31395_1.pep
MSRLQLGDFYYMAEDIIDDMDEDDYGRAGGDMDAHEYDMLTKVTDTSSGQARKGKDIQGIPWERLNITREDYRLTRLEQYKNYENIPASGDAVDKECKQMEKGGNYYEFFPNTRLVEPTILHFQLRDLVWATSKHDVYLMFNYSFMHXSALSCRLSEMLKFSGGVGATEKHPGN

SEQ ID NO: 75070 - protein, 229 aa, Gossypium hirsutum
  Clone ID: GOSHI-09MAY01-C31355_1.pep
MLYLRDLWRRHRRKVLVTAGVLGSGYLLYKLYDAHKRRLIDLERQLANERENDEFIKAQIQLHFENIQRIADTTTLPHAMPYLSCRIAEDLNLSHLMERLVKGKDQPNSLSSSEKLELWDRLKILSFTRLVVSIWAVTILSLYIRVQVNILGRHLYIDTARGLGSSYLLEEADLIDRDDQQKFLASADFLANHGLPKLISSMQTAATEVLKAKQLRDFFNTAILHETIM

SEQ ID NO: 75071 - protein, 140 aa, Gossypium hirsutum
  Clone ID: GOSHI-09MAY01-C31375_1.pep
MACHYAYYASFSPSVTLRGFGAKNREPRPFQVHLSSISSPVRASYNTLVSEAARLLVPTAIFEASKLKVVFMGEALKSYSAIIPRTYILSHCDFTAYLTLTISNVINLDQLKGWYNNDDVVAEWKKVKETMFLNVHCFVS

SEQ ID NO: 75072 - protein, 65 aa, Gossypium hirsutum
  Clone ID: LIB3120-019-Q1-K1-H6.pep
KKDVLEKAWILCSWHQSLSMLLKVKRKHSKHNGRPWNKHNPHFLFFFIVQNPPLSSLRACFLQKE

SEQ ID NO: 75073 - protein, 65 aa, Gossypium hirsutum
  unsure (1)..(65): unsure at all Xaa locations
  Clone ID: LIB3493-007-P1-M1-E5.pep
XKKDVLEKAWVLCSWHQSLSMLLKVKRKHSKHNGRPWNKHNPHFLFFFIVQNPPLSSLRACFLEK

SEQ ID NO: 75074 - protein, 140 aa, Gossypium hirsutum
  Clone ID: GOSHI-09MAY01-C31275_1.pep
HASEKINEHLLGIVKCGELGINELLAAKLSRSGNDARHAVEERDLCEKLLKQIEAKASELVAEKKKIRHLLDAYKRLKSQYNYLCRKNGLTTENMSFSNKLEDESDSARHHDKSKPSLDAENSILKTPMVVFGTKSMKDV

SEQ ID NO: 75075 - protein, 182 aa, Gossypium hirsutum
  unsure (1)..(182): unsure at all Xaa locations
  Clone ID: GOSHI-09MAY01-C31235_1.pep
ATFAINSPYFIAKNITFKNXAPLPPSGALGKQAVALRISADAAAFIGCKFIGAQDTLYDHIGRHYFKRCYIQGSVDFIFGNGLSLYKHCHLHAVTNSYGALTAQKRESMLEETGFSFVKCKVTGSGALYLGRAWGVFSRXVVFVYTYMDKIITPRGWYDWGDKNREMTGVYGQYKCSRPGAE

SEQ ID NO: 75076 - protein, 94 aa, Gossypium hirsutum
  Clone ID: GOSHI-09MAY01-C32985_1.pep
RSPHPFYWTLALFPLSHQSSAAMSQQPDTKPLTEEELERRKKKEEKAKEKELKKQKALEKAELAKLKAQQGSNAPKKSAKKSAKREADDENPED

SEQ ID NO: 75077 - protein, 475 aa, Gossypium hirsutum
  Clone ID: GOSHI-09MAY01-C32975_1.pep
MASRPIVPQQPRGEAVVHKQTKKNVAAGDGKSRRALGDIGNVVNVRAVADGKPAQIQTHRPLTRSFCAQLLANAQAAAVAENNKKNVCVNVEKAPAAVAVPPKRSGPAPAAAPPKAVQKKPTAKPAAPPVEVIEISPDVEEILEVKEKKEKKDKAEVINNNKKVTQKEGSPKKKHTFSSALTARSKAAAHGIANKPKEDIVDIDGADTDNHLAGVEYVDEIYKFYKSAEHESMPNDYMHLQTDINEKMRAILIDWLIDVHQKFELSPEALYLTINLIDRFLSVKVVPRRELQLLGMSAMLIATKYEEIWPPEVNGLVCGADRAYTHEQILIMEKTILGRLEWTLTVPTHYVFLARFIKASIPDPKMENMVYFLAELGIMHYETIRYCPSMVAASAVYAARCTLKKTPAWTDTLKFHTGYNEQQLMECAKLLACFHSKAIDSRLQVVYRKYSSSLRGAVALIPACQNLLSGVVSSA

SEQ ID NO: 75078 - protein, 55 aa, Gossypium hirsutum
  Clone ID: GOSHI-09MAY01-C32865_2.pep
PVISGQVKLHHYTKGPNIHIIKMAMINEQQKASSSLGVGSLQRSQHMNRRRTLRH

SEQ ID NO: 75079 - protein, 85 aa, Gossypium hirsutum
  unsure (1)..(85): unsure at all Xaa locations
  Clone ID: LIB3825-002-Q1-K6-E4.pep
MEAERLNSPSTSVITFELLGHQLHFSQDPNSKHLGTTVWDTSMVFAKFLEKNXKGRFCPSKLKXKRVIELGAXCGVAGVWNGIAG

SEQ ID NO: 75080 - protein, 213 aa, Gossypium hirsutum
  unsure (1)..(213): unsure at all Xaa locations
  Clone ID: GOSHI-09MAY01-C32525_1.pep
QSSGLIHALPKSSKPTLTLSLSLSFFYYHIFVSFPFKFLGPDRRTMASHAANLWVLLGLGLAGIFLMTKRLKKTIKADFGAFIQKLELLPPPQPAPPKAPHPLTGLNFAASDVFDIEGYVTGFGHPDWLRTHEPSTRTSXCVWPLVEGGATLXIGKLVVDELALXSMGENKHYSTTNXNPAAPAPAPPGSFSGAAVAVAADFVDFSLCIDTLG

SEQ ID NO: 75081 - protein, 148 aa, Gossypium hirsutum
  Clone ID: LIB3585-033-P1-K1-G9.pep
MASHAANLWVLLGLGLAGIFLMTKRLKKTIKADFGAFIQKLELLPPPQPAPPKAPHPLTGLNFAVSDVFDIEGYVTGFGHPDWLRTHEPSTRTSPVVLALVEGGATCIGKTVVDELAYSIHGENKHYSTPTNPAAPARIPGGSSSGAA

SEQ ID NO: 75082 - protein, 194 aa, Gossypium hirsutum
  Clone ID: GOSHI-09MAY01-C32455_1.pep
MHPLSSIRQLRHSSTSVLLQRFSIFNWVFRASSNRPAFLGGSKSFSAGAHSSENVGTPEKNFDQQTMKDNVSATRASTFQKFFGPLGAQSTGQTDFRSGGNYRSMDVLREAIDADRMANFRGSQFRQDHIEQNKHFAHIKIMRNNTFVTVTDSDGNKKCGASAGMSGLLGGTKVSKYATEAVAEYAGARQGKWG

SEQ ID NO: 75083 - protein, 191 aa, Gossypium hirsutum
  Clone ID: AI729047.1.pep
MHPLSSIRQLRHSSTSALLQRFSNFNWVCRASSNRPAFLGGLKSFSAGAHSSENVGTPEKNFDQQTMKDNVSATYASTFQNFFRPLGEQSTENVGNLGRNLDQQAVKENVSARYASAFRDFTRPSGQTKFRSGGNYRSMDVVMEAIDGDRRANYRGSQFRQDHIEQNEHFAHIKIMRNNTFVTVTDSNGNN

SEQ ID NO: 75084 - protein, 141 aa, Gossypium hirsutum
  Clone ID: GOSHI-09MAY01-C32165_1.pep
MATSSNNSIDSSLSSQRLVGKVALVTGGATGIGESIVRLFHKHGAKVCIVDVQDNLGLQVCQSLSNGPNVCFFHCDVTIEEQVRAAVDYAVEKFGTLDIMVNNAGLSGPPYNDIRNYDLSDFDKVMNVNVKGVFLGMKHAA

SEQ ID NO: 75085 - protein, 81 aa, Gossypium hirsutum
  Clone ID: GOSHI-09MAY01-C33995_2.pep
LNVARRIQSPSPPPSRPPPRPIYERYTWKIYSERLMTLAGVYGFWKYVSKLERRETRRYLEMFYILKFRELVKSVPLASDD

SEQ ID NO: 75086 - protein, 218 aa, Gossypium hirsutum
  Clone ID: GOSHI-09MAY01-C33995_1.pep
ELYAKNNKLRELANLVVVAGYIDVKKSKDREEIAEIEKMPHPSAHASVDGQFRWIAAQTNRARNGELYRYIADSKGIFVQPAFYEAFGLTVVEAMTCGLPTFATLHGGPAEIIEHGISGFHIDPYHPDQTAELLATFFERCKEDPSHWTKISDGGLKRIYERYTWKIYSERLMTLAGVYGFWKYVSKLERRETRRYLEMFYILKFRELVKSVPLASDD

SEQ ID NO: 75087 - protein, 107 aa, Gossypium hirsutum
  unsure (1)..(107): unsure at all Xaa locations
  Clone ID: LIB3135-020-Q1-K1-F1.pep
RFDPRAPRPRRDPYHPDQTAELLATFCERCKEDPNHWTKISDGGLKRIYERYTWKIYSERLMTLAGVYGFWKYVSKLERRETRRYLEXVYILKFRELVKSVPLASDD

SEQ ID NO: 75088 - protein, 71 aa, Gossypium hirsutum
  Clone ID: LIB3148-016-Q1-K1-D11.pep
TSKQDRIYDCSFYQFSYRYIVSFTYKSSRFQEAVQSQNTAFIYNIHHIIDFLLPTQTRIKMLHSKEIVMML

SEQ ID NO: 75089 - protein, 109 aa, Gossypium hirsutum
  Clone ID: LIB3083-005-Q1-L1-A10.pep
LYAKNNKLRELANLVVVAGYIDVKKSKDREEIAEIEKMHDLMKEYKLDGQFRWIAAQTNRARNGELYRYIADSKGIFVQPAFYEAFGLTVVEAMTCGLPTFATLHGGPA

SEQ ID NO: 75090 - protein, 186 aa, Gossypium hirsutum
  unsure (1)..(186): unsure at all Xaa locations
  Clone ID: GOSHI-09MAY01-C33885_1.pep
MSQKTMEVVKNLDIKRXMGRWYEIASFPSRFQPRNGVNTRATXDTLNEDGTVHVLNETFTDGKRGFIEGTAYKADPQSDEAKLKVKFYVPPFLPIIPIVGDYWVLHLDDDYQYALIGQPSRNYLWVLCRQTHMDDEIYNQLVQKAKDEGYDVSKLHKTPQSDPPPEGDDTPKDTKGIWWIKSLLGM

SEQ ID NO: 75091 - protein, 73 aa, Gossypium hirsutum
  Clone ID: GOSHI-09MAY01-C33875_1.pep
LLVLFFFFFLGVFFTCFFVFFFFLKRINLLESEMTPGLDLLYSTIIVSHSRELLIDNGTVNHTTNNQEKAHTV

SEQ ID NO: 75092 - protein, 140 aa, Gossypium hirsutum
  Clone ID: GOSHI-09MAY01-C33515_1.pep
MMNQYKVLQRCWAAMESNNRYAMAEIYTIGTGTWRSIGSAPIDTVALPFNAFLNGALHWFPCTPNGSEFIHTFDFDSEKFGTLPPPDHFRETDKKFTNYSRIGVLGGCLFMIYFTNSTRFDIWVMKDYGVKESLDQAVCD

SEQ ID NO: 75093 - protein, 182 aa, Gossypium hirsutum
  Clone ID: LIB3829-027-Q6-N6-D8.pep
GTLPPPDHFRETDKKFTNYSRIGVLGGCLFMIYFTNSTRFDIWVMKDYGVKESWTKQFVIENLYPKQGSWDFYEPMVVLNNGEILMLFNNDAVVCYNQKRKNLRGTKFFRTRSQFDATAFTPSLVSLNNVAKGEQISRYMYLYILYAYMYLCVYMYVYSKYSHICFVSDEFKLGIHNVCVYM

SEQ ID NO: 75094 - protein, 60 aa, Gossypium hirsutum
  Clone ID: GOSHI-09MAY01-C33665_1.pep
LAPTSSFEVEPTAGVSTLAPRHESKHRLTWSRIDMVSTMYVPEAKLDSPLLTPLHHVSRI

SEQ ID NO: 75095 - protein, 113 aa, Gossypium hirsutum
  Clone ID: GOSHI-09MAY01-C33635_1.pep
SKLYYQYQETENKLCVGYGGGVRVLFGFVGVTFITCIDLLASIYGMLVTERGTQEGGKKEFRAFTSTTAKLFMERPQGPINPYENTYICYCTTASSYSFNILPSFCFHSLFIC

SEQ ID NO: 75096 - protein, 196 aa, Gossypium hirsutum
  Clone ID: GOSHI-09MAY01-C33125_1.pep
MLCYEHNKTLFYTKTYHNMIHIFVAFLLVSTSLGPVLSLQPVPDSGHRQLQNCTLNPHKDIQKLRRVQAYLKKINKPAVKTIQSPDGDVIDCVPSHLQPAFDHPQLKGQKPLKPAVRPKGHNLTEAVSESFQLWRDTGESCPKGTVPIRRTTEQDILRASSLRRYGRIRRHVRRDSTGYGHEHAVVFENGDQYYGA

SEQ ID NO: 75097 - protein, 175 aa, Gossypium hirsutum
  unsure (1)..(175): unsure at all Xaa locations
  Clone ID: AI725930.1.pep
LSLQPVPDSGHRQLQNCTLNPHKDIQKLRRVQAYLKKINKPAVKTIQAGSLKLCANYMIIIXCLVLGFLLQSPDGDVIDCVPSHLQPAFDHPQLKGQKPLKPAVRPKGHNLTEAVSESFQLWRDTGESCPKGTVPIRRTTEQDILRASSLRRYGRIRRHVRRDSTGYGHEHAVVF

SEQ ID NO: 75098 - protein, 197 aa, Gossypium hirsutum
  Clone ID: GOSHI-09MAY01-C33365_1.pep
AGLSNQIKVSTAIDTITLAESSPPSKGSFKPESREVLRPRGGFLANNQAPLLVNLYPYFSYDDNNVIDLPYALFTAPNPVVEDPPLRYSNLFDAILDAVYSALEKAGGGSLEIVISESGWPTAGGRKRAATSIENSRTYNQNLINHVKKGTPKKPGKPIETYIFAMFDENTKTGEEIEKHWGLFLPNRQPKYQINFN

SEQ ID NO: 75099 - protein, 56 aa, Gossypium hirsutum
  Clone ID: AI054507.1.pep
LNSCTESIDEGHSNHASYSTLPIRAYHFFLGREGNQCIYQFQNTIQNKMMKISPIC

SEQ ID NO: 75100 - protein, 68 aa, Gossypium hirsutum
  Clone ID: GOSHI-09MAY01-C33295_1.pep
PPFFFLYNNFYHLFFFFVFYFFFFFFFFFFFFFFFFFFFFFFFFFNYETAYRIFSISISESCSEDMMV

SEQ ID NO: 75101 - protein, 113 aa, Gossypium hirsutum
  Clone ID: LIB3145-047-Q1-K1-G7.pep
ASNIHTQLPSCQITKMGQQIVNQSLTITAVVAILTSFWKDASKFNLITSSGGLHRSFTIILMGGRRFSWFRQISSSYPRINPKNSCIKNLTPLWISLFLRCQSPQTDKGMIHL

SEQ ID NO: 75102 - protein, 133 aa, Gossypium hirsutum
  Clone ID: GOSHI-09MAY01-C33285_1.pep
RLASLQNLVLIMFEDDTVLIPKETAWFSYFPDGAFEPVLPVQAAKLYKEDWIGLKTLDEAGKVKFVNVSGNHLQISTSDMKKYMVPYLEDQTPAPTGQTPTEASSYQWFSKVGHFFKDLIGLSEDQPLLHIVY

SEQ ID NO: 75103 - protein, 139 aa, Gossypium hirsutum
  unsure (1)..(139): unsure at all Xaa locations
  Clone ID: LIB3149-017-Q1-K1-B10.pep
FLPKLNNEINGMRNXTYKERLASLQNLVLIMFEDDTVLIPKETAWFSYFPDGAFEPVLPVQAAKLYKEDWIGLKTLDEAGKVKFVNVSGNHLQISTSDMKKYMVPYLEYQTPAPTGQTPTEASSYQWFSKVGHFFKDLI

SEQ ID NO: 75104 - protein, 133 aa, Gossypium hirsutum
  Clone ID: GOSHI-09MAY01-C33205_1.pep
FHLCKVTHTRYQKRAFRKQFLRGVFIFLFGFFPFFRFVCNISHEKNGKIPETIPMQAQISQKYGDTGEGRMVLKHFPSNFATFFKNNVGFKGFFLKRKNSLPDLYGRGLRWQDLDTASAPSIIKLDDGLAAAK

SEQ ID NO: 75105 - protein, 275 aa, Gossypium hirsutum
  unsure (1)..(275): unsure at all Xaa locations
  Clone ID: GOSHI-09MAY01-C33225_1.pep
LFVWNLVSSALGTGKSNSNSNVPLKNANPTPNSSSKNTYSMGNLVDSLPXNSGNWGNSSGYNNNSNGIGGSSNINVNINNSKNQNLGGASMKXLAGGAGGGGKSGIGSKDPFGSLVDFSSKPSGTLNSGSNKGNKANVAHDAFGDFQNASKPSTTAFPSSSFSAFEDFQNASKPSTMAFPSSGFGSTSNKKDSGLNMDNFGMPAKNVGSQSQTSVQSSGGDPLDMFFSSSSASGGSAQASGGGGGGGHQFSEVDDWGSDSEFGGAGGGNNGGSTT

SEQ ID NO: 75106 - protein, 124 aa, Gossypium hirsutum
  unsure (1)..(124): unsure at all Xaa locations
  Clone ID: LIB3120-060-Q1-K1-C5.pep
PTRPPTRPQNLAQLHFLLAVWVHLGIFRMLQNQAQWRFLLAVLVQLRIRMILVCLQRMLDLKVNHLFKARAVILSICSSRHLQLLEVLLKHLVEVEGSNFLKLMIGDWILSLEEXEEEMMVARQ

SEQ ID NO: 75107 - protein, 131 aa, Gossypium hirsutum
  unsure (1)..(131): unsure at all Xaa locations
  Clone ID: GOSHI-09MAY01-C28845_1.pep
MDKLVSSWYKDQSLPESYIFPPHERPGKLLVPRCNTVPVIDLGDTRTNLVHQILKASQEFGLFQVVNHGVPPNIMSETMSVFHKFFELPAEDKASLTVHTNDPXRCKLVTSTLDYDREKIHLWRDVLRHPC

SEQ ID NO: 75108 - protein, 47 aa, Gossypium hirsutum
  Clone ID: GOSHI-09MAY01-C28525_1.pep
LSAISGDPKYSTEGMKVLAHLKTLPKTEGLVPIYIRYFYSLQSFHHS

SEQ ID NO: 75109 - protein, 46 aa, Gossypium hirsutum
  Clone ID: GOSHI-09MAY01-C28465_1.pep
MMSELEEDSLKLPVLDLTQPDNIESSFLSSLLKACQEWGFFYVTNH

SEQ ID NO: 75110 - protein, 183 aa, Gossypium hirsutum
  unsure (1)..(183): unsure at all Xaa locations
  Clone ID: GOSHI-09MAY01-C28705_1.pep
QSSFGSQPCNVSDFFISDMIIASIPFDGNAVDDNISGTDAFPDFKCSEPSMLFDVAEQYMILPFLEDTVKANEINYVNLHEEAVMAQDNTGIHLAIGQMRSCAEDSDVNSDSDKADDFDPQSFIKSXPTLSDVVSSFRPAATAMEARRRKPITLVLDLDETLVHSTLEPCDDADFTFTVFFNM

SEQ ID NO: 75111 - protein, 86 aa, Gossypium hirsutum
  Clone ID: LIB3048-054-Q1-L1-H7.pep
SILLISAIFRVGLILFGEWQDTHVAVRYTDVDYLVFSDAASLMASGQSPYKRTTYRYSPLLAFLLIPNSFTSRCWGKFLFSASHLF

SEQ ID NO: 75112 - protein, 87 aa, Gossypium hirsutum
  Clone ID: LIB3048-037-Q1-L1-D1.pep
MISLKPRSILLISAIFRVGLILFGEWQDTHVEVRYTDVDYLVFSDAASLMASGQSPYKRTTYRYSPLLAFLLIPNSFTSRCLGKFLF

SEQ ID NO: 75113 - protein, 169 aa, Gossypium hirsutum
  Clone ID: GOSHI-09MAY01-C28185_1.pep
EENRQRVIKEESSDKSDEGGWTGWSEPLSKCKESSTSLENVAHDDAAVEDFHEKIENEDIKQEDDTESLLKQLGIDVDAGVDGEVKDTLTWARWSEEESSRDSAQWMPVRAKSGAVTNFYEEPNEEVDEQFMREILYEDVCEYLFSLSSTEARLSLVFQFIDFYGGKIS

SEQ ID NO: 75114 - protein, 304 aa, Gossypium hirsutum
  Clone ID: GOSHI-09MAY01-C28115_1.pep
HKSIKYNVWSATPHGNRRLDSAFEDAQRIAAGKPRGCPIFLFFSVNASGQFCGVAEMIGPVDFQKAMDFWQQDKWSGSFPVKWHIIKDVPNSHFRHIILGNNENKPVTNSRDTQEIMYKQGMEMLKVFKNHAMKTSLLDDFMFYENRQRIMQAEKAMQLIKSIESPVLAPAFDPVNKLNRVELLLNEHERSSKQSDPELLRTIVPSSNQPVSTDCDRTNARRMNESSGKIAVEAKDDASTLKISSLSINPKQDESKISTDAATKSDAVEVVNIGSVTVKVNKFTDSPGFLTVGTIPLNPKTPQL

SEQ ID NO: 75115 - protein, 130 aa, Gossypium hirsutum
  unsure (1)..(130): unsure at all Xaa locations
  Clone ID: GOSHI-09MAY01-C28075_1.pep
MARVLLQDLLPVALRYCLSKNVTSCLIELSNLTKAICGKVLDVEELMKVQDRAVLTLCNLEKIFPPSFFTIIVHLVXLSKLKSYCRTKRYPERSIAEGYLAEECMTFWSRYLEDVETRLNRPNRNAGLND

SEQ ID NO: 75116 - protein, 128 aa, Gossypium hirsutum
  Clone ID: GOSHI-09MAY01-C28365_1.pep
IGPSFPLWLRSQKHLEYLDISNSRISDVIPRWFWGLSTQFRDVNLSRNQISGQIPYLPKGPNIFTFVDLSFNNFSGPLPQISMGSNQYMIDLSNNYFSGSLFHFLCYQLNGTITTRFLGMANNPLSGE

SEQ ID NO: 75117 - protein, 96 aa, Gossypium hirsutum
  Clone ID: GOSHI-09MAY01-C28245_1.pep
VKEMDMISTWKVGRVQSASLSSKATQQLMTGFRPWKMIRCLFHPSQIEVKVVRSTRDVDQLCLYCSKCCSPGITQKLDMVCNGLNIVFIFSTLFYA

SEQ ID NO: 75118 - protein, 180 aa, Gossypium hirsutum
  Clone ID: GOSHI-09MAY01-C28225_1.pep
MIIPEKNRREICKYLFQEGVCYAKKDYNLAKHPEIDVPNLQVIKLMQSFKSKEYVRETFAWMHYYWYLTNDGIEFLRTYLNLPSEIVPATLKKSARPPGRLGGPPGDRARGPPRFEGDRPRFGDRDGYRGGPRGGDFVGDKGGAPADFQPSFRGPGGRPAFGRGGGGYSAAPSGSGSGFA

SEQ ID NO: 75119 - protein, 63 aa, Gossypium hirsutum
  Clone ID: LIB3146-058-Q1-K1-G7.pep
IACDFIEGVCYAKKDYNLAKHPEIDVPNLQVIKLMQSFKSKEYVRETFAWMHYYWYLTNDGIE

SEQ ID NO: 75120 - protein, 130 aa, Gossypium hirsutum
  unsure (1)..(130): unsure at all Xaa locations
  Clone ID: uC-gsronu33B106h06b2.pep
VTRKNKIITEKNRRGICXYPFQEGACYAXKDCDLAKHPXIDVPNLQVIKLMHSSKSKEYVRETFAWMHYYWYLTNDGIEFLRTYLNLSSEIVPATLKKSARPPGRLGRPPGDRPRGPPHYEGDRPMLGDR

SEQ ID NO: 75121 - protein, 102 aa, Gossypium hirsutum
  Clone ID: LIB3165-031-P1-K1-C10.pep
MIIPEKNRIEICKYFFQEGVCHAKKDYNLAKHPEIGLPNLQVIKLMQSFKSKEYVRETFAWMHYYWYLTNDGIEFLRTYLNLPSEIVPATLKKSTKPPGRLG

SEQ ID NO: 75122 - protein, 213 aa, Gossypium hirsutum
  Clone ID: GOSHI-09MAY01-C29595_1.pep
MADQSPADQTPPFSGMQSLSVDSQPPSSSSTPQMSLEEKFKIIRSVREECIQEDELLNLLNHKPEPICYDGFEPSGRMHIAQGVMKAINVNKLTSAGCRVKIWIADWFAQLNNKMGGDLKKIKVVGQYLIEIWKAVGMDLNEKVEFLWSSDEINSRASEYWPLVMDIARRNKLPRIMRCCQIMGRSEQDELSAAQILYPCMQCADIFFLKADI

SEQ ID NO: 75123 - protein, 169 aa, Gossypium hirsutum
  Clone ID: GOSHI-09MAY01-C29105_1.pep
DRFSSRSDRESRISNHSDHPRLASDLSRSKDYSQNAEKYSRDRYDGSGHRSRDKGKESPFLERYKDKDLSFDRVGSGRRHGKSLSEEMDRDRRRWDRDGRDEKVDYHRSWRDKKADHTSYEESRGHWNDSSSVRERDNDKRPSKDGYRSGHEDMDGLKPSKKERMKYDE

SEQ ID NO: 75124 - protein, 89 aa, Gossypium hirsutum
  Clone ID: LIB3048-043-Q1-L1-E7.pep
DLRWSKDYSQNAQKYSRDRYDGSGHRSMDKGKESPFLEPYKDKHLSIDRNGSDRIHGKTISEEMDCDPTKWDRDGSHEKVLYHISSKHN

SEQ ID NO: 75125 - protein, 283 aa, Gossypium hirsutum
  Clone ID: GOSHI-09MAY01-C29085_1.pep
LYLRSVGINDWHEVHVKRVVDEPIFDVQECKPGNLNRVIQQPSFPVNLDFLRKRKPSDDINIEHRIYTCEFLQCPYSELQLGFLDRTARDNHQLTCPHRNSSAEFGGSNFNINDVKPVIFPPPFAQPKPAAPSITSVSTPFDLSGLGVPEDGQKMISDLMSIYDNNVQANKNASPIKNPVTEGQNLLQPKTQQQQDEFFRGQGLSFFNESNIPANNQILPQGEAQFDRLKTSNSPFETTYNNNNNGFKLMFGSPFDLSSFDYNDDLQAVGVDAMPKQDVSIWF

SEQ ID NO: 75126 - protein, 49 aa, Gossypium hirsutum
  Clone ID: uC-gsronu33B170a11b1.pep
TPVDLSRLGCPEDGQKMISNLMAIYDNNVQANKNASPIKNPVTEGQNFL

SEQ ID NO: 75127 - protein, 125 aa, Gossypium hirsutum
  unsure (1)..(125): unsure at all Xaa locations
  Clone ID: GOSHI-09MAY01-C29075_1.pep
MVGPVRPQFVLFGSSIVQLSFSNGGWGAILADVYARKADILLRGYFGWNSRRAIQVLDHVFPKDAATQPELIITYXGGNDSMGAHPSGPGPHVPLSEFSGPWTLLYFCRGFQFNRFNSFMTFVYE

SEQ ID NO: 75128 - protein, 163 aa, Gossypium hirsutum
  unsure (1)..(163): unsure at all Xaa locations
  Clone ID: uC-gsronu33b112e10b1.pep
MVGPVRPQFVLFGSSIVQLSFSNGGWGAILADVYARKADILLRGYFGWNSRRAIQVLDHVFPKDASRQPELIITYFGGNDSMGAHPSGLGPHVPLPEYIENMKQIVNYLKGLSDSTRVIFLTSPPVNEERVNKYRSEHXSHLVSTYELCQTYADACVKLCQEL

SEQ ID NO: 75129 - protein, 198 aa, Gossypium hirsutum
  unsure (1)..(198): unsure at all Xaa locations
  Clone ID: GOSHI-09MAY01-C29255_1.pep
MEFTLVALTSLIALALVHPSHAQNSPQDYLVLPSQAQDSQQDYLALGGDSPQDYLNAHNAARAAVGVGPMIWDKTVAAYAQNYANQRYYDCNLIHSGGPYGENLAWSSADFSGTSAVRMWVSERVNYNYNFNRCAAAQGGGLYTXMVWRTRFVWGVLGECNTGGTFITCNYALAGIIIGQRPLQKVNLLNIFKSLISP

SEQ ID NO: 75130 - protein, 126 aa, Gossypium hirsutum
  unsure (1)..(126): unsure at all Xaa locations
  Clone ID: AI054678.1.pep
PWEGDSPQDYLNAHNAAQHXXXCWPYDLXITPWLPMHRTTLINAITTATYISRWPYGENLAGXRCFFGTLLKNVVRXRGKLQYNSQVCHSKFGAYXSGLATRSGGSSKGTLGLYTALSLRHSWQDL

SEQ ID NO: 75131 - protein, 109 aa, Gossypium hirsutum
  Clone ID: GOSHI-09MAY01-C29235_1.pep
MVSFIEERPKNIAAGQNMVSDPKSAQKPPAPPGFISISRKKLLQNLEINAGARVNSWVDSMRASSSTHMKSAPSIADDQGSWNLNHPSALDMFEQIFDASKGKQIVMFL

SEQ ID NO: 75132 - protein, 176 aa, Gossypium hirsutum
  unsure (1)..(176): unsure at all Xaa locations
  Clone ID: GOSHI-09MAY01-C24845_1.pep
MSTFGAAAANHNPNKSFEVAQPPSDSISGXGEFFFNFLIATSWDNQVRCWETPRNGTAVASTPKASITHDQPVLCSTWKDDGMTVFSGGCDKQVKMWPLLSGGQPMTVAMHDAPIKEVAWIPEMNLLATGSWDKTLKYWDTRQANPVHTQQLPDRCYALTVKYPLMVVGTADRNLI

SEQ ID NO: 75133 - protein, 182 aa, Gossypium hirsutum
  unsure (1)..(182): unsure at all Xaa locations
  Clone ID: GOSHI-09MAY01-C24875_1.pep
EKLWFEMMKTGCELDVASYNVRISNFQGGEPEKVKELIDDMSTLGLKPDTISYNYLMTCFCKRGMLDEAKKVYEGLEGNGCNPNAATFRTLVFYLCLNGLYEQGYKVFKESVRLHKIPDFNTLKHLVEGLVMKKKIKDAKGLIRTVKEXFPPNFLIAWKKLEEELGLVSGNAEAREAKESTG

SEQ ID NO: 75134 - protein, 109 aa, Gossypium hirsutum
  Clone ID: GOSHI-09MAY01-C24865_1.pep
TQIIPKIEKPSSFPCVHSNHAHHPHRNSSRHSRELRLHACLALYLQQHTQTEEQKSGQQTTEQIFFRFFFFFFSLFYFGYKRPISSTVMGERKNQRENSIRVQIGVFSV

SEQ ID NO: 75135 - protein, 84 aa, Gossypium hirsutum
  Clone ID: GOSHI-09MAY01-C24805_1.pep
LMPSQKILKPNLASGYHFFFSFDGSVYWESCSFKNWVIFFSYTFLLVLFFPIPFSIWFMSPFNPLLSFSIPRDTHYQVHLFLSF

SEQ ID NO: 75136 - protein, 196 aa, Gossypium hirsutum
  Clone ID: GOSHI-09MAY01-C24825_1.pep
AIDLEDIKFHQCVRLARFENDRTISFIPPDGSFDLMTYRLSTQVKPLIWVEAQVEKHSRSRVEIMVKARSQFKERSTATNVEIAVPVPADASSPNVRTSMGSAAYAPENDALMWKIRSFPGGKEYMLRAEFTLPSITDEEATPERKAPIRVKFEIPYFTVSGIQVRYLKIIEKSGYQALPWVRYITMAGEYELRLI

SEQ ID NO: 75137 - protein, 219 aa, Gossypium hirsutum
  unsure (1)..(219): unsure at all Xaa locations
  Clone ID: GOSHI-09MAY01-C24585_1.pep
QLTCVMKFGGSSVASAERMREVADLILSFPNERPVIVLSAMGKTTNKLLLAXGEKAVSCGVTNVDAIEELNFIKDLHYRTADELGVERSIVDGHLEVLEQLLKGIAMMKELTLRTKDYLVSFGECMSTRIFAAYLNKIGVKARQYDAFEIGFITTDDFTNADILEATYPAVAKRLNDDWISDPAIPIVTGFLGKGWRSSAITTLGRGGSDLTATTIGKA

SEQ ID NO: 75138 - protein, 189 aa, Gossypium hirsutum
  Clone ID: GOSHI-09MAY01-C24545_1.pep
MESQNLKHRSRDDPRFATTTSNEKNRANRREKRMAMAKRGLRSLVIAVSFPLSLTLLNIYLFGSGRGYASLAKPFWFPPLWLLHTGCLASSFVMGLSAWFVWVEGGFHVKPTALSLYLGYLGLSMAWHPTVLWMGASWAGLLVSLAMVGTLVGCSRDFGKVNPIAGNSVMPCLAWAAFLATVNLKLVFL

SEQ ID NO: 75139 - protein, 95 aa, Gossypium hirsutum
  Clone ID: GOSHI-09MAY01-C24465_1.pep
MSCREGLMSPQTETKASVGFKAGVKEYKLTYYTPEYEVKDTDILAAFRVTPQPGVPPEEAGAAVAAESSTGTWTTVWTDGLTSLDRYKGRCYDIE

SEQ ID NO: 75140 - protein, 130 aa, Gossypium hirsutum
  Clone ID: GOSHI-09MAY01-C24785_1.pep
NGPKNDEIIVDHRVSFELSGEDVARCLKNKSLVSSRTMPDYEYPKDLVAQGRIEKDEKVSGEAEEDHCYQKHRSVTLGSIKEFNFDSGKGEASEKPTVRSEWWANEKVAGKEARPGNNWTFFPMLQPEVS

SEQ ID NO: 75141 - protein, 186 aa, Gossypium hirsutum
  Clone ID: GOSHI-09MAY01-C24755_1.pep
PCIRNCKNRVIQTGLKAHLEVFKTRDRGWGLRSWDPIRAGTFICEYAGEVIDETKARQESGDGESEYVFHTNRLYESFKYNFGAESSEDFDIPSPVIISSKNSGNVARFMNHSCTPNVFWQPVMYEHNHEAFLHIAFFAKKHIPPMTELTFNYGIPQSEETQPDNPPENGRKKCLCGSLKCRGYFY

SEQ ID NO: 75142 - protein, 224 aa, Gossypium hirsutum
  Clone ID: GOSHI-09MAY01-C24725_1.pep
NKLSKVIQPSTGRVKGGADGTPGMRQSRSDGSLDTMPRRPVDPEEELRWMSQEVRGYVEAVLNSLAANVPKAVVLCQVEKAKAHAPAHASSSVSAQSTNRIEELLQEDQNVKRRRERFQKQSSLLSKLTRQLSIHDNRAASASDWSDSGAGAESSPRTSGGSVGDDWRTAFDAAAANGPVDYRRSGSNGPTQNGDVNSRSGSNSRRTPNRMPPAPPQSGSGYKY

SEQ ID NO: 75143 - protein, 94 aa, Gossypium hirsutum
  Clone ID: LIB3146-004-P1-K1-C3.pep
EKKLKMRKKYTVYEFKYLILPIPLSITKPLAYHTFFLIKIRQNLSRKIRSKVRTQPLNLKNIATMVLFTHTRLSRLGQVSCFNGLFVENLSHKR

SEQ ID NO: 75144 - protein, 115 aa, Gossypium hirsutum
  Clone ID: GOSHI-09MAY01-C24695_1.pep
MAEQAVQKPLNSSSESENGGILEKTPPLQDQKVDENIQEDSGKDLKKACTPDRLKVPKAFKFPERYRSPTDSMMSPVTKGLLARNRKAGGSLLPPSINQTKIHELRVQDVGLSHN

SEQ ID NO: 75145 - protein, 109 aa, Gossypium hirsutum
  Clone ID: LIB3146-003-P1-K1-C6.pep
PVDVDNHQGGFNATYSTDIIRSNNAPGQGVRMQFKPTTGKNLISETTIDKNIFDPHTPSSSFAPAGTSKRNGQKSTAPPDAANSGHGQGNKIRSSSSLFSSLQRISSAK

SEQ ID NO: 75146 - protein, 62 aa, Gossypium hirsutum
  unsure (1)..(62): unsure at all Xaa locations
  Clone ID: LIB3829-024-Q6-K6-F1.pep
RCVMSGHXTGETGSDLLVVCFHHCSAFLLPNDFFFLXXGKIRGGGGGGAFEDHTXYIYLHVN

SEQ ID NO: 75147 - protein, 142 aa, Gossypium hirsutum
  Clone ID: GOSHI-09MAY01-C24025_1.pep
MIRFVLLQNRQGKTRLAKYYVPLEDSEKHKVEYEVHRLVVNRDPKFTNFVEFRTHKVIYRRYAGLFFSLCVDITDNELAYLECIHLFVEILDHFFSNVCELDLVFNFHKVYLILDEFILAGELQETSKKAIIERMGELEKLE

SEQ ID NO: 75148 - protein, 122 aa, Gossypium hirsutum
  Clone ID: uC-gsronu33B144b03b1.pep
PTRPPECPQCGRRHPGECRAGENVCFRCGASDHFIRDCPETTKREEIMSARSGNASTRGRPQRNPGVGASNRGAFKDSAVRSDVRAPARSYAIRAREEASSPDVIVDQEVRNSRLDKGKNNS

SEQ ID NO: 75149 - protein, 91 aa, Gossypium hirsutum
  Clone ID: LIB3083-119-Q1-L1-E2.pep
EITSARSGNAPTRGRPQRNPGVGASNRGAFKDSAVRSDVRAPARSYATRAREEASSPDVIAGTFSLYDTTVIALIDPGSTHSYICTKLAFV

SEQ ID NO: 75150 - protein, 193 aa, Gossypium hirsutum
  Clone ID: GOSHI-09MAY01-C24335_1.pep
LQRRRVWPSDVQTFIYPNVGQPGHPVVPPAPRTSSSPSSSAGLGIRVVLKPDYRITPLPQFSPQVGDIRRSNFQFDFQFERKILAQPDAEFMNLSQLDLENHPSEPTQSTPSSGANSDSVLNKYIASGLSQDAVIIAVANYGDSPTKVREFVNGYNLLREMGFSANNVADALLVYDNDTDKALAHFLNSSSRG

SEQ ID NO: 75151 - protein, 194 aa, Gossypium hirsutum
  Clone ID: GOSHI-09MAY01-C24325_1.pep
MCKSNPRACLKTLFAKASALYFQLRFSNSSVPTAAPSISTSVSPSMAATDSPLTTKVCIIGSGPAAHTAAIYAARAELKPILFEGWMANDIAPGGQLTTTSDVENFPGFPDGIMGSELMERCRNQSLRFGTTIFTETVDKVDFSSSPYKIFADSKTVLADSVIVATGAVAKRLNFPGSGDGLGGVWNRGISACA

SEQ ID NO: 75152 - protein, 86 aa, Gossypium hirsutum
  Clone ID: uC-gsronu33B016a03b1.pep
FVRYIIYGLEGEKDILKGRGWLYYDKLAKSGWKGKAEIMETEGEDHVFHIFNPDCDNANRLIKRLASFFNQGKLPFQWKCESEVLG

SEQ ID NO: 75153 - protein, 134 aa, Gossypium hirsutum
  unsure (1)..(134): unsure at all Xaa locations
  Clone ID: LIB3083-114-Q1-L1-F8.pep
YVGFEQVFLAGDSAGGNIAHHLALRIKESNLGQXLKILGIGMIHPNFWGTSPIGPELNDRSRKELVDKWWLYVCPTDKGCDDPLINPFVDGESADLAGLACDRILIIVAEKDILKGRGWLYYDKLVKSGWKGKA

SEQ ID NO: 75154 - protein, 100 aa, Gossypium hirsutum
  Clone ID: AW187827.1.pep
FLFFEKKMQTMLNLNATYGLPLAISTITQHFIFSKEMADHERRTEAMKKRRSSSGVAGGSDRRFEKVLEEIMEGEADDDGGSAFQYLSCSCLVCTTAKAA

SEQ ID NO: 75155 - protein, 90 aa, Gossypium hirsutum
  Clone ID: LIB3083-116-Q1-L1-A5.pep
IFFSSFSVFFFFSRHCSYDTFFFEKRMADHERRTEAMKKRRSSSGVAGGSDRRFEKVLEEIMEGEADDDGGSAFQYLSCSCLVCTTAKAA

SEQ ID NO: 75156 - protein, 109 aa, Gossypium hirsutum
  unsure (1)..(109): unsure at all Xaa locations
  Clone ID: GOSHI-09MAY01-C24225_1.pep
MSQTGKLMPNIDQQSTKMLNLTVLQRIDAFIEEILITAAHVTFYEFNLDSNQWSRKDVEGSLFVVKRNTQPXRFQVIVMNRRYTDNFVENLLGDFEYEVQGPYLLYRNA

SEQ ID NO: 75157 - protein, 94 aa, Gossypium hirsutum
  Clone ID: GOSHI-09MAY01-C25995_1.pep
AWTLHENNQLLSLLDPKLVEFDEDEALRVIRVALLCIQASPSMRPPMSRVVGMLAGDIEVTNVTTKPSYITDWDFKDVTGTFMDESQTSIPSDH

SEQ ID NO: 75158 - protein, 127 aa, Gossypium hirsutum
  Clone ID: GOSHI-09MAY01-C25925_1.pep
VSRNHKHDVPPKGNVGDGFEMKPVDVEMGEGNHFDCELREEVNRKRRRPPKMKGSERSDQCNSKVKEGMIRKRGRPPKLQAGSKGLKSRLIDGRKKLGGLRRGRKKLRGRLKSNIPSTSLSEKKLIA

SEQ ID NO: 75159 - protein, 222 aa, Gossypium hirsutum
  Clone ID: GOSHI-09MAY01-C25855_1.pep
LSSKRVQSFRTIREEEVAAMLNHIDIASSSSAPVNLKKLSLLLANHVVCRVTFGKKYGGGGDGGTNRFDRVLHEVQHLVGEFVVSDYFPWMWWVNKLNGMETRVEKNFEELDKLYDEVIADHVAPTRTKANHEDIVDVLLRLQKDARQLITLNNQQIKGVLTDMFIAGTDTTASSLVWTFTELIRNPPSMEKVKYEVRKVGNGRDKIEESDIPKLHYLHSVI

SEQ ID NO: 75160 - protein, 141 aa, Gossypium hirsutum
  Clone ID: GOSHI-09MAY01-C25865_1.pep
SHLPIEYIQCDVLDEEETCDKLSKLNDVTHVFYVAWDKRSTEDENCVINGTMLRNVLKAVIPNSPKLKHICLQTGRRHYTGPIDLYGKYHAQPHDPPFREDLPRLKSSNLCYTLEDVLLEEVKQKENLTWSVHRPGLVFGF

SEQ ID NO: 75161 - protein, 94 aa, Gossypium hirsutum
  Clone ID: GOSHI-09MAY01-C25815_1.pep
MELPQSRPFGAEGRKPTHDFLSLYSHSSVQQDPRPPSQGGYLKTRDFLQLEQQGNPSAKKEISVEVATVEMPTPPSVEHILPGGIGTYSISHVS

SEQ ID NO: 75162 - protein, 192 aa, Gossypium hirsutum
  Clone ID: GOSHI-09MAY01-C25825_1.pep
RKLILPFYSFTLFCIILPMTMFVPEAELPAWVVCYIPATMSFLNILPAPKSFPFIVPYLLFENTMSVTKFNAMISGLFQLGSAYEWVVTKKSGRSSEGDLVSLVEKKPKHHRVGSEPNLEEMKADLQQEQEQKARKKKHNRIYTKELSLAFLLLTASARSLLSAQGIHFYFLLVQGISFLLVGLDLIGEQVL

SEQ ID NO: 75163 - protein, 369 aa, Gossypium hirsutum
  Clone ID: GOSHI-09MAY01-C25585_1.pep
MASSSSSSSSSLFRCFLHFFFFIISQVQAANLPFHPRDVLPLLPRQVSWPVLNSLNSPVDLLPSFVGSVSSSNRIANWKGACFYENTAWVEFHNKTGSEFGGGTLHIKVSYPHSWTCMDLYVFATPYRVTWDYYFLSREHTLEIKEWQDKAEYEYVKNRGISIFLMQAGMLGTLQALWDVFPLFTNTGWGENSNIGFLEKHMGATFEERPQPWFTNISVDDVHSGDFLAISKIRGRGGGFETLEKWVSGAYAGHTAVCLKDSEGKLWIGESGHENEKGEDIIAIVPWDEWWDFELNKDDSNPHIAYLPLHPDVRAKFNETAAWEYALSMAGKPYGYHNMIFSWIDTIGGNYPPPLDAHLVASVSSVRRF

SEQ ID NO: 75164 - protein, 75 aa, Gossypium hirsutum
  Clone ID: GOSHI-09MAY01-C25405_1.pep
LLSEMVSAIKVLGDGFVRMEQMKMEMAREIETMRMEMEMKRTEVILESQQRIVEAFAKAVSERKKKPKRMPLPQS

SEQ ID NO: 75165 - protein, 168 aa, Gossypium hirsutum
  Clone ID: GOSHI-09MAY01-C25755_1.pep
KHNPPALRQAKASASKAEPTITCRRDLETKTSPFTFRTTIPEAYLKPWQSNGASKLILRSCPKVFSNSHSHQQRFLFLFNQNDHKPQPEKGLWRFVYLPNTQALRTENTLEGSPRHITMSICSSITSGIYRILSASSVSKVASEDFATTAALKIDTEDKLKLGGSELK

SEQ ID NO: 75166 - protein, 61 aa, Gossypium hirsutum
  Clone ID: GOSHI-09MAY01-C25775_1.pep
KVFALLFWDNKQKFEFLTFVLTSFFILQWWLIEQADGWIVENISLLVNPNHVRPKKVLGCL

SEQ ID NO: 75167 - protein, 115 aa, Gossypium hirsutum
  Clone ID: GOSHI-09MAY01-C25765_1.pep
DSVVDVGNNNNRYTIIKADFPPYGRDFLNHKPTGRFCNGKLASDFTAENIGFTDYPPAYLSKKAKGNNLLIGANFASASSGYYETTAKLYHTLSLSKQLENYKQYQINMVAIAGK

SEQ ID NO: 75168 - protein, 133 aa, Gossypium hirsutum
  unsure (1)..(133): unsure at all Xaa locations
  Clone ID: GOSHI-09MAY01-C25705_1.pep
SICLVSLTKFTRVKLRVVELFKGSFKAHFEKIYEFMLEVRTQNVGTTHTIIWITRCFXRMYVCLXACKDGYKDGCRRIIVLDGYFLNGYFGGYLLATIGIDVNNGIYSILYVAIEIENQTSWGRLLELLSLDL

SEQ ID NO: 75169 - protein, 167 aa, Gossypium hirsutum
  unsure (1)..(167): unsure at all Xaa locations
  Clone ID: GOSHI-09MAY01-C25695_1.pep
MAVVSSAHSTIFSKTSLFHHINGFKRFSFCLPFSSSAVASLSSKKKWRQPVASSMLELGGIKIAKDDVVRDDPTNNVPDTIFSKLGLQLHRRNNHSLGILKNGIYEYFETNVPYMFHKFDDLWPHVLVXHDFDDSLFPLNMLPRVLWSYYVTLKWLRGVQCHSTNFF

SEQ ID NO: 75170 - protein, 95 aa, Gossypium hirsutum
  unsure (1)..(95): unsure at all Xaa locations
  Clone ID: LIB3048-001-Q1-L1-F12.pep
PLKWFKRFSFFXPFSSSARASLSSNKKWKQPVAYSMLELGRIKIAKDHVVKDDPTNNVPDTIFSKLGLQLHRMNNHPLGILKNGIYEYFDTNFPN

SEQ ID NO: 75171 - protein, 45 aa, Gossypium hirsutum
  Clone ID: GOSHI-09MAY01-C25645_1.pep
CAVLAFVLVGLLYGFFIAIICGQRINERHYHGLAKQGLTKVCRKN

SEQ ID NO: 75172 - protein, 199 aa, Gossypium hirsutum
  unsure (1)..(199): unsure at all Xaa locations
  Clone ID: GOSHI-09MAY01-C25675_1.pep
MIGKSRTLKGVRFSSRGSSTGSNTLGSAATDSQSTGDETLTQSAEEVPGSPAEATKGTKRKREPTNMKDIWNLQPGTRIVVDANQYGQLIGKEASKLAEFLCTIARTGSICPLNTKHWKHLSKYVLENILRIVHEKFDLQGKVEDSDILSHVGKXPKKFKLTLKTRYYKKMVQEGRSIEEIYKTNPPGVQDDQWKWLAE

SEQ ID NO: 75173 - protein, 107 aa, Gossypium hirsutum
  unsure (1)..(107): unsure at all Xaa locations
  Clone ID: GOSHI-09MAY01-C25665_1.pep
IARWFLVNGPLIEPKAITGMTPFHXPVCNSIQSDNHATVKTLLEYNAHCSADDDERMTPIKHISKGPGSEKLQELLHRHLEEQRKRWALEACREAXAKMDELEKELS

SEQ ID NO: 75174 - protein, 151 aa, Gossypium hirsutum
  unsure (1)..(151): unsure at all Xaa locations
  Clone ID: GOSHI-09MAY01-C25605_1.pep
MVFHSISETRNNSTETVTETEGVVMASSSALKSQPLHNFQLHDLKWAMNHSNNQRLRKLADSSQKSPQRSDTDTDSDHNPKGNTVREAPFNNGASSGSSLDHKTGKSEKKVINGPDSLVDSDSLGRKXAPPAGRSKIYIRLRTKNHNLLRR

SEQ ID NO: 75175 - protein, 290 aa, Gossypium hirsutum
  Clone ID: GOSHI-09MAY01-C25635_1.pep
PTRPQVSPKACGHTQGRKVVSREEAVMRIKAAVDARKESGSDIVIVARTDSRQALSLEESLWRSRAFADAGADVLFIDALSSKEEMKAFCEVSPLVPKMANMLEGGGKTPILAPLELEEIGYKLVAYPLSLIGVSIRAMQDSLTALNGGRIPPPGSMPSFEEIKEILGFNNYYEEEKRYATSKYQLYADREGSNAYSIQRVRDDSEQRGQSPQDPVVEVITPDVYTKYGADGSRDPFSGIWSRTLRIKITGRDGFEKPDVRVPAGFLEGITNIVPALGGVNLKALLDDAA

SEQ ID NO: 75176 - protein, 279 aa, Gossypium hirsutum
  Clone ID: GOSHI-09MAY01-C25625_1.pep
PTRPGRVGLTSRYKIQSKMGEGTLGLVLECWDRERKEMVAIKIVRGVKKYREAAMIEIEMLQQLRKHDKGGNRCVQIRNWFDYRNHICIVFEKLGPSLYDFLRKNNYRSFPIDLVREIGRQLLECVAFMHDLNLIHTDLKPENILLVSPEYVKIPDYKGALRSPKDSYFRRLPKSSAIKVIDFGSTTYERPDQNYIVSTRHYRAPEVILGLGWSYACDIWSVGCILVELCTGEALFQTHENLEHLAMMERVLGPPLPQHMLKRVDRHAEKYVRRGRLDW

SEQ ID NO: 75177 - protein, 95 aa, Gossypium hirsutum
  Clone ID: LIB3048-041-Q1-L1-B4.pep
DLKSATMKMEMFAHLKNHVKGGNRCGQIRNWFDYRTHIGIGFEKLGPSLYDCLPKNNYRSFPIDLVREIGRQLLECVAFMHDLNLIHTDLKPENI

SEQ ID NO: 75178 - protein, 291 aa, Gossypium hirsutum
  unsure (1)..(291): unsure at all Xaa locations
  Clone ID: GOSHI-09MAY01-C25375_1.pep
MASNPNEASADDFLEQILGFPNFAPSETGLAGPDGGLTGTTAGAGTPMFLQLSSGDGASHLGGIGGGGXAPFPGQVFPLGLSLDQGKSGGFLKPEEGSGGAASRFRDEVVDGRASSVKNVFHGSPMPATVAPSPHPPSLRPRVRARRGRATDPHSIAERLRRERIAERIRALQELVPSVNKTDRAVMLDEIVDYVKFLRLQVKVLSMSRLGGAGAVAPLVTDIPLSSVEDESGDGGRNQPAWEKWSNDGTERQVAKLMEENVGAAMQFLKSKALCIMPILLATAIYHSQPL

SEQ ID NO: 75179 - protein, 180 aa, Gossypium hirsutum
  Clone ID: GOSHI-09MAY01-C25325_1.pep
RDAEFQFDIDFEEPELDLNPKMATDDFMSRAPFQLGNGFVSNHFPLSKLEECFEEDEEESEEETEQPCFSTFKALERIPSTSKLSMSFKNTSLGDKSQKYSKFSGTKQENGYLNNSSGHRSANEQLPGNVSFVKLADMNEEEWNLFLEKFQELLYPGFEKRKSVTLGQKQIQRLGTSCQF

SEQ ID NO: 75180 - protein, 145 aa, Gossypium hirsutum
  Clone ID: GOSHI-09MAY01-C25205_1.pep
MASRLAMLKHSAATDYGSFLGLRRWIHASALPPPLGAPIGHPPPSQSLVFPESDQTPESNNNSNIGFGFGFCFPIFPLGGGSMELMAVPKKKVSRHKRGIRNGPQALKPIPVIIRCKSCGRVKLPHFFCCSGDRGHNNERDDSSG

SEQ ID NO: 75181 - protein, 42 aa, Gossypium hirsutum
  Clone ID: LIB3149-006-Q1-K1-A8.pep
EGRSQAYPIQKHVRIICMRKTLLGWHDNVGGQAYTDSVIKIG

SEQ ID NO: 75182 - protein, 111 aa, Gossypium hirsutum
  Clone ID: GOSHI-09MAY01-C26945_1.pep
MAREGQKNTMFIEQNTGDYENGDLQKNLDDDGREKRTGTWVTASAHIITAVIGSGVLSLAWAIAQLGWVVGPAVLIAFSFITYFTSTLLADCYRAPDPVHGKRNYTYMDVV

SEQ ID NO: 75183 - protein, 121 aa, Gossypium hirsutum
  Clone ID: GOSHI-09MAY01-C26875_1.pep
MLQIAFSSYSWLLTASNQKDGMLFPVALSFLVAILGISLCHVWTIRKPKKDIAPLPPGPRGLQIVGYLPYLGTDNLHLVFTDLAAAYGPIYKLWLGNKLCVVISSAPLAKEVVRDNDITFS

SEQ ID NO: 75184 - protein, 102 aa, Gossypium hirsutum
  unsure (1)..(102): unsure at all Xaa locations
  Clone ID: GOSHI-09MAY01-C26835_1.pep
QFHISDRPWEVLRNAVSKTYNRITDLRKEISSLKKSVVSAEDAASKAKADLEAAESKLTLVEGEPVLGDNPTQLKHLKSVAXKTNEETVSMHDXLEAKEALF

SEQ ID NO: 75185 - protein, 384 aa, Gossypium hirsutum
  unsure (1)..(384): unsure at all Xaa locations
  Clone ID: GOSHI-09MAY01-C26555_1.pep
IPNPDFRACKGNTSFTRRRQALKGCSLEKCTFLRAKYQPGFEEEIVPREGESALSGRGAGEWSTVPYAPQGPDRNGNKRMSSLESPIMLLTGHQSSIGTVKFNPAGTVVASGSHDREIFLWNVHGDCKNFMVLKGHKNAILDLHWTTDGSQIISASPDKTLRAWDVETGKQIKKMAEHSSFVNSCCPSRRGPPLVVSGSDDGTAKLWDMRQRGAIQTFPDKYQITAVSFSDASDKIFTGGIDNDIKVWDLRKGEVTMTPQGHQDMITGMSLSPDXSYLLTNGMDCKLCIWDMRPYAPQNRCVKIFEGHQHNFEKNLLKCGWSPDGSKVTAGSSDRMVYIWDTTSRRILYKLPGHTGSVNESVFHPNEPIIGSCSSDKQIYLGEI

SEQ ID NO: 75186 - protein, 76 aa, Gossypium hirsutum
  Clone ID: LIB3145-022-Q1-K1-E3.pep
MEIVPREGESALSGPKANGMANCPDSLQGPNRNGNKRSSSLESPIMLLTGHQNSIYTVEFNPPGTGVASGSHDKEI

SEQ ID NO: 75187 - protein, 146 aa, Gossypium hirsutum
  Clone ID: GOSHI-09MAY01-C26525_1.pep
HKKRGTRKGRGNKLSPQIQRIVGDATVHYGNGRFKEAISVLKEGVQLEPKFPHLYHMLGLSYKALGDNKRAFQFYIIAGLLKPKDPDLWKLLFTWSIEQENVSLTCHCLSKAIMADPTDISLRYLQASLYDELGDYQKAAESFEQI

SEQ ID NO: 75188 - protein, 142 aa, Gossypium hirsutum
  Clone ID: GOSHI-09MAY01-C26415_1.pep
ILQDAFVLCRVFQKSGSGPKNGEQYGAPFIEEEWEDDEAVFVPGQQDASAHEEAANEDAFVEVNDIDQNLDVGNPSENNILPLNGYCGESSNHVENSREFSEDDQNPRNSMHENAFLPSSFYYGESSNCGEHSMEFKEDYQK

SEQ ID NO: 75189 - protein, 145 aa, Gossypium hirsutum
  Clone ID: GOSHI-09MAY01-C26775_1.pep
MNMGNANGEDAIEALQAQAHIWRHAFNFVSFMSLKCALDLGILDIIHDHGKPMTITQLVAALQMLNPTKACDIYRLMRILVHSDFFARQKLDNDAQEEGYVLTNSSRILLKNNPFCITPTLKATMDPIITKPWSFLGTWFQNDDH

SEQ ID NO: 75190 - protein, 73 aa, Gossypium hirsutum
  unsure (1)..(73): unsure at all Xaa locations
  Clone ID: LIB3048-042-Q1-L1-H12.pep
MIYHCCWLQSHPTKHXDIYRLMRILVHSDFFARQKLDNDAQEEGYVLTNSSRILLKNNPFCITPTLKATMDPI

SEQ ID NO: 75191 - protein, 160 aa, Gossypium hirsutum
  unsure (1)..(160): unsure at all Xaa locations
  Clone ID: GOSHI-09MAY01-C26155_4.pep
MSSESSMIKRLDAKVALITGGASGLGVCXARLFVKHGARVLIAAMQDELGHSLCQELGADSTSYVHCDVPCVSDVGNAVYXAVSMFGKLDIMFNNAGLIGDREVRVTDASTDNFKRVFDISASGGFLGAKYAAKVMVPAKKGCILFSSSISSKISIGLAH

SEQ ID NO: 75192 - protein, 218 aa, Gossypium hirsutum
  Clone ID: GOSHI-09MAY01-C26155_3.pep
LGTENISYVHCDVTCESDVENAVNLAVCPFVRGRVGFNNAGLIGDGDVRVTDASTDNFKRVFDINVLGGFLGAKYAAKVMVPAKKGCILFSSSISSKISIGLPHAYKASKHGVVGLTKSLAVELGEHGIRVNCISPHATVTPLFLTTLGMFDKKKGEEMIATSAVLKGTVLEPEDFAHAALYLASDEAKFISGVNVPVDGGYNLSNQSWKMGFAALFG

SEQ ID NO: 75193 - protein, 300 aa, Gossypium hirsutum
  unsure (1)..(300): unsure at all Xaa locations
  Clone ID: GOSHI-09MAY01-C26155_2.pep
PAGPVPKFRARPTRSALEGEIFFTGTVSSESGITKRMAGQAALITGGASGLGECTAKLFVKNGAEVLIADIQDELGHSVCQELGTENISYVHCDVTCESDVENAGNLAVSKHGKLVIMFNNAGIPGGNVVRVTHAGTEDFKRVFDVNVLGGFLGAKYAARVIPPAEKGCILFSASLASKISFGLPHAYKASKHAVVGLTKSLAVELGEHGIRVNCISPHATVTPLFLTTLGTXDKKKGEEMIATSAVLKGTVLEPEDFAHAALYLASDEAKFISGVNLPVDGGYSLSNQSWKMGFAALFG

SEQ ID NO: 75194 - protein, 274 aa, Gossypium hirsutum
  Clone ID: GOSHI-09MAY01-C26155_1.pep
MASESLVTKRLDGKVALITGGASGLGECSARLFLKHGAKVLIADIQDELGHSLCKELGTENFSYVHCDVTCESDVENAVNLAVSKYGKLDIMFNNAGLIGDGEVRVTDASTDNFKRVFDINVLGGFLGAKYAARVMVPAKKGCILFTSSLASKISFGSPHAYKASKHAVAGLTKSLAVELGEHGIRVNSISPHAISTPMFQKSIGIPDKKKGEEMIAASAVLKGTVLEPEDFAHAALYLASDEAKFISGVNLPLDGGYSLSNQSWKLGFAALFG

SEQ ID NO: 75195 - protein, 76 aa, Gossypium hirsutum
  Clone ID: uC-gsronu33B074f06b1.pep
MSCDSSITKRLDGKVALITGGASGLGKCTATLFVKHGAKVLIADIQDELGDSVCQELGTENISYVHLRHYMPILCF

SEQ ID NO: 75196 - protein, 129 aa, Gossypium hirsutum
  Clone ID: GOSHI-09MAY01-C26135_1.pep
EVGNEKVDKRPYKELTLRPNSPKHPSGRPQPSTTPRTLTLNQTSKELSPIAGENPKLAMSSETTCLKKKLELEKKPRRTRPASEQSRSRRQSSRIQAESGLPHWMSRDKSHDLQRRDDQTSDISSDMTD

SEQ ID NO: 75197 - protein, 135 aa, Gossypium hirsutum
  Clone ID: GOSHI-09MAY01-C26075_1.pep
GPTGLLIPFNGSTAGTISTISLTHHDKVMLLGHSDSYTQDQTMQVTIAFNRFGEGLVQRMPRCRHGYFHVVNNDYTHWIMYAIGGSANPTINSQGNRFLAPDKMNNKEVTKRENTPRKKWKKWNWRSRGDLMLNG

SEQ ID NO: 75198 - protein, 55 aa, Gossypium hirsutum
  Clone ID: GOSHI-09MAY01-C26395_1.pep
LIPYEFRRGLPFNCWTNFQGIPTDLQRKQKLMHHAQLHSPYSKVLSNNNLDLFTN

SEQ ID NO: 75199 - protein, 302 aa, Gossypium hirsutum
  unsure (1)..(302): unsure at all Xaa locations
  Clone ID: GOSHI-09MAY01-C26355_1.pep
LILTLCLSERFDTFRTLLCADGCSMIDRRMGIYGYPIEIQALFFMALRCALSMLKHDAEGKECIERIVKRLHALSYHMRSYFWLDFQQLNDIYRYKTEEYSHTAVNKFNVIPDSIPDWVFDFMPTRGGYFIGNVSPARMDFRWFCLGNCIAILSSLATPEQSMAIMDLIEARWDELVGEMPLKIAYPAIESHEWRIVTGCDPKNTRWSYHNGGSWPVLLWLLTAACIKTGRPLIARRAIDLAETRLFKDSWPEYYDGKLGRYIGKQARXYQTWSIXGYLVAKMMLEDPSHLGMISLEEDKQI

SEQ ID NO: 75200 - protein, 56 aa, Gossypium hirsutum
  Clone ID: LIB3146-057-Q1-K1-F12.pep
HASAHASGGGYFIGNVSPAGMDFRWFCLGNCIAILSSLTTSYHPTSIMDLTQAGGH

SEQ ID NO: 75201 - protein, 188 aa, Gossypium hirsutum
  Clone ID: GOSHI-09MAY01-C26375_1.pep
VLGIDGGYKGFYAKNTITLTPKFVDDIHKRGGTILGTSRGGHDSVKIVDRIQDRGINQVYIIGGDGTHKGAAVIFEEIRRRGLKVAVAGIPKTIDNDIPVIDKSFGFDTAVEEAQRAIKAAHVESESIGNGIGLVKLMGRYCGFIAMYATLASRDVDCCLIPESPFYLEGSGGLYEYIEKRLKENGHY

SEQ ID NO: 75202 - protein, 105 aa, Gossypium hirsutum
  Clone ID: GOSHI-09MAY01-C26295_1.pep
ALYAFYHERRPESFVCPPTPEWKRSSDLDLNGEATADDDDDDDDGAPTALPVRGHAQFPGSHPVSLNRSLICLVLFFFLSSSLFWFLILHFVEISALSLRTLFGL

SEQ ID NO: 75203 - protein, 100 aa, Gossypium hirsutum
  Clone ID: GOSHI-09MAY01-C26285_1.pep
MFPSNHQLSGQPRALAVVETTTTSIQGDLNEASLASRDEVQNGGFSEAQSIMESSEKLQDDLRMLGMKIKQHEDSLELLRNQKNKLDDTILDMQGILFLF

SEQ ID NO: 75204 - protein, 109 aa, Gossypium hirsutum
  Clone ID: LIB3048-009-Q1-L1-C11.pep
MFPSNHQFSGQPRALAVVETTTTSIQVDLNEASLVSRDEVQNGGFSEAKSIMESSEKLQDDLRTLGMKIKQHEDSLKLLRDQENQLDDTILGMQVKLGKYHSSSLPVVN

SEQ ID NO: 75205 - protein, 248 aa, Gossypium hirsutum
  unsure (1)..(248): unsure at all Xaa locations
  Clone ID: GOSHI-09MAY01-C26235_1.pep
AMADESVMVKGNGTIFLAGPPLVKAATGEEVSAEDLGGATVHCKTSGVSDYFAQDEMHGLALGRNIVKNLHLAGKQGMLSSSPPANLEFKEPLYDVKELRSIAPVDHKQQFDVRSVIARIVDGSEFDEFKKLYGTTLVTGFARIYGQPVGILGNNGILFNESALKGTHFIELCSQRNIPLVFLQNITGFMVGSRSEANGIAKSGAKLVMAVSCAKVPKVTIMIGXSFGAGNYAMCGXRAFNPNFLFLW

SEQ ID NO: 75206 - protein, 63 aa, Gossypium hirsutum
  unsure (1)..(63): unsure at all Xaa locations
  Clone ID: uC-gsronu33B101g07b1.pep
VTRPVKGNGTIFLAGXPLVKAATGEEVSAEDLGGATVHCKTFGVSDYLAQDEMHGLALVRNIF

SEQ ID NO: 75207 - protein, 103 aa, Gossypium hirsutum
  unsure (1)..(103): unsure at all Xaa locations
  Clone ID: GOSHI-09MAY01-C27905_1.pep
MVVLSSATSMRTKKTKAVGIPVVDLSLDRSTVSELIVKACEDYGFFKVINHGVPSDTISRLEDEGVRFFDKEAGDXQRAGPATPFGYGLKNIGLNGDKGELEY

SEQ ID NO: 75208 - protein, 284 aa, Gossypium hirsutum
  Clone ID: GOSHI-09MAY01-C27865_2.pep
PCVRPRVRPRVRPRVRSILLDDPVNGEKEAIPNNNSARGYEVIDAMKAALESACPNTVSCADILAIASEQSVSTLAGGPSWAVPLGRRDGFTANRTLANSNLPGFNNTLDRLKNRFSNVGLNTSIDLVALSGAHTFGRAQCLTFTSRLYNFTGVGDTDPTLNTTYLEELRQICPQGGNSSVLTNLDPTTPDGFDNNYFTNLQVNRGLLRSDQNLFSTEGADTIEIVNRFSSNQTAFFESFVESMIRMGNISPLTGTEGEIRSNCRAVNSATIRSNSDAALVSSI

SEQ ID NO: 75209 - protein, 187 aa, Gossypium hirsutum
  Clone ID: GOSHI-09MAY01-C27865_1.pep
MPEKMACFQYIVAALCFAVLLEGSLSKAQLTPTFYDETCPNVTAIIRHVLVNASFSDPRIGASLIRLHFHDCFVQGCDASILLDDPVNGEKEAIPNNNSARGYEVIDAMKAALESACPNTVSCADILAIASEQSVSTLAGGPSWAVPLGRRVGFTANRTLANSNLPGFNNTLDRLKNRFINVGLNTT

SEQ ID NO: 75210 - protein, 173 aa, Gossypium hirsutum
  unsure (1)..(173): unsure at all Xaa locations
  Clone ID: AI055279.1.pep
MPEKMACFQYIVAALCFAVLLEGSLSKAQLTPTFYDETCPNVTAIIRHVLVNASFSDPRXGASLIRLHXHDXXCQGCMRSIXLDDPWNGEKEAIPNIIHFGFXKVLDALMVALKMACPKCVSCPEFLLLRFNHFXKNLPGGLYWAVHLGXMYGFPRNRKLANQTAQFYNLLTV

SEQ ID NO: 75211 - protein, 38 aa, Gossypium hirsutum
  Clone ID: LIB3135-022-Q1-K1-F4.pep
MGNISPLTGTEGEIRGRGRAANSATIRSNSDAALVSSI

SEQ ID NO: 75212 - protein, 69 aa, Gossypium hirsutum
  unsure (1)..(69): unsure at all Xaa locations
  Clone ID: LIB3048-029-Q1-L1-F9.pep
CXXKGCXXREGCFAPTTFVSLRLXYSRFIAFLXAICXSIPGKAGPLQCGSSHLRKKGDVVQSANXGHFR

SEQ ID NO: 75213 - protein, 59 aa, Gossypium hirsutum
  Clone ID: uC-gsronu33B050e04b1.pep
ALKSYNILFVLILSRKIASLLPIFLSLQFSKYYIELPRAASELDLIVAEFTARQFRTRG

SEQ ID NO: 75214 - protein, 79 aa, Gossypium hirsutum
  Clone ID: GOSHI-09MAY01-C27525_2.pep
QTIRGFTNIKDNQPHIDKFIYTYVSIYGHKILKFWVYNRRFKICNRKNPFENATKCSNIWYLQHRNNHYIQTIKQLYST

SEQ ID NO: 75215 - protein, 161 aa, Gossypium hirsutum
  Clone ID: GOSHI-09MAY01-C27525_1.pep
MRGLMNKLVSRSLSVAGKWQQQQLRRLNIHEYQGADLMNKYGINVPKGVAVSSIDEVKEAVKSAFPNENELVVKSQILAGGRGLGTFQNGFKGGVHIVKADQVEDIAGKMLGQILVTKQTGPQGKVVSKVYLCEKLSLVNEMYFAITLDRKTAGPVCFQTL

SEQ ID NO: 75216 - protein, 59 aa, Gossypium hirsutum
  Clone ID: LIB3048-024-Q1-L1-D3.pep
SLSVAGKWHQQHLRGLNIHEYHGAGLMNKYGINVPKGVAVFYNDPLYESIICPYLETYV

SEQ ID NO: 75217 - protein, 275 aa, Gossypium hirsutum
  Clone ID: GOSHI-09MAY01-C27605_2.pep
EICCALELSTEPLFVGKVAYTGKHCWVSYDDIFAGKANSKLVPEYPAEWLLQFASGIKTIVLVPVLPHGVLQLGSLEMVAEDLSILSCIKDRFACKNIHTQLISSDISSPFEKLEASSSALMGPLNSKDSNAVNSVESNKLLALDHIVPLLSIQNEFKVPGIIPSEILESESENRISVPLVSLSELPSPLSQSVSVDQLAVGESELFGFYCLKEELQAYPECNAYRVGECGEILDEVMNPYPAGYFLEPPDIDDVNFLSFPINFILWGGGGGIFL

SEQ ID NO: 75218 - protein, 133 aa, Gossypium hirsutum
  Clone ID: AI055087.1.pep
PHLKYAWGEGFVGKVAYTGKHCWVSYDDIFAGKANSKLVPEYPEEWLLQFASGIKTIVLVPVLPHGVLQLGSLEMVAEDLSILSCIKDRFACKNIHTQLTSSEISSPFEKLEASSSALMGPLNSKDSNAVNKC

SEQ ID NO: 75219 - protein, 121 aa, Gossypium hirsutum
  Clone ID: GOSHI-09MAY01-C27335_1.pep
MGPHLITAVAKFDLLSSTPSFSPLIVGLICPFALKYCINLRVGVARLYIDLIHAGRLFFFQLNRIVLEADHQPAAAPAGNGSRWQRALRLVCRRIITHARRSPPALEFDVASFHTLTMLSL

SEQ ID NO: 75220 - protein, 164 aa, Gossypium hirsutum
  Clone ID: GOSHI-09MAY01-C27275_1.pep
AAFVGIFQGVICMHRKIASKDHKLVYWVAGALSALSVLLVKKSRRSELALYVLPRATESLWYISVNRHLLPDVKNSEVALFCACMGGIMYYLEYEPDSIAPFLKGLIRRFLSSRISNPGSSFDRTASYTYLQTLDAMKKPKPEDNPQLDTSAPKQYSLESIQGL

SEQ ID NO: 75221 - protein, 181 aa, Gossypium hirsutum
  Clone ID: GOSHI-09MAY01-C27235_1.pep
MFRARSICARLSTHFKTRPFCSSIKDGKNKKKNNIDIVDGKIESNVSTFNESYRQLDNLDFLTAAKILFTHPPKKKKFGLDFHLVQLFFACMPSLALYLVAQYARYEMRKMEAELEEKKKHDEEEEMKRKQEEEEKDKEVYQIAPNPELFEVKRRLGKLEEAVKEIAAESKKQSAVRITKT

SEQ ID NO: 75222 - protein, 80 aa, Gossypium hirsutum
  Clone ID: LIB3145-044-Q1-K1-D5.pep
FYIWKISWFTAGLKNYICSVTAVYLVAQYARYEMRKMEAELEEKKKHEEEEMKRKQEEEEKDKEVEQIAPDSELFEVKRR

SEQ ID NO: 75223 - protein, 397 aa, Gossypium hirsutum
  unsure (1)..(397): unsure at all Xaa locations
  Clone ID: GOSHI-09MAY01-C20975_1.pep
PTRPVFITILYGEPSRPPSRPLEPIPGRAISRPVKKREKLAFAIGKSEEKCDVFKGRWVRDELTRPLYEESECPYIQPQLTCQEHGRPDTEYQKWRWQPHGCDLPSFNATLMLETLRGKRMMFVGDSLNRGQYVSMICLLHTLIPEHAKSMKSYNNDALTVFRAKDYNASIEFYWAPFLLESNSDNAVVHRVPDRIMRRGSINKHGKHWKGVDILVFNTYLWWMTGLDIKILKGSFEDEEKEIIEVSAEDAYRLAMRSMLRWVRKNMDRKKTRVFFTSMSPTHGKGIEWGGEPGKNCXNQTTIIEDPNYWDSNSRKSIMKVIAEEFSKFKLPITFVNITQLSSYRIDAHTSIYKKQWSPLTAEQLANPVSYADCVHWCLPXFKTTWMNFSFSKLTIP

SEQ ID NO: 75224 - protein, 146 aa, Gossypium hirsutum
  unsure (1)..(146): unsure at all Xaa locations
  Clone ID: GOSHI-09MAY01-C20905_2.pep
MILAWILSLSSAMAVARCQDFYSHAGPYVPPPQKVTYLHFFLHDTVSGNNPSAVPIVSPNTTTSTGFGGVIAFDDPLTVGPDITSEVIGNAQGLWVSTGKDVLTLMAYLDIGFTKGEFNRSSIXVLSRNPITESERELAVVGGKGK

SEQ ID NO: 75225 - protein, 186 aa, Gossypium hirsutum
  Clone ID: LIB3584-009-P1-K1-G10.pep
MGGGGESQHRHGSSSLPRLLLPCRTIRSTSPKVTYLHFFLHDTRSGNNPSAVGGGGPYTTTSTGFGGVIAFDDPLTVGPDITSEVIGNAQGLWVSTGKDVLTLMAYLDIGFTKGEFNGSSISVLSRNPITESERELAVVGGKGKFRMAKGYAQLKTYSVNFKTGDAIVEYNVDWEFTIKMIILLAF

SEQ ID NO: 75226 - protein, 99 aa, Gossypium hirsutum
  unsure (1)..(99): unsure at all Xaa locations
  Clone ID: GOSHI-09MAY01-C20745_1.pep
SFGICCGNFIXCDMPYPDLSFADVSSAVVRQNLRPDIPRCCPNSLANIMKKCWDANPEKRPAMEEVVRMLEAVNTSKGGGMIPDDQTPTCLCLTSLRGP

SEQ ID NO: 75227 - protein, 264 aa, Gossypium hirsutum
  unsure (1)..(264): unsure at all Xaa locations
  Clone ID: GOSHI-09MAY01-C20765_1.pep
LDPKRLMDPKTGFCHQTGTYSGLRRPLPLPPINQPLSVAEFCLSLFQRTSTDGSTTFVVNETAGESLSHSQFVSQVRSLAYSLQQRYSLSQNDVAFVVSPPSIHIPVVYFALLSLGIIVSPSNPLSSNSEIAYQIQLSKSVIAFATSKAFHKIPFLXHGTILLDSPEFLSMLTESNIDNIIKSVKVNQSDTAAILYSSGTTGRVKGVMVTHRNLIGILAIIHRYNMDQGKDNGMPPWRPVTFFTVPLFHAFGFFMLLGMVLSAS

SEQ ID NO: 75228 - protein, 81 aa, Gossypium hirsutum
  Clone ID: GOSHI-09MAY01-C20605_1.pep
MAVSATVIGALLGLGTQMYSNALRKLPYMRHPWEHLLGMGLGAVFVNQLVNWDAQLQRDLDNMLEKAKAANERRYFDGDDD

SEQ ID NO: 75229 - protein, 83 aa, Gossypium hirsutum
  Clone ID: LIB3272-050-P1-K1-H8.pep
MAVSATVIGALLGLGTQMYYNALRKLPYMQHPGKHLLGMGLGDDHVTQNVNCHGEFQCYLKTKHFKGPGGSSRNVHFLPSALN

SEQ ID NO: 75230 - protein, 105 aa, Gossypium hirsutum
  unsure (1)..(105): unsure at all Xaa locations
  Clone ID: GOSHI-09MAY01-C20635_1.pep
SFFSKGPNSLYQTLRKPDISAPGADILAAYSPVASPSITTTDPRRVXYYILSGTSTSCPHVAGVAAYVKTFHPHWSPSAIKSALMTTACPMDAPTNQRAEFAYGS

SEQ ID NO: 75231 - protein, 157 aa, Gossypium hirsutum
  Clone ID: GOSHI-09MAY01-C20195_1.pep
YEVVKHVGARYPEANLGAVGWSLGANILVRYLGPESHACPLSGAVSLCNPFNLVIADEDFHKGFNNVYDRALARGLCKIFKKDALLFEDMGGEFNIPLAANAKSVRDFDEGLTWVSFGFKSVDDYYYNCSTCDSIKHVKRPLLCIQAENDPIAPSRA

SEQ ID NO: 75232 - protein, 120 aa, Gossypium hirsutum
  Clone ID: GOSHI-09MAY01-C20155_3.pep
SFHFDFVIFGTNSLCAFALNLAVFLLVGKTSALTMNVAGVVKDWLLIAFSWSVIKDTVTPINLFGYGLAFLGVAYYNHSKLQALKAKEAQKKAAQADEEGGRLLDERESEGTDKKRESEN

SEQ ID NO: 75233 - protein, 175 aa, Gossypium hirsutum
  Clone ID: GOSHI-09MAY01-C20155_2.pep
VPVYKKPHPPPVPVYKKPCPPPVPVYKSPPVPEPHPPPVPVHKPPPVPVYKKRVPPPVPIYKPPPVPVYNKPLPPRVPVYTKPLPPPVPTYNPKPLPPIPYKPLPPLPKIPPFPKKPCPPLPKLPPLPKIPPKYFHHHPPLPKLPPLPKIPPKYFHHHPKLGKWPPLPPFAPHHP

SEQ ID NO: 75234 - protein, 105 aa, Gossypium hirsutum
  Clone ID: GOSHI-09MAY01-C20155_1.pep
EMNIITSLWNGGLKTQHTKTQMQPNGAKEIRSPHFLLPLNANLHDHHLPRFLPSISTTTLPFLSYLLSLRFLPSISTTIPSSENGLLCHPLLPIILKLSCIVLRI

SEQ ID NO: 75235 - protein, 68 aa, Gossypium hirsutum
  Clone ID: AI731355.1.pep
KPKPLPPIPYKPLPPLPKIPPFPKKPCPRRPKLPPLPKIPPKYFHHHPPLPKLPPLPKIPPKYFHHHP

SEQ ID NO: 75236 - protein, 106 aa, Gossypium hirsutum
  Clone ID: GOSHI-09MAY01-C20055_1.pep
LNQKLDLKTSSKGRDFRCVTSIFSRMPYKYMKWKAINKAAMSKEPVMSSNHHYDSQVSKSKHVLLTHNVLEQSKVACERKSPQSRPEFPIPVFFYAYNGPARALVL

SEQ ID NO: 75237 - protein, 85 aa, Gossypium hirsutum
  unsure (1)..(85): unsure at all Xaa locations
  Clone ID: uC-gsronu33B153a06b2.pep
HDWLFAHCWFIHVLPFYILIWNYGYWVSIFILLFFSVFFFLYIRLFFIYFFIYLLIYFLLFFLVCVLFFFIXIFFILLLFITYYF

SEQ ID NO: 75238 - protein, 146 aa, Gossypium hirsutum
  Clone ID: GOSHI-09MAY01-C20045_1.pep
GSVFDSGTGQYSTVLVVRAGGLQDSYFLGDMDPYVIIQYKGQERKSSAARGDGSSPSWNEKFTFKVEYPGSGGDYKLLIKIMDKDTFSSDDFVGQATIFVKDLLAVGADEGSAELHPTKHSVVNAEQRYCGEIVVGLTFTKKEEND

SEQ ID NO: 75239 - protein, 138 aa, Gossypium hirsutum
  Clone ID: LIB3083-028-Q1-L1-A3.pep
MAVGILEGLLVSAKGLQDSDFLGDMDPYVIIQYKGQERKSSAARGDGSSPSWNEKFTFKVEYPGSGGDYKLLIKIMDKDTFSSDDFVGQATIFVKDLLAVGADEGSAELHPTKHSVVNAEQRYCGEIEVGLTLTKKEE

SEQ ID NO: 75240 - protein, 285 aa, Gossypium hirsutum
  unsure (1)..(285): unsure at all Xaa locations
  Clone ID: GOSHI-09MAY01-C20065_1.pep
KDEKAEEKATEEKKGEPPAPTPPPPPFILLVDLHCVGCAKKIEKSIMKIRGVEGVEIDMAQNQVTIKGIIEPQTICAKIMKKTKRRAKVLSPLPPAEGEPIPEVVTSQVSGLATVELNVDMHCQACADQLVVXWPHVTGVQTAVTEHSTGKVTVTGTMDANKLVDYVYRRTKKQARIVPQPEPEPQPEPEKQEEKKEGEEKPTEEAKPEENAEKKEEKSPEEGENKEEGKKEGSAEAEENSGNHGNEEETMKRMIYYYQPLYVIEQMPPAPQLFSDENPNACCIS

SEQ ID NO: 75241 - protein, 47 aa, Gossypium hirsutum
  unsure (1)..(47): unsure at all Xaa locations
  Clone ID: GOSHI-09MAY01-C20275_1.pep
FLHQPPKTNXKVHGMYATFFLVICLFAGVDRRKKAYLEEGGEEGKKN

SEQ ID NO: 75242 - protein, 46 aa, Gossypium hirsutum
  unsure (1)..(46): unsure at all Xaa locations
  Clone ID: LIB3828-013-Q1-N6-G11.pep
NTRPKTNWKVHGMYATFFXLVICLFAGVDRRKKAYLEEGGEEGKKN

SEQ ID NO: 75243 - protein, 259 aa, Gossypium hirsutum
  Clone ID: GOSHI-09MAY01-C20215_1.pep
DAWGSGTLVHGNQHDNSSLSIGRVTAGVEFSRPLRPKWSGTAGLFFQRAGAHDEKKNPLIKDFYGSPLTASGKLYDDMLLAKVECVYPGSGNKGSSMLRPRTRGGLPVIPDWLYFNRVNARVSKSVKLGPARLLLRLSGGHVVGNFPPHEAFAIGGTNSVRGYKEGAVGSGQSYVVGSSEVSLKMLGPVEGVIFADYGHDLWSGPNVPGNPAAARNKRGSGYGYGIGIRLNSPLGLLRLEYAFNDRFAKRLHFAFGNPK

SEQ ID NO: 75244 - protein, 116 aa, Gossypium hirsutum
  Clone ID: GOSHI-09MAY01-C21975_1.pep
DLMAQVSQLQNENHQILTTVSITTQRYLNVEAENSVLRAQANELSHRLQSLNDIIDSLNGCNNNIGGADGGGDCGGFNVATIGFNEMVDHSFINPFNLAYLNQPIMASADNNMFQY

SEQ ID NO: 75245 - protein, 215 aa, Gossypium hirsutum
  Clone ID: GOSHI-09MAY01-C21935_2.pep
PRVRDKAGERNEPYDLRSKSLIVVKVWCLILVFVGTFVGGVSPYFLKWNQGFLVLGTQFAGGVFLGTAMMHFLSDANETFEDLTSKEYPFAFMLACAGCGLTMLADCVISYVYGKGKNSCNNGDLELQGAEQSKTNPHGQGDPPVGNGTDTKCAQSSSLTSASSFGDSVLLIIALCFHSVFEGIAVGVAKTETDAWKALWTISLHKIFAAIAMGI

SEQ ID NO: 75246 - protein, 188 aa, Gossypium hirsutum
  unsure (1)..(188): unsure at all Xaa locations
  Clone ID: GOSHI-09MAY01-C21935_1.pep
FLFFFFLYLSLFISVTCHGGSDADGDDDDDDKAGERNEPHDLRSKSLILVKVWCLILVFVGTFVGGVSPYFLKWSAXFLVLGTQFAGGVFLGTAMMHFLSDANETFGDLTTKEYPLAFMLACAGYLLTMLADCVISYVYGKGKNSCNNGDLELQGAERSKTNPHGQGDPPSSSLTSARSFGDSVLLIV

SEQ ID NO: 75247 - protein, 182 aa, Gossypium hirsutum
  Clone ID: GOSHI-09MAY01-C21925_1.pep
MVAESWFRSFWKIPRRHEGGSERVEIGVLAFEVASLMSKLVHLWRRLSDKQVSRLREEIMTCVGIKKLVSEDEGYIGHLICAEMIETVTHVAKSVARLAKKCSDPGLKSFELAFTELVQIGADPYCWTFSLKKMDKKVKKMERYISVNATLYQEMEMLLDLEQTLRRMKAIDAEPENLLEFQ

SEQ ID NO: 75248 - protein, 202 aa, Gossypium hirsutum
  unsure (1)..(202): unsure at all Xaa locations
  Clone ID: GOSHI-09MAY01-C21885_1.pep
MAEHLASIFGTEKDRVNCPFYFKIGACRHGDRCSRLHTKPSISPTILLSNMYQRPDMITPGVDAQGNPIDPRKIQQHFEAFYEDLFEELSKYGQIESLNICDNLADHMVGNVYVQFREEEHAANAVKNLSGRFYAARPIIVDFSPVTDFREATCRQYDENTCSRGGYCNFMHLKXISRELRRQVLGRSKEQVYRAEPTACIA

SEQ ID NO: 75249 - protein, 112 aa, Gossypium hirsutum
  Clone ID: GOSHI-09MAY01-C21845_1.pep
MEKQRKKEKPASSRQIFCLSGPSHLTSVDWDNFHDRRSVAASLVQGVYILERDRQENRKDPLAHAPAWWEFFNFQLFHILVDDVDNSIFGAIFQSKPWYFTYNHSSQSSSHY

SEQ ID NO: 75250 - protein, 243 aa, Gossypium hirsutum
  Clone ID: GOSHI-09MAY01-C21865_1.pep
FSRRIYYKGALPNCPVKKKVERSLDGQIAEIVYKGEHNHPKPQPPKRNSSQGLGVTSDGTGQDANNSLWSNNHNERSEGSETRAENHSEVRLSVLPAYQVKALAPYEHVTTGGASENSAGLSGECEEASKEGADVESKSKRRKNENQSSEVGTLGECIQEPRVVVQSCTDSEIMGDGFRWRKYGQKVVKGNPYPRSYYRCTNVKCHVRKHVERASDDPRAFITTYEGKHNHEMPLRNTNHVTA

SEQ ID NO: 75251 - protein, 154 aa, Gossypium hirsutum
  Clone ID: GOSHI-09MAY01-C21835_2.pep
DHCGHPFKVSECRFATSDRTVTCNEEPNADSYEVNPDMISQLEAAGLSFVGRDESGRRMEIVELPSHPFFIGVQFHPEFKSRPGKPSALFSGLIAASCGELDELLNKSSHVSKVVGSGISNGKATYNGHQNGSYFNALNGSLNGVCVNGNGVHH

SEQ ID NO: 75252 - protein, 317 aa, Gossypium hirsutum
  unsure (1)..(317): unsure at all Xaa locations
  Clone ID: GOSHI-09MAY01-C21835_1.pep
LVTNVYDMLHDPVXIAMVGKYVGLKDSYLSVLKALLHASVGCRKKLVVEWVEASHLEDITAKVDPDTYKAAWNRLKGADGILVPGGFGDRGVQGKILAAKYARESKVPFLGICLGMQIAVVEYARSVLGLYDANTEEFDPQTSNPCVIFMPEGSKTHMGGTMRLGSRRTYFKVPDCKSAKLYGDATFVDERHRHRYEVNPDMISQLEAAGLSFVGRDESGRRMEIVELPSHPYFIGVQFHPEFKSRPGKPSALFSGLIAASCGQMDLLLNKSDHLSNGMANGINGKATSKPRANGNCFKSSNGSLNGVYSNGNGVHH

SEQ ID NO: 75253 - protein, 147 aa, Gossypium hirsutum
  unsure (1)..(147): unsure at all Xaa locations
  Clone ID: GOSHI-09MAY01-C21435_1.pep
MYLDKDGKDREINIRMETRSRVKDSIPAWIRXSVQAPGEIPYSGIYYDPPEEEKYVFKHPHTKRPKSLRIYESHAGMICMDAATGSVNRNLDNPLLVVPLKPSVAEFPFAKKEEQSDRLSNLAGAGYQAFEDAILNKLTKTAEKQQK

SEQ ID NO: 75254 - protein, 88 aa, Gossypium hirsutum
  unsure (1)..(88): unsure at all Xaa locations
  Clone ID: LIB3582-021-P1-K1-H2.pep
MMETKDEFMTFEPEQAQVGSRGPTLVINEMVMRNVKSYAGEQRVGPFHKIRMETRSGVKDXIPAWIKFSVQAAGEIPYSGIYYDPPEE

SEQ ID NO: 75255 - protein, 100 aa, Gossypium hirsutum
  Clone ID: LIB3083-064-Q1-L1-G5.pep
ELFSRFGEFEDIVVNSSKKKGSALVVMATKHAVDSATGSVSGNLDNPLLVVPLKPSVAEFPAPKKEEQSDRLNNLVGAGYQAFEDAVLNKLTKAAEKQQK

SEQ ID NO: 75256 - protein, 132 aa, Gossypium hirsutum
  Clone ID: GOSHI-09MAY01-C21425_1.pep
SVTVSELIEASEQGLGFPSDIPQSPKPQDDKCDASDLPCEAWWKRRAVSLYVHAKETNAFWSVFIAAAVMGLVILGQRWQQERWQALQLKWQLSINNEKTGRVLDSIYRLKEVIVGGHCRGSFVRGTFPGDS

SEQ ID NO: 75257 - protein, 90 aa, Gossypium hirsutum
  Clone ID: LIB3083-082-Q1-L1-A6.pep
HPNNLHLTSLLLCFFLSSSSQVLAVAREGAPHKRTSTVATNDDFFKTIYGIEHPTSLLIVDAELPLKLQCLVILGQRWQQESQGPSQLQQ

SEQ ID NO: 75258 - protein, 86 aa, Gossypium hirsutum
  Clone ID: GOSHI-09MAY01-C21765_1.pep
MDFLFQQGIFFFLFQFGSIFLTYFLSLSTVSNPASLLSKPSELGICSQLQVIHLRSNRLIGNVTADFSRLSHLKELDLGSNTLNGE

SEQ ID NO: 75259 - protein, 64 aa, Gossypium hirsutum
  Clone ID: GOSHI-09MAY01-C21085_1.pep
SIQHLSSLLTFSVYSRSFLLLFLFTPAPSLFSSFNPLSRLKKFGCLVFLSGFRGFYYYYTKTNP

SEQ ID NO: 75260 - protein, 118 aa, Gossypium hirsutum
  Clone ID: GOSHI-09MAY01-C21075_1.pep
MSILSKSPSSNMGSSPFFHEFKKQASFFLKEKIKTARLALTDVTPAQLLTEEATNGNPWAPNTQSLGSISRAAFELDDYWRIVEILHNKLDKFERKTWRTSYNSLIVLEHLLTHGPIL

SEQ ID NO: 75261 - protein, 174 aa, Gossypium hirsutum
  unsure (1)..(174): unsure at all Xaa locations
  Clone ID: GOSHI-09MAY01-C21005_1.pep
MKWDMEIEEIEAVLEKIWDLHDKLSDAIHSISRAHFLNSIKALKKSDKKKLYDDVVVGADDNRTGFVFVKEFRIDDGDSAIQEAKSLNDIRTALENLEDQLEFFHTVQIQQRVERDAAIARLEQSRIILALRLAEHHGKKYKVIDEALAVVGDVHDXSRYISPKNLYCSPINPS

SEQ ID NO: 75262 - protein, 190 aa, Gossypium hirsutum
  Clone ID: GOSHI-09MAY01-C21025_1.pep
GSYRGLFLRDGVAEMEAAAKKFEQEDTISKEIERRPGNGDDLYSYPLSNNSRSDLEDGFFPYCEINVVLSVTTSTVGQPLEHKQPSISLDIPSCRPEAADALSFAASTLCSLAEQVGSSTKNVQGLGNLGNTTDKRFSEEVSRTTYKLSVSCFSHEDCPGINQYSGNTCVHEPVSRSVVDRDMIIPIQRY

SEQ ID NO: 75263 - protein, 58 aa, Gossypium hirsutum
  Clone ID: GOSHI-09MAY01-C21215_1.pep
IPSSKSQLEIHFQIFFQNSQPPRFNIYSTSHIQSHHPPFHPFTLINLSNTDMSQTLAN

SEQ ID NO: 75264 - protein, 125 aa, Gossypium hirsutum
  Clone ID: GOSHI-09MAY01-C22985_1.pep
PPSPPKHPYKYGAPPPPSPPKHPYKYKSPPPPPPVYKYKSPPPPPPSSPKHPYKYKSPPPPPPVYKYKSPPPAPPSPPKHPYKYKSPPPAPTSPPKHPYKYKSPPPPPSPPKHPYMYKSPPSPPP

SEQ ID NO: 75265 - protein, 301 aa, Gossypium hirsutum
  Clone ID: GOSHI-09MAY01-C22975_1.pep
SVPLAQYVRYVDQYWDNLNALGRADGSRLRLLTYDIVLMLARFATGASFSAECRGGGRESNSRFLPFMIQMARHLLEQGGPSQRRNMAKTVATYISSSTSDSKSATGGTQPLGTEETVQFMMVNSLLSESYESWLQHRRDFLQRGIYHAYMQHTHGRSTAKIESASSSKSPTSTSETGGDELLSIVRPMLVYTGLIEQLQQIFKVKKSSSLAATKGKSEGTSTGTEGEGLEGWEVVMKERLLNVKEMIGFSKELLSWLDDMTSASDLQEAFDIIGALGDVLSGGFSRCEDFVQAAIAAGKM

SEQ ID NO: 75266 - protein, 276 aa, Gossypium hirsutum
  Clone ID: GOSHI-09MAY01-C22905_1.pep
PRVRELSGGAIAGIVIGSVIAFILILVLSICLCRRRSGKKMEAQARDIGPSKQAEVEIPGDKVVSMENDHNHHHNNNTGNGLSGVVKKDAKSSGKGKKSLSFFRTGAEVFDLDNLLRASAEVLGKGTFGTTYKATLEMGLVVAVNRIKDVAVPEKEREAKMVAVGAMDHHNLVPLRAYYFSGDEKLLVYDYMPMGSLSALLHGNKGAGRTPLNWDTRSSIALEAARGITYLHSKGPLISHGNIKSSNILLTTSYEARVSDFGLAQFAGPTSNPNRV

SEQ ID NO: 75267 - protein, 121 aa, Gossypium hirsutum
  Clone ID: GOSHI-09MAY01-C22925_1.pep
MAGSGSSMLYSFLLFTVILSLQEMYRGKLASSELFTILGGFISSLLFLVLLTFIGNFQEASGVKTGWGAVILAEAVSLIAASTVHRVCITTCFLFSVGLLYEVNKISAVTVSKIESKAKRH

SEQ ID NO: 75268 - protein, 99 aa, Gossypium hirsutum
  Clone ID: GOSHI-09MAY01-C22495_3.pep
AFSSQPMNYGAMGSFFAQQQLLATMSNLQHFGNLNAQNAGINHVSSGSNGGSPMPDIFQSNLPTQTASSMMNNSKKEDTRAFDFILDHLAAARDPKRTV

SEQ ID NO: 75269 - protein, 456 aa, Gossypium hirsutum
  unsure (1)..(456): unsure at all Xaa locations
  Clone ID: GOSHI-09MAY01-C22495_1.pep
EFKQNDKGESSSNYSATKTREEXLLETIVTSGGVRLQPTRDAIQAFLVEAAKLDALALSHALESKLLSPLWQVRMKAVCVLESILRRKEDEHFVIVASPRAGPRDGVLRCSESPQASLREKANKVLILLNGEQAGDLASNSEKSSKPMTTPVQMPDLIDTGDPDDYDGQNTSIKDSHNQNTSNLTGTPLIDDLLGDGIDAGLSPSKQKYDDDPFAGVSFHSGEGRENVDDLFSGMTIDDKSVGNGNHVAANKKSELIDIFGTNSEAPFEPENKTNSVNELMAGLSMNENPPNLKQKGMTSEAPENMFANINTHSSQQASNDALSGIFGSQATGMNATPMFPLGTMPYGVPPGITLNPAFSSQPMNYGAMGSFFAQQQLLATMSNLQHFGNLNAQNAGINHVSSGSNGGSPLPDIFQSNFPTQTASSMMNNSKKEDTRAFDFILDHLAAARDPKRTV

SEQ ID NO: 75270 - protein, 102 aa, Gossypium hirsutum
  Clone ID: LIB3825-022-Q1-N6-H5.pep
LNPAFSSQPMNYGAMGSFFAQQQLLATMSNLQHFGNLNAQNAGINHVSSGSNGGSPMPDIFQSNLPTQTASFMMNNSKKEDTRAFDFILDHLAAARDPKRTV

SEQ ID NO: 75271 - protein, 83 aa, Gossypium hirsutum
  Clone ID: GOSHI-09MAY01-C22485_2.pep
SLPPLLFFLTSRCRCRCRCLCLCLHTFQRLTSYIYSIHSSPFLRRFSLTLTLGLFSKFSCHSFLALGNHRPKNTHAIIGREFS

SEQ ID NO: 75272 - protein, 437 aa, Gossypium hirsutum
  Clone ID: GOSHI-09MAY01-C22485_1.pep
MELAALNLVNATLNWITFALDAPSARAVVFGVHIGGHLFVEVLLLVVILFLLSQKSYKPPKRPLTKKEIDELCDEWVPESLIPPITQEMLSEPPVLESAAGPHTIIDGKEVVNFASANYLGFVGHDKLLESCTSALEKYGVGSCGPRGFYGTIDVHLDCEARIAKFLGTHDSILYSYGLSTLFSAIPCFCKKGDIIVVDEGVHWGIQNGLYLSRCTIVYFKHNDMESLEKTLEKITAQNMRAKKLRRYIVVASRPQNSGQIAPLDKIIRGKEKYRSRVLLDETNSFGVLGRTGRGLTEYCGVPIEKIDIVTAAMGHALATEGGFCTGSARVIDHQRLSSSGYVFSASLPPYLASAAITAIDILEQNPDLTSKLKENIAILWKGLSDIRGLSIASNPESPIVFLVLEKSTGSLKSDLQLLEDIADRALKQESIFVMAS

SEQ ID NO: 75273 - protein, 63 aa, Gossypium hirsutum
  Clone ID: LIB3145-016-Q1-K1-D2.pep
SLFNLSDRNSYIQQDNVDKLAELQPSTLQGFYRHLLQNQVALISRTPTATKVLIPVLSKSYLK

SEQ ID NO: 75274 - protein, 378 aa, Gossypium hirsutum
  unsure (1)..(378): unsure at all Xaa locations
  Clone ID: GOSHI-09MAY01-C22635_1.pep
MSPPLLGVEEEVQSSVSSPSVECISENGMGLKERNYLGLSDCSSVDSXPVSRGNLNLKATELRLGLPGSQSPERETELCLLNLGKLDEKPLFPLLPSKDGICSSSQKNVVTGNKRGFSDTMDGFSEVKGYVYTEKSWMFHEAGSDSESPQSVGHGKYPGNSGVNVILSTRSPGVQASVKQDEPANVLQEQPRATNGTSLKQTVISNNNTGAPAAKAQVVGWPPIRPFRTKTLAASSKNNDEVDGKPGPGALFVKVSMDGAPYLRKVDLRTYSTYQELSSALEKMFSCFTLGQCGAHGTPGKETLSESRLKDLLHGSEYVLTYEDKDGDWMLVGDVPWEMFIETCRRLKIMKSSDAIGLAPRAMEKSKANSKKEFGYGC

SEQ ID NO: 75275 - protein, 76 aa, Gossypium hirsutum
  unsure (1)..(76): unsure at all Xaa locations
  Clone ID: LIB3493-012-P1-M1-B9.pep
MDGAPYLRKVDLRMYSTYQELSSALEKMFSCFTLGQCGAHGTPWKEILSESXLKDLLHGSEYVLTYXDKDGDWMLV

SEQ ID NO: 75276 - protein, 161 aa, Gossypium hirsutum
  Clone ID: GOSHI-09MAY01-C22095_1.pep
MASSRGYYSRPNYRFLSSDQQLQSPLSHDSASAFELDESDIYNNGVSTRSDSPEFRSTSRVAKKQSNKRGGGGNSVVGGAPASLPVNIPDWSKILREEYRDNRRRSESDDNDVEADDWSEGGVRIPPHEFLAKQMARTRIASFSVHEGVGRTLKGRDLRRV

SEQ ID NO: 75277 - protein, 130 aa, Gossypium hirsutum
  Clone ID: GOSHI-09MAY01-C22355_1.pep
IRAQVRANPYCYKGRLRLNTANELLNTSLEIEQRLHEVSLPFLVLHGGEDKVTDKAVSQQLYNDAASSDKSFKLYPGMWHGLLYGELPENIEIVSADTIGWLNQRSEFGNSRLERELKLQDDEILILKHK

SEQ ID NO: 75278 - protein, 131 aa, Gossypium hirsutum
  Clone ID: GOSHI-09MAY01-C22335_1.pep
LNMSDFRDEAHSSSWDHSAFMGTYAMYLDQRLELMLFDRKSSGGSGAGGSSHGSADDRYGGRDNFRSPPPRPYEYDYGDIRGDNGYGNYGMTRRTRSYGDMSEAAGSDGRDGREEKKAVTPLREMTPERIF

SEQ ID NO: 75279 - protein, 121 aa, Gossypium hirsutum
  Clone ID: GOSHI-09MAY01-C22255_1.pep
MEFRSFSSSDGAAEGPVLWASAAVSSDASLKKTPASNAKSERINKGKFAPSGGKLAKIEEKVFNDDTTKTSSEGVEPRRSNRRIQPTSTLLGGLHSSLAISKIPSGSFDKSHKSQSRSMRG

SEQ ID NO: 75280 - protein, 55 aa, Gossypium hirsutum
  Clone ID: LIB3083-079-Q1-L1-F9.pep
KTCSEGVEPRGGNRRIQPTSRLLEGLQSSLAISKIPSVSFDKSHKSQSRSMRGET

SEQ ID NO: 75281 - protein, 275 aa, Gossypium hirsutum
  unsure (1)..(275): unsure at all Xaa locations
  Clone ID: GOSHI-09MAY01-C22215_1.pep
EMVNALRKASGQVDRANAAVRRLETENAEIRAEMEASKLSASVSVTTCLEVAKREKKCLKKLLAWEKQKAKLQDEIADEKDKIKDLQRCLARVEQDQKETELKWREELKSKELALAQIEEERCSKEAAEASNKRKLEALRLKIEIDFQRHRDDHQRLEQELSRLKLSAQSTELNHQADNLLPGRSERVQNPKGETIAKFLNELDKLEDSSEKEVNGDREXCIICSKDEVSIVFLPCAHQVLCANCNDSYGKKGKATCPCCQVPIEQRIRVFGASS

SEQ ID NO: 75282 - protein, 144 aa, Gossypium hirsutum
  Clone ID: GOSHI-09MAY01-C23975_1.pep
SSKWVTSSPIIYSLKLAKCGIKMNLDTWKPAETYFYDYIDLSENEITGSPVDLLNRTDFLVEFKAAGNKLKFDLGKLRIVKTLKELDISRNLVYGKVPAAITGFNKLNVSYNHLCGQLPKNKFPVSSFVGNDCLCGPPLSPCKL

SEQ ID NO: 75283 - protein, 85 aa, Gossypium hirsutum
  Clone ID: GOSHI-09MAY01-C23965_1.pep
MAQPLVKKDDDRDDEADYSPFLGIEKGAVLQEARVFNDPQLDPRRCSQVITKLPYLLNQGETFTKVEATEVFFAVTKLFQSKDIA

SEQ ID NO: 75284 - protein, 151 aa, Gossypium hirsutum
  Clone ID: GOSHI-09MAY01-C23915_1.pep
MGKSWLLLAFILWQIIPNEAAIAVGGGVGIGIGNAGGVGGGGVWIGGGIGSNTPTPSVPSVSKLSSAYTALQAWKSAIADDPMRILETWVGSDVCSYKGVFCADPQSGVASESFVAGIDLNHANLQGTLVSELSVLTDISILHLNSNRFSG

SEQ ID NO: 75285 - protein, 125 aa, Gossypium hirsutum
  Clone ID: GOSHI-09MAY01-C23815_1.pep
KMIEANPGNSLFLSNYARFLKKVCGDFVKTEEYCGRAILGNPNDGNVLSMYADLIWETPKDSSRAETYFDQAVKAAPDDCFVLASYARFFWDAEEKKNGENLSEVPEPSFIHGVFSMPPPLTAAF

SEQ ID NO: 75286 - protein, 164 aa, Gossypium hirsutum
  Clone ID: GOSHI-09MAY01-C23805_1.pep
ESVCRIHKAKEETADAEKLVDSLKSELETMKEEKIQALDNEKLAASSVQVLLEEKNKLINELENSRDEEEKSKKAMESLASALHEVSAEAREAKEKLLSSAAEHEHYEAQLEDLRLVLKAKNDLYETMLDDAKNEIDLFTNTIEQSKNEYQNSKIEWYQNRNSF

SEQ ID NO: 75287 - protein, 173 aa, Gossypium hirsutum
  unsure (1)..(173): unsure at all Xaa locations
  Clone ID: GOSHI-09MAY01-C23525_1.pep
MYRVALSRFRALKGRSGNLAAARYATSSAVAPLDTPSDSVSLPPPLPDYVAPSETKIKTLSNGVRIASEQLPTPAASIGLFINCGSIYETPISSGASHLLERMAFKSTTNRNHLRVGREVEAIGGNTLASATRECMTYTFDALKTYVPEMVECLXDCVRNPXAFLEWENNEEL

SEQ ID NO: 75288 - protein, 201 aa, Gossypium hirsutum
  Clone ID: GOSHI-09MAY01-C23765_1.pep
STQRSFLQAFESILGSPLTIEIRCKMNKDATAGFHGLLVLPSSRDGPSHMIMDLEDSGMHRKSPEAGGSEIVEIPVSPREAKDNEHAAFQELMLASYSGRQKPGELTPSQSIVRSKLSIAHVIHHGDGYTQENRWSNHKAVSIAEKLEQENLRLEPRSRSLLFWKTSKATRRKRLKIRTRRPALLLKLVSCGRCLSSKSPR

SEQ ID NO: 75289 - protein, 69 aa, Gossypium hirsutum
  Clone ID: GOSHI-09MAY01-C23145_1.pep
FLGWCLVLWLVAAVDSLLPQNSSIGGVGKGHSITGKDVDAIHYASYEFKVEGLPDSPVFPSFQSWGGLP

SEQ ID NO: 75290 - protein, 82 aa, Gossypium hirsutum
  Clone ID: GOSHI-09MAY01-C23085_1.pep
MGKSTPVKQAAVVLGALAFGWMAIEMAFKPLLDKARSAMDNSDPDREPDDIDSARKDDSDSDSDRKPISYADAVAKNIAGAS

SEQ ID NO: 75291 - protein, 92 aa, Gossypium hirsutum
  Clone ID: GOSHI-09MAY01-C23345_2.pep
RTRGRTRGRTRGRTRGVLGKGAGFTWEEAKMQAAEKALGSLRSMLGQFTQKRQGSPRSLQDMPSKRLKPEFPRVLHRMPSSGRYHKNAPPVP

SEQ ID NO: 75292 - protein, 256 aa, Gossypium hirsutum
  Clone ID: GOSHI-09MAY01-C23345_1.pep
ETPAGVFQDIAMKCGAKVEFRPALVASMDLQFSIEAWFAGEKVGEGTGRTRREAQRQAAEDSIKSLANTYLSRIKPDTGSAPGDLSRSANTNENGFPGNLNLYGNQQSSKEESMPFSNAPEPSRLLDPRLEGSRRSMGSVTALKELCMMEGLGVVFQAQPPASNTLQKDEVYAQVEVDGQVLGKGTGFTWEEAKMQAAEKALGSLRSMLGQFTQKRQGSPRSLQDMPSKRLKPEFPRVLHRMPSSGRYHKNAPPVP

SEQ ID NO: 75293 - protein, 106 aa, Gossypium hirsutum
  Clone ID: GOSHI-09MAY01-C23335_1.pep
APSGFSPANQISMAEAPLEPQMGSELESLAIPPMDPLYLSSDLGFPLDENDDFQLTFDDFDELYFPSDSDHLIMPDSYDAPAFTSESYVERYLNSSSPGLDSFSGP

SEQ ID NO: 75294 - protein, 206 aa, Gossypium hirsutum
  Clone ID: GOSHI-09MAY01-C23265_2.pep
PRVREASSSHHGGAILFIGRTSQIALTLAYPPFLNDRNIEYIKSSCSTTTYPKLCYQSLSVYASSISTSPKLLVHTALNVTLRASKATSRLMVKISRFHGLEPRVAAAMADCIEVIGDSVDELQQSLGELGHISRSNFSRARSDVQTWVSAALTDEDTCMDGFAGNNMNGYAKTMARKRIIKVAHLTSNALALINNYASTQGYYLP

SEQ ID NO: 75295 - protein, 160 aa, Gossypium hirsutum
  Clone ID: GOSHI-09MAY01-C23265_1.pep
MEASSSHHGLAILFIVLTSQIALTLAYPPFLNDRNIEYIKSSCSTTTYPKLCYQSLSVYASSISTSPKLLVHTALNVTLRASKATSRLMVKISRFHGLEPRVAAAMADCIEVIGDSVDELQQSLGELGHISRSNISLTMSDVNMGYAALQRDLDDGFVDT

SEQ ID NO: 75296 - protein, 206 aa, Gossypium hirsutum
  unsure (1)..(206): unsure at all Xaa locations
  Clone ID: LIB3543-059-Q6-K6-F4.pep
MSGICSSFSPSEEEIGAADLQDTNTNQRKPAGWKAMPFVLGNETFERLASFGLMANFMVYLQSEYHMNQVKAATLLNTWSAASNFAPVIGAYVSDAFIGKFWTIAFGSFSSLLGMIIMTLTALLPQLRPPPCTHEGQLHGQCVGHNKAQLGIXIASLCWLSXGTGGIKPCSIPFSVDQFDLTTERSRKGNNSFYNLYYTTQTIVLV

SEQ ID NO: 75297 - protein, 87 aa, Gossypium hirsutum
  unsure (1)..(87): unsure at all Xaa locations
  Clone ID: LIB3083-099-Q1-L1-E10.pep
VDTNTNQRKAAGWKAMPFVLGXNETFERLASFGLMANFMVYLQSEYHMNQVKAATLLNTWSAASNFAPVIGAYVSDAFIGKFWTIAF

SEQ ID NO: 75298 - protein, 192 aa, Gossypium hirsutum
  unsure (1)..(192): unsure at all Xaa locations
  Clone ID: GOSHI-09MAY01-C23205_1.pep
MERKKPTDSNCNSKLNIAIIHPDLGIGGAERLIVDAAVELASHGHNVHIFTAHHDKNRCFEETRAGIFPVTVYGDFLPRHIFYRLHAVCAYLRCIFVALCVLFMWPSFDVILADQVSVVVPLLKLKRSTKVVFYCHFPDLLLAQHTTLLRRIYRKPIDIIEELTTGMADMILVNSRFTASTFAXTFKHLHAR

SEQ ID NO: 75299 - protein, 187 aa, Gossypium hirsutum
  Clone ID: GOSHI-09MAY01-C98575_1.pep
ARGTNPNKSINNFNTHPSPKPQIRLSKTRPMNISSSRNQTSSSVWDFFRLGLVRAPELEFHELKIRTNNNNNRSRNSVSRNSSCSSSNSQLDSIKGFLRKGLFSGCKCSVNVVETVPLNKIAVIKSMMIKKKSEKEKAMFQAAMEEKTKLLQEVKIKKKMKEKRVLSRHRTYEWLKELSHAGFVDEA

SEQ ID NO: 75300 - protein, 68 aa, Gossypium hirsutum
  Clone ID: GOSHI-09MAY01-C98005_1.pep
LCPKIIKSVSAGFLFIDLGIALEPHWCVFRESTSSFYVISNASHFICIHTTAHLITSMILYLDGSFIG

SEQ ID NO: 75301 - protein, 296 aa, Gossypium hirsutum
  Clone ID: GOSHI-09MAY01-C98365_1.pep
FIKSARESKRWWLPLPQVPKTGLSDTERQKLQCKGKVVYQVFKAAASINENVLLEIPLPSIIRDALPKSGKASLGDDLYKVLTLESSSVDEMFISLNLKSENNALEVINRLEAAVFAWKGRLTEQASGKSPVRKSWSFINPISEMDKMELLVDRAEALLRQIKSAYPNLPQTFLDASKIQYGKDVGHSILEAYSRVLKNLAFSIMCRMGEILQEDSLCNPNSGVATWCFPGINVGNPRHSHSLSDVMNKVEGKYCESDTDVELYSDASINATPSTSRSRRVWCIGKEACSSIGVSP

SEQ ID NO: 75302 - protein, 182 aa, Gossypium hirsutum
  Clone ID: GOSHI-09MAY01-C98205_1.pep
SVFFSSFLCSHIAVECNSTTMCWNCKEPGHLAGQFPYEPVCNMCGKMGHLARDCLNPRLPAHDARLCNNCYKAGHFAADCTNEKACNNCHKIGHLGHDCHNKPVCNICNISGHVARQCAKSKLSSDIGGHFRDIVCRNCGQLGHISQDCVSIVICSNCGGRGHLYYECPSARMYDRSGVRRY

SEQ ID NO: 75303 - protein, 269 aa, Gossypium hirsutum
  unsure (1)..(269): unsure at all Xaa locations
  Clone ID: GOSHI-09MAY01-C99925_1.pep
QFELTQLLSGPYDKEXAVISITAGAGGTDAQDWADMLLRMYTRWGEKQKYKTRVVEKSLGEEAGIKSVTIEVEGRYAYGYLSGEKGTHRIVRQSPFNAKGLRQTSFSGVEVMPLLPEDSVDVELPEEDLEISFSRAGGKGGQNVNKVETAVRITHIPTGVTVRCTEERSQLANKIRALTRLKAKLLVIAEEQRASEIKPIRGDAVKAEWGQQIRNYVFHPYKLVKDVRTGFETSDIVSVMDGELDAFIKAYLKYKHSINVSATATTTGA

SEQ ID NO: 75304 - protein, 318 aa, Gossypium hirsutum
  Clone ID: GOSHI-09MAY01-C99545_1.pep
MANIRQPLLDRPRGSYSRDCPLIFTLVLLICLAALVAIHLVRFSSFDANHPYKYCERAVDQKSCLALLSEVASKTTVRKKGVDLLHAFLERSASDMQNVINQARNFNDGINNSREQASLADCLELVELSRDRIMDSMVGVEKQDVNWHSNAQAWLSSVLTNHVTCLDGLQGSVRTLMEPGLSDLISRARTSLAILVSVSPTKTEFDDDPLIGGFPSWLSSKDRKLLQALPNEIKADVVVAKDGSGNYKTLGEAVAAAPDKSKTRYIIHVKKGTYNENVEIGTNKKNLMIVGDGMNSTIITGSLNVIDGSTRTRGGRGE

SEQ ID NO: 75305 - protein, 185 aa, Gossypium hirsutum
  Clone ID: GOSHI-09MAY01-C99535_2.pep
MPEETNSIDYIMEKASGPHFSGLRSPTSASSSSSFFADANAPRQPFVIGVSGGTASGKTTVCDMIIQQLHDHRVVLVNQDSFYRGLNTEELKRVHEYNFDHPDAFDTEQLLECVEKLKSGQSVQVPIYDFKQHRRSSDSFRQVNASDVIILEGILVFHDQRVRNLMNMKIFVDTDADVRLARRIR

SEQ ID NO: 75306 - protein, 264 aa, Gossypium hirsutum
  Clone ID: GOSHI-09MAY01-C99535_1.pep
MSEGSISIVYAMEKASGPHFSGFRTPTATSVSSTTFSDANVPREPFVIGVSGGTASGKTTVCDMIIQQLHDHRVVLVNQDSFYRGLNSEELKRVHEYNFDHPDAFDTEQLLECIKKLKIGHSVQVPVYDFKLHRRSSDSFRQVNASDVIILEGILVFHDQRVRNLMNMKIFVDADADVRLARRIRRDTVERGRDVNSVLEQYAKFVKPAFDDFVLPSKKYADDIIPRGGDNHVAIDLIVQHIRTKLDEHDLCKIYPTVYVIQST

SEQ ID NO: 75307 - protein, 80 aa, Gossypium hirsutum
  Clone ID: GOSHI-09MAY01-C99415_1.pep
SCKISPWLHMVCLSHRFMFNEVKRTVNRAVSATPKKNDGGSGSPDTQMNWLMFELLRRDLFRFIPKKYSSAKVGTGPATG

SEQ ID NO: 75308 - protein, 95 aa, Gossypium hirsutum
  unsure (1)..(95): unsure at all Xaa locations
  Clone ID: GOSHI-09MAY01-C99715_1.pep
IPSTDDEKELQVVCMAPEEEKXTRRNPLDFPIEWERPKPGRRPDIFPQFSPMKTPXLPPPMPYDPPEEDEEEEEKKEEEEEDPEKEEVPDNPEKQ

SEQ ID NO: 75309 - protein, 249 aa, Gossypium hirsutum
  Clone ID: GOSHI-09MAY01-C99705_1.pep
KLGKGKSVNPMPVDEEVMVEGFLQIVSEARLSVKQLCKALVAQMEESDTTLMDNLNLVLQPYKLSLNSKYSKTVLYHLEAIINQSLYQDFENCVFQKNGSPKLLDPQQDRQAQFSSYVALRNLSWNEVVRKGTKYSSEEFSKFCDQKMSLIISPLNWTRPWPEQLLQAFFVAAKCIWLLHLLAFSFSPPLGILRVEENTPFDPQYMENMLMERQKSHGGSRVKIMVMPGFYVQGRVLRCKVICRYKIVA

SEQ ID NO: 75310 - protein, 236 aa, Gossypium hirsutum
  Clone ID: GOSHI-09MAY01-C99685_1.pep
MAVAGGVCRGGNVCLRRRDSFNLFNFHNQNARPRCFMVSGSQSSSGSRKEKMLASSKVRRVSLLQPLLKQEKTRGKELSYEKIDEWMRDSVADIVKRLPESPLLVEVFSDVKNNTTRTRTEKAEEDKWGLVKQKWEKGESPMPDGLIFVEQIHQGEEEEEGKEEVCNTRAWGIVVQGIGAAAPACYLLKTSKVGSGFGIRCTHFCLVRVKSFRETAFSQLQNCWLLQQAILEDNET

SEQ ID NO: 75311 - protein, 170 aa, Gossypium hirsutum
  unsure (1)..(170): unsure at all Xaa locations
  Clone ID: GOSHI-09MAY01-C99605_1.pep
MESQRGPLLSWAYFCQGKTMEELRYSLFYTTMELEQTRMAVQEELRKRDDQLILLKELLSKAIRERDEAQEKCQRLFLEKLLLHQLQQQQQQKQQVSPLSGVSGVEDERIKGIDSNNGFSSSDCEGSIVSSPVLDPTQPPQXATTRLPPQSMPQTTMELVPDKPLPEKGK

SEQ ID NO: 75312 - protein, 282 aa, Gossypium hirsutum
  unsure (1)..(282): unsure at all Xaa locations
  Clone ID: GOSHI-09MAY01-C99625_1.pep
VSALSWPYRQADLLREIVGYRADIVCLQEVQNDHFEEFFAPELDKHGYQALYKRKTNEVYSGNIHTIDGCATFFRRDRFSHVKKYEVEFNKAAQSLTEVAVQTTQKKAALNRLVKDNVALIVVLEAKFTNQGADNPGKRQLLCVANTHVNVPQELKDVKIWQVHTLLKGLEKIAASADIPMLVCGDFNSVPGRASHSLLAMGKVDPLHSDLLVDPLAILRSYNKLTHXLPLVNAYSTFLKGNGLWSEQPRKKVDPATLEPLFTKCTKKFIGTLYTYFKPGLF

SEQ ID NO: 75313 - protein, 173 aa, Gossypium hirsutum
  Clone ID: GOSHI-09MAY01-C99085_1.pep
DSNPTQPNSAKPNADRQSGTSYQQHSLPLEATDWQCRGFRSMQESRRIDEAGHGYSEEETMQLLSQTHIHSPAVSVKCNEMQRYGQMRRPGGNSNMFHIVPQHINPSPYQIHIPRSSNGGRIGSDLSLSTSDQQWQSGPHHQLFGNSAASSGFPSQIRPSQTWLHQNGFHSLI

SEQ ID NO: 75314 - protein, 212 aa, Gossypium hirsutum
  Clone ID: GOSHI-09MAY01-C99355_1.pep
REKKTQNVCFVSLGEKSGMAETESQAKRHEGKQYDNSEGEEEEEEEEEEVDELEDEEEEEEEGVSRVNESHGAGTAPSSDAEVRDSQLETLTNDDRCERLRENPTSELKEGAESKEQVKIAHQKVLPSLVVQRAEAPKQHLLQSSVSPTSSSQPSPTSITQDISSPPTPTLPAQSHSDQKVNGASPPVANQQNPSNLKMLSFVPVVKTPVSD

SEQ ID NO: 75315 - protein, 185 aa, Gossypium hirsutum
  Clone ID: GOSHI-09MAY01-C94925_1.pep
MKKETEPKSSSTQSMAQEPNAKADPKNSDPEMDAEGFVIVPTTEPEKEKEKESQIQNEQSPNQAQSGLRNSVHPLDSGSPAADRDANMSAPNRYNPNLAQAPAMDSSSASFKEKMDIVRDAFWRWKRIVGEATKKAEDLAGNTWQHLKTSPSLAEAAMGRIAQGTKVLAEGGYEKIFRQTFETVP

SEQ ID NO: 75316 - protein, 173 aa, Gossypium hirsutum
  Clone ID: GOSHI-09MAY01-C94415_1.pep
MKLREYCYCNIRKMGSPSSSTGRSWFKYFQYEEGRDSPSDARNVLLVVAGLIAAATFQAGVIPPGGVWQDSECGHVAGRAIYASQKHAFYIFLISNTLALSSSILVIISLTYKFPFHFEIFTASMMVTYASSIFAVTSHESVRFRFILTATAGPFVIRISIQMFNRCRLKSPN

SEQ ID NO: 75317 - protein, 46 aa, Gossypium hirsutum
  Clone ID: GOSHI-09MAY01-C94405_1.pep
CYTRSFFLWSISSIMLVFRRSCCVLSSSLVICKNYLSLSNLLLIKT

SEQ ID NO: 75318 - protein, 120 aa, Gossypium hirsutum
  Clone ID: GOSHI-09MAY01-C94185_1.pep
AVLNHDSVGGFITHCGWNSVLESVRAGVPMLAWPLYAEQRLNRVLMVEEMKIALPMVESETGFVCSTEVEKRVKELIESKESDSVRQRTLDMKRAAEVATSEGGSSRVALVKLFESWKLK

SEQ ID NO: 75319 - protein, 175 aa, Gossypium hirsutum
  Clone ID: GOSHI-09MAY01-C94075_1.pep
MSEDAPPFQTQDHDSLTIPLLSHQQRSINSTSQVAIVGANVCPIESLDYEIAENDFFKQDWRARGKVQIFQYIFMKWLLCFLIGGFVSLVGFFNNLAVENIAGVKFVITSNMMLAQRYWMAFLVFSLSNLALTLFAAIITAFISPAAAGSGIPEVKAYLNGVDAPGILSIRTLIV

SEQ ID NO: 75320 - protein, 291 aa, Gossypium hirsutum
  Clone ID: GOSHI-09MAY01-C94395_1.pep
PDVIEMTFYPITALLDGIAGKEHLIRAISLYLEYKPPMEELRYFLEFQTPRIWAPIQGTIPGHQRKEPICPSLRFSMMGQKLYVSQEQISVGRKPVTGLRLCLEGIKQNRLSIHLQYLVSLPKILLPHWDTHVAIGAPKWLGPEEQDSKWFVPVKWKSFSHVSTAPIENPESSIGDLSGVYIVTGAQLGVWDFGSRNVLYMKLLYSRIPGCTVRRSFWDHTPDDKPKKVVATAGSSGSEGNIVNKLAKFVDMFEMSKGPQDPPGHWLVTGGKLGVEKGKIVLRVKYSLLNY

SEQ ID NO: 75321 - protein, 98 aa, Gossypium hirsutum
  Clone ID: GOSHI-09MAY01-C95845_1.pep
GPYNHSCKTKRCIVCSFFLKYYSFLPKKKKKKKKKKKKKKKKKKKKKKKKKKKKKKKKKKKKKKKKKKKKKKKKKKKKKKKKKKKKGGGAPFFFFFGG

SEQ ID NO: 75322 - protein, 130 aa, Gossypium hirsutum
  unsure (1)..(130): unsure at all Xaa locations
  Clone ID: LIB3825-003-Q1-N6-D10.pep
PKEKVTLVRADISRLPFESSSIDAVHAGAALHCWPSPSTAVSISFNCXAEISRVLRPGGVFVATTYIVDGPFTFLPFVNTFRQNMMGIAGSYFAVSERELEDLCRTCGLVGFTCMRNGPFVMISARKRSS

SEQ ID NO: 75323 - protein, 135 aa, Gossypium hirsutum
  unsure (1)..(135): unsure at all Xaa locations
  Clone ID: LIB3083-049-Q1-L1-E5.pep
QRQCSEFIKHEENVPKXKVTLVRTHISRLAFESNLIDAVHAGAALHCWPXPSTGVTEISRVLRPGGVFAATTYIFDGPFTFLPFVNTFRQNMMXIAGRYFAVSERELXYLCQTCGLSALTCMRNGPFVMISARKR

SEQ ID NO: 75324 - protein, 158 aa, Gossypium hirsutum
  Clone ID: GOSHI-09MAY01-C97985_1.pep
FHASGLFAHNHRDRSSTDKSGNILPGTVVDSKICHPSEFDFYLCSHAGIQGTSRPAHYHVLWDENNFTADGIQSLTNNLCYTYARCTRSVSVVPPAYYAHLAAFRARFYLEPEMQDNNSSTGAGSGQAKGGGTKAAGESGVRPLPALKENVKRVMFYC

SEQ ID NO: 75325 - protein, 63 aa, Gossypium hirsutum
  Clone ID: GOSHI-09MAY01-C97975_1.pep
LGDHKFQPVAEMNFPETPVDYHVNGVLAGPRAGYDPNQGSWASTSGPCAGAMFDEPLYTGQLN

SEQ ID NO: 75326 - protein, 164 aa, Gossypium hirsutum
  Clone ID: LIB3828-034-Q6-K6-G2.pep
MRVPYRMGLEHQLQTLSWLPNGDSRHIALSDDPNLIPHRDVECSASSSFGSYGGYFGTGKSSLPSSSGQENSILNDLSGNGSLQLQLGGQCPLFSYNLNILNDPKFPPVAEMNFNETPADYQVNGALQGPRTGFDTAPGSWASTSGSCAVTMFDEPLYTRLQQH

SEQ ID NO: 75327 - protein, 173 aa, Gossypium hirsutum
  unsure (1)..(173): unsure at all Xaa locations
  Clone ID: GOSHI-09MAY01-C97925_1.pep
MPAGLRLSLAGGHKVGDSAGWTTIGNIDYKQWAATKTFXLGGGCFSRYNAQLHNAMRVTHSMYRACNTSSPLATYTTDNDSIKITTKGHHFFFCGVLGHCQAGQKVDINVLRLLETAPASAPSGSPLSPPPVHSVSVPVSSPSNALTLKASKGNFSKLGLAITVLQFLNQVSH

SEQ ID NO: 75328 - protein, 106 aa, Gossypium hirsutum
  Clone ID: uC-gsronu33B079c11b1.pep
MAAKRIEAQALLILMPALLRMSLAAVYKVGDSAGWTTIGNIDYKQRAATKTFQAGDVILFEDKAQLHNVMRVTHSMYRARNTSSPLATYTTGNGSIKITTKGHPFF

SEQ ID NO: 75329 - protein, 95 aa, Gossypium hirsutum
  Clone ID: GOSHI-09MAY01-C97525_1.pep
RRVGGRVGGRVGAGLPAEFKHINKQLMKREPGSKGTMQMEADEDEKIDQVSDSDYDSDDDGDFSILSDSSFGFPNQPLVNGTESSGISDEGMFEN

SEQ ID NO: 75330 - protein, 247 aa, Gossypium hirsutum
  Clone ID: GOSHI-09MAY01-C97495_1.pep
VNERGNYCRQRNDDKTSLETAINQTRKEEREVVNAKEAIEGLKDEGISENALILMELLKPLKSGFVWFWKTLSWERPGTTLVVIAIVTVIVYKEWVGKAISAGLLVLVAKMIQARQEKLKDKQKEITVCTAFEPTASTRENIVSAQYMYMTICQIIHQANVTILKLHSVLVSRAPKHANVMMVGITGLAILFAVTPLKYLIISAVFHWMIMRSKLGKYMKNNQNERRVKEWWDSIPPTPVRIVDQCL

SEQ ID NO: 75331 - protein, 66 aa, Gossypium hirsutum
  Clone ID: GOSHI-09MAY01-C97755_1.pep
KVATSICSPTHYPDACHKTFASMNSTGPKEFVKKVIYAAEEEVKKFLNFSDSKLLKLRTIGLTKWP

SEQ ID NO: 75332 - protein, 94 aa, Gossypium hirsutum
  Clone ID: GOSHI-09MAY01-C97155_1.pep
QTSRTQIIWVHYKNESYAFQKWNDLQQWIMMSVWDHWQRYSQTAYHSHGFDGGGEDGGFRSGYYIEKRVSFRKINSCIKAKDLTCKLVFESDLK

SEQ ID NO: 75333 - protein, 202 aa, Gossypium hirsutum
  unsure (1)..(202): unsure at all Xaa locations
  Clone ID: LIB3825-023-Q6-K6-B2.pep
RDFKWYDGFFLSMLATXIIVAINWKRYHHCTYPLHIWIVVDYSTVFIFRLLMFVDNGLAAGMGLDFGWQQRYARFCGRIVVLSILSMLLYPFLWAWTVIGTLWFTSARNCLPKEGQKYGFLIWLLFSYCGLLCIACMSVGKWMTRRQAHLLRAQQGIPISEYGVLVDMIRVPDWAFEAAGQEMRGMGQDTAPYHPGLLLTPA

SEQ ID NO: 75334 - protein, 121 aa, Gossypium hirsutum
  Clone ID: AI054860.1.pep
FLWAWTVIGTLWFTSARNCLPKEGQKYGFLIWLLFSYCGLLCIACMSVGKWMRGMGQDTAPYHPGLYLTPAQREAVEALIQELPKFRLKAVPTDCSECPICLEEFHVGNEVKAFRSIQALL

SEQ ID NO: 75335 - protein, 222 aa, Gossypium hirsutum
  Clone ID: GOSHI-09MAY01-C90905_1.pep
MVKSVASAQLHQEEEDDDGETVKVEGNGSEQKANSNRSKHSETEQRRRSKINERFQTLRDIIPQNDQKRDKASFLLEVIEYIQFLQEKLQIYEGSYQGWSQEATKLIPWRNHRGLAESFIDHSQIMNNGSNCENDGVIPSMVANAQNSIDSDLGDAAVFKTPDHPPVSATSTVSMQTQSNTIATHGRGTLLFMSLLLILRTWYINPNFSHGKTKTVCLKMLV

SEQ ID NO: 75336 - protein, 209 aa, Gossypium hirsutum
  Clone ID: GOSHI-09MAY01-C90795_1.pep
MVRGKLILICQHGGEFETKDDGSMSYAGGEAHALDISPETGFDDLKYKLAEKCNLELKSLAIKYFLPGNRRTLITLSNEKDLKRMCDFHKDSVTADVFLTGKAGFVPVNHGMPAKRKKKATAARPATSKVAPSAGGLKDVTISIATPSDSVAGVNAALRSPSRAAKRTASRNIVDGLFEVSVADATDTDTIDMSASPADTVKKRRRTAS

SEQ ID NO: 75337 - protein, 126 aa, Gossypium hirsutum
  Clone ID: GOSHI-09MAY01-C90655_1.pep
YCNLWFIWFSLHSSDNIQQVPKRGRAIVHFDAVFDHQGFRSTSGLIVWNEEGEILATQVVIHSNIANPFTAEAYAGLQVIKLGIELGVNKIEVMGDSKTGSSRNVKVSNTDKSVIGAIIRDIQNQK

SEQ ID NO: 75338 - protein, 211 aa, Gossypium hirsutum
  Clone ID: GOSHI-09MAY01-C90015_1.pep
MSGYVGILVSDPCLQNQFTQVELRSLKSHFTSMRRENGKLTLGDLASRISRLKVVGENLSDQETTDFIAALYPNFNDEVDFESFLKVYLKLHAHASSRTGNPAKNSSAFLKAATTTLLHTISESEKASYVAHINNYLAQDGFLNKYLPIDPSSNDLFEIVKDGVLLCKLINVAVPGTIDERAINTKRLLNPWERNENHTLCLNSAKAIGCT

SEQ ID NO: 75339 - protein, 140 aa, Gossypium hirsutum
  unsure (1)..(140): unsure at all Xaa locations
  Clone ID: GOSHI-09MAY01-C90315_1.pep
RKNYVNRCQIQEWYPKFKSVSIRTFIHELPESFVQYLLDDSGPFLLPASISNEDAFPNRIHNPEEEEDYQVSLXDPADEAEAFSAPCFPELELKIKESIETLGGAIFPKLXNWSAPKDSAWISTFGTLRCTTFSEIALLL

SEQ ID NO: 75340 - protein, 192 aa, Gossypium hirsutum
  Clone ID: GOSHI-09MAY01-C90335_2.pep
DTLGTALWGGLKRTYRLALKIQRRIISPKRPRIRQFVHRRTRAVFDIALKVHQNIQQRGWEVGRNLGNWILRWLDKMKPSAQIRPPSHQKPHHGTGSANMNITKQVNNSSKTPRSLQTPRNSEADKRLFSSSTYMLSKSLPTIAMMIRPPRAAGNLPPSGHLSINGPHTLRLNYTRGEGVIRKDIMQWMLHN

SEQ ID NO: 75341 - protein, 140 aa, Gossypium hirsutum
  Clone ID: AI055059.1.pep
MVLWEITLGTAYFLGLKRTYRLALKIQRRIISPKRPRIRQFVHRRTRAVFDIALKVHQNIQQRDWEVGRNLGNWILRWLDKMKPSAQIRPPSHQELHHGPGSANMNITKQVNNLLETSRSLQTPRNSEADKRFLINVYAC

SEQ ID NO: 75342 - protein, 154 aa, Gossypium hirsutum
  unsure (1)..(154): unsure at all Xaa locations
  Clone ID: GOSHI-09MAY01-C91955_1.pep
MELVQIQRXLVDYTKSLFMEGFLDAQFLQLQQLQDDSNPDFVFEVVSLFFEDFEKLLNELTIALDQPNVDFKKLDSHVHQLKGSSSSIGAQRVKNACIAFRNYCDXRNIEGCLTCLQQVKQECYLVKNKFETLFRLEQQIMASGGSVPTIELGF

SEQ ID NO: 75343 - protein, 128 aa, Gossypium hirsutum
  Clone ID: GOSHI-09MAY01-C91965_1.pep
VAFTGTENGVRIKSWGRQSSGFARNILFQHAVMTDVQNPIVIDQQYCPDEKNCPGQVSGVKISDVTYQDIHGTSATEVAVKFDCSSEYPCSNIKLEDVKLTYRNKAAEASCSNADGTASGFVQPSSCL

SEQ ID NO: 75344 - protein, 84 aa, Gossypium hirsutum
  Clone ID: GOSHI-09MAY01-C91855_1.pep
LCLVPPAGLGIVMMADKLGFLPAGDKMFRFVLLLQHSMPTSVLSGAVANLRGCGKESAAVLFWVHIFAVFSMAGWIILYLYILF

SEQ ID NO: 75345 - protein, 239 aa, Gossypium hirsutum
  Clone ID: GOSHI-09MAY01-C91465_1.pep
ESYSIQNKTDNVVKIAVVYLGFIKGEDGTLDEPKKATALFKVDMLYTIHASGDIVIESNVKPSSGLPPLPRVGVEFHLEKSVDQVKWYGRGPFECYPDRKAAANVGVYEQSVEGMHVPYIVPRESGGRADVRWVTFQNKDGCGIYASTYGKSPPMQLNASYFSTAELDRAVRNEELIKGDSIEVHLDHNHMGIGGDDSWTPCVHENYLVPAVPYSFSIRLCPVTSATSGQNLYRSQLQN

SEQ ID NO: 75346 - protein, 151 aa, Gossypium hirsutum
  Clone ID: GOSHI-09MAY01-C91415_1.pep
VYSSALKLVHSMLPLPHLKDGYLTAPPFGNTFPPHSDWKRTEFFLNQEALQQVIKVEQKQVSRSLSGRIVDAGNTDKKAIRVDIPDIISVSASADLTLPPGAGLCINTTSGQVFLVADSWESLDGWLDALRLVYTIYARGKIDVLAGIIAT

SEQ ID NO: 75347 - protein, 80 aa, Gossypium hirsutum
  Clone ID: GOSHI-09MAY01-C91705_1.pep
KLILTQNLGAYPPGAASNWQLPIPFPPVAAAPTLLGKGAKQWRSGDWMCPKCNNHNYASRAQCNRCKTQRETVAEPVNAA

SEQ ID NO: 75348 - protein, 209 aa, Gossypium hirsutum
  Clone ID: GOSHI-09MAY01-C91175_1.pep
MAFTGTLDKCKACDKTVHVVDMMTLEGVPYHKTCFKCSHCKGNLVMNTYSSMDGVLYCKPHFEQLFKESGNFSKNFQTANTEKQNDTSRTPNKLSSLFSGTQDKCAACEKTVYPLEKITMEGECFHKTCFRCAHGGCPLTHSSYAALNGILYCKHHYAQLFMVKGNYNHVLQSATHRRNPSPASSTDFAENQADLETAAANQDANEDQS

SEQ ID NO: 75349 - protein, 251 aa, Gossypium hirsutum
  unsure (1)..(251): unsure at all Xaa locations
  Clone ID: GOSHI-09MAY01-C91115_1.pep
GAWAARGCVQTFAADQFDENNPEEXAAKSSFFNWWYLGIVTGASVAIVVVIYLQDTARAAAGFGVLSGSLAVALAVFLIGIRKYRKQRPTGSPFTSVAQVFVAAAKKWRVSETHGGRGICYEDDRRGGSHVKGQTMGRDLVRTKQFRFLDKAMIIDDKDTLSKTRDPWRLCSLNQVEEVKLVLRLIPIWLGCLMFSAVITQLHTFFTKQGSTMLRSIGPNFQVPPAALQILVGLTILIAVPIYDRVFVPIA

SEQ ID NO: 75350 - protein, 314 aa, Gossypium hirsutum
  unsure (1)..(314): unsure at all Xaa locations
  Clone ID: GOSHI-09MAY01-C91255_1.pep
MTKGKGVVSPNLKLSLPPPAETSVSKFLTESGTFKDGDLLVNKDGVRIVSQSEPEAHPPIKPSEADNDDQLSLEDLDAIKVIGKGNGGIVQLVQHKWTGQFFALKVIQMNIEDSYRKQIAKELKINQSSQCPYVVVCYQSFYNNGAISIILEYMDGGSLADFLKKLNQFPNPILLXICKQVLKGLIYLHHERHIIHRDLKPSNLLINHRGEVKITDFGVSAIMTSTSGLANTFVGTYNYMSPERIIGGNYGNKSDIWSVGLVLLECATGQFPYSPPDQAAGWTNFYELMEQIVEQPPPCAPSDRFSPEFCSFIS

SEQ ID NO: 75351 - protein, 75 aa, Gossypium hirsutum
  Clone ID: GOSHI-09MAY01-C91235_1.pep
IDQFYMLYDDFNITKLPLLPQEVTGVEALKSFSRHFLSPYQPLCKRGTVEDLERRISMLKVQISEAEAELEKLRK

SEQ ID NO: 75352 - protein, 60 aa, Gossypium hirsutum
  Clone ID: GOSHI-09MAY01-C92545_1.pep
GSSTFVFYGFRLSLLPMCTAFDCNSIHYIHSHDELNTTEKELTTAIFVLILHSPCLSLNQ

SEQ ID NO: 75353 - protein, 118 aa, Gossypium hirsutum
  Clone ID: GOSHI-09MAY01-C92565_1.pep
ISFWSFLIFSSYAWVSHDNITINLDSHLVIETSQEINNVPYGDYFIVEGLWSVERDINGQREDCILRVYVNLAFSKRTVWKACCVGRRTLFFGVKGEFLPARLLPVSLHKLSILWRGR

SEQ ID NO: 75354 - protein, 125 aa, Gossypium hirsutum
  Clone ID: LIB3828-016-Q1-N6-H1.pep
KSKGFSSIGAAGFCWGAKAVVELTKAKLIQAAVILHPSYMTMDDIKSVKLPIAILGAELDHLASPAVLKQFDDILSANKVDRFVKVFPNCSHGWTLRYDINNSTAVARANEAHQDMLEWLLKYVK

SEQ ID NO: 75355 - protein, 47 aa, Gossypium hirsutum
  Clone ID: uC-gsflnu33B094c10b1.pep
DSYLTYFKSHSSWLSHENVACVIGAEESRGTHCFMQSSFRTRGRTRG

SEQ ID NO: 75356 - protein, 134 aa, Gossypium hirsutum
  unsure (1)..(134): unsure at all Xaa locations
  Clone ID: GOSHI-09MAY01-C92035_1.pep
MTDPEXFEQRYPVFLHKFGLRENSGGAGHRKGGNGLVREIEFRRPVVVSILSERRVHAPRGLKGGANGARGANYLITKDKRRIYLGGKNTVEVQAGEILQILTPGGGGWGSLSSSLGSFTVFKNCFPGNFDHQV

SEQ ID NO: 75357 - protein, 87 aa, Gossypium hirsutum
  Clone ID: GOSHI-09MAY01-C92295_1.pep
NPKLTLVFGFGYWASVIGFFVLILFYYLCFVFKARVKLGPNINDFYLRYVYFSLNHGDVLRVEKREGFVFLAFAFFFDFSKCFLDIL

SEQ ID NO: 75358 - protein, 215 aa, Gossypium hirsutum
  Clone ID: GOSHI-09MAY01-C92285_1.pep
SLLAATNPTEEHVHSTFASRYVRAPVPRFKMPEKSIPKDAAYQVIHDELMLDGNPRLNLASFVTTWMEPECDKLMMAAINKNYVDMDEYPVTTELQNRCVNMIANLFHAPVGEEETAVGVGTAGSSEAIMLAGLALKRRWQHKRKTEGKPTDNPNIVTGANVQVCWEKFARYFEVELKEVKLKEGYYVMDPEQAVELVDENTICVAAILGSTLTG

SEQ ID NO: 75359 - protein, 200 aa, Gossypium hirsutum
  Clone ID: GOSHI-09MAY01-C92245_1.pep
FSFLLSSSSCNALDFCVADLKTPQGLAGYSCKRLELVTVDDFVFSGLHAGNTSNLIKAAVTPAFTAQFPGVNGLGISIARLDLAVGGVVPMHTHPDSSEIIVVIQGIIDAGFVSSANKVYFKTLKTGDIMVFPQGLLHFQINAGTTPALAYVSFSSPSPGVQILDFALFGNDLPSNIIEETTFLDDAQVKKLKGVLGGTG

SEQ ID NO: 75360 - protein, 181 aa, Gossypium hirsutum
  Clone ID: GOSHI-09MAY01-C93935_1.pep
ARGQGRKKGSLIDDVVGSASSRVTPALDGTAGGLRGNRSERDSRNTSSVPGAGRTSLDGAKGDRRTKAKPKQKSGHGFNGRLSDPLLPPLANSNKMTEREARSLSPTPSNVRPKESDEPDDFANLQLNDLDPMEELGVSNDIGGPQDLSSWLNFDEDGLQDHDSIGLEIPMDDLSELKFAF

SEQ ID NO: 75361 - protein, 191 aa, Gossypium hirsutum
  Clone ID: GOSHI-09MAY01-C93585_1.pep
ILFDLVEQCSFQKQLKMHRGMSTRDEKVVSRAIELNEQLQNVLIRHDALLSGRTTVSSRPASTLNHFNHEEEEEEPEQLLRRIRKGKACARPEDEECSREQPHVGLYGSNILGEKERLNRPLIRPLPSEPSYENNGHPSAVAIPPPPAKHIERERYFQEKKADGSAVAGHMRGLSLHSRNASSSRSSDFSD

SEQ ID NO: 75362 - protein, 318 aa, Gossypium hirsutum
  unsure (1)..(318): unsure at all Xaa locations
  Clone ID: GOSHI-09MAY01-C93545_1.pep
GKSGKSIYFKDIWPSNDEIAQVVQSSVLPXDMFKSTYEAITKGNLMWNQLSVPASMLYSWDPNSTYIHEPPYFKNMTVEPPGPHGVKDAYCLLNFGDSITTDHISPAGSIQKDSPAAKFLLERGVDKKDFNSYGSRRGNDEVMARGTFANIRIVNKLLKGEAGPKTIHVPTGEKLYGFLPALRFKAAGQDTIVXAGAEYGSGSSRDWAAKGPMLLGVKAVIAKSFERIHRSNLVGMGIIPLCFKPGEDADSLGLTGHERYSIDLPNKISEIRPGQDVTVTTDTGKSFTCAVRFDTEVELAYFDHGGILPFVIRNLNKE

SEQ ID NO: 75363 - protein, 152 aa, Gossypium hirsutum
  Clone ID: GOSHI-09MAY01-C93415_1.pep
IARISMRTYKKAIIRLEQVSHSYMQRAIASHGAFAIWYARHSKHYIKKPEILLGRTTEDFVVDIDLGREGCANKVSRRQAIFDLEGDGSFHLKNLGKCSVSINNKEVGPGQSLSLDSGCLIEIRGMPFIFETNQTCVEQYLNSKLRKSAGPC

SEQ ID NO: 75364 - protein, 199 aa, Gossypium hirsutum
  Clone ID: GOSHI-09MAY01-C93765_1.pep
MAASFSVPSMIMEEEGRYEAEVTEVQAWWNSERFKLTRRPYSARDVVALRGNLKQSYGSNEMAKKLWRTLKAHQANGTASRTFGALDPVQVTMMAKHLDSIYVSGWQCSSTHTTTNEPGPDLADYPYDTVPNKVEHLFFAQQYHDRKQREARMSMSREERARSPYVDYLKPIIADGDTGFGGTTATVKLCKLFVERGAA

SEQ ID NO: 75365 - protein, 188 aa, Gossypium hirsutum
  Clone ID: GOSHI-09MAY01-C93725_2.pep
MGQGQEHKTRDVPQLEIQERGEIFFFYRPKVNKEEVHSVDDVQRLYIVLRPESGERGVEEKQDPHSGKEGAKSRSGDQPQTGSSMNKTEGGQGSQEVNIEEEPLLRFIVMGRKRLPDPGKKSQTFWGFVELVTTKVEDVKDALKGEEYDTSSRGHRYQPPARAVGEGVYRIVRHNSSKNKMHTHLIYK

SEQ ID NO: 75366 - protein, 216 aa, Gossypium hirsutum
  Clone ID: GOSHI-09MAY01-C93725_1.pep
GEPGINIEEEPLLRFIVMGRKRLPDPGKKSQTFWGFVELVTTKVEDVKDALKGGHRYQPPARAVGEGVYRIVRHNSSKNKMHTHLIYKLEFPPPKEENEPQESLNIEPEGSFLIQIKNPSQASNSQFRGVGNKRKAAFPAHLQARLGNTRYHPADPPDFLNYEGCEFLLISASDAIDKELGLELETEGEADPSCSDLVRTFGDTASTTPLFKGIWS

SEQ ID NO: 75367 - protein, 250 aa, Gossypium hirsutum
  unsure (1)..(250): unsure at all Xaa locations
  Clone ID: GOSHI-09MAY01-C93095_1.pep
MLRNQVQDLVIPRAVLQKPRRSIGSCYSYSKLPEEPIKLSVRKLDGSSFEVEVLKSATIADHKLAVQHVFSHMPRKGPGKIAWPHVWGHISXCYDGQEXVLTDTDHIMNYGIKDGDQLHFIRHVTSSYNLTKIQSKRRMAAQKQSYLSISSSTSTLACEHNGEDDEDEDDMEAGTCKSGNDKKRSMIVQQECQFGQLWRSWSSHSKTSTIRRKGSSQGKVCQPRDGTSFVGNFRKIYQLWGTTKYSPKPK

SEQ ID NO: 75368 - protein, 81 aa, Gossypium hirsutum
  unsure (1)..(81): unsure at all Xaa locations
  Clone ID: GOSHI-09MAY01-C93045_1.pep
TKSMIGHCLGAAGGLEAIAPVKAITTGWVHPTXINQFKPEPSVEFDTVANEKQQHEVNVAISNSLGFGGHNSVVAFSAFKP

SEQ ID NO: 75369 - protein, 283 aa, Gossypium hirsutum
  unsure (1)..(283): unsure at all Xaa locations
  Clone ID: GOSHI-09MAY01-C93335_1.pep
AFEPKVLKLRGQVETLRKRXELQESELQKSTKKTQEAMKVAAEESAKSKAAKEVIKSLTAQLKDMAERLPPGVYDTENIKPAYLPNGLEPNGIHYPDANGEGHLRSESIGGSFLASPTALDSSTINGNQSPGQLLKEPTGANGRDDHSGTRLLNGSGGLQPGGSGVSAAGDEREFGSFGDGENGTKSRNSALAANGNQVEAEWIEQYEPGVYITLVVLRDGTRDLKRVRFSRRRFGEHQAETWWSENREKVYERYNVHVSDKASISGQTARRSEGALSPTSQV

SEQ ID NO: 75370 - protein, 79 aa, Gossypium hirsutum
  unsure (1)..(79): unsure at all Xaa locations
  Clone ID: GOSHI-09MAY01-C93285_1.pep
PRPQVIGLHMCGEDSAEIAQGFAVAVKAGLTKADFDATVGIHPTSAEELXTMRSPTRKIRQSSESQGNMGHEAKTAAGV

SEQ ID NO: 75371 - protein, 112 aa, Gossypium hirsutum
  Clone ID: GOSHI-09MAY01-C88485_1.pep
IKYGVYSEGCGLNSVMMSWGHDDYMYLVAKENDTTLPSAALFIIRYHSFYALHRSGSYKQLMNGEDVENLKWLEIFNKYDLYSKSKVRIDVEKVKPYYLSLIEKYFPAKLRW

SEQ ID NO: 75372 - protein, 80 aa, Gossypium hirsutum
  Clone ID: GOSHI-09MAY01-C88785_1.pep
MCGVWSTSFQSMQVMYDASGVRLHAGRQAELLNQIVCEFPPEHPLSSVRPLRELLGHTPLQVVAGALVGFIVAFLMRNSG

SEQ ID NO: 75373 - protein, 165 aa, Gossypium hirsutum
  unsure (1)..(165): unsure at all Xaa locations
  Clone ID: GOSHI-09MAY01-C88745_1.pep
MSSKTAESSGLSDSGREFVHHFFSGTFSFDSDAGQSELQAKXAVIYEREYMQGVMIKERIRDYNELSKKAEKKTKFHAKETQKSSCVGIFKGHNSYHLMLNLQLGIRYTVGKITPVPKREVRAADFGDRARITMFFPKXGSQFTPPHKSIDFYWKDYCPMVFRHL

SEQ ID NO: 75374 - protein, 209 aa, Gossypium hirsutum
  Clone ID: GOSHI-09MAY01-C88635_1.pep
IKIGVQSVDVDGAKDLVTVKGTMDVEDLVPYLREKLRRNVEVVPPKKKDAGEKKDGGEKNDAGGDNKEKGKEAAAAGGGGKKGGGGGEKEGGEKKEGGPGDKKEAGGEKKEAGEKKEAGGEAKMEVSKMEYHGYAYPPQPMYWSGGQEYGGPSYAIEGYRNHQRSGYVDRGYMHPHPVYVNQGYMIDPRHPLHAPQMFSDENPNPCFVM

SEQ ID NO: 75375 - protein, 117 aa, Gossypium hirsutum
  Clone ID: GOSHI-09MAY01-C88145_1.pep
HLVAETSFTPSQSESGEGLGPPSVGLLSGVGEELLFFLLVFFIFCRFFFFLSFLFFLFIVCKTETKGEEEGDPYLRGCVDEAFFSSARIGVEWEEALDLKWQRKGKNGGGVHLSLQF

SEQ ID NO: 75376 - protein, 42 aa, Gossypium hirsutum
  Clone ID: GOSHI-09MAY01-C88315_1.pep
GLAPDTQSSSQAQTSQAHTRDTSNSEKDAAVTEKSKESSSAS

SEQ ID NO: 75377 - protein, 59 aa, Gossypium hirsutum
  Clone ID: LIB3543-058-Q6-K6-E2.pep
TSVYPFDGAKTLNLTFTMHDESQIMHVPRNLSTTKTMSYLFFSLFRSHKMNINSMQGRQ

SEQ ID NO: 75378 - protein, 61 aa, Gossypium hirsutum
  Clone ID: uC-gsflnu33B091b01b1.pep
FHARKAIKLYYANNLKNDQLKLGPVMSHGIIIPSFFFTLIFYLPWLLRVDCSGISTFRGLL

SEQ ID NO: 75379 - protein, 188 aa, Gossypium hirsutum
  Clone ID: GOSHI-09MAY01-C89495_1.pep
MASRLQIEGDASVLLRVTHSNLKSFAADIRFSLQMSVEAVKDKLWKKCGTSVNSMRLELYDDCKNKLCDLRDDSRPLGFYSPVDGFRLHIIDLDPSSVTSGGWLEDTSLVEKYSISEDEYNKRSGTFRKFKEQMASQNPSEFRNKMSDDYMGDLCSNIKVGDRCEVDPGEKRGVVKYVGRAEALGPGF

SEQ ID NO: 75380 - protein, 111 aa, Gossypium hirsutum
  Clone ID: AI731356.1.pep
MASRLQIEGDASVLLRVAHSNLKSFATDIRFSLQMSVEAVKDKVWKKCGTSVNSMRLELYDDCKNKLRDLSDDSRPLGFYSPLDGFRIHIIDLDPSSVTSEGWLENTSLVE

SEQ ID NO: 75381 - protein, 136 aa, Gossypium hirsutum
  unsure (1)..(136): unsure at all Xaa locations
  Clone ID: AI729455.1.pep
ACGEFXVIRLWQDNQIVAVLARVADEIQWPITKQGTSVKLDDSHYFFSLQFPKEADSIEDGDMKVNKSDDDGSDLLSYGLTIASKGQEDLLSQFDVILQCYSFFTVQKVYDKGEEVLDGPVSAAKNISPDDLNSGS

SEQ ID NO: 75382 - protein, 202 aa, Gossypium hirsutum
  Clone ID: LIB3543-050-Q6-K6-C10.pep
LRKSYSVELACGEFSVIRLWQDNEIVAVLARVADEIQWPITKQGTSVKLDDSHYFFTFQFPKEADSIEDGDRKVKKSDDDGSDLLSYGLTIASKGQEDLLSQFDVILQCYCCFTVQKVNEKGEEVLDGAVSAAKNTSPEDLNSGSKKEAMEGKCAAYWTTLAPNVEEYSRKAAKMIAAGSGQLIKGILWCGDVTIDRLNRGD

SEQ ID NO: 75383 - protein, 317 aa, Gossypium hirsutum
  unsure (1)..(317): unsure at all Xaa locations
  Clone ID: GOSHI-09MAY01-C89115_1.pep
PSVRSYPGVPPSPPYGNIFGSGPTGSTGDLPITANFVNKNQKMNIRIIAIIVLSAFVLLLVLAGAISVLVKWRKVRRPSNAVGPAFPSSLNKRSGIGSMLSSSITSSPSMSLISTMATCAFPVKTFTLVELEKATSNFSSKRILGEGGFGRVYRGVMGDGSEVAVKLLTRDNLXETREFIADVEMLSRLHHRNLVKLVGICIEGRIRCLVYELVPNGSVESHLHGVDKNKGPLDWDARLKIALGAARGLAYLHEDSNPRVIHRDFKASNVLLEDDFTPKVSDFGLAREATEGSQHISTRVMGTFGYVAPEYAMTGHL

SEQ ID NO: 75384 - protein, 89 aa, Gossypium hirsutum
  Clone ID: GOSHI-09MAY01-C89305_1.pep
TLKGCTLKYSQLTSLLSQIFSHMSLCRPYRPAPVTTLNVTKSALVFLSSFLWYIPSTCSQCCLSPLKYPLNNKSLNIIKPNPNVAFKFM

SEQ ID NO: 75385 - protein, 134 aa, Gossypium hirsutum
  unsure (1)..(134): unsure at all Xaa locations
  Clone ID: GOSHI-09MAY01-C89325_1.pep
MASKFWTQGGSDTEEEETDIEDEIENGGAGETTAAAAGSRYLQTNASDSDDSDGQKRVVRSAKDKRFEEMASTVDQMKNAMKINDWVSLQESFDKINKQLEKVMRVTESDRVPNLYIKXLVMLGRFLSLKLLAN

SEQ ID NO: 75386 - protein, 158 aa, Gossypium hirsutum
  Clone ID: GOSHI-09MAY01-C84895_1.pep
FGSIISEAKNVEVILAGLLPDFDAVLTLVSFLSKTLPFQKIVDVLLEFESRQTRVVHDVSMHANMVQAPSLTAMTESDLRDIHSGHSTYGSRGRVFRPRIQCQIYSRYSHLAQRYFYRFNRDYDGPTALTTVRFSSAHDGQELHSDLHGRSTGFSGPG

SEQ ID NO: 75387 - protein, 177 aa, Gossypium hirsutum
  Clone ID: GOSHI-09MAY01-C84785_1.pep
MAIAAASSFSVGSSQCHLCQVEGAYYSPLVGVNNGWIRHTFDGCKVTDSPGISVRCRNLFFGSTQFHWLSMGRDLSLSKVLVAADYSDSVPNPSSYESNQGYHPLEQLKGSKRIQEIQLSSAEIARTTVEANSSALLVFPGTVHSEPHEQISWAEFPYVADDYGDIFFEISDDENIL

SEQ ID NO: 75388 - protein, 163 aa, Gossypium hirsutum
  Clone ID: GOSHI-09MAY01-C84105_1.pep
MAAAATPPPVAADASSSSSPLTLASSACESEEVAVNEGQNQEPQNQDGIKECLHKTKPIQFLGRTTPIILQNDNGPCPLLAICNILLLRNNLSLSADIAEVSQEKLLSLVAERLIDSNSNVNNKDAGYVENQQQNIADAIDLLPRLATGIDVNIKFRRIDDFD

SEQ ID NO: 75389 - protein, 292 aa, Gossypium hirsutum
  Clone ID: GOSHI-09MAY01-C84315_1.pep
MASSHLLCNHSLFFSSAFKNCGFSNTPPSKLQFQITPFVKASKKQLEIVYDPDERLNKLADEVDKEAPFSRLTLFSPCKINVFLRITNKREDGYHDLASLFHTISLGDVIKFSLSPSKTKDRLSTNVSGVPLDDKNLIIKALNLYRKKTGSSNFFWVHLDKKVPTGAGLGGGSSHAATALWAANQFKGSVATEKELQQWSSDIGADIPFFFSHGAAYCTGRGEFVQDISHPLPSDIPMVLIKPREACSTAEVYKRLRLDQTSNVDPLTLLEKISRNGISQDVCINDLEPPAF

SEQ ID NO: 75390 - protein, 145 aa, Gossypium hirsutum
  Clone ID: GOSHI-09MAY01-C84325_1.pep
KETFSVVLEMQIYTSVVASCLSTIGLFASGEWKSLQHEMEVFGTGRVSYVLTLVWTAITWQVCAVGVVGLIFVVSSLFSNVISTLSLAVTPLAALVVFHDKMNGVKVIAMLLALCGFASYIYQNYIDDRKARRLQTHVREIQHTA

SEQ ID NO: 75391 - protein, 112 aa, Gossypium hirsutum
  Clone ID: GOSHI-09MAY01-C84245_1.pep
FTRPRQGDYTTKIIEWMELQKRIWIYELGSLPPFLLVFAGNIAPVDHRWNQHGLGGDNYRGLCRNLHPGPVSLLHWSGKGKPWVRLDANRPCPLDALWAPYDLLQTPFALES

SEQ ID NO: 75392 - protein, 305 aa, Gossypium hirsutum
  unsure (1)..(305): unsure at all Xaa locations
  Clone ID: GOSHI-09MAY01-C85945_1.pep
QRPVFFVASRGHHAEIGGVTPGSMPPFSXSIWEEGAAIKAFKLVEKGXFQEEGIIKLLKFPGADEHSQNIPGTRRLQDNLSDLRAQVAANQRGITLIKELIEQYGLETVQAYMTYVQLNAEEAVREMLKAVAARISSESTRLGERNSITIEEEDCMDDGSVIHLKLSIDSNKGEASFDFSGTSPEVYGNWNAPEAVTAAAVIYCLRCLVDVDIPLNQGCLAPVIIHVPAGSFLSPSDKAAVVGGNVLTSQRITDVVLTAFQACACSQGCMNNLTFGDNTFGYYETIGGGSGAGPTWXGTSGVQCH

SEQ ID NO: 75393 - protein, 325 aa, Gossypium hirsutum
  Clone ID: GOSHI-09MAY01-C85435_1.pep
KAVARSKKNPKAKHKSPAAPHTWELESVSRGKKVNCCACLKPMSPSQTLGPTVASDSFIHRCSICGAVAHLSCSSRAQKDCKCVSMIGFEHVMHQWAVRWTELTDQPDGASFCSYCEEPCSGSFLGGSPIWCCLWCQRLLHVDCHSSMSNETGNICGLGPFRRLILSPLYVKKLSPNSGFLSSITHGANELASSVRETIRSQGKKHKHNNKTSADTGSNGSISDMSTGSTAETPQNVNGSYAKEGNCNGSMNVGTPCQDGSINKKIESNPSIKRSGSINQKDESQALRMKQRYELTDLPPDARLLLVFINKKSGARRGDSLRQRL

SEQ ID NO: 75394 - protein, 213 aa, Gossypium hirsutum
  unsure (1)..(213): unsure at all Xaa locations
  Clone ID: GOSHI-09MAY01-C85295_1.pep
MAETLSHAITPKTQTLTRKKEPTSPLFFPVLLKNPRFWIQVPNPNSHPVFNEKGSFRMDPPLINESSFSAANPSAYSLAEIWPFPINPGSDPTAVTGGGLGLRIGNLGGFGETSGLRDGSMEESTVTEQSVGCGGGRKXRELSSEDXSSKIVSTTTSANELNDSNGKRMKTPVSKNGNTGSKEAEVEASSADGSKPDKIANLPNHLSRLFYVR

SEQ ID NO: 75395 - protein, 57 aa, Gossypium hirsutum
  Clone ID: GOSHI-09MAY01-C86975_1.pep
RLNFMDQCYKKEKKKETLKEDLEGVELWFESIKKNQGRLRLRDKANKIVNTHTHTKL

SEQ ID NO: 75396 - protein, 214 aa, Gossypium hirsutum
  Clone ID: GOSHI-09MAY01-C86905_2.pep
GSTHAVRLTHKVIPERMPDCSYFLQGLCTNENCPYRHVHVNPNASTCEGFLRGYCADGNECRKKHSYVCPNFEATGSCPLGSTCKLHHPKNRSKAKKSKRSMEHNTARGRYFGIDISEPKRMGSERQQEVLEEANICFDGKFSDYISLGVSEDEVGGLHQANCDETSFGDNDSTVLQSEDLDELIKPIRIMSECKITESFLVTESSSGKHLAIQ

SEQ ID NO: 75397 - protein, 168 aa, Gossypium hirsutum
  Clone ID: LIB3825-014-Q1-N6-G3.pep
RTRVLASEKVRWSLHTARLRLVKKRKYCQFFTRFGKCNKDDGKCPYIHDPSKISVCTKFLKGLCSNPNCKLTHKVIPERMPDCSYFLQGLCTNENCPYRHVHVNPNASTCEGFLRGYCADGNEVVPYHLGNVILVIILHFMPHPVSYHVMEIYLYIQFVWLAHTGLNN

SEQ ID NO: 75398 - protein, 98 aa, Gossypium hirsutum
  Clone ID: GOSHI-09MAY01-C86865_1.pep
SANQWGVFVIKFRTPQCTKTLVHPKIIPQSNFFTCGKQNHVICKDIGSALNTPNPKCLKSYPFQTAKFIRLFACMTPIQNERTCATAISSLHQKALTY

SEQ ID NO: 75399 - protein, 89 aa, Gossypium hirsutum
  Clone ID: GOSHI-09MAY01-C86835_1.pep
KNFEIARLLDRLHYYEAVNQEMSQRNQEAVEMARRERQRKKRSQRWIWGSIATAITLGTAALAWSYLPTGKGSSSSNVPQASNPDDAAK

SEQ ID NO: 75400 - protein, 283 aa, Gossypium hirsutum
  unsure (1)..(283): unsure at all Xaa locations
  Clone ID: GOSHI-09MAY01-C86455_1.pep
RKGEGEEVCRADFPPNFVFGVATAAYQIEGACNEGSRGASIWDSFSHTEGKIIDGSSGDVAVDHYHRYKEDVNLIHKFGFDAYRFSISWSRIFPDGVGTKVNEEGIAFYSNLINALIDRGIQPFITLWPWXLPLHLQESIGGWLDKQIVNYFAIYADTCFSHFGDRVKNWITINEPLQTAXEGYDTGIFAPGRREGSSAEPYLAAHHQILAHATAVSIYRSKYKDKQGGQIGLVLDCEWAEANSDKIEDKSAAARRLDFQLGWYLCPLYYGDYPAVLLERLGD

SEQ ID NO: 75401 - protein, 315 aa, Gossypium hirsutum
  Clone ID: GOSHI-09MAY01-C86785_1.pep
AYIKRVEKHILTSVDDPSPMKTMAGGSVANAIRGLSSGFGVNSGMIGAHGDDEQGQLFVSNMNFTGVNISRLRKKRGPTAQCVCLVDAYGNRTMRPCLSTAVKVQGDELTKDDFSGSKWLVMRYGIFNLEVTQAAIRFAKLEGLSVSIDLASFEMVRNFREPLLKLLESGDIDLCFANEDEATELLRGEANASPEAALEYLSKYCRWAVVTLGANGCIAKHAPEVVRVPAIGETKAVDATGAGDLFAGGFLYGLVKGLSLEECCKVGSCSGGAVIRSLGGEVTPENWQWMYKQMQIKGLPLPDISELMSPRSNKH

SEQ ID NO: 75402 - protein, 215 aa, Gossypium hirsutum
  Clone ID: GOSHI-09MAY01-C86165_1.pep
MARRPDEEYDYLFKIVLIGDSGVGKSNLLSRFTRNEFCLESKSTIGVEFATRTLQVEGRTVKAQIWDTAGQERYRAITSAYYWGALGALLVYDVTKPTTFENVSRWLKELRDHADSNIVIMLIGNKTDLKHLRAVSTEDGQSYAEKEGLSFIETSALEAINVEKAFQTILSEIYRIMSKKSLSSDDLAPASIKEGKTIAVGAPDANTKKACCSSS

SEQ ID NO: 75403 - protein, 166 aa, Gossypium hirsutum
  Clone ID: AI731768.1.pep
MARRPDEEYDYLFNIVLIGDSGVGKSNLLSPFTRTQSCLESPSTLRVEFAPPTLPLHGTTVTPPFSAPAGPHRYSAIPTASYQGALGALLVCHVSSPTTSDHVTPWSNELVDHADSTLLMPLIGNQPVLSLLSTRFPTTMVAPPSETEGLFLLSRPSSSAAAYCPV

SEQ ID NO: 75404 - protein, 128 aa, Gossypium hirsutum
  unsure (1)..(128): unsure at all Xaa locations
  Clone ID: LIB3583-048-P1-K1-E9.pep
YNHLCQDEVASITSGGGKYNLLSCFSGTQFRLEYKYTIXVNKATLTVKVEGRTAKAQIWNTDRQERSRAITSAYYRGALGALLVYDVTKPAPFENVSQWLKELRVHADSNIVIMWIGNKTGLQHLRAV

SEQ ID NO: 75405 - protein, 175 aa, Gossypium hirsutum
  unsure (1)..(175): unsure at all Xaa locations
  Clone ID: GOSHI-09MAY01-C86385_1.pep
ILPILWSGTVGRYDGDYSEEDPQIMRLKRSLRPELGEPVILRCQPYKIPLTELLLPHKMAPVEFFRLWPSLPAIVEYTGTYIYEGSGFKATAAQQYGSSPFLSGLKSLYFKPFHRVCSHIIRTVAGFQLCYAAKTWHGGFIAHXMIFGASEVSRNVDLGDETTTMMCKFVARASD

SEQ ID NO: 75406 - protein, 295 aa, Gossypium hirsutum
  unsure (1)..(295): unsure at all Xaa locations
  Clone ID: GOSHI-09MAY01-C86265_1.pep
WNASRTEITFKDMISRGVLPNVLVYNTLIAGNCAAGNLTDAFKYFDEMVKGETRPTIVTYNTLISGLCKKGRITEAEALLPKITSNGCSPDVITYNTLLSGYSNEGNAEKCLDLYENMKSLGIKPTLNTYHPLISGCSKKGIELAARPSREMEEMHLTPDLLTYNVLIHLYAEHGDVQNAXFSLHREMIDRGICPDKLTYNSLILGQFKNGKLLEIKDLVDDMKAKGLVPKADTYTLLIKGYCEHKDFIGAYFWYREMFENHFLSRFTTCKETRDWALKSRKVARGADYLLGDEG

SEQ ID NO: 75407 - protein, 213 aa, Gossypium hirsutum
  unsure (1)..(213): unsure at all Xaa locations
  Clone ID: GOSHI-09MAY01-C87995_1.pep
APLDKVCVLSCGMSTCFGATVNVAKPKXGGSVAVFGLGAVGLAAAEGARVCEASRIIGIDLNPNRFEEAKKFGCTEFVNPKDHNKPVQEVISEMTGGGVDCSIECTGSTRAMVSAFECVHDGWGVAVLVGVPSRDDSFKTHPIHFLNERTLRGTFFGNYKPLSDIPGVVEKYMKRELELDKFITHSVPFLDINKAFEYMLRGEGPPRMIRMDA

SEQ ID NO: 75408 - protein, 274 aa, Gossypium hirsutum
  Clone ID: GOSHI-09MAY01-C87865_1.pep
WMPCGPPYMMKPPGSQVPLIPIPRLKTQQQSRPASKAKKNESKTKKVASVSVLGMLFFILLFSGLVPIMNLRYDNTPVGSGPGFVGDGFYEVHRGRVLRVDSHLNRSNYGGGAAFSYGDFNISNRVHGRRSESGGERKETGAQSAPDYIKNVSEPLTASLYVPRNDKLVKIDGNLIIHSVLASEKALASHKASERKNKETGLAIPKNFSPALAIPNARENGGKHSREYRNPAERPMALSSGSADALKDHIRSTAADGKMRQWLREGWQDRCEFG

SEQ ID NO: 75409 - protein, 244 aa, Gossypium hirsutum
  Clone ID: GOSHI-09MAY01-C87575_1.pep
YYCFCNQLTSKAVDKDFSRNRSPHFACGSLTEEEPAVIVNTPLPDKPLPLKKPSSECGDGQRSMRYFLTESLGKNAKHRKAKVPTSNQRTLALYDGNDPSVESEPDETLAALKSKMKPKSKSERTLALCYGNDPSLESEPEETLAALKSKMKPNSKSDGKKKDNDRQALAQGTKEATNKEREETEKEGESQMETFPPKIVAMHRVRWNMNKGSERWLCYGGAAGIVRCQEITVRDVHKKLTRKR

SEQ ID NO: 75410 - protein, 222 aa, Gossypium hirsutum
  Clone ID: GOSHI-09MAY01-C87515_1.pep
HVQSPFVEMMLLDGCFIMEVLHHFGVSEQQPWVFPIEPWQLPILVQDLLILDNQIPFFVLEMLFESLESQEGTPTPSLCTKALKFFDLAFPLSMDIACPLKPHHLLDLLLQSIRSSSPSQMVAPNFVYSFLKKISTRNQADTMRDQLELQPPFYLTKNAMELQASGIELRSTTAARFTNINFNNGGLEIPSVTINDIFIAILNNFVAFEHCSETSSKTFGRG

SEQ ID NO: 75411 - protein, 109 aa, Gossypium hirsutum
  Clone ID: GOSHI-09MAY01-C87695_1.pep
KQKRNLRLLKVKFINKAIPSVVYPRLMLPPSLQLLIRVLSERLHLWVCIGGQPYYTSTNRRHRGRSTTPRNQQHENFVINDSLSLSGSELREMGWDNIHPSWFVLWIPI

SEQ ID NO: 75412 - protein, 113 aa, Gossypium hirsutum
  Clone ID: uC-gsflnu33B075e02b1.pep
MPRSQINGNFIDKTFSIVANILLRIIPTTSGEKEAFTYYRDGMSAQSEGNYAEALQNYYEAMRLEIDPYDRSYILYNIGLIHTSNGEHTKALEYYFRALERNPFLPQAFNNMA

SEQ ID NO: 75413 - protein, 249 aa, Gossypium hirsutum
  unsure (1)..(249): unsure at all Xaa locations
  Clone ID: GOSHI-09MAY01-C87645_1.pep
SEGQQSVREAISLSRNAPPGPPPLCSICQHKAPVFGHPPRWFTYAELEHATNGFSQSNFLAEGGFGSVHRGILPDGQVIAVKLHKLASSQGDREFCSEVEVLSCAQHRNVVMLIGFCIEGGKRLLVYEYVCNGSLDSHLYGHNHDTLQWSARQKIAVGAARGLRYLHEECRVGCIVHRDMRPNNILLTHDFEPLVGDFGLARWQPDGDRGVETRVIGRFGYLAPEYAQSGQITEKADVYSFGXVMVELI

SEQ ID NO: 75414 - protein, 157 aa, Gossypium hirsutum
  Clone ID: GOSHI-09MAY01-C87185_1.pep
PTSFTCPPCSNPNFSFFNLAPTKKPKVIDKEAAKALLAAAKIAAASMTKAAAVAKVEAERRVKEATLAKKRAKEALERLALLARKDSDRHKSSLVGIPKSKPDAAIAAAADAKASSLSLPSPIPDKGNNGSYSVSGANVPISIPKLQRQQSTHGMPN

SEQ ID NO: 75415 - protein, 71 aa, Gossypium hirsutum
  Clone ID: uC-gsronu33B113a11b1.pep
FRSFSVFSKLFVCIQWELSLLPWMYFSLSSLFLIICFTFSPSYAKTKALWTFCSYKITRKRTGQNGLDRSP

SEQ ID NO: 75416 - protein, 292 aa, Gossypium hirsutum
  unsure (1)..(292): unsure at all Xaa locations
  Clone ID: GOSHI-09MAY01-C87045_1.pep
LLPYDSLEXAELALGWNLTVAERLWFSYSAHKSDYILYTHNCLFVFLVFSLVPLPWALVELYWFDAVDRFKLQPRVKRSFPELFKCYKDVLHQFIFVVAPLIAVSFPVLEWVGIRTSLPLPTKWEVISQLIVYFLVEDYTNYWIHRFLHSEWGYEKIHYMHHEYNAPIGFAALYAHWAEILILGIPTFLGPAMVPCHMTTLWLWSSLRQVEAIETHSGYNFPWSPTKLIPFYGGPEYHDFHHFVGRQCQSNFASIFTYCDYLYGTDKGYRRHKQAVKKGFLSKESISLCDLH

SEQ ID NO: 75417 - protein, 252 aa, Gossypium hirsutum
  Clone ID: GOSHI-09MAY01-C80425_1.pep
LDFVVAEANKYGIHLILSLAESFKDYGGKDKYVQWAKQRSRNLSKEDDFFTDSVVKKYYKNHIKAVLTRINTITGVAYKDDPIIFAWELMNEPRCPSDPSGANLQNWVKEMAAHVKSIDNHHLLEIGLEGFYGESMPEKKQYNPNSYSIGTDFISNNQIPEVDFATIHIYPEQWLPSTNSCEEAQLGLVDKWMEAHTMDCNSVLKKPLVIGEFGKSFKLPGYSLEKRNEFFQRIYKAIYSGARNGGSCDGGL

SEQ ID NO: 75418 - protein, 217 aa, Gossypium hirsutum
  unsure (1)..(217): unsure at all Xaa locations
  Clone ID: GOSHI-09MAY01-C80795_1.pep
AIKSWARQILRGLHYLHSHNPPIIHRDLKCDNXWANGNNGEVNIGDLGLATVLQQPNXARSVIGTPEFMAPELYDEEYNELVDIYSFGLCILEMVTCEYPYNECKNPAQIYKKVXSGIKPASLGRVNDPQIKQFIEKCLLPASMRLPAAELLKDPFLLAETPKEPASGPPVNLIQTEPHLMEIDLNCKMLMVKPSTESIKETPRFSALELQSFTQNN

SEQ ID NO: 75419 - protein, 84 aa, Gossypium hirsutum
  Clone ID: GOSHI-09MAY01-C80155_1.pep
IKASNLFLFPLFMYKKRIYQLPVFVHAVRYLPFFPSIIIFLKRSEKSTTNNASIAQPPNNHGENKPITKIFRTINIFAVYVLQA

SEQ ID NO: 75420 - protein, 65 aa, Gossypium hirsutum
  Clone ID: uC-gsflnu33B143e03b1.pep
ELNRKFNLPGIMTQVSQQIPEISKEKGNKRTSKKIKIIKNFKPKRKKKEENGHEDGFSSMLFIPD

SEQ ID NO: 75421 - protein, 211 aa, Gossypium hirsutum
  Clone ID: GOSHI-09MAY01-C80175_1.pep
QIPNQVLLVGKDIGLTGTKLGCDEGGCGACTVMISHYDRKTKKCMHYAVNACLAPLYSVEGMHVITVPRVRNHKCGLHPIQESLARSHGSQCGFCTPGFIMSLYALLRSSETPPTEEQIEESLAGNLCRCTGYRPIVVLMSILLSIFLPWTRPFEYVKEFNQAHRRDDDIAIVNAGMCVCLQEKSEEWVISDASVAYGGVAPLSLCAIKTE

SEQ ID NO: 75422 - protein, 149 aa, Gossypium hirsutum
  Clone ID: GOSHI-09MAY01-C80095_1.pep
MDLVQLQRQFVDYKTSLYHEGFLDEQFTQLQELQDENNPDFVVEVVSLFFEDSERLLNELARALEQQNIDYKRIDAHVHQLKGSSSSIGAQRVQKVCIAFRNYCEEQNVEGCLKCLQQVRHEYSLVKTKLESLFQLEQQILTAGGSFPM

SEQ ID NO: 75423 - protein, 317 aa, Gossypium hirsutum
  unsure (1)..(317): unsure at all Xaa locations
  Clone ID: GOSHI-09MAY01-C80065_1.pep
FPRYLSFVKGVVDSNDLPLNVSREILQESRIVRIMRKRLVRKTFDMILGISMSENKGDYETFWENFGKHLKLGCIEDRENHKRLAPLLRFFSSQSEDEMISLDEYVAHASAEQKDIYYLAADSVSSARNTPFLERLLEKDLEVLYLVDPIDEVAIQSLKSYKEKNFVDISKEDLDLGDKNEEKEKVTKEEFSRTCDWIKKRLGDPLALVQISNRLSSSPCVVVSGKFGWSANMERLMKAQTVGDTSTLEFMKGRRVFEINPAHPIIRDLNAVFXRYPDDEHVLRATDLLFDAPLAFRGYTSDNPPQMVGKIYEMMGM

SEQ ID NO: 75424 - protein, 109 aa, Gossypium hirsutum
  unsure (1)..(109): unsure at all Xaa locations
  Clone ID: GOSHI-09MAY01-C80395_1.pep
SKSFMDKVKVQXLEKFLXLFYYWKQKRQPKESFGDFTARIGFEKLKELVDKWEGVVQTPPARYNLKLFADKETYEVMDELAKLQNKSAHQLAIEVMRNFVASQQNGKSE

SEQ ID NO: 75425 - protein, 182 aa, Gossypium hirsutum
  unsure (1)..(182): unsure at all Xaa locations
  Clone ID: GOSHI-09MAY01-C80315_1.pep
AKFLRLKWRKFGHLASEVGGARNIFAEXLFGKNKAENTFWLDSSSTEKGRARFSFMGGKGGDLWKQLTFRLSEQSDTAGERGHLLIEDTKGFTCSKILEEGFFEYLNKELLSLCHEEKDYEGLPFDFYGGFIGYIGYNLKVECGAASNAHKSTTPDACFFFADNLVVIDHHTNDVYVLSLQE

SEQ ID NO: 75426 - protein, 212 aa, Gossypium hirsutum
  Clone ID: GOSHI-09MAY01-C80295_1.pep
HNEIQTVNIKSVGTNIEVTDGERLPLTVKELGTCDLYPQSLKHNPNGRFVVVCGDGEYIIYTALAWRNRSFGSALEFIWSPDGEYAVRESTSKIKIFSKNFQEKRIVQPTFSAEHIFGGTLLAMCSSDFICFYDWAECRMIRRIDVTVKNLYWADSGDLVAIAGDTSFYILKYNRDVVQSYLDSGRQVDEQGVEDAFELLHETNERVMTGIW

SEQ ID NO: 75427 - protein, 45 aa, Gossypium hirsutum
  Clone ID: LIB3585-054-P1-K1-A2.pep
ELGTCDLYPQSLKHNPNGRFVVVCGGSGVYDLYLLTLAYIGNFVQ

SEQ ID NO: 75428 - protein, 154 aa, Gossypium hirsutum
  unsure (1)..(154): unsure at all Xaa locations
  Clone ID: GOSHI-09MAY01-C80255_1.pep
VNTATKHGLMDAPKAVXPMSVWWLLPQYVLTGLGDVCPPARPQELFYDQMPEEMRSIGAAAYISVVGVGSFINTAIISVVQVISSRHGNEWLGDNLNRAKLNYFYWVLAGLSAFNLCAYIWISRRFVYKKVENNDERVGEGKESGMGGYLDVKV

SEQ ID NO: 75429 - protein, 192 aa, Gossypium hirsutum
  unsure (1)..(192): unsure at all Xaa locations
  Clone ID: GOSHI-09MAY01-C81955_1.pep
EAIYLNRXTFVMDLNMCLSAXHSSSXKTEEGQRFPVLFSTFEHLKETASVVEEIEFLXRDWKKWDRGHKRKVPLKKIKSYKTTPMQLKKDKTTIIWRQFDGPEPDNYWYRVCEGQAAKYIHRPWHTIWKSKRLMNIVTEISGRMDWDFDAIHVIRGEKAQNKQLWPNLDSETSPNAILTKLQQMVQPWRNLY

SEQ ID NO: 75430 - protein, 159 aa, Gossypium hirsutum
  unsure (1)..(159): unsure at all Xaa locations
  Clone ID: LIB3543-029-Q1-K6-C10.pep
VVKQEGWERLYGGLTPSLVGTAASQGVYYYFYQIFRNKAETAALQSQKKGIGDGSVGMLSSLVVAALSGCVNVLLTNPIWVVVTRMQVGNDCSXETALPVIEPLSYGTSHVIQEVYDEAGLFGFWKGXNPSIQFMLYETMLKKLKKRRALSKQGNNGVT

SEQ ID NO: 75431 - protein, 128 aa, Gossypium hirsutum
  unsure (1)..(128): unsure at all Xaa locations
  Clone ID: LIB3585-012-P1-K1-A1.pep
MSDALINGLAGAGGGIIAQIITYPLQTVNARQQTERDLKKEKRKVGAIEQMCQVVKQEGWERLYGGLTPSLVGTTASQGVYYYFYQIFRNKXEPQHFKARKKGXGDGSVGMLSSLVVATLSGCVNVLL

SEQ ID NO: 75432 - protein, 175 aa, Gossypium hirsutum
  Clone ID: LIB3585-007-P1-K1-E8.pep
LKLLNGMNTGVKPTSEHRSSLLQVTDIVPADLDEKNLWPKHGFYIKVSDSSHSIYVSLPSDQDDFVLSNKMQLGQFIYVDRLEPGSPVPVVKGAKPLPGRHPLVGTPEPLMGLRRKGEKSEQKQESKLHRRGSWGKGVNGTDEISSPLVLKPVPLDFDQCTPVKERSNLARTPMM

SEQ ID NO: 75433 - protein, 124 aa, Gossypium hirsutum
  unsure (1)..(124): unsure at all Xaa locations
  Clone ID: LIB3582-041-P1-K1-B6.pep
PTRPPTRPPTRPPTRPRLEPGSPVPVVKGAKPLPGRHPLVGTPEPLMGLRRKGEKSEQKQESKLHRRGSWGKGVNGTDEISSPXVLKPVPLDFDQCTPVKERSNLARTPMMSSMIRRVGKDKCS

SEQ ID NO: 75434 - protein, 72 aa, Gossypium hirsutum
  Clone ID: LIB3585-007-P1-K1-D7.pep
KRDFFDVWPDDLVITIFFKLSSTAACHSDFANVLIVCKKLNSLEVRPLVLSKDSPKMFAIKGKSWSEVTHRF

SEQ ID NO: 75435 - protein, 100 aa, Gossypium hirsutum
  Clone ID: LIB3585-008-P1-K1-D6.pep
GISYPRAHVCIDDIVFERRDFAGDNMACQKRLKLSSGIVGKRDFLDVLPDDLVISMFSKLSSTAVCPSYFSNCLIVCKILNSLSVRSLVLYKAFSKMFVI

SEQ ID NO: 75436 - protein, 224 aa, Gossypium hirsutum
  Clone ID: GOSHI-09MAY01-C81665_1.pep
PKSPERKELPPAPKEEEPAPDMNEIKALPAPENYTPPPPPEPEPVKPPEPQEDLVNVAEDTVPPDDHGNKLPGAAFNAPTANNGDGSWEALPSNGPEVTSAWQTPAAEPGKEDCELALVETASNLSRQKAALGGGLDPLLLNGMYDQGTVRQHVSTAQLNGGSASSAASPPPGKTTSHGVAIAAPDGTVHNDNQDPFAGSLSIPPPSYEQMADMEKKQTLLAQE

SEQ ID NO: 75437 - protein, 185 aa, Gossypium hirsutum
  Clone ID: GOSHI-09MAY01-C81045_1.pep
HASALFFANDGFTAYDCKGQLVFRVDSYGPDARDKAEIVLMDAHGRCLLTVRKKRPSLHHRWEGFLGERTEGQKPIFSVKRSSIIGRCGMTVEVFNNPGLEYQIEGNFGQRSCTIFNAAKESVAEIKRKVDASTNVVLGKDVFLLSLKPGFDGAFAMGLVLVLDQVNGGDYVENDEAEMIPTTED

SEQ ID NO: 75438 - protein, 138 aa, Gossypium hirsutum
  Clone ID: GOSHI-09MAY01-C82555_1.pep
MDGSDWVELFVREMLNASNIDDARARASRALEVLEKSICARAGAKVAQNFHQENKMLKEQLEALIQENTILKRAVAVQHERQKEYENQSQELQHLKQLASQYQEQLRTLEVNNYALTMHLKQTQQSSSIPGRFNPDVF

SEQ ID NO: 75439 - protein, 188 aa, Gossypium hirsutum
  Clone ID: GOSHI-09MAY01-C82575_1.pep
NGSNGKGFTGSESEQLILKSSRAMDQNAGKNEGEDSRQSSSLPRQAIPEYKTFSGSLMPDNTFSSKKVTGDEDRNFPQLKFQSDCIYSGPLYRQRRETNNTDNASESAVVQRGRFKVTSADLSSKGATNCIFSPSTGGPSPNVTASAILPSLQYILQQNTVQREELIRLFKYLEQSSGKLGDLTEVGT

SEQ ID NO: 75440 - protein, 300 aa, Gossypium hirsutum
  unsure (1)..(300): unsure at all Xaa locations
  Clone ID: GOSHI-09MAY01-C82445_1.pep
CRVGCLRDVCNRILYDKRFSAFHYPVTDEDAPNYRSIIQNPMDVATLLQRVDSGQYLTCSAFVQDVDLIVTNAKVYNGDDYNGARIVSRACELRDAVHGMLSQMDPALVAYCDKIAAQGGPAHMPDDLGLPPAVPVMQLGTSTRASARLRNGQPEADLQSYKALKRPKKNADTAPAAEDKSQASDSVQMKPSQTLEVKEINCERDEPTLGDGKQQETSTEANGSQDTIMLDGEISTQAXSVKKLLVERTGNYGIPGLGRLYSRIMXGIFESRVGDDDDPKPSVLEFLLKFAEDDANFSSL

SEQ ID NO: 75441 - protein, 228 aa, Gossypium hirsutum
  Clone ID: GOSHI-09MAY01-C82465_1.pep
MDRSEQTEQQQQQQQQSVMGVVAGTGPMGYSTGPYQAAPVAASGTPATAVPSPTQPPATFSGSPHQLAYQQAQQFHHQQRQRQHQQLHMFWANQMQEIEHASDFKNHSLPLARIKKIMKADEDVRMISAEAPVIFAKACEIFVLELTLRSWIHTEENKRRTLQKNDIAAAISRTDVFDFLVDIIPRDELKEEGLGVTKATIPFVGSPTDMPYYYVPQHPVGHAGMTMG

SEQ ID NO: 75442 - protein, 181 aa, Gossypium hirsutum
  unsure (1)..(181): unsure at all Xaa locations
  Clone ID: LIB3828-025-Q6-K6-F2.pep
APPHLSKAPLSSHKLNGDNGSLDFEKLWKQPSNRDFVPCVQPGSNYTAPDESGGYLLVHTNGGLNQMRAGICDMVAVARIINATLVVPELDKRSFWQDASNFSDVFDEDHFINALANDVNVIKKLPKDLSSATKVVMHFRSWSGLEYYRDEIASLWEEFQVIRAAXSDSRLANNHLPPEMQ

SEQ ID NO: 75443 - protein, 146 aa, Gossypium hirsutum
  unsure (1)..(146): unsure at all Xaa locations
  Clone ID: LIB3585-004-P1-K1-E1.pep
QLNGDNGSLDFEKLWKQPSNRDFVPCVQPGSNYTGWFEXSFLMCLLSTCLLIFNLWFVCSAPDESRGYLLVHTNGGLNQMRAGICDMVAVARIINATLVVPELDKRSFWQDASNFSDVFDEDHFINALANDVNVIKKLPKDLSSAS

SEQ ID NO: 75444 - protein, 249 aa, Gossypium hirsutum
  Clone ID: GOSHI-09MAY01-C82115_1.pep
RESDRSAAKRATHVLAELAKNEEVVNVIVEGGAVPALVKHLQAPPCEDGDRSPKPFEHEVEKGSAFALGLLAVKPEHQQLIVDSGALSPLVNLLRRHKDSSISRAVISVIRRAADALTNLAHENSSIKTRVRMEGGIPPLVELLEFTDTKVQRAAAGALRTLAFKNDENKNQIVECNALPTLILMLRSEDAAIHYEAVGVIGNLVHSSPNIKREVLAAGALQPVIGLLNSCCSESQREAALLLGQFAAT

SEQ ID NO: 75445 - protein, 98 aa, Gossypium hirsutum
  Clone ID: GOSHI-09MAY01-C82065_2.pep
HVRAQLPLKRHQSFKPLQIEPLRMQRLRVKVDFRSLNSRKQGRSLRFEILTSKFPLIKCVDACILIQRRASFWVLFGCWNSDGNPQKNPSNKFGGKFN

SEQ ID NO: 75446 - protein, 110 aa, Gossypium hirsutum
  unsure (1)..(110): unsure at all Xaa locations
  Clone ID: LIB3829-020-Q6-K6-E5.pep
MQASTHLIKGNLEVKISKRRDLPCFREFKERKSTLTRNLCIRRGSICSGLSSGAVSMGAELARARDNVETVARSLIKFRSVKGGDVEDLAPINPHETSXWTVLPFVGVAC

SEQ ID NO: 75447 - protein, 78 aa, Gossypium hirsutum
  Clone ID: LIB3582-058-P1-K1-F1.pep
IAHTSENTRILHYLGRVARVPPLNDDVLRRGGSKTWSFCRAVKAKFFLIFFHFFLSFFLKTESSPSPSFFLFPFLLGF

SEQ ID NO: 75448 - protein, 83 aa, Gossypium hirsutum
  Clone ID: uC-gsflnu33B072h09b1.pep
KIKFIVTNIKYKICKTQILLGPKINNPTNTKKTTYKTSPNQAQSNPSPKLTEKNKNTKTLGVPHLGSSDQQPQHSLCCHPRAV

SEQ ID NO: 75449 - protein, 102 aa, Gossypium hirsutum
  Clone ID: GOSHI-09MAY01-C82375_1.pep
IKLKQLPDVTLPLKVIPLLGFSFCAYISQLRVLLTLLTCKNMDKFQGFVLLFLLVISVSSSQIPMVSAARPFSILPDQQSKSLPACLFLLSFTLLFQFQLTY

SEQ ID NO: 75450 - protein, 198 aa, Gossypium hirsutum
  Clone ID: GOSHI-09MAY01-C83955_1.pep
MGKAKSEFENLWKKRNLEEPLDGDGETLIKRLKTERTKPGFDMELHLDTPLPIEWQRCLDLQSGTIHFYNSRTDTRTCKDPRTSPECPSTGHMSLDLELNLPCVSNATNPEAVSKQNCVGSVEKKLNSWGGLMQKRPWLTMEEAKEEEEEMVATVCRQCHMLVMLIKSSPACPNCKFRHPPPDPGPPKLFNQRLSLLC

SEQ ID NO: 75451 - protein, 156 aa, Gossypium hirsutum
  unsure (1)..(156): unsure at all Xaa locations
  Clone ID: GOSHI-09MAY01-C83815_1.pep
AHQGNGHEXDFGNDERVYILDMYNPGIYPFDMTARNYINQKVEVMTGTATVDYLDQLDKALAVAGSNFAPELIVYNAGTDILDGDPLGGLKVSPEGVIQRDEKVFRFARDRKIPIVMVTSGGYMKTSARVIADSIINLSKEGLIETNVHSGRKIMI

SEQ ID NO: 75452 - protein, 153 aa, Gossypium hirsutum
  unsure (1)..(153): unsure at all Xaa locations
  Clone ID: LIB3829-007-Q6-K6-C5.pep
NINLRGQLTLPSGFIIIFIQSFQDMTARNYINQKVEVVTGTATVDYLDQLDKALALLVTNXQVAGSNFAPELIVYNAGTDILDGDPLGGLKVSPEGVIKRDEKVFRFARDRKIPIVMVTSGGYMKTSARVIADSIINLSNEGLIETNVHSGRK

SEQ ID NO: 75453 - protein, 266 aa, Gossypium hirsutum
  unsure (1)..(266): unsure at all Xaa locations
  Clone ID: GOSHI-09MAY01-C83595_1.pep
MAFLSKIGGILKQTVSTPPWARLSESRPGLFQVFRSMSSDPSSKLFVGGISFQMDDQSLNEAFSKYGEVVEARVIVDRQTRRSTGFGFITYTTTEDASSALQALDGQILHGRQVRVDYANDRPRRNFGGAGGYRGGGGYGGGNYGGGGYGRKMNGNXNIGYGNSGNYGGQGSYGGDNYGTGGGVGYGSNFGQSTNYDTGSFEVAGGGSGSDGFAAGGENVGLGGGDQLGSAEDSYKEETAGFGLNDPPSDNFRDDEDRNGDLSKRV

SEQ ID NO: 75454 - protein, 68 aa, Gossypium hirsutum
  unsure (1)..(68): unsure at all Xaa locations
  Clone ID: uC-gsflmaxxa096a10b1.pep
FIVRQVAIQSDADSXTSYPEYILANLVHALAHHSCPNTDECKDVKAFELIFRQLYLTISMLVKKERKY

SEQ ID NO: 75455 - protein, 108 aa, Gossypium hirsutum
  Clone ID: LIB3493-034-P1-M1-H2.pep
MSTLIEEEIEVRKGPWTTEEDTLLTHYIGRHGVGPWNMLAKCAGLKRSGKSCRLRWLNYLNPDIKRGNLTLQEQQLILQLHSLWGNRWSKIAEHLPGRTDNEIKNYWR

SEQ ID NO: 75456 - protein, 259 aa, Gossypium hirsutum
  Clone ID: GOSHI-09MAY01-C83255_1.pep
GTTAFDSIWSRRRSAANGETGREWWTDYKEGSGERSLVWGSENVDSVMLWERSHTADAYLTGKAEGLDDGDIAGQAIATKTVQGDERTYLTGEELKRNVEFCEAVDCNPHDPAVDMEPAVYDIHVVDDKVDILKEENTKESKLPSGSALNHKTLLYDSRRSFSAVGTEMLEIGAEIKCLRERLQIVRGEKVKLSFSSDQRKRIDTHLKLIEELVNQLREFQQLKEPVRQTSLPPLPSPFKVNSNRRRCRSVSDGIEDSA

SEQ ID NO: 75457 - protein, 228 aa, Gossypium hirsutum
  Clone ID: GOSHI-09MAY01-C58944_1.pep
PTRPIGPKFLNASVGFGGSCFQKDILNLVYICECNGLPEVAEYWKQVIKINDYQKNRFVNRVVSSMFNTVSNKKIAIGRVAFKKDTGDTRETPAIDVCKGLLGDKARLSIFDPQVTVDQIQRDLTMKKFDWDHPLHLQPMSPTTVKQVTCVWDAYEATKDAHGICILTEWDEFKNLDFKRIYDNMQKPAFVFDGRNIVNVDQLREIGFIVYSIGKPLDAWLKDMPAVA

SEQ ID NO: 75458 - protein, 126 aa, Gossypium hirsutum
  Clone ID: GOSHI-09MAY01-C58554_1.pep
STRPGDSILDSFSLSPLPYPVLLILAVTSIFLGISWYVNYESVLETTEEQLSWVLFATPVVLILLARWVSSMDTSDMLFGSSPWERRRQAHQRPSEGSSPWIVAAFIVLLLILVQYQSVFRESWLV

SEQ ID NO: 75459 - protein, 210 aa, Gossypium hirsutum
  Clone ID: GOSHI-09MAY01-C58444_1.pep
DSVPSLRPKGQSSLNEMPHVDTSGPEETKSVLGHQNPVISLPSVIIKELPAIDDDDLPEFDFGAECGISRTPRSKVFDTAVFDKNVVVEGLKKVVASVPLSSPTTQSLPAQCKRRAEDILSPQFAFNSCLNLPPGNKASKLAPVLQAKHTVKSSSVFTPVITSIIAPQKNIFDDDDDDMPEWCPPNVKHTFLESAMVARTSIHPTYQTQS

SEQ ID NO: 75460 - protein, 59 aa, Gossypium hirsutum
  Clone ID: GOSHI-09MAY01-C58734_1.pep
IVEFMKIKNFNSSSAFHYLCFMLSKKKIIWSLSQSIMKNQIMVSPRHLHHLDGHLFHSD

SEQ ID NO: 75461 - protein, 309 aa, Gossypium hirsutum
  Clone ID: GOSHI-09MAY01-C58724_1.pep
VVLEEASKGGPPASLPISCIEAGDDHSLPNLALRRGEEHSFILKPVSSMWKDLSSPRASAKSSALQPPSMTSDRKGSVSVVNHYAVMVSCRCNYTESRLFFKQPTSWRPRVSRDLMISVASEMSGQYSGPNEGITPLPVQVLTLQASNLSDEDLTMTVLAPTSLTSPPSVVSLSSSPTTPMSPFVGFSELAGKAGGERRTADINLAQCPVYLRIKNRMFTSSNAQLTPTADFIPTSGLGCTHLWLQSRVPLGCVPAQSTATIKLELLPLTDGIITLDTLQIYVKEKGLTYIPEHSLMINATSSIFTGII

SEQ ID NO: 75462 - protein, 170 aa, Gossypium hirsutum
  unsure (1)..(170): unsure at all Xaa locations
  Clone ID: GOSHI-09MAY01-C58694_1.pep
MVAELKYEISQNAYIKLVLHALKHKTTAVNGILLGRVNPQNDSVVEIADSVPLFHSNLALLPSLEIALIMIEEHYGSKGLGIVGYFHANERFDDAELGIVAKNIGDHICRYFPQAAIFLLDNKMLEALPMGKDQSPVMQLYIRDASKNWKLAGPDGGTDLXIKEPAANAV

SEQ ID NO: 75463 - protein, 198 aa, Gossypium hirsutum
  Clone ID: GOSHI-09MAY01-C58124_1.pep
MATKAAVSVAASVTAASSSSSKFVINTPHRFLCLKRLSSFSSFSASALAIKCTSISNCSPNKSARSMEGFTTRTKASAQPLENADELIASVETFIFDCDGVIWKGDKLIDGVPETLDMLRSKGKRLVFVTNNSTKSRKQYGKKFETLGLNVNEEEIFASSFAAAAYLKSINFPKDKKVYVIGEDGILKELELAGFQYL

SEQ ID NO: 75464 - protein, 128 aa, Gossypium hirsutum
  Clone ID: LIB3149-046-Q1-K1-G11.pep
PDEIFHRAKGVQLCNTQASQCSPAFFADSFFLNQFSFDVIQDRPFIPPTAWVICERHMISVVPVTRVTMSRHRQFFSFYIVGLSREVYLKDYYPARFCWGLCPCLEWLKTYSLGRYVVHLKGDCFSII

SEQ ID NO: 75465 - protein, 35 aa, Gossypium hirsutum
  Clone ID: LIB3582-030-P1-K1-B9.pep
EVYLKDYYPARFCWGLCPCLEWLKKKELAKYAGLH

SEQ ID NO: 75466 - protein, 65 aa, Gossypium hirsutum
  Clone ID: GOSHI-09MAY01-C59854_1.pep
MPPCRLRAQVEGCGFGRSRGRTNALNLVASNISPRDLSDRQTGKTDRHPMLLSLELGAQLGGTRV

SEQ ID NO: 75467 - protein, 160 aa, Gossypium hirsutum
  Clone ID: GOSHI-09MAY01-C59524_1.pep
GAFAQLGQLSRLDLTYNRLATLAPDPLFSRGREAEASPAPLVLSFSGNPLHCNCELLWLRRLARPDDLETCASPPGLAGRYFWAVPEGEFSCEPPLIARHTQRLWVLEGQRATLRCRALGDPAPTMHWVGPDDRLVGNSSRARAFPNGTLEIGVTGAGDA

SEQ ID NO: 75468 - protein, 162 aa, Gossypium hirsutum
  Clone ID: GOSHI-09MAY01-C59464_1.pep
WGRSQLSAHGPASFKMSTVHEILCKLSLEGDHSTPPSAYGSVKAYTNFDAERDALNIETAIKTKGVDEVTIVNILTNRSNAQRQDIAFAYQRRTKKELASALKSALSGHLETVILGLLKTPAQYDASELKASMKGLGTDEDSLIEIICSRTNQELQEINRVY

SEQ ID NO: 75469 - protein, 68 aa, Gossypium hirsutum
  Clone ID: GOSHI-09MAY01-C59764_1.pep
TTRALNKRSFFKKNLPSILLLPSFPAIELRATVAPNTPTPAWFKSNPQDPSTFGPVKQPPTRSAQIDW

SEQ ID NO: 75470 - protein, 84 aa, Gossypium hirsutum
  unsure (1)..(84): unsure at all Xaa locations
  Clone ID: GOSHI-09MAY01-C59714_1.pep
MALLRGRTASLNLFNRLLHQSFRAPNRNLSSVAADAHNQSTIENMKXRDLLNLDINSHIGSCMPIASMRIGTFIHNIEVNPGQG

SEQ ID NO: 75471 - protein, 81 aa, Gossypium hirsutum
  Clone ID: GOSHI-09MAY01-C59214_1.pep
QWISELVKPHEWLLVEAPAARLNRLLTMQDLLERDIEKGFIPHTESIERSAEPPPFETNSAVFNVATLERYHDIRSRHFKD

SEQ ID NO: 75472 - protein, 135 aa, Gossypium hirsutum
  unsure (1)..(135): unsure at all Xaa locations
  Clone ID: GOSHI-09MAY01-C54714_1.pep
MATASVAFKSREDHRKQLELEEARKAGLAPADVDEDGKEINPHIPQYMSSAPWYLNXKDLCLKHQRKWKSDPNYTKSWYDRGAKIFQAEKYRKGACENCGAMTHDAKSCMERPRKKGAKWTNMHIAPDXKIETFE

SEQ ID NO: 75473 - protein, 162 aa, Gossypium hirsutum
  unsure (1)..(162): unsure at all Xaa locations
  Clone ID: GOSHI-09MAY01-C54184_1.pep
NSNASLNPRRNLSISYISGGCLTDLFTMSTGQLLSIEPQELQFPFELRKQISCSLNLSNKTDNYVAFKVKTTNPKKYCVRPNTGVVLPRSTCNVVVTMQAQKEAPTDMQCKDKFLLQXMWVASPGATTKDIPXMFNKESGHKLKVQGGGDVAPLGPSPVRKI

SEQ ID NO: 75474 - protein, 154 aa, Gossypium hirsutum
  Clone ID: uC-gsflnu33B035c07b1.pep
MLLSPDTRSSGPIKNLIESLPQLYLWWSPVTDPITMSTGELLSIEPYELQFPFELRKQISCSLNLSNKTDNYVALKVKTTNAKKYCVRPNTGGVLPRSTCNVIGIMQAQKEAPPDMQCKDKFLLQSVDARPGATAKDITSEMFNKESEHHVEEC

SEQ ID NO: 75475 - protein, 138 aa, Gossypium hirsutum
  Clone ID: LIB3829-032-Q6-K6-D6.pep
MMSTGELLSIDPQELQFPFELRKQISCSLNLSNKTHSYVAFKVKTTNPKKYCVRPNTGVVLPASTGNVIAVTMQAQKEAPPDMQCKDKFLLQSVVASPGTAAKDITPEMFNKESGNRVEECKLRVVYLAPPQPPSPVQ

SEQ ID NO: 75476 - protein, 114 aa, Gossypium hirsutum
  Clone ID: LIB3582-017-P1-K1-B8.pep
SLPQLYLWWSPVTDPITMSTGELLSIEPQELQFPFELRKQISCSLNLSNKTDNYVAFKVKTTNPKKYCVRPNTGVVLPRSTCNVIGLSPCPSLAQNLDLAIIVLVNHVSFLMFS

SEQ ID NO: 75477 - protein, 167 aa, Gossypium hirsutum
  unsure (1)..(167): unsure at all Xaa locations
  Clone ID: GOSHI-09MAY01-C54164_1.pep
MACSGERQEKLFLAPFASILLVTXAIVTIATTGSISKKKSSNTVAAHSIIKSSCSSTLYPELCYSTISSAPDAETKVKNPKXDVIELSLNLTVTAVQSNYLSIKKLISTQRKSLTEREKAALNDCLELVDENLDELFVAEHDLSDYPRLTXNLQHADDLKSLLSAAM

SEQ ID NO: 75478 - protein, 155 aa, Gossypium hirsutum
  Clone ID: GOSHI-09MAY01-C55144_1.pep
MPTHSYHQFPPTFLNQSPPADKLINTQSHVGHSMTIIKHPTSTTLRFLSSINSRRFQYPRRRFLLVNGSVRFKPMATKLEETMIKGAGEDSKKGGKGEEPGKGIQPPPPPPEKPEPGDCCGSGCVRCVWDVYYEELEAYNKLYKSDSNGSKSNSF

SEQ ID NO: 75479 - protein, 147 aa, Gossypium hirsutum
  unsure (1)..(147): unsure at all Xaa locations
  Clone ID: GOSHI-09MAY01-C55344_1.pep
KIIETDVSYTFLKTTLADDYSEESSYNVVVSAEGSIGTNDYKVMXHNVAKSQIASLVADVFSNTAVAENKVVEVFTSPSAPSKSVDELFSAIPEDGRRKAYAEATARAKAEEEAVLAAVKAREAAEAAKKLEVEVKKLSEQEANAAN

SEQ ID NO: 75480 - protein, 147 aa, Gossypium hirsutum
  Clone ID: GOSHI-09MAY01-C55374_1.pep
DAEWILCIPLSMNKQTDHIIRRGEPTVEYTVRSGHKLILQEGHTNTHSNYKHFYKRIWSLDLPPKIKITNWRLFRNFLPTFCNLHYRRLMGSAICRRCHNGPESSEHVFKECPTMQVLISRWDAPTDPWVKINFDASTFAAEAMACL

SEQ ID NO: 75481 - protein, 99 aa, Gossypium hirsutum
  unsure (1)..(99): unsure at all Xaa locations
  Clone ID: LIB3165-045-Q1-K1-G3.pep
NHSWKGFFLRPSSFKASFTPKGDIFWKLSGFFFLKPFLTIKITTLVASFGTKWKTPGFKSETQLFESWIKNFISDLSSTCSCIFESLXRSRLHFYLSQP

SEQ ID NO: 75482 - protein, 218 aa, Gossypium hirsutum
  unsure (1)..(218): unsure at all Xaa locations
  Clone ID: GOSHI-09MAY01-C55324_1.pep
MADAAPPSKSRDLDKLLLRPGNLVGPTFDPGVQLRDDLQEYARVLVVGAGGLGCELLKDLALSGFKNLEVIDMDRIEVTNLNRQFLFRLEDVGKPKAEVAAKRVMERVSGVNIVPHFCRIEDKDIEFYNDFNIIALGLDSIEARSYINAVACXFLEYDSDDNPREETMKPMVYGGTEGFKGHAXVIVPGVTPCFECTIWLFPPQVKFPLCTLXETPRI

SEQ ID NO: 75483 - protein, 224 aa, Gossypium hirsutum
  Clone ID: GOSHI-09MAY01-C55214_1.pep
YPKLFLHFFQGQCSLPSAHLTAKPPCLRPLDHSPCTKTKPSVRTHAKKKNPWLDPFEDDVEDPFSEYGSLFTDGKQEEDPRPPEDPDNPYGFLKFPKGFTVELASLPLKIRGDVRRCCCVISGGVYENLLFFPVIQLIKDRYPGVQVDILASERGKQTFELNKNVRWANAYDPDDDWPDPAEYTDMIGLLKNRYYDMVLSTKLAGLGHAAFLFMTTARDRVSYI

SEQ ID NO: 75484 - protein, 158 aa, Gossypium hirsutum
  unsure (1)..(158): unsure at all Xaa locations
  Clone ID: GOSHI-09MAY01-C56994_1.pep
MASGLAPVSISGGSHLKAREVWFTKSSTFGKKPSLVVRRKPLSSKNQFSVSAXSRNGSRGGGSDFVTGFLLGGAIFGTLGYVFAPQIRRSLLNEDEYGFRKAKRPLYYDGGLEKTRETLNEKISQLNAAIDNVSSRLRGSNNTPTVSAETDPEVEATM

SEQ ID NO: 75485 - protein, 55 aa, Gossypium hirsutum
  Clone ID: GOSHI-09MAY01-C56554_1.pep
DGSGMKEPVQTQAMDGRAGLGSQTKKLDPSLEVQAGDSYKTVIHKKALARFREMS

SEQ ID NO: 75486 - protein, 57 aa, Gossypium hirsutum
  Clone ID: GOSHI-09MAY01-C56494_1.pep
IRFVFFKSTQIHQFNFRLTQMKAQVQESRPSSDISLVIIMILITLSFGLPTPLHYCI

SEQ ID NO: 75487 - protein, 59 aa, Gossypium hirsutum
  Clone ID: GOSHI-09MAY01-C56484_1.pep
SRTSTKREVDKKAEFFHCKFSGIIINECKYINYKYFFFRKYILPSDNDSLKIKKILFFA

SEQ ID NO: 75488 - protein, 72 aa, Gossypium hirsutum
  Clone ID: GOSHI-09MAY01-C56424_1.pep
MAVSKVSFVAVFAALVFTLVALPAAVQAQSSAPAPAPTSDGTSIDQGIAYVLMLVALVLTYLIHAADLCFTF

SEQ ID NO: 75489 - protein, 130 aa, Gossypium hirsutum
  Clone ID: GOSHI-09MAY01-C56384_1.pep
KSSNILLDEHWYAKLSDFGWAGLGPSDGLSHVSTAVVGTIGYAAPEYIQTGRLTIKSDVWSYGVFLYELITGRRPLDRNRPKGEEKLLEWVRPHISNIKKVRLIIDPRLDGKYSLKSAHKLAAVANKCLS

SEQ ID NO: 75490 - protein, 144 aa, Gossypium hirsutum
  Clone ID: GOSHI-09MAY01-C56314_2.pep
ESDYSVLAPDIIQIIESTILVFRLFLKMANKKHGSFRNLFGNQNPMATPLQQVQSLLEKKGAKLKELRKKRKGWKKNTWPISHEDVPLLFGLIDLKIISRVLRMGRISKEQLFWCEEKMKKLHFCDGKLERDPSPILFPVLIKG

SEQ ID NO: 75491 - protein, 201 aa, Gossypium hirsutum
  Clone ID: LIB3829-003-Q6-K6-G10.pep
GGEKCSSEWRDVEAEGRQWWGGFDAVYEKYCERMLFYDKMIAQQLKEAGSSNPSTPSPKSENKKLRSPLSCLFLKKIEEPDEEAEQLQQSINNPYQDLETAYVAQFCLTWEALHCQYSQLSQIVLCQPENPICYNHSAQQLQQFQVLLQRFIENEPFQDGPRSEIYARARNILPKLLQIPNIQGSDRKEKVEEESDYSVLA

SEQ ID NO: 75492 - protein, 119 aa, Gossypium hirsutum
  Clone ID: LIB3583-034-P1-K1-F11.pep
ENEPFQDGPRSEIYARARNIVPKLLQIPNIQGSDRKEKVEEESDYSVLAPDIIQIIESTILVFRLFLKMDNKKHGSFRNLFGNQNPMATPLQVQSLLEKVHFYLNFLCYLCYSIWKYQI

SEQ ID NO: 75493 - protein, 82 aa, Gossypium hirsutum
  Clone ID: GOSHI-09MAY01-C57874_1.pep
KEQILIYEYNLNYSSSTLPHTSANSYIPITKFPFLTEHIKLNNEGRALKKQNYLKKGVKIQFRSIFGGIYVRILHNPERVME

SEQ ID NO: 75494 - protein, 135 aa, Gossypium hirsutum
  Clone ID: GOSHI-09MAY01-C57834_1.pep
MGPTSAPTTATAPSAGTAPAAGKAPSSGSGKWCVAKSNASDAALQANIDYVCSSGVDCKPIQSAGACFNPNNVRAHASYAMNAYYQANGRHDFNCDFNRTGVITSTEPSHAAWNYSGNQGPGVKLESSVAANTMR

SEQ ID NO: 75495 - protein, 280 aa, Gossypium hirsutum
  unsure (1)..(280): unsure at all Xaa locations
  Clone ID: GOSHI-09MAY01-C57554_1.pep
HASARFAHIEIPVHSFGFGQTGGFSXDDPAEDAFAKCISGIFSVVIQDLRIQLSFAPDSAPAEITAVYSCNGKPTVLTSGSVRLGDFYAEEERDLLVELKVPASALRSNHVMCVRCLYKDPVSQEVVYGRDQSLLVPQPNAVRSPAPEIEQFRFFFITTRAIAESRRLIECGNDLTSAHHLLASARALLMQSNSLTVAEYVRGLEAELTELQRMKQQMVEIQRRRVNEREREREAIMVVMDENGEPLTPSSAWRTAEKLAKVAMVKNKVSDLHGFENARF

SEQ ID NO: 75496 - protein, 142 aa, Gossypium hirsutum
  unsure (1)..(142): unsure at all Xaa locations
  Clone ID: GOSHI-09MAY01-C57474_2.pep
MYRMALMALIAGDLPGVNRXKAIVGDITPSCGVPKEEKSRREQAALTEMCKILGGGMRAEEIQELWVEYENNASLEANLVKDFDKVELILQALEYELEHGKVLNEFFLSTEGKFQTEIGKSWAREINSRRNSILVEKRKGPK

SEQ ID NO: 75497 - protein, 230 aa, Gossypium hirsutum
  Clone ID: GOSHI-09MAY01-C57474_1.pep
MAFSASPHCAPPLHRFALRRSPPPQPPLAFMRCPFFSSSSFRPVYFSPAPTLRIIVSAKSNKPSSGRSADSTSASAIDFLTLCHSLKTTKRKGWINHGIKGPESIADHMYRMALMALIAGDLPGVNRERCIKIAIVHDIAEAIVGDITPSCGVPKEEKSRREQAALTEMCKILGGGMRAEEIQELWVEYENNASLEANLVKDFDKVCYMMAFICVCMLTHTHTPAEIFFT

SEQ ID NO: 75498 - protein, 137 aa, Gossypium hirsutum
  unsure (1)..(137): unsure at all Xaa locations
  Clone ID: GOSHI-09MAY01-C57434_1.pep
SLSKVMDGLFKLAKTLFGIDIEPADGLAPVWNKDVRFYRVKDSSGSPIAYFYFDPYSRPSEKREGAWMDEVASRSRVLSRTGTTPWLPXAHMVCIQTPPFGDKPSLMTFREVETVFHEFGHALQHMLTKQDEGLVAC

SEQ ID NO: 75499 - protein, 114 aa, Gossypium hirsutum
  Clone ID: GOSHI-09MAY01-C57694_1.pep
AISIFIGIANALMTVTAVSMQNVLIGQDLNGCAFVCGSLSFLDKISCGLTLFVLQSFHSSSPIVAGNYSTSNFSITRYGLGLVPAFCSLVGVAVTWTMELRVPLYKPLTETLLE

SEQ ID NO: 75500 - protein, 221 aa, Gossypium hirsutum
  Clone ID: GOSHI-09MAY01-C50914_1.pep
AAWAPPVEVRGEYDLSSLHSALSGGAPLSKEVIEGFLEKYPNVKILQGYGLTESTGIGAWTDSLEESRKYGTAGMLSPSMEAKVVDPDSGKALNVNQTGELRLRGPSVMKGYFSNPEATTSTLDSDGWLRTGDLCYIDEDGFIFIVDRLKELIKYKGYHVPPAELEALLLSHPDILDAAVIPFPDREVGQFPMAYVVRKPGSNLSETGVMDFVGRQVAPYK

SEQ ID NO: 75501 - protein, 149 aa, Gossypium hirsutum
  unsure (1)..(149): unsure at all Xaa locations
  Clone ID: GOSHI-09MAY01-C50884_1.pep
SVIGRSPCCXNRSTYKGSWARKEYXRLITYIQAHGEGCWRSLPKAAGLLRCGKSCRLRWINYLRPDVKRGNFTDEEDELIIKLHSLLGNKWSIIAGRLPGRTDYEIKNHWNTHIKRKLVSRGIDPLTHRPVNEQAAIHTIYTVSLTAVL

SEQ ID NO: 75502 - protein, 198 aa, Gossypium hirsutum
  Clone ID: GOSHI-09MAY01-C50824_1.pep
TCHLETFSLDNLHVVLKVHCVSLMGPGLSNCILIKELYLAGNKISDVEGLHRFLKLTVLDVSFNKITTTRALGQLVANYNSLQALNLLGNPVQSNVSDDQLRKAVCSLLPKLTYLNKQPIKPQRAREVLTDSVAKAALGSGSWSSRRKASKRTSQGASTSASVHRGSVGLRHKNKNKSKSRSRYHSSAKSPALASSSR

SEQ ID NO: 75503 - protein, 63 aa, Gossypium hirsutum
  Clone ID: GOSHI-09MAY01-C50544_1.pep
FYTKKKKNKKKKKKKKKKKKKKKKKKKKKKKKKKKKKKKKKKKIKKKKIKKNIYKIKIYIFSL

SEQ ID NO: 75504 - protein, 59 aa, Gossypium hirsutum
  Clone ID: LIB3146-018-Q1-K1-B1.pep
KWWWKQQRAWPFQLCPLKAPYHHKAFYNKIMNFLRQVNIKNRVIFGKAFTLLESIGRDY

SEQ ID NO: 75505 - protein, 64 aa, Gossypium hirsutum
  Clone ID: uC-gsflnu33B074h04b1.pep
VRPRVRNEIHSTSLLSLILYTKIMNFLTASNNKNKVNLGKKIKMLKSIARDYGSGMNGFRNCMK

SEQ ID NO: 75506 - protein, 86 aa, Gossypium hirsutum
  Clone ID: uC-gsronu33B014a09b1.pep
VAMPHEGTFLSLILYTTIMNFLTASNNTYKANLGKKIKMLKSIARDYGSGMTGSRNRMKGNSYSIDRTSNTIALEPKQGNRQPPTK

SEQ ID NO: 75507 - protein, 86 aa, Gossypium hirsutum
  unsure (1)..(86): unsure at all Xaa locations
  Clone ID: LIB3829-028-Q6-N6-G1.pep
VQGERNCIFPEDPXGQLLNEKCMKKRKGSPADLQDSNEEPKKNLKSRGLCLVPISCTLQVGSDNGADYWAPPSLLGFLGKAIAKHT

SEQ ID NO: 75508 - protein, 99 aa, Gossypium hirsutum
  unsure (1)..(99): unsure at all Xaa locations
  Clone ID: LIB3146-016-Q1-K1-G1.pep
RFLKSQMEALSLPYLTRDGSSGNMRQQQQSLLNEKCMKKRKGSPADLQDSNEEPKKNLKSRGLCLVPISCTLQVXSDNGADYWAPPSLLGFGKAIAKHT

SEQ ID NO: 75509 - protein, 182 aa, Gossypium hirsutum
  Clone ID: GOSHI-09MAY01-C50764_1.pep
IGKPGPTHAYAGMAPTGDTRFQFHSDQIGMGVFHETQLAIYHASKMERVRQWILQDVLHAPISDATYSCNSQSVYATFCDGNIGVFDADSLRLTCRIAPSVYLSSVILKGSQTVYPLVVAAHPIEANQFAIGLSDGTVKVLEPSESEGKWGVSPPADNGVQLNGRTTSSSTTSNHTPDQLQR

SEQ ID NO: 75510 - protein, 94 aa, Gossypium hirsutum
  Clone ID: LIB3146-019-Q1-K1-F2.pep
EKEIKITSAHHFFNQTPKVFNFDNKMSRIFNPEEKKELRRSMKRRGRSMRLGGKTQLQFQSMATEKVTVPVQYLAPSQHSMREAPLQSKRTRTR

SEQ ID NO: 75511 - protein, 91 aa, Gossypium hirsutum
  Clone ID: LIB3146-019-Q1-K1-E8.pep
HMAHRKNPAPVSINGDEEGDGASSVSSAVTTLDERSANAKLTYKNALMMIRCAILDQKIFQETNYAENIANAWEDEWTERLEERVGVRRGS

SEQ ID NO: 75512 - protein, 190 aa, Gossypium hirsutum
  Clone ID: GOSHI-09MAY01-C50614_1.pep
VDEDQLKCIFAIPINSHGLEDMVFWKHGATGEFSVKSGYRVLLTELDQNKSYNLPNAENYMGFYKALWIIQIPPKVKIHVWRLFKNLVPHFCTLAKRKLVADVICPLCKKDPEDSDHLLWSCCILRQLCSGLQIKMAPVGCTSNYKCHFVNTFLAGDEHNRQIISIFLWHYGTVELNVCMKVSSSHCRKL

SEQ ID NO: 75513 - protein, 65 aa, Gossypium hirsutum
  Clone ID: LIB3146-019-Q1-K1-A1.pep
LCIKVSFPRRVIIGLFKVTAPFFFNNFCFFFFFFFFFFFFFFFFFFFFFFFFFFLEAWRYWGVLC

SEQ ID NO: 75514 - protein, 286 aa, Gossypium hirsutum
  unsure (1)..(286): unsure at all Xaa locations
  Clone ID: GOSHI-09MAY01-C50194_1.pep
MLGAARGITSSSSSRIFSTNILSKPPSFFTISRALAPSIPRFSVRSMADSAFKKVQIQRDDTAFDAYVVGKEDAPGIVVLQEWWGVDFEIKNHALKISQLGPGFKALIPDLYRGKVGLDVAEAQHLMDGLDWQGAVKDICASVDWLKANGSKKVGVTGFCMGGALSIASSVLVPQVDAVAAFYGVPSPELADPAQAKAPVQAHFGELDNFVGFSDVTAAKALEEKLKESKTPYEVHIYPGNAHAFMNRSPDGIKRRKGMGMADEDEAAVRLAWSXRFESWMARFLS

SEQ ID NO: 75515 - protein, 83 aa, Gossypium hirsutum
  Clone ID: GOSHI-09MAY01-C50184_1.pep
HGYDNAFFSMRTIFIGHGPQFARGKKVPSFENVQIYNLVTSILKLEGAPNNGSSAFAESVLLPSQSFYLLSMFRVILAAEIWE

SEQ ID NO: 75516 - protein, 128 aa, Gossypium hirsutum
  Clone ID: GOSHI-09MAY01-C50124_1.pep
RRLARSYSSDPSPGQSLMSAYPRAQNQWPAGYGAQPQTWPFTTQAQTWTPGYSQQAAYGAYGSYGSTYATPQVPTSVPQSAGSGAYPTTYPVQTFPQQSFAVPTAGTMLTPAQQPAAAVPQTTYYGTY

SEQ ID NO: 75517 - protein, 102 aa, Gossypium hirsutum
  Clone ID: GOSHI-09MAY01-C50074_1.pep
QNDSPFGSANVSFRLRLHQAASAHNKTEIPSAKKPSLAKEKSTKSLAPGNLELNYIKQKLETLTSMLETSEETMSSEAKSKIQSEIKGLLEMVNTMVESSSS

SEQ ID NO: 75518 - protein, 233 aa, Gossypium hirsutum
  Clone ID: GOSHI-09MAY01-C50384_1.pep
RGDVHKSMKYNVWSSTPNGNRKLDAAFHEAETRESETGTKCPIFLFFSVNGSGQFVGLAEMIGKVDFNKDMDRWHLIKRNGFFPVKWHVIKDIPNKELFHIILENNENKPVTHSRDTQEIGLKQGLELLRIFKGYSEKSSLLHDFGFYENREKTLDAKKNYKPATLEYMEDDLTKQTKAGEREVEEELRRTKKTGDATSIINRTKKLSLNGCNRKSVAVKNPIASSFPTVPAP

SEQ ID NO: 75519 - protein, 52 aa, Gossypium hirsutum
  Clone ID: GOSHI-09MAY01-C50214_1.pep
RSQVPWLVDKYMKKEIKIDECITHNVTLGDINKAFDLMHEGGCLRCVLKMNE

SEQ ID NO: 75520 - protein, 53 aa, Gossypium hirsutum
  Clone ID: uC-gsflnu33B068f05b1.pep
RKVKRKGVYVDNMHHNHKSDNETINNIIQSNSHLHRWFSFNIINQTFFTRLNY

SEQ ID NO: 75521 - protein, 139 aa, Gossypium hirsutum
  Clone ID: GOSHI-09MAY01-C51984_2.pep
FDTSTLLYPSHIELESLNGISFSCFRDLVFKKLYCRLIEAALTLINQEREGQQIDCVLLKNGLDIFVEISDYKGVNYYEDFERIMLTEISGYYSRLASEWLLHDSSAEYVQKVFWCLNREKQRARQYLHPDTEVKIVQV

SEQ ID NO: 75522 - protein, 183 aa, Gossypium hirsutum
  Clone ID: GOSHI-09MAY01-C51984_1.pep
MCLPMVKILVSLLVEFGSVHGRVRINQEREGQQIDCVLLKNVLDIFVEISDYKGANYYEDFERIMLTEISGYYSRLASEWLLYDSSAEYVQKVFWCLNREKQRARQYLHPDTEVKIVQVVRYHLLDQIANKLMEKRQAENSGMVTVYQEILSKCAGMSLQEGSSSTSPEEWLSTLIANSAHIC

SEQ ID NO: 75523 - protein, 116 aa, Gossypium hirsutum
  Clone ID: GOSHI-09MAY01-C51954_1.pep
MKGRPTRAGVHCLTNSCWSALKPSSFSVSGNSNFSKRRVIKAFFFDPNQVPILNQAVKEPVAFMGGMFAGILRLDLDEEPFKGWVARTVEASNISEDDISEGLQEEEDTPEQIEID

SEQ ID NO: 75524 - protein, 144 aa, Gossypium hirsutum
  unsure (1)..(144): unsure at all Xaa locations
  Clone ID: GOSHI-09MAY01-C51974_1.pep
MGEEEANKMEASEPKEDMQQQPQPQPQPVKEEEMENEDEAGAEKKSVIIPLPQKVAAAETPPSVTEKSPNNRDSVLARVETEKRLALVKAWEENEKAKIDNKAYKKISAIGSWENTKKSAVEAQLKXLRENLEKKKEEYAERMK

SEQ ID NO: 75525 - protein, 154 aa, Gossypium hirsutum
  unsure (1)..(154): unsure at all Xaa locations
  Clone ID: GOSHI-09MAY01-C51924_2.pep
WLLIDPKIEFLMSEVNEEKTSGDFREMDXRLAHEVISFVKKKMDKASRSGDLRDIKLSLIGHSIGNFIIRTALAESAMEPYLRFLHTFVSLSGPHLGYLYSSNSLFNSGLWLLEKLKGTQCIHQLTFADDRDIRNTLFHKLCEVLRTKLQNGLE

SEQ ID NO: 75526 - protein, 222 aa, Gossypium hirsutum
  Clone ID: LIB3583-034-P1-K1-D12.pep
PTRPLNFHRDSKTRILDFLRDEWAKDRRAEWSIWMVYSKVDMPHRYINGSFDESSHQIVHKRGSSLWKLTDDPAQMAAMRAELHRRSIAQMRMNSRSIQDMQIFGDPSGIPIVIIEHVMNAPQRTSSDNLYMRNLDIRDSITTSTVPSSEAVKKLSSASAAQSGRDLKIVIFVHGFQGHHLDLRLVRNQWLLIDPKIEFLMSEVNEEKTSGDFREMGLRLAH

SEQ ID NO: 75527 - protein, 339 aa, Gossypium hirsutum
  unsure (1)..(339): unsure at all Xaa locations
  Clone ID: GOSHI-09MAY01-C51844_3.pep
MNLSGTLVPELGQLSHLKILHFMWNELTGNIPKEIGHISTLRLLYDYSGYGQSSGKPSQQNTYADIEAAYKCLEENYGAKQENIILYGQSVGSGPTVDLATRLPRLRAVVLHSPILSGLRVMYPVKRSFWFDIYKNIDKISLVKCPVLIIHGTNDDVVDCSHGKXQLWELCQEKYEPLWVKGGNHCDLELYPDYIRHLKKFISTVEKSPSRRNASRKSTDGIEQSRQSTEYFEAPRRSIDRREKPRKSTDTRDKPRKSTDSREKPRKSIDRPEKLKVQEHNKFNNMDKLEKLRTSLDQMERMERSRRSVEYHEKSRRSVDLQLEKGRKSVDWIDRIPAV

SEQ ID NO: 75528 - protein, 123 aa, Gossypium hirsutum
  unsure (1)..(123): unsure at all Xaa locations
  Clone ID: AI054982.1.pep
GTNDDVVDCSHGKQLWELCQEKYEPLWVKGGNHCDLELYPDYIRHLKKFISTVEEVTFSKKCXRKSTDGIEQSRQSTEYFEAPRRSIDRREKPKESTDTRDKPRISPIPGKTMKSLMALKLKF

SEQ ID NO: 75529 - protein, 112 aa, Gossypium hirsutum
  Clone ID: AI055591.1.pep
KRQLLNMNLSGTLVPELGQLSHLKILHFMWNELTGNIPKEIGHISTLRLLYDYSGYGQSSGKPSQQNTYADIEADTSVFERFTVPSKKIHPVGRSVVALLGSCYSFTSIRLF

SEQ ID NO: 75530 - protein, 144 aa, Gossypium hirsutum
  Clone ID: AI731904.1.pep
MGGVTSSMAAKFAFFPPNPPSYKLVKDEATGISVLDPFPHRENVDVLRIPTRRGNEIVAVYVRNPMATSTLLYSHGNAADIGQMYELFIELSIHLRINLMGYDYSGYGQSSGKPSEHNTYADIEAAYKCLEESYGAKQENIILY

SEQ ID NO: 75531 - protein, 89 aa, Gossypium hirsutum
  Clone ID: GOSHI-09MAY01-C51864_1.pep
QFRSDHLKQIISGFQSFHSHCTSCFLVLCDMIRPLNVSCFFCCLKEGGALLLSSYPGTGFLSFCNLGCNSIAVLLSPTFWALLFLPFCF

SEQ ID NO: 75532 - protein, 102 aa, Gossypium hirsutum
  Clone ID: GOSHI-09MAY01-C51574_1.pep
ELWLYIRKKERKRKKKLKIQFSFPSICYSAIFVCICRCVRPSCRYGVRWHRTEAVLAWLLETETYGGAEGARLRRKARGSPRVSGLVIFWAYRACIWVSGSG

SEQ ID NO: 75533 - protein, 56 aa, Gossypium hirsutum
  Clone ID: uC-gsflnu33B073g07b1.pep
LLSMFSVSSNHASTASVRCQRTPYLGNIGVNSHKSKSGQGVRPEISSPYKLGPKRG

SEQ ID NO: 75534 - protein, 93 aa, Gossypium hirsutum
  Clone ID: GOSHI-09MAY01-C51514_1.pep
ADPSEAHDSHETAEGETGEGNGDNSEPITRSCTYSYDQLKSKSENPVTGIDFKRRETYLSDEEFETVFGMPKEAFYKLPKWKQDLQKKEVDLF

SEQ ID NO: 75535 - protein, 341 aa, Gossypium hirsutum
  Clone ID: GOSHI-09MAY01-C51714_1.pep
FYSERAHSEAYATILHSAHVYVCGAITAAQSIRMSGSTRDLVILVDDSISDYHRGGLEAAGWKIYTIQRIRNPKAEPEAYNEWNYSKFRLWQLTDYDKIIFIDADLLILRNIDFLFEMPEISAIGNNATLFNSGVMVVEPSNCTFQLLMDHINEIESYNGGDQGYLNEIFTWWHRIPKHMNFLKHFWEGDEVEKKQMKTRLFGADPPILYVIHYLGNKPWLCFRDYDCNWNVDILQEFASDVAHKTWWKVHDAMPENLQKYCLLRSKQKAQLEWDRRQAEKGNYTDGHWKIKIKDKRLKTCFEEFCFWESMLWHWGEKNWTDNSTANPSPPAIKKVSLSSL

SEQ ID NO: 75536 - protein, 209 aa, Gossypium hirsutum
  unsure (1)..(209): unsure at all Xaa locations
  Clone ID: GOSHI-09MAY01-C51704_1.pep
QLSTVPPGRRTPEAIARAVEYLDNLDQAALQGGFILEKIMGPISTGHLELQTRNPDDNPSVTFNYFQHPLDLQRCVQGIQTIGKIVESESFSKFRYDYMSWPGLVNMTEHSPINLLPRHYNSSIPLETFCRDTVMTIWHYHGGCQVSRVVDPDYKVLGVEALRVIDGSTFNYSPGTNXSATVMMLGKVVLKLITCRNIHFMVGFLKLTF

SEQ ID NO: 75537 - protein, 125 aa, Gossypium hirsutum
  Clone ID: GOSHI-09MAY01-C51614_1.pep
TYIIIVREKWAAKGQALQIVKQPNKLNLGPNPNSPLTKFSTENPSSFGPNAASPSSLQYHPRTPPRISRHDPPQRAPLHAPTIPDLVAFCYSLCLDQKLKRRLKPRGALERRPPRVKETLEEART

SEQ ID NO: 75538 - protein, 47 aa, Gossypium hirsutum
  Clone ID: GOSHI-09MAY01-C51144_1.pep
PNPIPEPIQACLQAYFRSAIRFINYFIICEHVRAQAQAPVTHTESHP

SEQ ID NO: 75539 - protein, 261 aa, Gossypium hirsutum
  Clone ID: GOSHI-09MAY01-C51124_1.pep
MESSSEVSSRLQYIEQYLLDENQFPPVGLWSFSNENQWTNYPKSEVSTSQSHSLYSQTSTSDSCLTASNFNSLDEDDFFNFSTNFPGFESNQSDVFEFDSKPQSIHLTTPKPLASDATACEFQVKSLSSSNSTSNSQSRKPLLKISLPHKVEWIQFGKPDLTEVKPKNSNTEEKTKHYRGVRQRPWGKFAAEIRDPNRKGSRVWLGTFDTAIEAAKAYDRAAFKLRGSKAILNFPLEAGKLDVIAADGERKRMRDDDAWDE

SEQ ID NO: 75540 - protein, 67 aa, Gossypium hirsutum
  Clone ID: GOSHI-09MAY01-C51034_1.pep
FNIAWTITSRSPWNCSHIQGYSAMVSPETCEPLKESIYPNHSSDCYHLSNHLRSSGHQNKGSWLHSW

SEQ ID NO: 75541 - protein, 131 aa, Gossypium hirsutum
  Clone ID: GOSHI-09MAY01-C51384_2.pep
SDYSLSLPKLGFRKLKYADFSTSYSITGTFLRNLGNGGGGSLLEVLILRDCMHLKEMEVARFLTAVIAGDFKFLKHLDISNREGLASEGDWYQRSYNSSLIPLQQVLEVRPDICLLAEFPSEGCGRDASLT

SEQ ID NO: 75542 - protein, 177 aa, Gossypium hirsutum
  Clone ID: LIB3582-007-P1-K1-B3.pep
MSVSSNCHLIERLFFESSKTGRDDSLKSPTCVDLVNNCPNISYLSLRGFKLHDYKVRILVKGFRKLKYADFSTSYSISGTFLRNLGSGFGGNLLEVLILRDCMHLKEVEVARFLTAVLAGDFKFLRYLDISNREGLASEGDWYQRSYNSSIIPLKQVEVRPNICLLAEFPSEGCYID

SEQ ID NO: 75543 - protein, 114 aa, Gossypium hirsutum
  Clone ID: LIB3146-027-Q1-K1-C4.pep
LVVASLLLVFPFFPSSHKHSKIRNWKFLGNEYRILTCFSWLCSFLDIDHMIDSDFNSELSLPFQQSGETSDGALVTSSLESSYNSDQGSGNEEYQDSGFVIYEESSDEVDFLVV

SEQ ID NO: 75544 - protein, 144 aa, Gossypium hirsutum
  Clone ID: GOSHI-09MAY01-C51224_1.pep
AYSCKIDVYWDLSSAKFGSGPEPFEGFYVGVVANKQMVLLLGDMSKEACKKTGATHIPCNASLVAKKEHVFGKRVFGTKAQFCDNGRIHDLIIECDAVGMKDPCLIIRVDGKALMQVKRLRWKFRGNHTILVDGMAVEVYWDVH

SEQ ID NO: 75545 - protein, 71 aa, Gossypium hirsutum
  Clone ID: GOSHI-09MAY01-C52904_1.pep
PKEEKRRRKIISFYNFCYIFGPSSAIRGSFAGITCMVGAGPRAQHVGRRWGGYCGPSLLLLLRVSAVLCFC

SEQ ID NO: 75546 - protein, 84 aa, Gossypium hirsutum
  Clone ID: LIB3146-050-Q1-K1-D3.pep
GFSAWVSTLAPSCRHRRAHREATANGARNQELPSLLVPGHLPHICGHLWAVTAAPVCCYCLGFLLCCVFAEGHTVVRLGFRLVG

SEQ ID NO: 75547 - protein, 82 aa, Gossypium hirsutum
  Clone ID: GOSHI-09MAY01-C52934_1.pep
YAPSCSSSSQLITLLKVTQVDIGLQFLQTSPEYGPTYISRIHPIKIQLQKTSSWDNSAFCILYLGNFHFKLLLLQSMMPFES

SEQ ID NO: 75548 - protein, 145 aa, Gossypium hirsutum
  Clone ID: GOSHI-09MAY01-C52894_1.pep
LTYPLELLKARLTVNEDYKNLLDAVAKIVQAEGPGGLYKGLTPSVMGVVPYAASNYFAYDTLRNAYKKAFKKEEIGNVMTLLIGSAAGAISSTATYPLEVARKQMQAGAINGRQCHSMIQALTSIVEKEGMAGLYRGLGPSCMKL

SEQ ID NO: 75549 - protein, 93 aa, Gossypium hirsutum
  Clone ID: GOSHI-09MAY01-C52574_1.pep
IVTFRKKSLISFPCLFLFSAVVLFFLQVPARNPAMTIHWREFRPGVEVLAAPRASETLGLLSFVNKLGHLGLVYFGRHLVYSMGLGVIGHRVI

SEQ ID NO: 75550 - protein, 194 aa, Gossypium hirsutum
  Clone ID: GOSHI-09MAY01-C52504_1.pep
MNCLQNLPRSYALPFQGFKCNPRKLLSCSLNMMVHFQGGMNSSNVPRSMVVKAIPGSTSSEKTSNSDSEGKKSETYSHDMTEAMGAVLTYRHELGMNYNFIRPDLIVGSCLQTPEDVDKLRKIGVKTIFCLQQDPDLEYFGVDIGTIRDYAKKCGDIEHIRAQIRDFDAFDLRMRLPAVVSILHKAVNRNGGVT

SEQ ID NO: 75551 - protein, 63 aa, Gossypium hirsutum
  Clone ID: GOSHI-09MAY01-C52494_1.pep
CFFLLFLLEFLLVFIYLLFQCISFSLFFFSFAFKIIKKIRKERKETHLPVVACRRPPAIVVVR

SEQ ID NO: 75552 - protein, 110 aa, Gossypium hirsutum
  Clone ID: LIB3146-044-Q1-K1-D7.pep
ATSVVHRTTTMAGGRRQATTGRCQTSMVKCGGGVQGVGAAHRGKGVHAALERARFCSPLPKLLMLFGLGFLIFWARWVYLILVLGRNCNGLFYFGIWGSILDPGKNGLLQ

SEQ ID NO: 75553 - protein, 171 aa, Gossypium hirsutum
  unsure (1)..(171): unsure at all Xaa locations
  Clone ID: GOSHI-09MAY01-C52484_1.pep
MENGSSSSSSSSMGNNNVYQQTPSSERSAVTSSNAFFSMAKSLLPARRRLRLDPSNKLYFPYEPGKQVRSAIDIKNTSKSHVAFKFQTTAPKSCYMRPPEGILGPGESLIATVFKFVEPPENNEKPMEKKSRXKFKIMSLKVKGETDYVPELFEEQNDEVTVEQILLAAFL

SEQ ID NO: 75554 - protein, 66 aa, Gossypium hirsutum
  Clone ID: LIB3146-044-Q1-K1-C8.pep
TTAPKSCYMRPPEGILGPGESLIATVFKFVEPPENNEKPMEKKSRVKFKIMSLKVKGETDYVPELV

SEQ ID NO: 75555 - protein, 197 aa, Gossypium hirsutum
  Clone ID: GOSHI-09MAY01-C52414_1.pep
MQIFETTNIKQEVEEIEENNMMPRLDETSSRYRQFDMVSDCSDHHFLGESKVLAMSQVKRSWVKKVQQEWSILEKNLPEIIYVRVYEERMDLLRAVLVGAPGTPYHDGLFFFDIFLPSNYPYEPPSVHYHSWGLRLNPNLYESGKVCLSLLNTWTGSDTEVWNPGSSSILQVLLSLQALVLNEKPYFNEAGYDKTVG

SEQ ID NO: 75556 - protein, 111 aa, Gossypium hirsutum
  Clone ID: GOSHI-09MAY01-C52434_1.pep
FEYRVTQESLMDRLTTDIRAACLSIDQNCRVLTIHGSMDKIVPAQDALEFARFIRNPKLRIIEGADHEFSAHQDELATVVLDFVKAVREDRNSAERLQSCERAVNFIKARI

SEQ ID NO: 75557 - protein, 159 aa, Gossypium hirsutum
  unsure (1)..(159): unsure at all Xaa locations
  Clone ID: GOSHI-09MAY01-C52744_1.pep
HASGGVGDSVIGRALSQLLWSVNDIPVSSSKYGIVRSLAEQLIEENNKEDIEALREMNRTVLXAAFSRTLGLVEAAMLELGQGRVGHYGAGFGPVCYQLNRLLRAVGVGSGRVGVSRSGNSMQKLAAELLWLPEKLSGCEFEEEAVERWASASNLAGLS

SEQ ID NO: 75558 - protein, 151 aa, Gossypium hirsutum
  Clone ID: GOSHI-09MAY01-C52764_1.pep
PTRPSYLAKQQWEEVQAVIQQVQNIMGGCLTTHDNLEASLRDLSRTGNIRACKAARKAADGLLKELSKELKPLLTFLRSSPSAAQVLPKVEELVAKERELQEKVMVKHSTVVDGYEKKSGARDIENRVALQQQKLTALEARKLMIFFEFIV

SEQ ID NO: 75559 - protein, 207 aa, Gossypium hirsutum
  Clone ID: GOSHI-09MAY01-C52614_2.pep
LFTPAPARAAGTKGDNYEPNRMNPQQPVLDVAPLNCVPYMGPTNADDMFSSPTKENTEAVEAIGPAMIFLPSQSTREELDNIMAATKNGVALTGAAATGSVGPVIGKVDIGELEDSYYFRVALPGVSMDKRDFNCDIEPDGKVVIKGMSTTGEKIVCKNFQIFHMLTQNLCPPGLFTASFQLPGPVNNEDAKSYLANGMLEAVVKRM

SEQ ID NO: 75560 - protein, 87 aa, Gossypium hirsutum
  Clone ID: GOSHI-09MAY01-C52614_1.pep
ILSSRFLMWRLSIVCHTWVQLMPMICFLHPPKRILRLWKTIGPALNFCLYNNPGKIGKYKGCSKKWFPLMGLNTWDNWPLFWEKGPW

SEQ ID NO: 75561 - protein, 59 aa, Gossypium hirsutum
  Clone ID: GOSHI-09MAY01-C52634_1.pep
PRVRGRVGKWAWARTEHIRVHTGARPYVCGEEGCGQTFRFVSDFSRHKRKTGHSGKKGS

SEQ ID NO: 75562 - protein, 141 aa, Gossypium hirsutum
  Clone ID: GOSHI-09MAY01-C52174_1.pep
MRREISILIQPRCLLLFISLSILLIFAFSGAKREEEKIVEEEHEITHRVYLDVDIDGQRVGRIVIGLYGEVVPKTVENFRALSTGEKGKGAKGKALHYKGTPFHRIISGFVVQGGDIIHGDGRGSESIYGGTFADENFKIK

SEQ ID NO: 75563 - protein, 79 aa, Gossypium hirsutum
  unsure (1)..(79): unsure at all Xaa locations
  Clone ID: AI726244.1.pep
MRREISILVQPRCLLLFISLSILLIFAFSGAKREEEKIVXEEHEITHRVYLDVDIDGQRVGRNIIGLYGEVVPKTVGMF

SEQ ID NO: 75564 - protein, 147 aa, Gossypium hirsutum
  Clone ID: LIB3543-036-Q1-K1-E8.pep
MTEEENREFDVDVDDNDDDGFEDENNIPNSQNKKRKKKKLLNEGGDADNRGVCYLSRVPPHMDHVKLRQLLSQYGEILRIYLTPSGHQPQVKGKRPRPSKVQEQEFSEGWVEFARKGIAKRVANMLNGEQIGGRKRSSFYYDIWNIK

SEQ ID NO: 75565 - protein, 77 aa, Gossypium hirsutum
  unsure (1)..(77): unsure at all Xaa locations
  Clone ID: LIB3146-040-Q1-K1-A3.pep
TQIKRKPPKPFKGQEQEFSERGVEFARKGIAKRVANMLNGEQIGGRKRSSFYYDIWNIKYLSXFKWDDLTEEIAYKS

SEQ ID NO: 75566 - protein, 204 aa, Gossypium hirsutum
  Clone ID: GOSHI-09MAY01-C52284_1.pep
TVAFGFHKVLQGQEIFLSSLYRRGSTMEETRGNDGAGLPNVGQMSGTRSGWSSSMQGYNTHSPVQPSAQVSSPSSVLMFQQASNPVPNFNPTRNFNQEMERGVSSFRVPETYGAKLLSSSISEHDSQPLAAQPSFGTNQELASCKSSCRLFGFSLTEGDLDATKEDNVVHATLSLGRGSLLPCIGESFHPNPPAVASTVWKQLY

SEQ ID NO: 75567 - protein, 102 aa, Gossypium hirsutum
  Clone ID: GOSHI-09MAY01-C53964_1.pep
KIRGRGHFWIQNGLFLEIGELWIPTRKTNPIHKDVPENTLFLLLNQPLRDAYTTGPLFLKINLVAINAKTANWKAIAMFLILQATNKRTIPFDPSMILTKKN

SEQ ID NO: 75568 - protein, 80 aa, Gossypium hirsutum
  Clone ID: GOSHI-09MAY01-C53864_1.pep
MSGPPRVRSAYTATGMEARSVLGPAGNKVPTKPASKSTKKPVQQTPEGKDKEKVKELFTPQKKPTPAPQSLTLTASILRL

SEQ ID NO: 75569 - protein, 220 aa, Gossypium hirsutum
  Clone ID: GOSHI-09MAY01-C53424_1.pep
EKLIVFVTHHHLDHVEGLSIIQKCNPNATLLAHENTMRRIGKGDWSLGYTSVSGEEDILVGGHRLTVIFAPGHTDSHMALLDVSTNSLIVGDHCVGQGSAALDITSGGNMTEYFQTSYKFLELSPHTLIPMHGRVNLGPKNMLWGYRKNRRSREESILQAIENGAETLFDIVANVYSGVDRTLWTAAASKVRLYVGHIYPHKRLYKGSSIWKTILTVCQH

SEQ ID NO: 75570 - protein, 92 aa, Gossypium hirsutum
  Clone ID: GOSHI-09MAY01-C53724_2.pep
GEAAGPRRQSENENISQNGNPMQIPAQPDLQQAEAGPNPGTMSSFSSLLLWILGGASSEGLSSFLSMFRDVREQGQVYTDPPHENRAMQNVQ

SEQ ID NO: 75571 - protein, 65 aa, Gossypium hirsutum
  Clone ID: LIB3828-004-Q1-N6-H12.pep
PDLQQAEAGPNPRTMSSFSSLLLWILGGASSEGLSSFLSMFRDVREQGQVYADPPHENRAMQNVQ

SEQ ID NO: 75572 - protein, 173 aa, Gossypium hirsutum
  unsure (1)..(173): unsure at all Xaa locations
  Clone ID: GOSHI-09MAY01-C53664_1.pep
REELLKRRLQHLRKLSRCYRDHYWALMENLKIQYRNYYWKFGISPSKQNDNQQLADAQVVANPIVDDIESPPADNVHVDNNFSSNFKNNQHCLFVGCKFKAMALTRFCHLHILSDSKQKLYKACTYVIKSAHAGPITCGKPILRTAIPFLCTXHFQKTQKHVNRALKKQVLMF

SEQ ID NO: 75573 - protein, 165 aa, Gossypium hirsutum
  unsure (1)..(165): unsure at all Xaa locations
  Clone ID: GOSHI-09MAY01-C53014_1.pep
PRVRPRVRPLVRPRVPQIEVNASNGSIGAHRAVLSARSPVFHSMFSHNLQEKELSTINISDMSIEACQALLCYIYGNIKHEEFLAHRLALLRAADNYDISDLKEACHQRLLEDXDPKNVLERLQMAPFYQLPKLKSSCMRYLVRFGKIYDIRDDFNAFLQCADGS

SEQ ID NO: 75574 - protein, 126 aa, Gossypium hirsutum
  Clone ID: GOSHI-09MAY01-C53324_1.pep
NLDNESPSTITSLNPRSPPHFERLEACKSFGRERCPPSRPSLESGIKFDCYKRDFRWPAPLAPHLGDRPKRPNCTNNLSTDARFQLQTDSCENHPPTSPHFSSILGKSLLQPIFYCTNYRNLELDY

SEQ ID NO: 75575 - protein, 256 aa, Gossypium hirsutum
  unsure (1)..(256): unsure at all Xaa locations
  Clone ID: GOSHI-09MAY01-C53244_1.pep
DILPKLMTSTGSYEDLFRKEIAKYDHICEEIAQNIEAQEQLLMQIQVQNEEFGAVFNLEDYKASREKCYKQIQAALAKCKEIKENINEGLKFYVTLQDAINNIKQQCSDFVMTRNIQCREMMEXDVQRQMAGFNFXDRESTGPYPSVGQPXSIPRSSTQQLTESQSISHPSPQTPYYRPPEQPMHGYGHPPPPYTAPQQPSPYHVPPSTGAPYPPPHAQQHAPVGHEYGQPAYPGWRGPYYNAPAEQSGSHPRPPY

SEQ ID NO: 75576 - protein, 37 aa, Gossypium hirsutum
  Clone ID: GOSHI-09MAY01-C48974_1.pep
YSSIFFKIHVNIINLKKPNYTKLKSNDNRGTKTIIRP

SEQ ID NO: 75577 - protein, 195 aa, Gossypium hirsutum
  Clone ID: GOSHI-09MAY01-C48914_1.pep
MKIHEVWVVKRIIWYQILYQGYCTFSSLPSFNSVQVNFIPIPKMASPICFYLLFLSLLSQTQLSFSTTHTPIDHGRPLVTSIADVHDLLPKYGLPKGIVPNNVKSYTLSSTGDFTIELESTCYVQFDDLVYYDKTISGKLSYGAVHDVFGIQAKKLFLWLPVTGIEVNGKSGMVQFFVGAFSMEFPAVQFEDIPV

SEQ ID NO: 75578 - protein, 160 aa, Gossypium hirsutum
  unsure (1)..(160): unsure at all Xaa locations
  Clone ID: GOSHI-09MAY01-C48844_1.pep
NIPAASFGISTMIGVTVWIRIYDRLIVPWLQKSTKKEGGITLLQKMSIGMVLAIITMVISAIVEDRRRALALSNPIGIDSKKRSFSSLSTMGXIPQLTLIGLSEAFTLIGLIEFYYKQFPENMRSIAGSFTFIGLALSSYLSSFLISVVHKISERSQTGD

SEQ ID NO: 75579 - protein, 225 aa, Gossypium hirsutum
  Clone ID: GOSHI-09MAY01-C48864_1.pep
MDEVKLFGFWPSPFSRRVIWALKLKGVEYEYIEEDLPYNKSDLLLQYNPVHKKIPVLVHGGKPIAESLVILEYIDEVWPHNPLLPKDAYERSVARFWAKFIEEKTQPMWEFFRKFGEEQQKAIENNYEILRTIEEHGLGDKKFFGGDQIGVADLVFGMVIHMLAPMEEVVGGVKFIKADSFPRLHAWVRHFSEHPVIKDNVHYYTRVVDFLKKRIELYRKSQHSH

SEQ ID NO: 75580 - protein, 199 aa, Gossypium hirsutum
  Clone ID: GOSHI-09MAY01-C48554_1.pep
PRVRALFLAITSLVLGSTIASDEFDPVLDISGQELRTGIDYYILPVIRGRGGGLTLASTGNETCPLDVVQEQQEVSNGLPLTFSPVNVTQGVVRVSTDLNIKFSAASICVQTTLWTLHFDESVQKYIVTTGGVEGNPGRETLSNWFKIQKFEDDYRLVYCPTVCNFCRPVCGALGVFMDGGTRRLAISEEPLKVMFKRA

SEQ ID NO: 75581 - protein, 207 aa, Gossypium hirsutum
  unsure (1)..(207): unsure at all Xaa locations
  Clone ID: AI055331.1.pep
MKTALFLAITSLVLGSTIASDEFDPVLDISGQELRTGIDYYILPVIRGRGGGLTLASTGNETCPLDVVQEQQEVSNGLPLTFSPVNVTQGVVRVSTDLNIKFSAASICVQTTLWTLHFDESVXKYIVTTGGXKGNPGRETLEHWFKIXKFEDDYRLXYCPTVCIFADFCGALGFYGGELALANMRALNHVRGTLRHLLFLIPNTLLI

SEQ ID NO: 75582 - protein, 207 aa, Gossypium hirsutum
  unsure (1)..(207): unsure at all Xaa locations
  Clone ID: GOSHI-09MAY01-C48674_1.pep
MAKTRPGSLAPKSKPGKKDLDSFTIRGTNKVVRVGDCVLMRPPDNGKPPYVARVEKIESDSRNNVKVRVRWYYRPEESLGGRRQFHGAKELFLSDHYDVQSAQTIEGKCIVHSFKNYSKLENVGAEDYFCRFEYKAATGAFTPDRVAVYCKCEMPYNXPDDLMVQCEGCKDWYHPACVDMTIEEAKMLDHFVCFECSEDDLKRSQNG

SEQ ID NO: 75583 - protein, 122 aa, Gossypium hirsutum
  unsure (1)..(122): unsure at all Xaa locations
  Clone ID: LIB3135-048-Q1-K1-E9.pep
KRAEARVRYEVHSVHTMVWKCIVHSFKKYTLHEDVGADDYYCRFEYKAATGAFTPDRVAVYCKCEMPYNPYDLMVQCEGCKDWYHPACVDMTIDESKMLDHLCCSECSEDDPKXSQNGFHSS

SEQ ID NO: 75584 - protein, 108 aa, Gossypium hirsutum
  Clone ID: GOSHI-09MAY01-C48194_1.pep
PRVREANAHHALPLNNYCHQVQCQVTATNQTTLEPARNSPKKHYRGVRRRPWGKYAAVIRDSTRQGARMWLGTFETAEAAALAYDKAAYRMRGSKALLNFPAEVTVEP

SEQ ID NO: 75585 - protein, 120 aa, Gossypium hirsutum
  Clone ID: uC-gsronu33B169f05b1.pep
MAYSQARDFMFCNLCGTMLSLVSPKIAECSLCRSKTSAKGIVGREIGYTLTVEDIRRDLGISHAAEEMTTKESAALIKQTCKSCGNAKLEYTTRQMRSADEGQTVFLGCPKCKRRDTENE

SEQ ID NO: 75586 - protein, 52 aa, Gossypium hirsutum
  Clone ID: LIB3135-041-Q1-K1-G9.pep
IQIRDCFFLLSSLKERFMAYSQARDFMFCNLCGTMLSLVSPKIAECSLCRSK

SEQ ID NO: 75587 - protein, 161 aa, Gossypium hirsutum
  unsure (1)..(161): unsure at all Xaa locations
  Clone ID: GOSHI-09MAY01-C48364_1.pep
RRVGRPRVREAVGLGGWHWLVLKNGVEVKLQXNALSVLEHPTGNEVDDDHDLDNSSSGSDIASSIEFQRPAKPRVRHTKPWVPSASMKSTNRNGYRDVRSIIHAPQSGGINAYSPREQMLNTVQQHFMSQLPLNEVHVISEFITAAKRLKTVDGDTKGEQL

SEQ ID NO: 75588 - protein, 149 aa, Gossypium hirsutum
  Clone ID: LIB3135-044-Q1-K1-D6.pep
SPTRPVGLGGWYWLVLKNGVEVKLQRNALSVLEHPTGNEVDGDHDFDNSSSGSDIGEKDHDFPSSIEFQRPAKPRVRHTKPWVPSASMKSTNRSGYRDVRSIIHTPQSVNLARLDTNSLRRYCKHFKLGGINAYSPREQVLNTVQQHFM

SEQ ID NO: 75589 - protein, 133 aa, Gossypium hirsutum
  Clone ID: GOSHI-09MAY01-C49984_2.pep
MAALVLPLLILAAITGRSSGNWCICKDGVSDTVLQKTLDYACGAGADCNPIHLKGSCFNPDTVKAHCSYAVNSYFQRKGQAQGTCDFSGTATVTTADPSYTGCAFPSSASTVCTHHNTHIHTFIHHTLVLDPN

SEQ ID NO: 75590 - protein, 198 aa, Gossypium hirsutum
  Clone ID: GOSHI-09MAY01-C49984_1.pep
MAALVLPLLILAAITGRSSGNWCICKDGVSDTVLQKTLDYACGAGADCNPIHLKGSCFNPDTVKAHCSYAVNSYFQRKGQAQGSCDFSGTATVTTADPSYTGCAFPSSASTAGTTTTPTTTPSSTTPSSVNPINNTPTSTTPFGSTTPTGILGGVGNGLGPSGTGINTDYSTDGGFRLQYCFSSYATLLISGLMLLWG

SEQ ID NO: 75591 - protein, 84 aa, Gossypium hirsutum
  Clone ID: uC-gsronu33B046e09b1.pep
LTDKAHCSYAVNSYFQRKGQAQGTCDFFCTATVTTTSPTTTPLFTILLSVNLINMIKTCLSPFVSTHLPEYWVELSITFRFSYI

SEQ ID NO: 75592 - protein, 174 aa, Gossypium hirsutum
  Clone ID: GOSHI-09MAY01-C49534_1.pep
TDPSQMSSRSIRRQLGHNLLSSLKYTFKFDRRNSTMRPTRGYAFVSTTQIGGLTPDSRSLRFLRQEFDLRYVVPLGFYHAALNFGVSGGVVFPWGNGFSSRPSSLPERFFLGGNISPVCALGGPTALWGFKTRGLGPTVPKRQVNNENADPSGVDFLGGEPRCTALADLSLIFI

SEQ ID NO: 75593 - protein, 192 aa, Gossypium hirsutum
  unsure (1)..(192): unsure at all Xaa locations
  Clone ID: GOSHI-09MAY01-C49484_1.pep
RQIAELNFRICMCLEIGSEPGEAIPYCQKAISVCKSRLQRLTNEVKTSSDLASSSATSELDDGVQQSSSGSQTVISVKDLDXEIETLAGRAEDLEKKLEDLQQLVANPKSIIAEILGMASAKAKADEKSASPAVGSSSRMGTGNRNGGFDSSPVFTGYTNGAAAVTHLGVLRRGVKPVLMSPVESGPAKKPV

SEQ ID NO: 75594 - protein, 141 aa, Gossypium hirsutum
  Clone ID: GOSHI-09MAY01-C49454_1.pep
NRQQEKCFALQDKLFSIYAAGNTVPIPFLRASDISPIALLSDNILGGMQQDSTGNVAVEALQELFAGDGQSKKGRRTQNEVPLPPSVYQRLTSSSTLMNLAQALAYHKMCYEEMPLQELQATQEQQTIQNLCDTLRTILRL

SEQ ID NO: 75595 - protein, 62 aa, Gossypium hirsutum
  Clone ID: LIB3829-024-Q6-N6-A3.pep
QVPLPPSVYQRLTSSSTLMNLAQALAYHKMCYEEMPLQELQATQEQQTIQNLCDTLRTILRL

SEQ ID NO: 75596 - protein, 90 aa, Gossypium hirsutum
  Clone ID: GOSHI-09MAY01-C49774_1.pep
IVMVDYCLSGHMVDRVSRLTPQSACGNNVVKRVAVEMIKFYPHFFFCLFWLISLCLWRYHDVLVLYVQKSVKVDQSNFFMMWSPSSTYSL

SEQ ID NO: 75597 - protein, 286 aa, Gossypium hirsutum
  Clone ID: GOSHI-09MAY01-C49654_1.pep
MGGKEEDVRLGANKFSERQPIGTTAQTDKDYNEPPPAPLFEHGELYSWSFWRAGIAEFVATFLFLCITVLTVMGVNRAPSKCASVGIQGIAWAFGGMIFALVYCTAGISGGHINPAVTFGLLLARKLSLTRAIFYMVMQCLGAICGAGVVKGFQPSRYEVLGGGANVMNHGYTKGDGLGAEIVGTFVLVYTVFSATDAKRNARDSHVPILAPLPIGFAVFLVHLATIPITGTGINPARSLGAAIIYNRDHAWNDHWIFWVGPFIGAALAALYHQIVIRAIPFKSRA

SEQ ID NO: 75598 - protein, 291 aa, Gossypium hirsutum
  unsure (1)..(291): unsure at all Xaa locations
  Clone ID: GOSHI-09MAY01-C49604_1.pep
PRAGTRALLPKFLLFLSKTEGIPSGSHVIRAASGKYFYFIVFNVFIGVTIGGTLFASIKTIEEKPNSVFDMLAKSLPGNATFFLTFVALKFFVGYGLELSRIVPLIIYHLKRKYLCKNEAELREAWFPGDINYATRVPSDMLIVTIVLCYSVIAPVIIPFGVLYFALGWLVLRNQALKVYVPAYESYGRMWPHMQIRIISALFLYQVTMLGYFGVMRFYYTPILGPLPILSLVFGFACRKKFYGAFCHTVLEVACHELKETPYMEQIFYSFIPXSLISEKQEDELFEDALS

SEQ ID NO: 75599 - protein, 224 aa, Gossypium hirsutum
  Clone ID: GOSHI-09MAY01-C49104_1.pep
TFKVTLPSGSSPPLPLKEKLPFFSLKDDKGKIARGICITKTSLKPDISNFLVVYPPRSLFPEQVTSIRLLQIASTRAVGLPGMSVLYISASCNADDQGKKLIHAVVNTLLTVPLDSESNAAVQSETAEIGSAVQDETSESSSGGPSDSGEEKPTLLWSALYSQELTLGQVDFICSTPMPDGKLNYNDLIDTTFKIFQEIYPEEEFFPETSLENPEVDGDASPET

SEQ ID NO: 75600 - protein, 267 aa, Gossypium hirsutum
  Clone ID: GOSHI-09MAY01-C49084_1.pep
LATYIEPGKCLHGTVGSPFYIAPEVLVGGYNQAADIWSAGVILYILLSGTPPFWGKTKSRIFDAVRAADLQFPSDPWDRISDSAKNLVRGMLNTDPSQRFTALQVLHHLWMKYDESCPEESSEFVYHSHGELEVHSGSFSLSRDQDISFGAGSPIIYDVQSPSLTCRTSFSSSLVEPSTTCFALGGFSFHGGNSETLEFSSAVPSMPSFAFFSPSSVAEQENIALVERFAGDTGLDKLLVLPDSSLSCGPEAREKETKTAEFGRTGG

SEQ ID NO: 75601 - protein, 112 aa, Gossypium hirsutum
  Clone ID: GOSHI-09MAY01-C49014_1.pep
MEIEIWHRQCSSRLETIKLGRSYTQRGHDEHSKPKWRTFWKIFTRERKKIFASPVGFQASYDPDEYSQNFDQGTGWAEPDNLSRSFSARFADPSRISRRNPLRSCDWQMNDS

SEQ ID NO: 75602 - protein, 187 aa, Gossypium hirsutum
  unsure (1)..(187): unsure at all Xaa locations
  Clone ID: GOSHI-09MAY01-C49374_1.pep
DWIDYPCNNVAFKLYEIVNYQQCVDDNVSDFHRTGRLIQGCQFVTVRTCFEFERDAIKLLIKLYQKPVVPVGLLPPLLSLPSNEDNKWEAIKSWLDSQGEKSALYIALGSEVNLSEGSIHQLAFGIEKSNLPFIWVVRXRPVGEGQMNDIIPPGFEKRVSNRGLVLRDWAPQLWILAHSSCWGFLTH

SEQ ID NO: 75603 - protein, 146 aa, Gossypium hirsutum
  Clone ID: GOSHI-09MAY01-C49364_1.pep
AFVAGNDAGRAYNTFPKMGDVWVPDNIFELKPTIRNFFENTSMVQLDHRILATTTLISICGLWWSTKKLDIHPAIRTLVGATFGMAALQVTLGVSTLLSYVPVSLGTAHQAGALTLLTLMLLLNHTVRRPSMSLLKTLPQVTKTAW

SEQ ID NO: 75604 - protein, 194 aa, Gossypium hirsutum
  Clone ID: GOSHI-09MAY01-C49334_1.pep
SSEVAAKDSLTGEHVQNDQAQELLGTEKTQADQAEASIIEPNSSEAQTSVPQSGITDDEEQLAQRPEVDLVEACNEESNPAEGPSSAQAISDESTRPENDPGLTRASSLQSEKPEVHQVETCNMESNPTGPSSSQVISNESTNPGLTQNELQSEDPAEASQSPKTETVDVFDMDIHLKETQDPSPELEDDAKVS

SEQ ID NO: 75605 - protein, 89 aa, Gossypium hirsutum
  Clone ID: LIB3135-056-Q1-K1-H7.pep
SEVVSMLEGRSGIPEMVPDPGSYNQDLRFKAIRDHHKSMNNNNSKWSSSSASGNEIEESYLRFKAMETQTSMSAASWTASSTMSEWQHS

SEQ ID NO: 75606 - protein, 48 aa, Gossypium hirsutum
  Clone ID: LIB3135-056-Q1-K1-H5.pep
VTSIGCTQTDSRRLINPTMNAAIQTLWKRRVHDAADIDVWVSIALNLK

SEQ ID NO: 75607 - protein, 207 aa, Gossypium hirsutum
  Clone ID: GOSHI-09MAY01-C49264_1.pep
MSTTFGTMNETLCTSSSSEWKQLYEQTIDACFGFSDATAVTVTTNNLTSNTSYAAAVDHYLAPKACISKSIRRRSRASKRTPVTLLNADAKNFRSLGQQFTGCRRRSTSFSFAKNPRGPGNINFAHVNPKNDDHHHHNYTSHSDHASTLPQPGTNDCWKSQLLQPQEKHEHHHHHQQHDDEYQQRVSNEEQEGEFSFDRITSTDHDD

SEQ ID NO: 75608 - protein, 71 aa, Gossypium hirsutum
  Clone ID: GOSHI-09MAY01-C44834_1.pep
FHASGRLLTTWVGCHQVHRIKDGLVTWVEMLRISKILTKVIHRTCNIRITIHQIWAGMVGITSLRYLFYMN

SEQ ID NO: 75609 - protein, 157 aa, Gossypium hirsutum
  Clone ID: GOSHI-09MAY01-C44554_1.pep
YSIQQPERRCNFQEHGKLCDDETCFSCNSIREAESQIVRGTLLIPCRTAMRGSFPLNGTYFQVNEVFADHDSSLNPIAVPREWLWNLPRRMVYFGTSIPSIFKGLTTEGIQHCFWRGYVCVRGFDQKSRAPRPLMARLHFPVSRLAKAKGKGAGEDE

SEQ ID NO: 75610 - protein, 115 aa, Gossypium hirsutum
  Clone ID: uC-gsflnu33B058b08b1.pep
YASAISTLIEEMNAKHVEQIQTIQAEQAVREKTLLEEAKSRFRMEVAEREARLIAEAEERFMKLTEIREAKLMDMFDAREKKYEALINECMAKGMPIEFQSSRHEDKAFSSNDDE

SEQ ID NO: 75611 - protein, 71 aa, Gossypium hirsutum
  Clone ID: LIB3148-027-Q1-K1-F10.pep
FRMEATEREAHLIAEVEERFMKLTEIREAKFIKMMDAREKKYKALIDECMAKGMSSKSKTFHNKHSKVTIL

SEQ ID NO: 75612 - protein, 167 aa, Gossypium hirsutum
  unsure (1)..(167): unsure at all Xaa locations
  Clone ID: GOSHI-09MAY01-C44504_1.pep
MADGISSFWGPVTSTSECCEKNYAYSSYVAEFYNTISNILAILLAFIGLVNAIRQRFEKRFTVLHVSNMILAIGSMLYHATLQRLQXQGDETPMVWDILLYMYILYSPDWHHRSTMPTFLLLYGVIFAALHSVFPFGIGSQLHHLILCLLCIPPIFTYYLPSHDAPS

SEQ ID NO: 75613 - protein, 76 aa, Gossypium hirsutum
  Clone ID: GOSHI-09MAY01-C44494_1.pep
MSSLGTSKGVLEIAKFGLYVTIPIVLMYTFANNTKNLQKFMGNRSYVVYPPEGPRPPSPEELREMARELARKKNNH

SEQ ID NO: 75614 - protein, 108 aa, Gossypium hirsutum
  Clone ID: LIB3135-024-Q1-K1-A10.pep
AQYPKVQVCLAILNSFQPKEKGKTLSVAQQPRRTFSAVRPASSPRTPRPPFVRLTPRANAQPRTRTCKREQTKVAKIRRKKNCILFLFFLHSAITPIDFDCKLLFFFL

SEQ ID NO: 75615 - protein, 59 aa, Gossypium hirsutum
  Clone ID: LIB3148-026-Q1-K1-E7.pep
AQYPKAQLCLAILNSFRPKEKGKTLSAAQQPHRAFSAVRPARSPRMPHAKGQHTAPYSY

SEQ ID NO: 75616 - protein, 111 aa, Gossypium hirsutum
  Clone ID: GOSHI-09MAY01-C44404_1.pep
AGKESSLSQVVRTTIGRDYVLSFTIGDANNACEGSMVVEAFANKNTVKVTYDSKGKGGFKQARLRFKADSTRTRIMFYSTFYTMKNDNSGSLCGPVVDDVKLVSIQKLHHL

SEQ ID NO: 75617 - protein, 353 aa, Gossypium hirsutum
  Clone ID: GOSHI-09MAY01-C44724_1.pep
VLTGSIKFQLPGVTSNAEVDAGETSSDTSEAQTDEVKAEKPDDTSKNRPSKKSKKKERELAENPPAKATAKAKAKAEKKRLLALPLEASVISLLLLVVLGAFYVVHSVWAAAEAYSAPSIVLTTRSRDGLHVFDDFREAYAWLSHNTDVNDKVASWWDYGYQTTAMANRTVIVDNNTWNNTHIATVGTAMSSPERAAWEIFHSLDVKYVLVVFGGLIGYPSDDINKFLWMVRIGRGVFPHIKEPDYLRDGQYRIDSQATPTMLNWLMYKLSYYRFVETDGKAYDRVRRTEIGKKYFKLTHFEEVFTTHHWMVRIYKLKPLKNRIRGKAKKSKSKTSSTSSSKRSGTKKKNPWL

SEQ ID NO: 75618 - protein, 65 aa, Gossypium hirsutum
  Clone ID: LIB3148-030-Q1-K1-C3.pep
EIGKKYFKLTHFEEAFTTHHWMVRIYKLKPPKNRIRGKAKKSKSKTSSTTSSPKRSGTKKKNPWQ

SEQ ID NO: 75619 - protein, 47 aa, Gossypium hirsutum
  Clone ID: GOSHI-09MAY01-C44674_1.pep
LNFFFFFFFLFFFFFFYFFFFFFFFFFILKIFFFFFFFFFFFFFFFK

SEQ ID NO: 75620 - protein, 95 aa, Gossypium hirsutum
  Clone ID: GOSHI-09MAY01-C44184_2.pep
ELIVFCIYTRVNQINREYYHFSFKFSRLDRGNAQTATEDQQNKTKTNILKPSVLPYMGRIVSILKTVQDLHCYSGYLLYIFFRVGFTGFQFLHFL

SEQ ID NO: 75621 - protein, 118 aa, Gossypium hirsutum
  unsure (1)..(118): unsure at all Xaa locations
  Clone ID: GOSHI-09MAY01-C44184_1.pep
KQGRDVLQGSQLLALDVAAAVXLLGRALIGDELAXKEKKALRRTLTDLASVVPIGFLMLLPVTAVGHAAILAAIQRYVPSLIPSTYGSERLDLLRQLEKVKELETSEANSEENIEQVA

SEQ ID NO: 75622 - protein, 211 aa, Gossypium hirsutum
  Clone ID: GOSHI-09MAY01-C44134_1.pep
ANQPWRLITCFWLHAGVIHLLANMLSLIFIGIRLEQQFGFSTLSVPFCSGSVLSSLFIQRSISVGASGALFGLLGAMLSELLTNWTIYTNKAAALITLTVIIVINLAVRILPHVDNFAHIGGFLTGFLLGFVLLLRPQFGWVGRKHLPAGARVTSKHKAYQYLFLVIAMVLLIVGFTVGLVMLFRGENGHDHCSWCHYLSCVPTSKWHCGN

SEQ ID NO: 75623 - protein, 87 aa, Gossypium hirsutum
  unsure (1)..(87): unsure at all Xaa locations
  Clone ID: LIB3135-035-Q1-K1-A5.pep
RPVLVAAYYRLFSFNVAFLLVPLVHLPAGARVTSKHKAYQYLFLVIAMVLLIVGXLVMLFREENGHDHCSWCHYLSCVPTSKWYCGN

SEQ ID NO: 75624 - protein, 188 aa, Gossypium hirsutum
  Clone ID: GOSHI-09MAY01-C44124_1.pep
ILFSKAALDFIVCDESDVFVTNNNGNMARILAGRRKYFGHKPTIRPNAKKLYRLFLSRSNMTWEAFASRVRTFQRGFMGEPKEVRPGRGEFHENPSACICEDSEAREKATTYSRGKKNGKLDDSSRKKEVIVSDDQNDYDDNDEPRWPDLDDDENQVWPQEKLHYNGTGSDYDAVISDEPELEEMLSD

SEQ ID NO: 75625 - protein, 77 aa, Gossypium hirsutum
  Clone ID: GOSHI-09MAY01-C44044_2.pep
MGLWTLLEGFLLLANALAILNEDRFLAPRGWSFSDFSAGRTKSFKGQLIGLIYATQYMRVPLILLNAICIFVKLVSG

SEQ ID NO: 75626 - protein, 77 aa, Gossypium hirsutum
  Clone ID: AI055685.1.pep
MGLWTILEGFLLLANALAILNEDRFLAPRGWSFSEFSAGRTKSFKGQLIGLIYATQYMRVPLILLNAICIFVKLVSG

SEQ ID NO: 75627 - protein, 201 aa, Gossypium hirsutum
  Clone ID: GOSHI-09MAY01-C44024_1.pep
AVGATTPFFTAVFAVVMTSKREGWITYVTLVPVVAGVIIASGGKPLFHLFGFMMCIGATAARALKSVLQGLLLSSEGEKLNAMNLLMYMAPIAVLALFPAALYMEKGVVGITIALARDDWKFLIYLLFNSALAYFVNLANFLVTKHTSPLTLQVLGNAKGAVAVVISILIFKNPVSITGMLGYSLTVAGVILYTEAKKRSM

SEQ ID NO: 75628 - protein, 124 aa, Gossypium hirsutum
  Clone ID: GOSHI-09MAY01-C44374_1.pep
DSPAMMFKGMEGSTLGVWAAHGEGRAYFPDDGVLDRVLHSDLAPLRYCADDGNPTVAYPFNLNGSPLGVAAICSPDGRHLAMMPHPERCFLMWQFPWYPKDWNVDKKGPSPWLKMFQNAREWCS

SEQ ID NO: 75629 - protein, 49 aa, Gossypium hirsutum
  Clone ID: LIB3148-025-Q1-K1-E5.pep
DTVPEVCTKQRLFMSKLKTKTAFQAFQYNSLTQMKHPSSITLQLLSFVL

SEQ ID NO: 75630 - protein, 129 aa, Gossypium hirsutum
  Clone ID: GOSHI-09MAY01-C44294_1.pep
SMIKTYFRVFTINFPIFKRIQTQKIILVSKKRLFFPEHYQCYHERSFNKETNSTKLTAIAFKKGDIRLRIRAKQPASLIKDRKTRYSHIKTYPAHKTTLNQEAPVTYIYRRIKSLYGKYTTNSKGYRYR

SEQ ID NO: 75631 - protein, 167 aa, Gossypium hirsutum
  Clone ID: GOSHI-09MAY01-C45994_1.pep
EALLFHFLQALFSSHERQDCTVKMEIDVPASVAYQLYSDREAIPNWMPFVSSVKASIVLEDKPDLSRWFVKYKAFGRNIEYSWLAKNMEPIPNQKIHWRSLEGFVSGGAVRFYPKGPSSCLVDLRISYEVPQLLIPVASVLQPFMENLLERGMDRFAKFAKSSSSTR

SEQ ID NO: 75632 - protein, 66 aa, Gossypium hirsutum
  Clone ID: LIB3828-002-Q1-N6-F12.pep
TRANECFYSNCTHFCQSFFSFQLRISYEVPQLLIPVASVLQPFMENLLERGMDRFAKFAKSSSSTR

SEQ ID NO: 75633 - protein, 67 aa, Gossypium hirsutum
  Clone ID: LIB3148-048-Q1-K1-A11.pep
PIIIADSPVPTVWDNQISCWIVLYCMSDLNILSHYYYYYYFCISSVIPLNQMQFCGVGNKCIKFSLI

SEQ ID NO: 75634 - protein, 95 aa, Gossypium hirsutum
  Clone ID: GOSHI-09MAY01-C45914_1.pep
KNIKKKNLFLIIFFEYRKFAYQHDQIIQYNHLTVQTSTTISFSAVLPKTTKPKRKRFKQLYHNQKYTTVSTSNAYKNNPNSLRIQPGNASGHRLK

SEQ ID NO: 75635 - protein, 330 aa, Gossypium hirsutum
  unsure (1)..(330): unsure at all Xaa locations
  Clone ID: GOSHI-09MAY01-C45854_1.pep
VDHKCWERPEDMDTVRTVYSVSSSNPGSDVAGETAAALAAASLVFRRVDPKYSRLLLQTARKVMAFAIQYRGAYSDSLGSAVCPFYCSYSGYXNELLWGAAWLFRATNDAYYYNFLKTLGAWCSTXDIFSWDNKYAGAXVLLSRMALLGKDKNFEQFKQEAESFMCRXILPNSPYSTTQYTQGGLMYKLPESNLQYVTSISFLLTTYGKYMKAKKQTFNCGSLFVTPNSLIGLAKRQVDYILGENPIKMSYMXGFGRNFPKRIHHRGSSLPSLAKHPQSIGCDGGFQPYFYSSNPIPNVLVGAIVGGPNQNDGFPDDRSDYSHSELSTYI

SEQ ID NO: 75636 - protein, 182 aa, Gossypium hirsutum
  Clone ID: GOSHI-09MAY01-C45874_1.pep
QVRRSIVYGDQPRNRLDLYLPTNTDGPKPVVVFVTGGAWIIGYKAWGSLLGLQLAERDIIVACVDYRNFPQGTISDMVKDVSQGVSFVCNLIDRFGGDPNRIYLMGQSAGAHISACVLLEQAIKESRGESTTWSVSQIKAYFGLSGGYNLFNLVNHFHNRGLYRSIFLSIMEGEESFEQFSS

SEQ ID NO: 75637 - protein, 74 aa, Gossypium hirsutum
  Clone ID: LIB3582-038-P1-K1-B9.pep
PVLAETEEEAAEDLRPKLFGVSIGMKRVRREGEEEEGVMDEEQQQEIKPGSDIKSEPLDGNNDNQDSTWLELGK

SEQ ID NO: 75638 - protein, 60 aa, Gossypium hirsutum
  Clone ID: LIB3148-046-Q1-K1-C11.pep
PRVRFGGDPNSQREHIFLLVFFWSKQSKNLEEIKPGSDIKSEPLDGNNDNQDSTWLELGK

SEQ ID NO: 75639 - protein, 234 aa, Gossypium hirsutum
  unsure (1)..(234): unsure at all Xaa locations
  Clone ID: GOSHI-09MAY01-C45564_1.pep
MTDFEACYQSNGEDXENSNGGVPSPQPREGSHGGLEGRRDSKSQHGSREHERGSSRSREKEKSRDKGRDKDSDRHRDRERDKERERSKDRDREKDRDRHHRDRRRDRSRERSERRERGRDRDDDDYHRSRDYDRRRDYDRDRGDRNRRGSRRSEHRSKSRSRSRSPSKSKRISGFDMAPPASAMLAAGSGGAAAAAAAAVTATTVQIPGNNPTLPGVFPNMFPLATGQQFGGLP

SEQ ID NO: 75640 - protein, 247 aa, Gossypium hirsutum
  Clone ID: GOSHI-09MAY01-C45724_1.pep
TAAWGRGRVELKRIENKINRQVTFAKRRNGLLKKAYELSVLCDAEVALIIFSNRGKLYEFCSSSSMLKTLDRYQKCSYGAVEVSKPAKELESSYREYLKLKARYEELQRTQRNLLGEDLGPLNSKELEQLEHQLESSLKHVRSTKTQYMLDQLTELQNKEQMLMETNRALSIKLEEVSARNQFRVSWEGGEQSVAFTNQQAQSMGLFQPLECNPTLQIGYCNPVASDQMAATTHAPQVNGFIPGWML

SEQ ID NO: 75641 - protein, 84 aa, Gossypium hirsutum
  unsure (1)..(84): unsure at all Xaa locations
  Clone ID: LIB3148-044-Q1-K1-C6.pep
VFHCHIYKLNQSHAFCLWLKVSIVLPANSVTAVVFMSMQYIMHMLLKLFLHIFQHQEAFLGNSLWALGGLVKSKKLRPPFGGXP

SEQ ID NO: 75642 - protein, 93 aa, Gossypium hirsutum
  Clone ID: GOSHI-09MAY01-C45644_1.pep
NPHAPLLGRANRKLYERSSGSDYGGVNDVRVTGKLLALDFLALILSEKEKRKSRKKSLKSPFQFLIFFSLKFFCFSIQYPSKRSRYNVCIGSL

SEQ ID NO: 75643 - protein, 70 aa, Gossypium hirsutum
  Clone ID: LIB3148-036-Q1-K1-C4.pep
SILINMKNYNLIRRRKKKKKKKKKKKKKKKKKKKKKKKKKKKRGGLFKDIRLCSAGLQVKIFFLGPPKLN

SEQ ID NO: 75644 - protein, 43 aa, Gossypium hirsutum
  Clone ID: LIB3148-036-Q1-K1-E2.pep
RGWGRSSHKMSPPKPFSFVYYFVFFFFFFFFVIFFLVFFFFFF

SEQ ID NO: 75645 - protein, 326 aa, Gossypium hirsutum
  Clone ID: GOSHI-09MAY01-C45164_1.pep
MENRTNSEQEACIDLNLDIVSDYPATARKSICDSDSSSNHSVTDVETFLREKSCGFDEVREPVLKRLKSDCSSSVSREYSEKYQHSISTGHRGPDGFEGKKLFGVELQFPHINAGQSNTLLKAETLNCSDVIASMAHQGHPLGNRAVEPLNFGSVIFGKLWCNSQAIFPKGFRSRVKYFCVLDPTKISRCGAEVLDIGLLGPLFKVTLEGCPTTTFSNVLPNKCWEMVLQQLNQEILRRKNLGESGLLPLQSLQSINGLQMFGFLSPPIIQAIEALDPNHQCSEYWNHKTARVINEVKKYALGLSCSVGESKAKILGVDLTKQDHE

SEQ ID NO: 75646 - protein, 201 aa, Gossypium hirsutum
  Clone ID: AI725439.1.pep
GPVSEVLPQHGTKLKASPSTVGCENNAYNIGVLIMENSVNLEQDACMKLNLDVLTDYPASKSVNALDSPNNKSDVEIFLPSFNQEKICGFDEVREPVLKRLKSDCSSSVSRESPNNYQHSTSCVHQDSDGFDGKKLFDVELHPGKSNTFWKTATVNNSDLNASIVARGDPLLISSVKPLNFGSVMFGKLWCSKKAIFPKGS

SEQ ID NO: 75647 - protein, 318 aa, Gossypium hirsutum
  unsure (1)..(318): unsure at all Xaa locations
  Clone ID: GOSHI-09MAY01-C45124_1.pep
KFFEMPRHEAVNALDVYKRAGQQANSLSDFYEVCKGLELARNFQFPVLREPPQSFLATMEEYIREAPRVVSVPTEPVLQLTYRPEEGPSEDTKSPNDEPEPSAPADDVAASTVETAPPPPPPPQTNLDTGDLLGLNDAAPNASAIEESNALALAIVPTESGTASAFNSSAGQPVDFDPTGWELALVTTPSTDISAPTERQLAGGLDSLTLNSLYDEAAYRASQQPVYGTAAXNPFEVQDPFAVSNNIATPTVVQMAAMGQQQNNPFGSYQPTYPQPHLVMSPSNPFGDAGLGAFPANQMVPFAQPHANNPFGGSTGLL

SEQ ID NO: 75648 - protein, 86 aa, Gossypium hirsutum
  Clone ID: LIB3148-035-Q1-K1-E10.pep
ISTGWHFQLTEWFHLLNHMRIIHLVEAQAYCSVKYEELMGVYFGWEMRRVCRKHLCFALVWAVKASLWIFKDVIIICCCHQFMKKK

SEQ ID NO: 75649 - protein, 172 aa, Gossypium hirsutum
  unsure (1)..(172): unsure at all Xaa locations
  Clone ID: GOSHI-09MAY01-C45294_1.pep
GLTPGHWLCINGFPATTLHGARTQQERELALRSFKXGKTPILVATDVAARGLDIPHVAHVINFDLPNDIDDYVHRIGRTGRAGKSGLATAFFNEGNLSLARPLAELMQEASQEVPAWLTRYASRAPYGGSKGRRSGGGRFGGRDFRRESSFGKNLDYYGGGGNSGSGYWSSF

SEQ ID NO: 75650 - protein, 253 aa, Gossypium hirsutum
  unsure (1)..(253): unsure at all Xaa locations
  Clone ID: GOSHI-09MAY01-C45224_1.pep
KSLPVFPNDALFLTFFLLLSAADAFNITKVLGSFSDYSTFNDLLTQTGVASXINDKKSVTVLVVSNSQISGLSSQPKDTIKKXLSIHVVLDYYDKAKVDKVPSKPLTLTTLYQQSGKAQNQQGFLTMTRVGKQVSFGSAAPGSSHDSIFVKQVTTQPYDISVLEISNVINVAITSSPSYAPNASPPRKALAPGPNKSPLASPPKTTRSDIPAADAPSTITDSDAPDNTSAASIASASAILFIFASARFMLTMM

SEQ ID NO: 75651 - protein, 144 aa, Gossypium hirsutum
  Clone ID: LIB3272-046-P1-K1-E8.pep
MLTSLCFVFIFIFGFSPFATPTLLFQGFNWESSNKAGGWYNFLQSSVSDISNAGVTHVWLPPPSQSAAPQGYLPGRLYDLDASKYGSQAELKSLIDAFHQKGVKCVADIVINHRTAERQDNRGIYCLFEGGTSDDRLDWGPSFI

SEQ ID NO: 75652 - protein, 131 aa, Gossypium hirsutum
  Clone ID: LIB3148-059-Q1-K1-D11.pep
HASAHASAHASAPPSHSVGPQGYLPGRLYDLDASKYGSQAELKSLIEAFHQKGIKCLADIVINHRTAERKDGRGIYCIFEGGTPDDRLDWGPSFICGNDKEYSDGTGNPDTGLDYPPAPDIDHLNPRVQKE

SEQ ID NO: 75653 - protein, 92 aa, Gossypium hirsutum
  Clone ID: GOSHI-09MAY01-C46534_1.pep
SPIRPRTRGLEFRNRVVSVGNTNNGPLQAPVSDAAGAAPIISSNGAGPSISLHASGSIEELEPAVLTAMTSIPGAPVVQMMPLPRSNFHVLG

SEQ ID NO: 75654 - protein, 65 aa, Gossypium hirsutum
  unsure (1)..(65): unsure at all Xaa locations
  Clone ID: GOSHI-09MAY01-C46494_1.pep
AFGQTISGVTYRFSANLIKXVCACHGTHMSPEEFVRHASEECTNPDNNNGLATFPGTNPAASSQS

SEQ ID NO: 75655 - protein, 187 aa, Gossypium hirsutum
  unsure (1)..(187): unsure at all Xaa locations
  Clone ID: GOSHI-09MAY01-C46464_1.pep
DISKAYDRVXWNFLQEIMHKMGFGQKWIDSIMKCISSVSYSIVFNGIKGDDFYPTRGLRQGDPLSPFLFLICGEGLSGLMRTATGEGVIKGVKASRSGPRVSHLLLADDCLLFEEASSKGVSTLKQILXEYRNSSGXVNFDXRQSFFSSNLAEEVRQMVVIQLGIRSSNEFEKYLGLPSLVGRKKKE

SEQ ID NO: 75656 - protein, 178 aa, Gossypium hirsutum
  Clone ID: GOSHI-09MAY01-C46674_1.pep
PRVRYLMSAFDVPEVMAVTRSNICKNGIQALSRGGAVIYYASIFLYFWVFSTPVVSLVFGSYLYICINWFHLHFDEAFSSLRIANYKSFTRFHINRDGDLEVFTLAVDKVPRDWMLDPDWDMEQKQPHQLSHRRKYPSKWSAAAGQQDPVNTVRVVDHFVIRQNEKPDFVSSNGSVSR

SEQ ID NO: 75657 - protein, 67 aa, Gossypium hirsutum
  Clone ID: GOSHI-09MAY01-C46154_1.pep
GCCIFDARTVTKLMPEPQALNCLIQNAAGIFIVECGQAKVSSFVNSFAYYYYAWMEEPNYYRIQTLH

SEQ ID NO: 75658 - protein, 134 aa, Gossypium hirsutum
  Clone ID: LIB3582-041-P1-K1-E4.pep
PTRPQTIDQLIETGKSEQIFQKAIQEQGQGQILNTVEEIQERHDAVVEIEKKLLDLQQIYLDIAVLVESQGEILDNIESQVSTAVSNVQSGTVALQNAKKRQKSTRKWTCIAIIILLIIVAVIVVGVLKPWKSS

SEQ ID NO: 75659 - protein, 105 aa, Gossypium hirsutum
  unsure (1)..(105): unsure at all Xaa locations
  Clone ID: LIB3148-049-Q1-K1-G10.pep
AIQEQGRGQILNTVEEIQERHDAVVEIEKKLLDLQQIYLDIAVLVESQGEILDNIESQXVSTAVSNVQSGTVALQNAKKRQKSTRKWTCIAIIILLIIVAVIVVG

SEQ ID NO: 75660 - protein, 117 aa, Gossypium hirsutum
  Clone ID: GOSHI-09MAY01-C46084_1.pep
MAQRTEKEETEFKVPETLTLCVNDCGVIGNPATNNMCQNCFNATTPKSTAAVVSSSTGGASSGGVSILNQRSTTSRSINKRSDLSPPKTTTVGRSSGSRNDPEPGYGKEGGEPGFWM

SEQ ID NO: 75661 - protein, 99 aa, Gossypium hirsutum
  Clone ID: GOSHI-09MAY01-C46074_1.pep
KERELRTSSLTRKQPNTGSKETRLDEVLLRHKERKPFAYGLCNECYEEFMKVSGGLDGGSDPPAFQRPEKERLAKLSIEENAKVCSVIILSKGLRTVIG

SEQ ID NO: 75662 - protein, 226 aa, Gossypium hirsutum
  unsure (1)..(226): unsure at all Xaa locations
  Clone ID: GOSHI-09MAY01-C46024_1.pep
RGGPSRRPMYTNGVPSCCLGFSPAIERIFRRAAEGLSEIIPEEPELFEDPCYVPDPVSLLGPVSESLDNFQLDLGAGFGMDVGTERPCGLKNISASSEINKPSPIESPLSRSRCATPKAPRSSNFSCGXILIANEKRTWQMWSSSPLGQDGLGLMGDPASWLLPLEHNRSNKDDLLHLSSQKTMASLFAKEDPILAGKRSSQKVFLGNGQNGGTFSPVPGLSDHHP

SEQ ID NO: 75663 - protein, 92 aa, Gossypium hirsutum
  Clone ID: GOSHI-09MAY01-C46344_1.pep
SQQPSTRSFWNMPRTVSGGWISRAVSSHGFFHACLSLLLGTDDPAKGRRHYAHSTHTRQIQYFVKCIDEIPWLLRLNRGLQCRLSSENGLEC

SEQ ID NO: 75664 - protein, 130 aa, Gossypium hirsutum
  Clone ID: GOSHI-09MAY01-C46324_1.pep
MANRVQIPTSNSALIAMIADEDTVVGFLMAGVGNVDLRRKTNYLIVDSKTTVKQIEDTFKEFTTREDIAVVLISQYVANMIRFLVDSYNKPVPAILEIPSKDHPYDPAHDSVLSRVKYLFSAESLASGRR

SEQ ID NO: 75665 - protein, 154 aa, Gossypium hirsutum
  Clone ID: GOSHI-09MAY01-C46244_2.pep
HASAYMQPLDGSSAVKVQVSAVENPEEASFFESYEAAHSMHDLSSLIAQKLGVKAPPVRIDSQAKYGALSRGDGAIYLRLPHKGYREKIWDHAAGCIVVTEAGGVVTDAAGQPLDFSKGKYLDLDTGIIVTNQKLMPLLFNAVRKSIQEKASSL

SEQ ID NO: 75666 - protein, 126 aa, Gossypium hirsutum
  Clone ID: GOSHI-09MAY01-C46244_1.pep
SFFESYEAAHSMHDLSSLIAQKLGVKAPPVRIDSQAKYGALSRGDGAIYLRFPHKGYREKIWDHAAGCIVVTEAGGVVTDAAGQPLDFSKGKHLDVDTGIIVTNQKLMPLLLNAVKESLKEKAPSS

SEQ ID NO: 75667 - protein, 144 aa, Gossypium hirsutum
  Clone ID: LIB3828-016-Q1-N6-D5.pep
YSSAVKVQVSAVENPEEASFFESYEAAHSMHDLSSLIAQKLGVKALPVRIDSQAKYGALSRGDGAIYLRFPHKGYREKIWDHATGCIVVTEAGGVVTDAAGQPLDFSKGKHLDVDTGIIVTNQKLMPLLLNAVKESLKEKAPSS

SEQ ID NO: 75668 - protein, 81 aa, Gossypium hirsutum
  Clone ID: LIB3148-051-Q1-K1-D11.pep
YKGLHEAGGVVTDAAWQPLDFSKGKYLDLDTGIIVTNQKLMPLLFNAVRKSIQEKASSLLIHFRGRLHPFLITCSVKLVET

SEQ ID NO: 75669 - protein, 51 aa, Gossypium hirsutum
  Clone ID: GOSHI-09MAY01-C47964_1.pep
FSLFSYLENLRFFHIFFNKYIYILKRTSLQMKMISTSDYHELVFLDNLGSE

SEQ ID NO: 75670 - protein, 316 aa, Gossypium hirsutum
  unsure (1)..(316): unsure at all Xaa locations
  Clone ID: GOSHI-09MAY01-C47854_1.pep
MQQRRDEQEATAAKTTLRLLEKTVKDMLVDQGRLVEVPYTATLGDTMNALVALPVAAPPGQWIGASGSMILESDKQTGAVRKHYIGMVTMLDIVAYIADDDGSNDQTTDVANLEKKMMVPVSSIIGRSFEGLSLWTLNPNTNILDCMELFSKGIHRALVPMDSQMEPTRPVELVVSASSYKMLTQMDLLKFLKDHASELGEILSSSIKEIGCLNQNVYAITDRTRGMDAIKCLRTALLNAVPIVESSNDFEEDHRQLVDGEGRKPIGTFSATDLRGCHLSALQTWLPLRHCXFTELVSRSPLFAFKRGVSRQRNGE

SEQ ID NO: 75671 - protein, 144 aa, Gossypium hirsutum
  Clone ID: GOSHI-09MAY01-C47544_1.pep
MNLNPQLRGMFDMNPQLRDMMHNPEVLRQMFSPETMQQMLALQQSLLSLNRQQSTPDSAQTGGTTAAPGTANLDLLMNMFGGLGAGGLGVPNQPDVPPEELYAPQLSQLQEMGFYDTQENIRALRATAGNVHAAVERLLGNSGQ

SEQ ID NO: 75672 - protein, 88 aa, Gossypium hirsutum
  Clone ID: LIB3825-020-Q1-N6-F6.pep
DSTQTSGTTGAPPTASLDLLMNMFGGLGAGGLSVPNQPDVPPEELYATQLSQLQEMGFYDTQENIRALRATAGNVHAAVERLLGNSGQ

SEQ ID NO: 75673 - protein, 117 aa, Gossypium hirsutum
  Clone ID: GOSHI-09MAY01-C47504_1.pep
SQWGGYVRSRSILSTRSDRYRRHSIAGSSMRDDESLTSSPAVPSYMAPTQSTKARSQIPSPLGSGTPDRRVAGSAKKQLLFSASPASSRRHSEPPKVDISEVRKNQHAPSNGRQVVW

SEQ ID NO: 75674 - protein, 57 aa, Gossypium hirsutum
  Clone ID: GOSHI-09MAY01-C47404_2.pep
LSEVSSKLSSNILSSHQSCVSIVHCLRIRLFPCNLVSFLITIINNCQATMCGSFSRR

SEQ ID NO: 75675 - protein, 60 aa, Gossypium hirsutum
  Clone ID: LIB3825-007-Q1-K6-F5.pep
FHNFPNFNFLKLQFNLFYLFFQYIIFYFFFYFFCFFFFFFFFFFFFFFFFFFFFFFFFFF

SEQ ID NO: 75676 - protein, 157 aa, Gossypium hirsutum
  Clone ID: GOSHI-09MAY01-C47744_1.pep
SKWVYFKKMDMLMSTPPQQGGLSCGLDSGEYVFMNPRVYLNRANGLDEMRDSPADSESADSEEDVSDGLPPKKRRFGRQYDEGSSFRLLADLIQKFSDTYEKIEDSKRQQMLELEKMRMDFHRELEMQKQHIMERAQAEIAKIQQQADDDENEKASG

SEQ ID NO: 75677 - protein, 182 aa, Gossypium hirsutum
  Clone ID: GOSHI-09MAY01-C47604_1.pep
QGVSRALVENSRTLRLPTYLHERLGLIRNAKYRLEEKGITPTIDRIAESLNMSQRKVRNATEAVSKVFSLDRDAFPALNGLPGETHHSYIADNHVENNPWHGVDEWALKDEVNRLINITLGEREREIIRLYHGLDKESLTWEDISKRIGLSRERVRQVGLVALEKLKHAARKKKMEAMLVKH

SEQ ID NO: 75678 - protein, 95 aa, Gossypium hirsutum
  Clone ID: AW187491.2.pep
GSLPLAAAKPQPSHRTTPQLSPYASARPLYALHTHRTCTPNARRKQTRENGRKIVFFLFLLSAMKPKENHLYILGTHKKTEYKEKVIKTLKGDFR

SEQ ID NO: 75679 - protein, 66 aa, Gossypium hirsutum
  Clone ID: LIB3135-026-Q1-K1-H9.pep
PKPTTSPNLDPKVQGPKFLSNRNPRVLFLAPQPSPSPRSVRPPRAPPYASTQPPYSRHAHPVPAKT

SEQ ID NO: 75680 - protein, 229 aa, Gossypium hirsutum
  unsure (1)..(229): unsure at all Xaa locations
  Clone ID: GOSHI-09MAY01-C47034_1.pep
LIGSTNQVFSLVFAVILLIGLASPLAVPIYAFVKSWRLVGFEADMERQQPLLKEETTSPPSETKDIITEVAAAASADDATVLVEKTKPVIGEEHTIMEAMQTWDFWVSLTSFLCGVGTGMAVINNMAQIGLALGHADVSIFISLTSIWGFFGRIIFGSVSEYFLKKAGTPRPLWNAASQILMAGGPPLXMAWAWPGCLNMGPIVVGLCYGVRIALTVPVASELFGLKYY

SEQ ID NO: 75681 - protein, 83 aa, Gossypium hirsutum
  Clone ID: GOSHI-09MAY01-C47334_1.pep
VRMMNEAQFQNRPMVFPQLVATDLSRFQVQPHWQGLSPRAQPRQKQDSLPPDLNIGFQSPGSPVKQSAGVLVDSQQPDLALQL

SEQ ID NO: 75682 - protein, 135 aa, Gossypium hirsutum
  Clone ID: GOSHI-09MAY01-C40984_1.pep
GNAHSGTKKKGNAHKRMKGSMLQAKPWEHVDHVIMNLPASALLFLDAFRAIISRKNWRGPLPLVHCYCFIRANETQEFIISEAESALNAKIKDPVFHKVRDVAPNKAMFCLSFRLPEACFIEDVANSTCHNTGGL

SEQ ID NO: 75683 - protein, 124 aa, Gossypium hirsutum
  Clone ID: GOSHI-09MAY01-C40954_1.pep
VDVLPKKPAKQFHEQENGNIEKNGKHSEQKSSKKQQNGSVQPKKPFQRVNVDEVEFVDSRLEDNSYWAKDGAETGYGAKAQEVLGQVRGRGFRHEKTKKKRGSYRGGQIDLQSHSIKFNYSDEE

SEQ ID NO: 75684 - protein, 77 aa, Gossypium hirsutum
  Clone ID: GOSHI-09MAY01-C40944_1.pep
YLLWVLCSAGLLRTMEGSKMAMILIAYVTVLAVFTNGATALREDQGAVAPSPMESAGAALGVPAAVAALASMAAWFF

SEQ ID NO: 75685 - protein, 138 aa, Gossypium hirsutum
  unsure (1)..(138): unsure at all Xaa locations
  Clone ID: GOSHI-09MAY01-C40964_1.pep
LADAPKKDRFHYTQGAHKINSFYTAPKKLLASDSRLRPDRYALXLGDLSKAGFEKSSLEERQRAEKKNREVKGHKFTPKWFDFANEVAATPWGDLEVYQYNGKYTEHRAAIDGSSSSEEIDIKSTEFNPWQYEDLAAN

SEQ ID NO: 75686 - protein, 65 aa, Gossypium hirsutum
  unsure (1)..(65): unsure at all Xaa locations
  Clone ID: LIB3146-042-Q1-K1-A5.pep
GDLSKAGFENSSLEERQRAEKKNREEKGHKFTPKWFGXANEVAATPWGDLEVYQYNGRFPNNGLA

SEQ ID NO: 75687 - protein, 226 aa, Gossypium hirsutum
  Clone ID: GOSHI-09MAY01-C40914_1.pep
ECGQNQANQLWTLTSNDNTVRSGGKCLTTYGYSFKNYVMIYDCETAVPDATKWEIRSDETIRNPRSGLVLTGSRDSSGMINLVVDHKYDGSRQTFYASNNTKPAVTTIVGYKDMCLLASGSRVWLEDCVSNDAEQQWAIYPDGTIRPQKNRNGCLKYANDYSGLVNVATCDGFVEERWVFRSDGTILHKMTEMVMDVLDPTATLLEVSANHYNNQQFSQIWFQVQP

SEQ ID NO: 75688 - protein, 115 aa, Gossypium hirsutum
  Clone ID: GOSHI-09MAY01-C40824_1.pep
TKNNKNPKLKVQYKYLGQNKINLFFLTKYPKTLTQILNFQNPNKISLNKPKTRSPTYPKLFQLLVNSRRVWNKLERHQKVGLTRETLPPSLHITRGLLLRTPSSCKFATGSSLLR

SEQ ID NO: 75689 - protein, 94 aa, Gossypium hirsutum
  Clone ID: GOSHI-09MAY01-C40564_1.pep
PKKEKKSRNRKNKPSSSMRRSPRAWSAHSTLEAQPLPGFVPSLPKTLTRIRSSVGGLRQPKRRGTHLGSDKVGKGHATEGVSSMIHTLNPLIPF

SEQ ID NO: 75690 - protein, 203 aa, Gossypium hirsutum
  Clone ID: GOSHI-09MAY01-C40524_1.pep
DRYLSGNTMNRQRLQLLGVACMMIASKYEEICAPQVEEFCYITDNTYFKDEVLEMESSVLNYLKFEMTAPTAKCFLRRFVRAAQGINEVPSMQLECMANYIAELSLLEYSMLCYPPSLIAASAIVLAKFILLPSKKPWNSTLQHYTLYKPSDLFECVKDLHRLCLNNNNSTLPAIREKYSQHKYKCVAKKYCPPSIPSDFFHN

SEQ ID NO: 75691 - protein, 54 aa, Gossypium hirsutum
  Clone ID: LIB3584-009-P1-K1-D2.pep
FLCLLVFGFVCNPNLSMNLKVCVGTCYQFLICYIIIFYSIFIKISVLWDIMRFW

SEQ ID NO: 75692 - protein, 53 aa, Gossypium hirsutum
  Clone ID: LIB3147-027-Q1-K1-H1.pep
ETDNKCQHKLLSSCSNSGYIQNQTPEDTKSSIIANSDAPQWSIHNHISRVLKQ

SEQ ID NO: 75693 - protein, 107 aa, Gossypium hirsutum
  Clone ID: GOSHI-09MAY01-C40724_1.pep
MGKRKSRAKPAPKKRMDKLDTVFSCPFCNHGTSVECRLDMKNLIGEASCRICQESFSTVITALTEPIDIYSEWIDECERVNNLEEEDDGDQDEGYVPRKRVSTSEWD

SEQ ID NO: 75694 - protein, 137 aa, Gossypium hirsutum
  Clone ID: GOSHI-09MAY01-C40664_1.pep
ETAFPDWFVAFQLYMATPGLQKMYSCNGTALELNGVNNTIFMQGLPGLNYIVAETDAANPQKDPRVPGKQQTVISFTKKTTPSINIAAGDGFPSKVFFNGEECALPSMLPTNSGNRKGSTTVISILIAVLVFMLVQQ

SEQ ID NO: 75695 - protein, 90 aa, Gossypium hirsutum
  Clone ID: GOSHI-09MAY01-C40174_1.pep
MGAEQALKRIPRIKFPQRHPKPSPSGSISEIQATRKDGGVIGNFIARSRLSSDVPAPPSNTAVGGKASLLPKRTPVSEREIEAILLGGCF

SEQ ID NO: 75696 - protein, 129 aa, Gossypium hirsutum
  Clone ID: GOSHI-09MAY01-C40134_1.pep
EFASSIFGSNTRFKTLGTEHLTKSSTLVQNYTVLTTPEEIPAPMMVACHTVPYPYAVLYCHSQVTENRVFKVSLDGENGDKVTAVAVCHKDTTQWNRNHVSFRVLGIEPGTPGVCHFFPADNFVLVPDP

SEQ ID NO: 75697 - protein, 166 aa, Gossypium hirsutum
  Clone ID: GOSHI-09MAY01-C40064_1.pep
MPPKFDPTQVVDVFVRVTGGEVGAASSLAPKIGPLGLSPKKIGEDIAKETAKEWKGLRVTVKLTVQNRQAKVAVVPSAAALVIKALKEPERDRKKTKNIKHNGNINLDDVIEIAKVMRPRSMAKDLRGTVKEILGTCVSVGCTVDGKDPKDLQQEIDDGDVDVPLE

SEQ ID NO: 75698 - protein, 46 aa, Gossypium hirsutum
  Clone ID: GOSHI-09MAY01-C40024_1.pep
IIEGAIRHFFTLAFSFTEMKKKKPTANVSAFESITSTVLYVSFFNI

SEQ ID NO: 75699 - protein, 121 aa, Gossypium hirsutum
  Clone ID: GOSHI-09MAY01-C40354_3.pep
PTRPPEFTVPQCYYAKQPPALHQGYFSKFTVDALFYIFYSMPKDEAQLYAANELYNRGWFYHKEFRFWFMRVPNVEPLVKTNTYERGSYHYFDPNSFEIIRKDNFVVHYELLEKRPSLPQH

SEQ ID NO: 75700 - protein, 240 aa, Gossypium hirsutum
  unsure (1)..(240): unsure at all Xaa locations
  Clone ID: GOSHI-09MAY01-C40354_2.pep
DFPQLTSRPSSAGGPQGQLGSLRKQGPSPIVQQNQEFSIQNEDFPALPGFKGGNADYAMDLHQKEQLHDNTMSMMQSQHFSMGRPAAFNLGGSYSSHRPQQQQQHAPSASTTGVSFPPVNDQDPLHLHGSDIFPSSHSGYHSQTSGPPGIGLRPLNSSNSVSGMGYDQLIQQYQQHQNQSPLRLQQMSAVNQSFRGXGLKPTQAAQSDSDPFGLLGLQSVIKMTNPDLTXLALGIDLTTL

SEQ ID NO: 75701 - protein, 293 aa, Gossypium hirsutum
  unsure (1)..(293): unsure at all Xaa locations
  Clone ID: GOSHI-09MAY01-C40354_1.pep
FYYAMDLHQKEQLHDNTISMMQSQQFSMGRSGAFNLGGSYSSHRPQQQQHAPSASRVTWDGLRPLNSSNTVXGMRHDQLXQQYQQHQNQSPFRLQQMSAVNQSFREPGLKSTQAAQSDSDPFGLLGLQSVIKMTNPDLTSLALGIDLTTLGLNLNSSENLYKTFGSPWSDEPAKGDPEFTVPQCYYAKQPPPLHQGYFSKFTVDTLVYIFYSMPKDEAQLYAANELYNRGWFYHKEHWCWFIRVPNVEPLVKTNTYERGSYHCFDPISFETVRKDNFVVHYEMLEKRPALPQH

SEQ ID NO: 75702 - protein, 55 aa, Gossypium hirsutum
  Clone ID: uC-gsronu33B015e08b1.pep
TPDSFRTFALFFFFFFFFFFFFFFFFFFLMEMLVCIRFVKKLQWLLIGKKINRNA

SEQ ID NO: 75703 - protein, 69 aa, Gossypium hirsutum
  Clone ID: LIB3148-035-Q1-K1-B6.pep
LRQTRTREVDATILIPTLLLGDANNQAIKARVEDHEAHLEHKNDALLCCKLNQPTTFNYWISYIDSNLK

SEQ ID NO: 75704 - protein, 175 aa, Gossypium hirsutum
  Clone ID: GOSHI-09MAY01-C40344_1.pep
CSPTSASYIPTSPFYSPTSPFYSPTSPSYSPTFPAYSPTSPGYSPTSPSYGPTSPSYSPTSPSYNPQSAKYSPSLAYSPSSPRVSPSSPYSPTSPNYSPTSPSHSPTSPSYSPSNPTYSPTSPYNSGGNPDSSPGSPQCSPSAGYSPSAPGYAPSSTGQYTPSNTDDQAADDGKT

SEQ ID NO: 75705 - protein, 247 aa, Gossypium hirsutum
  Clone ID: GOSHI-09MAY01-C40204_2.pep
MAPIPFLSLLLLFSLTFPSSSSAFEQQQSPLLKYHHGPLLKGNITVNLVWYGKFSSTQRSIIGDFLNSLSNPKTTSSPSVSSWWRTTAKYKGGSSSVVVGKQTLDDKYSLGKALKTSQLKVLAFKYGYGDGKAVNVVLTSSDVAVDGFCMSRCGTHGSVQVKKSRFPYAWVGNSVSQCPGYCAWPFHQPVYGPQTPPLVAPNGDVGVDGMVINLATVLAGTVVNPYNNGYFQGPAEAPLEAVSACTG

SEQ ID NO: 75706 - protein, 193 aa, Gossypium hirsutum
  Clone ID: LIB3584-010-P1-K1-D6.pep
GSPSSGDDCQNRGGAGGGVGTTLVTVLFSKLLKLPTQVLAFKYGYGDGKAVNVVLTSSDVAGEGFCFSRCGTHGSVQVKNSRFPYAWVGNSVSQCPGYCAWPFHQPVYGPQTPPLVAPNGDVGVDGMVINLATVLAGTVVNPYNNGYFQGPAEAPLEAVSACTGIFGKGAFPRYPGKVLVGETTGASSNAVGV

SEQ ID NO: 75707 - protein, 189 aa, Gossypium hirsutum
  Clone ID: GOSHI-09MAY01-C41954_1.pep
LDYVGYLYQRMEPLSEQERIELGYRDFLQAPLQPLMDNLEAQTYETFEKDSVKYIQYQRAICKALLDRVPDGKASAITTVLMVVGAGRGPLVRAALQAAEETGRKLKVYAVEKNPNAVVTLHSLVKLEGWENVVTIVSWDMRLWNAPEKADILVSELLGSFGDNELSPECLDGAQRFLKQDGISIPSSY

SEQ ID NO: 75708 - protein, 97 aa, Gossypium hirsutum
  Clone ID: GOSHI-09MAY01-C41934_1.pep
LQSKEHIEASLLSKHIAAMRRERAMAYSFTHQQTWKNGSKSMNPLFMDMNNPTWGWSWLERGMAARPWEGHGSDGNMNRSSTMSSVMICTFLKEKSA

SEQ ID NO: 75709 - protein, 113 aa, Gossypium hirsutum
  Clone ID: GOSHI-09MAY01-C41814_1.pep
MAASQGSIGSQGSGSSGISELDSQPPQGTYKCQGSRSPTSNQHNQPGVDEKRLRASLKNIMEDMPCVSTTGDGPNGKRIEGFLYRYRKGEEVRIVCGCHGSFLSPAEFVKHAG

SEQ ID NO: 75710 - protein, 96 aa, Gossypium hirsutum
  Clone ID: GOSHI-09MAY01-C41834_1.pep
SPFISFFLLYLGMLLYLFISCFSIIFFIKSLTLKPLPPWATEMRLLSPWFRKDVSFFLSSRLSKNILGLAYFTTVVSKMSLKKMSFTSKVDNFEEV

SEQ ID NO: 75711 - protein, 91 aa, Gossypium hirsutum
  Clone ID: GOSHI-09MAY01-C41544_1.pep
LVSCGFYSFSPLLCVQVQLPVLVWEHPNKLFIPKGVAAAISLGNLSCFGVAKYAAMMIAVSYVSMRFKVESLCASSFFPFVECNVIVPNKK

SEQ ID NO: 75712 - protein, 69 aa, Gossypium hirsutum
  Clone ID: LIB3147-043-Q1-K1-A4.pep
KTRDHGKRANHSDLSHVGFTRFLHYFVCKCNCRFLSGNIPTSCLSPRYVYLFCIIIIYLIKFIYLRMQL

SEQ ID NO: 75713 - protein, 56 aa, Gossypium hirsutum
  Clone ID: LIB3272-009-P1-K1-F11.pep
GRKEETMARGRTILTCLMWLLLVFSITLCASATAGARLGTSQQVVYPQVCCGDDCC

SEQ ID NO: 75714 - protein, 227 aa, Gossypium hirsutum
  Clone ID: GOSHI-09MAY01-C41794_1.pep
TLTPYKVPIKVEYAVRKSCYASVVVENIKLVYLRRSLVEELLMHPDTFEEKVVGSFVRVKRKPGNCSGMTSFQLLLVTGVKKTSNAESNKGILLEVSCMPVDIPIDMLNDDDISEEECIDLQQRIKDGIIKRPTVVELEEKAKSLHEDITKHWIQRELVQLQGKIDFAHEKGRKYMLERFLYEREMLQKPSEQQRLLQKLPRVIAEEVEVKKTADRNYSGNDCPTGL

SEQ ID NO: 75715 - protein, 58 aa, Gossypium hirsutum
  Clone ID: LIB3148-041-Q1-K1-G9.pep
RIKEQTDNQTFPFKTKIVPTCISVPSHAQNQFYPAIELILAESTALLYLHAEYWLSTS

SEQ ID NO: 75716 - protein, 229 aa, Gossypium hirsutum
  unsure (1)..(229): unsure at all Xaa locations
  Clone ID: GOSHI-09MAY01-C41644_1.pep
EVFSFYPDETFCNGFEEVLRRYRELVPNLKLAGPTSFAPIIEMAITIVEQSGGQYHVLLIIADGQVTRSVDTERXAFDNFQFVNFTEIMSKIVDRSRKEAEFALSALMEIPSQYKATLELNILGNTRGKAIDRVPLPPPLYGAGSFSNSKLSWSSSFRPSAPSSARREAPVQTAPPASSASDNHLCPICICNAKDMAFGCGHQTCCECGQDLQLCPICRGTIDTRIRLY

SEQ ID NO: 75717 - protein, 127 aa, Gossypium hirsutum
  unsure (1)..(127): unsure at all Xaa locations
  Clone ID: LIB3147-044-Q1-K1-B5.pep
PRVRPRVRPRVRPRVRELNILGNTRGKAIDRVPLPPPLYGAGSFSNSKLSWSSSFRPSAPSSARREAPVQTAPPASSASDNHLCPICICNAKDMAFGCXHQTCCECGQDLQLCPICRGTIDTRIRLY

SEQ ID NO: 75718 - protein, 180 aa, Gossypium hirsutum
  unsure (1)..(180): unsure at all Xaa locations
  Clone ID: LIB3582-006-P1-K1-D2.pep
LIPCFGFGXASTHDQXVFSFYPDETFCNGFEEVLRRYRELVPNLKLAGPTSFAPIIEMAITIVEQSGGQYHVLLIIADGQVTRSVDTERGQLGPQETKTVEAIVKASEYPLSIILVGSGDGPMDMMREFDDXISARAFDNFQVVNSTEIMSKNMDRSRKEAEFAFSALMEIPSQYKATLE

SEQ ID NO: 75719 - protein, 66 aa, Gossypium hirsutum
  unsure (1)..(66): unsure at all Xaa locations
  Clone ID: LIB3146-013-Q1-K1-H10.pep
VFSFDEIHDYVQNFVYIYDGCPISIKKRSNAHPIMAIYEAFCTIYLKAFVRVGERVGARVVXRVXV

SEQ ID NO: 75720 - protein, 133 aa, Gossypium hirsutum
  Clone ID: GOSHI-09MAY01-C41664_2.pep
MAVPLLSKKIVKKRVTKFKRPQSDRKISVKTNWRRPKGIDSRVRRKFKGCTLMPNIGYGSDKKTRHYLPNGFKKFVVHNVGELKLLMMHNRTYCAEIAHDVSTKKRKEIVERAAQLDVLVTNKLARLLNQEDE

SEQ ID NO: 75721 - protein, 132 aa, Gossypium hirsutum
  Clone ID: GOSHI-09MAY01-C41664_1.pep
MWSKDYTKTMCELDILIANAIRHLRCMKQTNCQRPKGIDARVRRKFKGYTLMPNMGYGSDKKTRHYLPNGFKKFVVHNVGELELLMMHNRTYCAEIAHEGSTKKRNEIVERAAQLDVLVTNQLARLRSQEDE

SEQ ID NO: 75722 - protein, 131 aa, Gossypium hirsutum
  Clone ID: GOSHI-09MAY01-C41064_1.pep
MEFRPLEIKVISAKDLKDVNLFTKMDVYVVVSINGDSRTAQRTPVDKDGGSNPEWNYTVRFTVDEAAARQNGLTVVFTLKSQRQLGDKDIGTVQVPVKELLDNGDGNRKGQNNLSYAVRLANGKAKGVLHL

SEQ ID NO: 75723 - protein, 63 aa, Gossypium hirsutum
  Clone ID: GOSHI-09MAY01-C41024_1.pep
MCTSKAQKNRTLRKRANKLSPSFRHPNNSSVIGGAQGYCNQAEQVCQRGANAVATAKLVKNID

SEQ ID NO: 75724 - protein, 84 aa, Gossypium hirsutum
  Clone ID: GOSHI-09MAY01-C41284_1.pep
PTRPPDSSLSCGPEAREKETKTAEFGRTGGMNGSKLLAFHSKRNRTIGHGEREQLDFIVSESVIRWASCTNLPTATSLRSSLVC

SEQ ID NO: 75725 - protein, 192 aa, Gossypium hirsutum
  unsure (1)..(192): unsure at all Xaa locations
  Clone ID: GOSHI-09MAY01-C41234_1.pep
FKTSSMVLDVQFSVSQTSLRMVAAYSDGFVKVFELLDPLELKNWQLQAEFQNVIHAVSIVGKASCLTACISWNPQNGEGQESSFILGFXNSDTPQLNSXHRWWELDPAHQRWLPVAELALPGDRGDQIYSGAWAPNIGRPYEVIATASQKGISVWRVGSTTDMDGRLCMENGALLSRHNSEVWQMEWDMNGM

SEQ ID NO: 75726 - protein, 141 aa, Gossypium hirsutum
  unsure (1)..(141): unsure at all Xaa locations
  Clone ID: GOSHI-09MAY01-C42944_1.pep
ISCFGCAIEIIYLILYIVYAPMRDKVFTVKWIILFNLGGYCLIMVATNLFRERSKRVTVMGWVCAVNSVAXSASPLGIMRRVIRTKSVEYMPFLLSFFLTLCSTMWFFYGLFLQDLYVAFPNVLGFLLGTAQIIIYVIYKN

SEQ ID NO: 75727 - protein, 121 aa, Gossypium hirsutum
  Clone ID: GOSHI-09MAY01-C42924_1.pep
SSSSSIDDDNSSVWSIQVNASTHDEDEETTIEEMGDDYHEDAEEMGDDDDGLVDELCEGLSKMSMEEMFQGKHTRFVYNSDEKIEEECAEKEDSSDIIRLKGLPTPKGKHLRFPLDEVDDD

SEQ ID NO: 75728 - protein, 190 aa, Gossypium hirsutum
  unsure (1)..(190): unsure at all Xaa locations
  Clone ID: GOSHI-09MAY01-C42594_1.pep
HASGKRECCRRPNRSDAHLSVEEEAKLEEQTRDYFDHTAPKRHTKPQRSDYSSNYVDALAAADSGIPEYLEFQRLENDPQKIVYNGSEVREEFMETEYYKDLNCVDKHHHTTGTGFIKVENDNGRNFKLEPDSDTSCHASCXGNPATNDWIPAALDAAYVASDKPNRMINEFNEPAWFSIVFLLSPVMCF

SEQ ID NO: 75729 - protein, 173 aa, Gossypium hirsutum
  unsure (1)..(173): unsure at all Xaa locations
  Clone ID: GOSHI-09MAY01-C42794_1.pep
CDLHKLYKSYRERMRKFDILNYQKMYAIGFLHSKDPLQSISTHKSSSPAITSLLHQNLRLRRRKKSNFDPTTKFIKELHSDLEMVYVGQLCLSWEILHRPSASAMEIWETDPYSLRRFNEVACEFQQFQVLIQSIQSKTELFEXPRVQNYVKNRCXFYRNLLQVPVIFERISV

SEQ ID NO: 75730 - protein, 113 aa, Gossypium hirsutum
  unsure (1)..(113): unsure at all Xaa locations
  Clone ID: GOSHI-09MAY01-C42764_2.pep
GDVFKWKHLWSVLAEQFGIEXFGFVEGENRGLEEMMKGKEGVWEEIVKENQLQKTSLQEVGXWWFTDAMLSAPLPMPLLSMNKSKEHGFLGFRNSQNSFVTWIDKMKAYKIVP

SEQ ID NO: 75731 - protein, 232 aa, Gossypium hirsutum
  Clone ID: GOSHI-09MAY01-C42764_1.pep
QPHDPPFTEDLPRLNAPNFYYHQEDILFEEIEKKEGLTWSVHRPAIIFGFSPYSLMNLVGSLCVYAAICKYEGKPLHFPGSKAAWNCYFEASDADLIAEQHIWAAVDPYAKNEAFNVTNGDVFKWKHLWSVLAEQFGIEEFGFVEGENRGLEEMMKGKEGVWEEIVKENQLQKTSLQVVGNWWFSDALFLAPLQMPLLSMNKSKEHGFLGFRNSRNSFVTWIDKMKAYKIVP

SEQ ID NO: 75732 - protein, 130 aa, Gossypium hirsutum
  Clone ID: uC-gsronu33B127g08b1.pep
HASAHASAHASADADLIAEQHIWAAVDPYAKNEAFNVTNGDVFKWKHLWSVLAEQFGIEEFGFVEGENRGMEEMMKEKEGVWEEIVTENQLERTSLPVRGNWRFTEAKCLVLSTHVSYGVYKAGAWAFEV

SEQ ID NO: 75733 - protein, 54 aa, Gossypium hirsutum
  Clone ID: LIB3148-002-P1-K1-F10.pep
LACYRKMSETIAYLQREASVVLVKMLCGFLFPLFVYDALSILSCRILNYTIYTC

SEQ ID NO: 75734 - protein, 222 aa, Gossypium hirsutum
  Clone ID: GOSHI-09MAY01-C42624_1.pep
DAWADAWAVKPHEAFLKLRHESKVEHIFVVGNSGKQFEIVLNFLGLVEKFFYLSGKYDMELTVGDAAMENSLLVAIGHIELDLPEAPEKAPRPPPQPVDPYSRYGPKAEITHIFRAPEKRPPQELSLAFLGLTILPLLGFLIGLLRLGVNLKNFPSKPLPATFAVLFHVGIAAVLLLCVSICVKLDLSQTLKILGFLGGILVLAGHRILSHLAAASAKLKFA

SEQ ID NO: 75735 - protein, 76 aa, Gossypium hirsutum
  Clone ID: GOSHI-09MAY01-C42054_1.pep
QSLGRYWMAYAKGNCGTCSYLGTFRTTKCQSGCDQPTQRWYHVPRSWLKPTKNLLVVFEELGGDVSKISLVRRSVL

SEQ ID NO: 75736 - protein, 78 aa, Gossypium hirsutum
  Clone ID: LIB3147-054-Q1-K1-F6.pep
VEEFCISKFSFPVSNKTFITMLMSYSNHRQKIPESLQQQRFLFCLNKSYELVRHPGNPRKCGRTNGRTRGRTRGRTRA

SEQ ID NO: 75737 - protein, 79 aa, Gossypium hirsutum
  unsure (1)..(79): unsure at all Xaa locations
  Clone ID: LIB3147-054-Q1-K1-F2.pep
VEEFCISKFSFPVSSKTFIQLLMSSRNHRQKVPESLQQQRFLFCMDSVMGGSASRKPPYAWTDEWSEEGXMSAVRVGGR

SEQ ID NO: 75738 - protein, 55 aa, Gossypium hirsutum
  Clone ID: LIB3829-022-Q6-K6-F10.pep
KKKKKKKKKKKKKKKKKKKNKTKKKKKKKKKKQKTKKKKKKKKGRPFLRTPNFLP

SEQ ID NO: 75739 - protein, 53 aa, Gossypium hirsutum
  Clone ID: LIB3147-055-Q1-K1-A12.pep
CVMTYKYSSVLSGKSWLCIKSPIKRNLESKIGALHHTVDTLVLFSRYFLPLPF

SEQ ID NO: 75740 - protein, 178 aa, Gossypium hirsutum
  Clone ID: GOSHI-09MAY01-C43954_1.pep
DARHLTVILEPYFPLSIEGGSGLRSLSIFSALGTRVVTDKSLHQLFEKSPCLRVLDLGMNNSCDDLIPEISSKIGDLIHLRHLNLFCCKMIHRLPDTICQLHDLLSLDLHGCSRLGKLPDGLGNLINLRYLCTTDCSSLTYYPKGIGKLTSLRTLTDIIARADCDDPKVFCIGDLENL

SEQ ID NO: 75741 - protein, 178 aa, Gossypium hirsutum
  Clone ID: GOSHI-09MAY01-C43964_1.pep
MAANKNSHLGFSLISLIFLFSIPKSLSALDPEPAVWDMLPKYGLPSGLLPSTVTDYVLHEDGRFIVTLDSPCYVQFEYLVYYDKTITGKLGYGSITDLKGIQVKRFLFWLDVDEITVDLPPSGSIYFQVGFINKKLDVDQFQTVHSCRDGVTGSCKYSWKSVLQLPMPTNDIQMLITE

SEQ ID NO: 75742 - protein, 178 aa, Gossypium hirsutum
  unsure (1)..(178): unsure at all Xaa locations
  Clone ID: uC-gsronu33B106a06b2.pep
MAANRFNSHLGLALAYLIFLISIPKSLSVLEPQPAPPSVWDILPKFGLPSGLLPSTVTDYVLHDDGRFIVTLDSPCYIQFEYLVYYETTITGSLGYGSITDSEGIQVQRIFLWFDVNEIKVDLPPSDSIYFQVGFINKKLDVDQLITIHSCRDEVTGSCXYSSESLLQLPTPRNEIEE

SEQ ID NO: 75743 - protein, 277 aa, Gossypium hirsutum
  unsure (1)..(277): unsure at all Xaa locations
  Clone ID: GOSHI-09MAY01-C43934_1.pep
GGTSGRIADTIGRKGXMRLSAVFCIAGWLAVXFSKSDVSLDLGGFATGYGIGIFSYVVPIFIAEIAPKNLRGGLTTLNQLLIVIGQSTAFLIGTVISWRELALAGLLPCIVLFVGLCFIPESPRWLAKVGDQKEFHAALRELRGKDADITEEAEEIQEYIETLQSLPKTTIWDLFQKQYIKSVIIGVALMVFQQFGGINGVSFYASQTFALAGLSSAKAGTVAYACVQVPITFLGAMLMDKSGRRPLIMVSSXGTFLGCFLACTSFYFKEHDLLPEW

SEQ ID NO: 75744 - protein, 131 aa, Gossypium hirsutum
  Clone ID: LIB3148-019-Q1-K1-C9.pep
HASAHASAHVSALMVFQQFGGINGGSLYASQTFALAGLSSAKAGTVAYACVQVPITFLGAMLMDKSGRRPLIMVSSAGTFLGCFLAGTSFYFKEHDLLPEWRPILAVAGVLIYVGSFSIGLGAAPWVIMSE

SEQ ID NO: 75745 - protein, 207 aa, Gossypium hirsutum
  unsure (1)..(207): unsure at all Xaa locations
  Clone ID: GOSHI-09MAY01-C43894_1.pep
DLTAGYXLKLSTDEVKAYVPDVLNQFQTIIQYIYNQGGRYFWIHNTGPVGCLPYVMERIPVLAGQIDDYGCASPFNEVAQFFNRGLKKIVEQLRKNLPHAAITYVDVYSVKYSLISQGSKHGFKHPLRTCCGHGGKYNYNKNLGCGAKVNKHGKEVLVGAPCKDPWTYVNWDGVHFTEAANKYIFERIVNGSLSDPPTALNMACYRN

SEQ ID NO: 75746 - protein, 254 aa, Gossypium hirsutum
  Clone ID: GOSHI-09MAY01-C43844_1.pep
MFSSPKKEDDDSGQGFRFDKSLQELRDLRSQLHYAADYCETTFLKSEEKKTVVENTKEYLCKALVTFVDHLGNVSANLNHSISQTNSFSEAELRINCLHQRLLSCQQFAHKLALTRVKWNPILSRHNRRYLSAPTLAAVEKSNENSRATISAIPGKLVNKHELDTEGVPLFFFTCTDKPSLSKSPSLKSNCDESNSDSTLVPVRDGFSMLSKGSNPTFHFQQGNKKHGRKSLYRKSLPSADILSFIRRARRSAA

SEQ ID NO: 75747 - protein, 140 aa, Gossypium hirsutum
  Clone ID: GOSHI-09MAY01-C43874_1.pep
IFCSSSQCYPIQISGWPLELMAYAYLTVSPPSMSKQFEEMAAMASNESIIRKDLRYPEIEEKALQFILDNCESSISKYSKFLKESGSMDLDITSQELQNRGVFLKQLAVDLCISEQKILHRAQYILKRRLRDMRSGELRA

SEQ ID NO: 75748 - protein, 171 aa, Gossypium hirsutum
  unsure (1)..(171): unsure at all Xaa locations
  Clone ID: GOSHI-09MAY01-C43574_1.pep
HSYKGFQQLSSLVDVGGGLGITLNLITSKYPSIKGINFDLPHVIKHAPAYHGVQHVGGDMFESVPKGAAIFMKWILHDWSGDHCLKLLKNCYNAIPXNGKVIVVEAVVPVVPEANAYLRSITQLDVLMLAQDPGGKERTKSEFEALATKAGFSGIRYECFACSYWIMEFFK

SEQ ID NO: 75749 - protein, 95 aa, Gossypium hirsutum
  Clone ID: GOSHI-09MAY01-C43534_1.pep
EREGRERDRRDRERGRRRSRSRSRSRERKRHGRSSMSPRRHEAEDGNAPEESKKKGKKEKKEKKEKKDDGTDHPDPEIAEANRIRASLGLKPLKL

SEQ ID NO: 75750 - protein, 297 aa, Gossypium hirsutum
  Clone ID: GOSHI-09MAY01-C43454_1.pep
MDKTQSIPTIDLSDFPAQYEKLRRSSEEWGCFRVVNHNIPFELMQEMKQVVRSLLDLPIQIKQNNVDVIAGSGYWAPSPKNPLYEALGLYDMASSQAVHTFCSQLDASPSQRDAVEKYAKAIHEVIMDIGGKIAESMGLKGDYCKEWPCQFRINKYHFTPQSVGSAGVQLHTDSGFLTILQDDENVGGLEVMDKSGEFVAVDPLPGSLLVNLGDMATVWSNGRLHTVKHRVQCKEAKTRVSIATFLLGPKEEAVDPPPELVDSDHPRLYNSFTYEEYRKLRLSTELPAGEALALVHT

SEQ ID NO: 75751 - protein, 91 aa, Gossypium hirsutum
  Clone ID: GOSHI-09MAY01-C43774_1.pep
FWRHPELRVNSTKSMIGHLLGASGAVEAVATVQAIRTGWVHPNINLENPDVGVDTSVLVGPNKERLNVKAALSNSFGFGGHNSSIIFAPYK

SEQ ID NO: 75752 - protein, 49 aa, Gossypium hirsutum
  Clone ID: LIB3148-016-Q1-K1-H2.pep
CNFITVLTLYFLGYKPFLLHEHKNYYIYWFFNGPVASNTKTSIVATTFK

SEQ ID NO: 75753 - protein, 41 aa, Gossypium hirsutum
  Clone ID: GOSHI-09MAY01-C43664_1.pep
INQFLQSLRFITYKLLIFKKYRIVIRHLPLLSSAKFYRTPF

SEQ ID NO: 75754 - protein, 68 aa, Gossypium hirsutum
  Clone ID: GOSHI-09MAY01-C43144_1.pep
FRAAWALGLGLFWAYNWVCCFCNFGLFLDFFGFYLLGWNQVARAKVGSYMYYNLIYQEIHFPTSPDSS

SEQ ID NO: 75755 - protein, 95 aa, Gossypium hirsutum
  Clone ID: AI725926.1.pep
MKACVGWRRFLFCFPLIFILPHLFSVLELHQNQVVTDSPKENTKKFDVQHSSGDDAPKKITKKFDHLVLGPAAGEGLPNRLQCRGVKALNKTYFS

SEQ ID NO: 75756 - protein, 66 aa, Gossypium hirsutum
  Clone ID: GOSHI-09MAY01-C43074_1.pep
IKCQSNTNHILHDKKTHKHLVTLGGTGYFQPVDHVRKERVGSKINSFGRVGGRVGGRVGGRVGPPR

SEQ ID NO: 75757 - protein, 212 aa, Gossypium hirsutum
  Clone ID: GOSHI-09MAY01-C43024_1.pep
MSSLSVRFFAPQQPLLPSTASSFKPKTWVMAAPTTAPATSVDVDGRRLEPRVEEREGYFVLKEKFRDGINPQEKIKIEKDPLKLFMEAGIDELAKMSFEDLDKAKATKDDIDVRLKWLGLFHRRKHQYGRFMMRLKLPNGVTTSAQTRYLASVIRKYGKEGCADVTTRQNWQIRGAVLPDVPEILKGLDEVGLTSLQSGMDNVRNPVGNPLA

SEQ ID NO: 75758 - protein, 44 aa, Gossypium hirsutum
  Clone ID: LIB3148-006-Q1-K1-E11.pep
MSTGARVITVKNDLAKLQLTSPVCTNKGEKIALNRHVEKHWRLI

SEQ ID NO: 75759 - protein, 45 aa, Gossypium hirsutum
  Clone ID: GOSHI-09MAY01-C43354_1.pep
PQASHTKRMSVVARLRELNTLGGHVESVVKLKGLDIDTIQQHYTA

SEQ ID NO: 75760 - protein, 127 aa, Gossypium hirsutum
  Clone ID: GOSHI-09MAY01-C43324_1.pep
LAIVPYTILIDGLCKAQHIEAAKELFHQLSDSGLKPNVYTYCVMINGLCKEGLPNEAYRLFGSMGDNDCLPNSCCYNVMIRGFLRNSYTSKATQLLTEMVGKGFSADIFTATLFRDLIVHSNKSILL

SEQ ID NO: 75761 - protein, 51 aa, Gossypium hirsutum
  Clone ID: GOSHI-09MAY01-C43204_1.pep
LISIENSHIYNVEGYIYIYIYIIVLQRFLLQAILNPKYYISSQNPNINQPN

SEQ ID NO: 75762 - protein, 62 aa, Gossypium hirsutum
  Clone ID: GOSHI-09MAY01-C78474_1.pep
NRLLLKLLLSHYSSSSRAACRVSVCRSIIWPFIQKFLIQIKAPNMDASCTPEKNFIATLLGI

SEQ ID NO: 75763 - protein, 55 aa, Gossypium hirsutum
  Clone ID: LIB3582-003-P1-K1-F6.pep
TLAETVIVTLQFKQLSSQIKAPNMDDHAHQKRTSLHTLLGITYMKHKLSSHIKCQ

SEQ ID NO: 75764 - protein, 228 aa, Gossypium hirsutum
  unsure (1)..(228): unsure at all Xaa locations
  Clone ID: AI729376.1.pep
GVVKYHGPRPIMRPKQVFVANHTSMIDFIILKQMTAFAVIMQKHPGWVGLLQSTILESVGCIWFNRSKAKDREIVTRKLREHXQGADNNPLLIFPEGTCVNNQYSVMFKKGAFELGCTVCPIAIKYNKIFVDAFWNSRKQSFTMHLLQLMTSWAVVCDVWYLKPQNLRPGETXIEFXERIRDXISVRAGLKKVPWDXYLNYSRPSPXHKERKQQSFAESVLRGLELEK

SEQ ID NO: 75765 - protein, 129 aa, Gossypium hirsutum
  Clone ID: LIB3582-006-P1-K1-D3.pep
VFVANHTSMIDFIILEQMSSFAVIMQKHPGWVGLLQSTILESVGCIWFNRTEAKDRETVTKKLREHNQSVDNNALLIFPEGTCVNNQYNVMFKKGAFELGCTICPIAIKYNKIFDDAFWNSRKQSFTMH

SEQ ID NO: 75766 - protein, 316 aa, Gossypium hirsutum
  Clone ID: GOSHI-09MAY01-C79964_1.pep
MSARVITVSQDGNGDYRTVQEAIDTVPLCNTCRTIIRLSPGVYKQPVYVPKTKNLITLAGLRPELTVLTWNNTATKIQHHQGSRLIGTGTFGCGTVIVEGEDFIAENVTFENSSPEGSGQAVAIRVTADRCAFYNCKFLGWQDTLYLHHGRQYLKDCYIEGSVDFIFGNSTALLEHCHIHCKSAGFITAHSRKTSQESTGYVFLRCVITGNGGSSYSYLGRPWGPFGRVVFAYTYMDQCIKHVGWHNWGKAENERSACFYEYRCFGPGCCQSKRVTWSRELLEEEAEEFLMHGFIDPDPNRPWLAQRMALKIPYSA

SEQ ID NO: 75767 - protein, 139 aa, Gossypium hirsutum
  unsure (1)..(139): unsure at all Xaa locations
  Clone ID: uC-gsflmaxxa045f08b1.pep
MSERVITVSQDGNGDYRTVQEAIDTVPLCNTCRTIIRLSPGVYKQPVYIPKTKNLITLAGLRPELTVLTWNNTATKIQHHQCSRLIGTATIGXGTVICEEKDFIAENVTYETLARGFRTSCCIRXTADRCAFYNANSWL

SEQ ID NO: 75768 - protein, 143 aa, Gossypium hirsutum
  Clone ID: GOSHI-09MAY01-C79904_2.pep
YYYQNLPFLFFFYSLNIYIFLIITFTPVNLEWRKGKVNPFSSSIRARLRPKAMPMNLVHDVDGLPRIILTEPTGSSAEVLLYGGQVVSWKNERREELLFMSSKANWKPPRAIRGGIPICFPQFGNLGSLEQHGFARNPMWSLD

SEQ ID NO: 75769 - protein, 203 aa, Gossypium hirsutum
  unsure (1)..(203): unsure at all Xaa locations
  Clone ID: GOSHI-09MAY01-C79904_1.pep
LEWRKGKVNPFSSSIGARLRPKAMPMNLVHDVDGLPRIILTEPTGSSAEVLLYGGQVVSWKNERREELLFMSSKANWKPPRAIRGGIPICFPQFGNLGSLEQHGFARNRMWSLDSDPSPLPPANNQSSVDLILKSTEEDLKIWPRCFELRLRVTLSAGRLTLIPRVRNTDXQAFSFMFTLCNYFXVSDINEVRVEGLETLDYF

SEQ ID NO: 75770 - protein, 178 aa, Gossypium hirsutum
  unsure (1)..(178): unsure at all Xaa locations
  Clone ID: uC-gsflmaxxa005c03b1.pep
YGYSKIWVLESSQEQIFRVNQENGSLKQNLNATNAAPSAARSEISKVSNNGINALKGKGDQSANRQHKSTSLVKNCYAGIQMSNGLSSKHDEELADLLEEKTRSLEAIQASHESQIKQFKMELEKEHDKLVNVQIRLQEEHXLNESFQEELRLLKIDRDKRSSELSNIRNELDEKTKE

SEQ ID NO: 75771 - protein, 146 aa, Gossypium hirsutum
  Clone ID: LIB3584-024-P1-K1-H8.pep
MWTSIANLKENLNKITLDVHGDDDEELEIYGSENGRHSTFSDRRNSHTFAHSKPVSFSSLASGIDSPFNSEIGRYRAEIKKLQESEAEIKSLSVNYAALLKEKEEQIFRVNQENGSLKQNLNATNAAPSAARSEISKVSNNGINAL

SEQ ID NO: 75772 - protein, 99 aa, Gossypium hirsutum
  Clone ID: GOSHI-09MAY01-C79134_1.pep
MGEMSSFQLGVIGALFLSVASSVSIVICNKALMSNLGFPFATTLTSWHLMVTFFTLHAAQRFNLFESKPIDMKTVVLFGILNGVFIGLSKLSLGFTPLD

SEQ ID NO: 75773 - protein, 153 aa, Gossypium hirsutum
  unsure (1)..(153): unsure at all Xaa locations
  Clone ID: GOSHI-09MAY01-C79384_1.pep
MQALCSCEEAIDIGTMMENKRNPFSVDHTGFTSLASKRQKATKEKKDQVSERIAALQQLVSPYGXTDTASVLLEAMGYIRFLHEQVKVLSAPYLQTMPANSLQGDDQYSLRNRGLCLAPVSCTVGLARSNGADIWAPVKTTSPKFDEVISQFN

SEQ ID NO: 75774 - protein, 67 aa, Gossypium hirsutum
  Clone ID: GOSHI-09MAY01-C79314_1.pep
FSLEVKSLHFERLGAPYLRQPGESPRLEENFYANPLPGCICKRSQEKQTSSLKLERTLSSVQRRYLR

SEQ ID NO: 75775 - protein, 229 aa, Gossypium hirsutum
  Clone ID: GOSHI-09MAY01-C79334_1.pep
MTYTALKAVSLTHVRYQRGDQLGHFLAWVSLVPVFISLGGFVSHFIFRRELQSMFFALGLVISQFINEFIKKSVQQARPETCALLEMCDSHGWPSSHSQYMFFFAVYFTLLTCKGIGGIWNVRTKWAALFLPWSLAVLTMYSRVYLGYHTVAQVLAGASLGILLGGLWFWVVNSMLFCYFPLIEESSFGRFFYVKDTSHISDVLKFEYDNARAARNTMAARKAMASKSS

SEQ ID NO: 75776 - protein, 135 aa, Gossypium hirsutum
  Clone ID: GOSHI-09MAY01-C74844_1.pep
ATATASRVLQLGLVLGLILAVILGGGLSFGAKLFTKDADVLRLIGTGIPFVAATQPINSLAFVFDGVNFGASDFAYSAFSLVLVAIASIICLCILSSTHGFIGLWISLTIYMSLRAFAGFWRIGTGTGPWKFLRG

SEQ ID NO: 75777 - protein, 436 aa, Gossypium hirsutum
  unsure (1)..(436): unsure at all Xaa locations
  Clone ID: GOSHI-09MAY01-C74874_1.pep
TRHEHPFNLFWRQGSFICDACGSEGNNLCYICSICHLQVHKKCTSLPRIIKISRHNHFVFRKYLXHEAKIEKQECMICHHDVKMEYGCYCCLKDDCNYFVHVNCATEDTDLYYIVDSENPDELVEEPIESAITCVIEVNELGDATKIEHVSHEHCLVLGVMTQDDVDKHCDGCSLSILGSFYSCLQCIFFLHKSCADIPXKKHHWFDIHLLNLETNCIFQCDICLQQCCGFVYNCDECAFSFCLKCAMIPDTLDYLSHEHPLFWDSKYKGKCNACDLWVYGGYRCKSCKYAVHFECITLPNEVRHKCDKHFLKLTFRDESDYPEQHYCDIYEERRDPNKWFYCCSICDTSIHXGCVLGKYPFIKAGKSYRYKGHSHPLTFVRKKYHYLECAICGEICEELALECDICSYIVHWSCISPFFSLDFARLFGDRNVDQL

SEQ ID NO: 75778 - protein, 96 aa, Gossypium hirsutum
  Clone ID: GOSHI-09MAY01-C74494_1.pep
MCCKGDGWNSKGDKWKSVWKIPGPQRVCVFIWLILKQRLLRNVERVKRGLSDFLSCSIWGFHSEDTLHILRDYTAAKDVWSQFLTGSTLELKGDCQ

SEQ ID NO: 75779 - protein, 91 aa, Gossypium hirsutum
  Clone ID: GOSHI-09MAY01-C74774_1.pep
PVLLPAKLSNEVNLRNLVPENCFVGNQVSVLETFAPAIEAMKSGICEYGNGQKNVLYSQRPMVHFKIGIGKKPLGTAPDFNSKNKDLEKIV

SEQ ID NO: 75780 - protein, 305 aa, Gossypium hirsutum
  Clone ID: GOSHI-09MAY01-C74294_1.pep
MEGVVVKEEETQMTFATAVGTTAGLSSSSSSSNVTPQPKEGLNEVGPPPFLTKTFDMVEDPSTDSVVSWSEARNSFIVWDSHKFSTTLLPRHFKHNNFSSFIRQLNTYGFRKVDPDRWEFANEGFLGGQKQLLKTIKRRRNIVQSSQHQAGGGGACVELGQFGLDEELERLKRDRSVLLAEIVRLRQQQQHSRDQIVAMEDRLQSTEKKQQQIMSFLAKALRNPTFIQQLAQNRQAKGVEIGRKRRLTASPSVENLQQAAVPVVVDNDQVEEQEGLATIETEIETFFNSAMDDESSTEIKDHMPS

SEQ ID NO: 75781 - protein, 191 aa, Gossypium hirsutum
  unsure (1)..(191): unsure at all Xaa locations
  Clone ID: AI729182.1.pep
MEGVVVKEEETQMTFATAVGTTAGLSSSSSSSNVTPQPKEGLNEVGPPPFLTKTFDMVEDPSTDSVVSWSEARNSFIVWDSHKFSTTLLPRHFKHNNFSSFIRQLNTYGFRKVDPDRWEFANEGFLXGQXXLLKTIKRRRNIXQSSQHQAGXXXXXXXXXEXGVDEEWKKLGRDRCVLGGLNSGGVRWRGR

SEQ ID NO: 75782 - protein, 233 aa, Gossypium hirsutum
  Clone ID: GOSHI-09MAY01-C75834_2.pep
MAYCNPSSDQKLDEMASMEVGSDKDVKVHVFSSSSELIEKLHEKWSPVKKKPYPAMYSSVFGGIILDPAMMVIPIDDHMVHRGHGVFDTAVILDGYLYELDAHLDRFLRSASKARITLPFPRSTLRSILVQLTAASQCKEGTLRYWLSAGPGNFLLSPAKCPTSAFYAVVIADVVSQCKNGVKVITSTIPMKAPQFATMKNVNYLPNVLSIMEAEDKGAYASIWVDDDGFIAE

SEQ ID NO: 75783 - protein, 196 aa, Gossypium hirsutum
  unsure (1)..(196): unsure at all Xaa locations
  Clone ID: AI054460.1.pep
IASVGIKAESPXPXPRSXLRXILVQLTAPHSARXGTLRYWLSAGPGNFXLSPAKCPXXPFYAGVIADVVSQCXNGVKXDNFDYPMKAPXVATMKNVNYLPNVLSIMEAEDKGAYASIWVDDDGFIAEGPNVNVAFITNDKELIFPSFDRILSGCTSXEAKGAAEIMYIGSTLPILPIIMWDEHPIGDGMYNLMFRK

SEQ ID NO: 75784 - protein, 190 aa, Gossypium hirsutum
  unsure (1)..(190): unsure at all Xaa locations
  Clone ID: GOSHI-09MAY01-C75404_1.pep
KVEEENVHIRPEMKGLPKTLAVNEKELCKYFEPGNHVKVVSGTKEGATGMVVKVEQHVLIILSDTTKEHIRVFADDVVESSEVTTGITKIGEYELHDLVLLDNNSFGVIIRVESEAFQVLKGVPERPRGFXLANLREIQCKGDXKINGHDRYRNTVAVKDXIRILDGPCKGNMVLKAHIKGVRSLMIGLP

SEQ ID NO: 75785 - protein, 167 aa, Gossypium hirsutum
  unsure (1)..(167): unsure at all Xaa locations
  Clone ID: GOSHI-09MAY01-C75364_1.pep
PTRPPTRPPTRPQNVIPHGSSGGVVAASGDELENDYQQIKKHVKNDFKFLLEIASAENSGLHVFDFLANSILKEVLEAIQKGKPGAFSPGRPKEFLKNYKASLDFLAYLEGYCPTSAAVARFRAAPSYVEFMKQWNVGVXYFSLRFQEIAGALDSALTAAGLVLVQN

SEQ ID NO: 75786 - protein, 138 aa, Gossypium hirsutum
  Clone ID: GOSHI-09MAY01-C75254_1.pep
SNKIRGNCSSSLRMQWTKLLLLPIPSSSSTFQSGASSKLRFLSTSIAATFGIPYLKNTYCFCQRPPLANWCPTSLADLFTCIKGISFQPPAFVNLNLSTSSMPTHKPLFPPQKAKESSQSRIKINQIYNKACIWIFHT

SEQ ID NO: 75787 - protein, 239 aa, Gossypium hirsutum
  unsure (1)..(239): unsure at all Xaa locations
  Clone ID: GOSHI-09MAY01-C76584_1.pep
METAGEWLEKALIDLCKKIETGLDLDAEIISGLVSYCELAHPLDAKEYLDNIIGQEAGKVVTEEYLRRRGHLVLCTGNAAIPASKLQAYVKPPSGEISVSGTKKPFKTPKEAAGSSYRAEPKKNVISGNQENRIPNDASDSRNMRKGNQGNSKKKKAGKVVSLAEAAKGSIVFHQGKPCSCQARQHRLVSNCLSCGKIVCDQEGEGPCHFCGALVLREGXTYAGLEGSFTPVSDAEAAA

SEQ ID NO: 75788 - protein, 152 aa, Gossypium hirsutum
  Clone ID: GOSHI-09MAY01-C76684_1.pep
MAPGGSACKEVIESHSPVADYDIASAKSESNNATSTTTTTTMKTSVNLVGKHGIHSNNGVYELLECPVCTNLMYSPIHQCPNGHTLCSNCKIRVHNCCPTCPYDLGNIRCLALEKVAESLELPWKYQNLRGLPTLPSHRKLEHKSTCMMDVP

SEQ ID NO: 75789 - protein, 95 aa, Gossypium hirsutum
  Clone ID: GOSHI-09MAY01-C76094_1.pep
KNYIAAAVAATKEERSQVVLLNSIESFCSKASPEAAKEVALVLKVLYDDDILEEEFIMEWYQKGIAGSNKGSQIWKNLKPFIEWLQTAESESEDE

SEQ ID NO: 75790 - protein, 60 aa, Gossypium hirsutum
  Clone ID: LIB3830-001-Q1-K6-A6.pep
RKFHKKKKKKKKKKKKKKGAAAGRVGFPRIKDSELHPVRALCCSVVYYVVNWSLFIPLMG

SEQ ID NO: 75791 - protein, 56 aa, Gossypium hirsutum
  Clone ID: LIB3829-020-Q6-K6-H5.pep
RRGRRIIEDDDILEEEFILEWYQKGIAGSNKGSQIWKNLKPFIEWLQTAESESEDE

SEQ ID NO: 75792 - protein, 74 aa, Gossypium hirsutum
  Clone ID: GOSHI-09MAY01-C76324_2.pep
YSSCFFEVSIAGSDFCDSKCAVRCSKAGVQDRCLKYCGICCEKCHCVPSGTFGHKDECPCYRDMKNSKGKSKCP

SEQ ID NO: 75793 - protein, 88 aa, Gossypium hirsutum
  Clone ID: GOSHI-09MAY01-C76324_1.pep
MKMVLVLFLLVSLALSSCFFEVSIAGSDFCDSKCAVRCSKAGVQDRCLKYCGICCEKCHCVPSGTFGHKDECPCYRDMKNSKGKSKCP

SEQ ID NO: 75794 - protein, 50 aa, Gossypium hirsutum
  Clone ID: uC-gsflnu33B073b11b1.pep
FFTRPSTRSRTRSFTRTEKCHCGPSGTFGHKDECPCYRDMKNSKGKIKCP

SEQ ID NO: 75795 - protein, 128 aa, Gossypium hirsutum
  Clone ID: GOSHI-09MAY01-C76234_1.pep
MGLSRTHKTANGVSTRWVSFFCIASFFLGVLVINRLWTSSDPVKINEASSVQTHGRKEVHPLVNCDKDTSVEAGDILSRVSQTHDVIMTLDKTISSLEVQLAAARAAKGDSNEGSPMGYKTWNRELEG

SEQ ID NO: 75796 - protein, 153 aa, Gossypium hirsutum
  Clone ID: GOSHI-09MAY01-C77904_1.pep
VPLDALFVAKKEHVFGKRVFGTKAQFCDTGRIHDLVIECDMIGVNDPCLVIRVDGKSLMQVKRLRWKFRGNYTILVDGMAVEVYWDVHNWLFGSSVGNAVFMFKALPSSEEKLWISQSITNPSTLQWSFSQRFQDSKTRNLGFSLVLYAWKNE

SEQ ID NO: 75797 - protein, 183 aa, Gossypium hirsutum
  Clone ID: GOSHI-09MAY01-C77844_1.pep
MQGQKGAFGSFSETFFDQGSTSSNATIDQQVCWNNIQNPIENRFPDCLPSHNDINIGYVNSIGREEQEPGRWSLEEPSSSGTQNEVNHDERKIDHVWSSSMSASVTAEKNSPFVQNSNSNTVSPSLNLNAAIVAHGNNNCQVTERSNLNKPSGSERDLISSDAGPEGFIHASRSSGYVVDDND

SEQ ID NO: 75798 - protein, 283 aa, Gossypium hirsutum
  Clone ID: GOSHI-09MAY01-C77564_1.pep
DLELKRMKFPCKKLLPLLIFILSCLSVLRLLKLAITSSDPSSQAAALLSSLQRECSSPSECSKIQSNAANATLLSPKEFMLLSDLVTRKTPCNLLVFGFQPQYIDLSSINAGGITLFLEDNHYKISNFEASSNQTRIYKVKYGVPAKKAYKLLKHARGNPTCSPSINLLQQSTCKLALRDLPQQVYELKWDVIVVDGPIGDSPEAPGRMSTIYTASMLARATARNMTDVMVHDVHRTIEKWFSWEFLCEENLVSAKGKLWNFRISSDQSNSTQFCSSETVHIR

SEQ ID NO: 75799 - protein, 144 aa, Gossypium hirsutum
  unsure (1)..(144): unsure at all Xaa locations
  Clone ID: LIB3585-006-P1-K1-G2.pep
NSLVKNYYRCLFSYSLAFPFSDSLNSQLLLQILRLKLLLCYRRFNGSVRHLPNVYLDLSSINARGITLFLEDNRYKISNIEASSNQARIYKVKYGVPVKXAYKLLKHARGNPTCSPSINLLQQSTCKLALRDLPQQVYEAKWDV

SEQ ID NO: 75800 - protein, 166 aa, Gossypium hirsutum
  Clone ID: GOSHI-09MAY01-C77754_1.pep
MMQPRVVAMEEGKEPISANKTNLFRALPSRLLVFCLLFLGVGVGLSIISMYSVRFSMVQQLATKATSAVQPLFQDDGTTIDNFIRPPSNLMHNMNDTELLWRASFVPQIKDYPFKRVPKIAFMFLTKGPLPLAPLWDRFFKGHEELYSIYVHALPSYTAGYPPGRV

SEQ ID NO: 75801 - protein, 148 aa, Gossypium hirsutum
  Clone ID: GOSHI-09MAY01-C77744_1.pep
KKRTPKQSKYEMPPPPSLQAGPVKKGHHMGDYIPQEELEKFMAACNDAAAQKAAKETAQKTKIQSDNVGHKLLSKMGWKEGDGLGSSRKGIADPIMAGDVKMNNLGVGAHNPGEVTPDDDIYEQYKKRMMLGYRYRPNPLNNPRKAYY

SEQ ID NO: 75802 - protein, 56 aa, Gossypium hirsutum
  Clone ID: uC-gsflnu33B132f01b1.pep
SYSSNQPPTLHIVDFFHNCVLNSMLFEDCSGDWVCIDSQASYASVLSSSPVFAFYG

SEQ ID NO: 75803 - protein, 215 aa, Gossypium hirsutum
  Clone ID: GOSHI-09MAY01-C77764_1.pep
MGGTGDDKIPIHTETEGSETTIEIKIKTLAETYTMRVDKQMPVPALKEQIASVTGVLSEQQRLICRGKVLKDDQLLSAYHVEDGHTLHMVVRQPVPPSDGAPNHSDDLGSGTSRSHGNHVPSFVIETSNMPEQGDGVPPEIGRIVSAVLGMFGFANMASDVREQGSQRHERTSGIGIPKSSQGPTEQTSMRNQSDREHTAFGLPAAVFLGPMQPS

SEQ ID NO: 75804 - protein, 353 aa, Gossypium hirsutum
  Clone ID: GOSHI-09MAY01-C77734_1.pep
RTRGPESTTTFPVTLSELTERLKHWKNILQSNVEDRFPAVLKLEEESRVLRDFHVVDVEIPGQYFCDQEIAPDHTVKLDRVGADIQIVRRHGSSFRRLTLIGSDGSQRHFIVQTSLTPNARSDERILQLFRVMNQMFDKHKESRRRHICIHTPIIIPVWSQVRMVEDDLMYSTFLEVYENHCARNDREADRPITYFKEQLNQAILGQISPEALVDLRLQAYNDITKNLVTDGIFSQYMYKTLPSGNHIWAFKKQFAIQLALSSSCSFLLQIGGRSPNKILFAKNTGKIFQTDFHPAYDVNGMIEFSEPVPFRLTRNMQAFFSHFGVEGLIVSSMCAAAQAVVSPKQSQHLWYQ

SEQ ID NO: 75805 - protein, 167 aa, Gossypium hirsutum
  unsure (1)..(167): unsure at all Xaa locations
  Clone ID: AI054866.1.pep
FVREYKQDFERDLDPESTTTFPVTLSELTERLKHWKNILQSNVEDRFPAVLKLEEESRVLRDFHVVDVEIXGQXFSDQEIAPDHTVSXIRVGADIQIVRRHGSSXXRLTLXGLNGSXRHFIVQTSLTPNXXSDERVLHXXRVMXXMFDKHKDTSYICITHHYIRVPW

SEQ ID NO: 75806 - protein, 177 aa, Gossypium hirsutum
  Clone ID: GOSHI-09MAY01-C77284_1.pep
MNGGDAYGMMEAQYIWRHHRHDIRDDQCSSALVKHVKAPVNLVWSLVRRFDQPQKYKPFVSRCIMKGDLGIGSVREVNVKSGLPATTSTERLELLDDEEHILGMKIVGGDHRLRNYSSIITVHPEVIEGRPGTMVIESFAVDVPEGNTKDETCYFVGALIRCNLKPSSDRFKKDVLV

SEQ ID NO: 75807 - protein, 171 aa, Gossypium hirsutum
  Clone ID: GOSHI-09MAY01-C77244_1.pep
MAATKLYVVYYSLYRHVEIMAREVHRGAKSLQDVEATLWQVPETLSNTILQKMNTPAKAADVPEIRPEQLLEADGFLFGFPSRFGVMAAQFKAFFDATNDLWERQALAGKPAGIFWSTGFHGGGQELTALTAITQLAHHGMIFVPLGYTFGSGMFEMNEVKGGSSYGAGTY

SEQ ID NO: 75808 - protein, 47 aa, Gossypium hirsutum
  Clone ID: uC-gsflmaxxa051e08b1.pep
HTCFITQKPSLSVSHVTLKPDNFVLSFLQHTHAFKGESFSFGQILWS

SEQ ID NO: 75809 - protein, 225 aa, Gossypium hirsutum
  Clone ID: GOSHI-09MAY01-C70824_1.pep
FDRVKKGDTFVAICRHCKKKLSGSSTSGTSHLRNHLIRCQRRSNHGVAQYFSAKDKKKEGSLALVTIDQEQKNVEVLSIVNLRYEQEQIKSEHVAIGSNSLDQRRSQFDLARMIILHNYPLAMVEHVGFKIFVRNLQPLFELATRNKVEADCMEIYAKEKPKVYEIFDKLPGIISVSADVWTASEDDAAYRSLAAHYIDENWQLKRGFVFGLSSALRDCFEVYDG

SEQ ID NO: 75810 - protein, 185 aa, Gossypium hirsutum
  Clone ID: GOSHI-09MAY01-C70594_1.pep
TYGPDISYLRDSDHKPQVLNAWEKNGKFVVGAVVSVLCLILVILGILWWKGYFRSKPSREQVLRGLDLQTGFFTFIQMKAATNYFDAANKIGEGGFGAVYKGVLLDGTIIAIKKLSSKSRQGDREFLDELGMISGLQHPNVVRLYGCCVEGTQLLLVYEYMENNSLAHALFGKLNVLNLFYSPFL

SEQ ID NO: 75811 - protein, 268 aa, Gossypium hirsutum
  Clone ID: GOSHI-09MAY01-C70484_1.pep
MQLFVFISKTQSSSHLMNFILISSSVCVTYLVVSVLLLNGSKPLSLRAYSSYQDVNTPTTVEHIVFGIASNQKSWTKRKEYVKLWWKPRQMRGCLFLESMPSNATLMDVDDVTLPPICISEDTSRFRYTYRGGLRSAIRVARVGSETAALNHPNVRWYVFGDDDTVFFPENLAKTLSKYDHQLWYYIGAGSEIYEQNRIFGFGMAFGGAGFAISYPLAKVLAKVFDSCIERYPHLYGSDSRVYSCLTELGVGLTREPGFHQFDVRGNA

SEQ ID NO: 75812 - protein, 220 aa, Gossypium hirsutum
  Clone ID: GOSHI-09MAY01-C70784_1.pep
MSGYSFLNDQLSKRTSIFSLQLWVVLGICVGTAIVIVLFLISLCITCKRQNKATRSSNNVVKPILNSSIPIASKEIQEIRVEPSHHSNPVLLPESDPVLILHPEEGSGDVSRCNGIHIEIGKDHKVASPERGSGSGHGSGEARCSDQGMTVRAVPEVSHLGWGHWHTLRELEESTNDFAADNVIGEGGYGIVYRGVLEDNSKVAVKNLLNNRGQAEKEFK

SEQ ID NO: 75813 - protein, 124 aa, Gossypium hirsutum
  Clone ID: GOSHI-09MAY01-C70144_1.pep
MEPERPNYGAIMVHLKKPYWVFLILLFTFVAVLTFQISTKDILPFQFFGVTGSRKTSVTSGSEPVPDPGSCAGLLGEFPERKHVMSIKEFGGVGDGKTSNTAAFWKAIVHMQRLSNKGRGQLNV

SEQ ID NO: 75814 - protein, 212 aa, Gossypium hirsutum
  unsure (1)..(212): unsure at all Xaa locations
  Clone ID: GOSHI-09MAY01-C70134_1.pep
PTRPALGKKGGGSPLMFEWYGEKYWGAAHGLAGIIYVLMDTELKPDEAEDVKSTLRYMIRNRFPGGNYPASEQDRKSDVLVHWCHGAPGIALTLVKAAEVFGDDEFLEAAVDAAKVVWNRGLLKRVGICHGISGNAYVFLSLYRKTGNVKFLYRAKXAFACFLLDQAHKLISKGEMHGGDRPYSLFEGIGGMAYLFLDMIEPLGSRFPAYEL

SEQ ID NO: 75815 - protein, 138 aa, Gossypium hirsutum
  Clone ID: GOSHI-09MAY01-C70374_1.pep
MKGFHERNDSLNCSSKASIDSSPTPGTGSEPGPNDSKFSKTSLWSNFFASAFSVFDTYSESSSSSACEKKSSFSKTNGWTTAVKRVVSGGSMRRIHERVLGPSKIGISSSTSDIWLLGLCYKISQESSGDVDATSALA

SEQ ID NO: 75816 - protein, 149 aa, Gossypium hirsutum
  Clone ID: GOSHI-09MAY01-C71984_1.pep
CREAERLDSSNDQLSSCMSSVLDEVSLEASSFWQLQQVMEKLDIRTKLCIRDSLYRLARSAEQRHNCTNTKGGMKEEKDEAGSFVANETNKCTRFMDMETGTNSIDRSIAHLLFHRPSGPSLHHATGYGSWTTTKAGNHEFVNISVNSF

SEQ ID NO: 75817 - protein, 193 aa, Gossypium hirsutum
  Clone ID: GOSHI-09MAY01-C71804_1.pep
MEDFEKKVSIKDSMEIEQENSNCSKSNEILNSLRKFLEIQQRRAQAYSKLKTGFSEYMKSGGELAYQQLCSEITVEFNDCSKQVLEMESLFLNPDYCRVDLAELLRAIQTQEKQKLHLTATIQVLKKAGRPSERLVNHENCSFKKPMEHECVHLQEITEAAGTEEAELNAEYDNALKEAIKGVQDAVTAINEH

SEQ ID NO: 75818 - protein, 96 aa, Gossypium hirsutum
  Clone ID: LIB3582-053-P1-K1-G3.pep
KTQWRLNKKTAIAVKAVRFSIHLANSLKFNSVELKLTPSLKRKPSSFLFSPQKETPKFDLDLLNPFFCFTFFLIHNYFLGSLINTSVIAKNQGKYQ

SEQ ID NO: 75819 - protein, 163 aa, Gossypium hirsutum
  unsure (1)..(163): unsure at all Xaa locations
  Clone ID: AI054981.1.pep
GHRRLRRRDHFVQENGDPDLSCSIDELDPWTAWAYKPRTISFLFVGACFLIWASGALDPESNKSGDLVTSVKRGVWAMIAVFLTYCMLQAPSTVLIRPHPAVWRLVHGWLVVYLVALTFLLFQTRDDARQFMKFLHPAFGVELPERXYGADCRIYIPENPLAD

SEQ ID NO: 75820 - protein, 176 aa, Gossypium hirsutum
  unsure (1)..(176): unsure at all Xaa locations
  Clone ID: LIB3585-064-P1-K2-B5.pep
VVYLVALTFLLFQTRDDARQLRRFLHPDLGVDLPERSYGADCRIYIPENPSSRFKNVYETLFDEFVLAHILGWWGKAILIRNQPLLWVLSTGFEFMELTFRHMLPNXNECWWDSIILDIFTCNWFGIWAGMHTVRYFDGRTYEWVGISRQPNIIGKVKRTLGQFTPAQWDKNEWHP

SEQ ID NO: 75821 - protein, 331 aa, Gossypium hirsutum
  unsure (1)..(331): unsure at all Xaa locations
  Clone ID: GOSHI-09MAY01-C71304_1.pep
RVFLKGPSLYAFKGLAGRFAPIGVHLAMLLIMAGGTLSATGSFRGSVTVPQGLNFVMGDVLGPTGFLSTPTEAFNTEVHVNKFYMDYYDSGEVSQFHTDLSLFDMNGKEVMRKTLSVNDPLRYGGITIYQTDWSFSALQILKDGEGPFNLAMAPLTINGDKKLFGTFLPVGDTDSSNVKGISMLARDLQSIVLYDKQGKFAGVRRPNSKLPIKIDGTKIVIVDAIGSIGLDLKTDPGVPPIYAGFGALMLTTCITYLSHAQIWALPDGTTVILGRKNNRXAKAEFPHEMNRLLDQVPEIIESSLSQKPKYIGWLFSRLPKGEDTSFQAHHR

SEQ ID NO: 75822 - protein, 181 aa, Gossypium hirsutum
  unsure (1)..(181): unsure at all Xaa locations
  Clone ID: GOSHI-09MAY01-C71244_1.pep
MAEVLGKGNLFTTGTYSQTRSLEGGTCLVPKKISGFSLERNGFSSLKVKSQALRSGFNGQRMVFLEKKSMNRRRFCQVPIKAQMQSGLIGRVQKWWEKGLQPNMKEVASAQDLVDSLLNAGDKLVVVDFFSPGCGGCKALHPKICQFAEMNPDVQFLQVNYKEHKLMXFALNXHVLPFFAF

SEQ ID NO: 75823 - protein, 251 aa, Gossypium hirsutum
  unsure (1)..(251): unsure at all Xaa locations
  Clone ID: GOSHI-09MAY01-C72864_1.pep
SQKRWVFGLDLSLHNDIDVYQFKFFSELVKXKVGENDTVIVMTHEPQWLLDWYWNENSGQNVSHLICDYLKGRCKLRIAGDMHHYMRHSCVPSEGPVHVHHLLVNGCGGAFLHPTHVFSSFNKFYGKTYECKAAYPSFHDSNRIALGNILKFRKKNWQFDFFGGVIYFILVFSMFPQCKLDHILRGDSFSGHLGSFFGTVWDNFVYVLEHSFVSLTGVVLLLIMAIAFVPSKVSRKKRAIIGIIHVSAHLA

SEQ ID NO: 75824 - protein, 105 aa, Gossypium hirsutum
  Clone ID: GOSHI-09MAY01-C72464_2.pep
GEKIGCGGGGDLSAASIRKKAIEVGARVDALEAAAAHHHHHHHHHHHHHHHGHSYNGGDYGDELKPSNGGFLNRVDLNKMPDPEDSDGEWLRGFDSIMALQMVMD

SEQ ID NO: 75825 - protein, 164 aa, Gossypium hirsutum
  Clone ID: GOSHI-09MAY01-C72464_1.pep
MENGTGVVAGSRKSSTERPYKGIRMRKWGKWVAEIREPNKRSRIWLGSYSTPVAAARAYDTAVFYLRGPSARLNFPDLLTGEKIGCGGGGDLSAASIRKKAIEVGARVDALEAAAAHHHHHHHGHSYNGGDYGDELKPSNGGFLNRVDLNKMPDPEDSDGEWLR

SEQ ID NO: 75826 - protein, 128 aa, Gossypium hirsutum
  Clone ID: GOSHI-09MAY01-C72094_1.pep
RTRGKKNEVGFYSLPVLSMAGRGDTQIAVHRTSAISGGQRCARVGIEPRFKACSKAKTLPILESAKRTAREALRRSGHGTISGRCLVNRGKKGFFFHFRVNLQTSLGMRRLGMRYGRRGRGEHRCGTH

SEQ ID NO: 75827 - protein, 131 aa, Gossypium hirsutum
  Clone ID: GOSHI-09MAY01-C72074_1.pep
TFLLGKFPHSIINDMSFIKDIIDSLSSIISTDSMPYESTQKPSSSTCQNMEGIAGNQRTAYKLKGYFDLAKGEIDKAVRAEEWGLVDDALIHYKNAQRILIEASSTPTPSYISSCEQEKVKSYRQKISKWQ

SEQ ID NO: 75828 - protein, 190 aa, Gossypium hirsutum
  unsure (1)..(190): unsure at all Xaa locations
  Clone ID: GOSHI-09MAY01-C73954_1.pep
HSFATERIEATGRRLANYCERFNVPFEYKAIAAQNWENIRIEDIKINSNEVLAVNSLFRFENLLDETAEVDCPRNAVLKLIRRMNPDXFVHSIINGSYNSPFFVSRFREALFHLSXVFDMSDNTSPRDEPGRLMFESELYGQEAVNVVACEGPARVQRPETYKQWQIRMTRAGFKPLPLNQELMTKLRHK

SEQ ID NO: 75829 - protein, 208 aa, Gossypium hirsutum
  unsure (1)..(208): unsure at all Xaa locations
  Clone ID: GOSHI-09MAY01-C73424_1.pep
DSAALLSGALNVPMLFTGHSLGRDKLEQLLKQGRLSKDEINTTYKIMRRIEAEELSLDASEIVITRARQEIDDHGRLYDGFDPVLERNLRARIRRNVSCYGKXFMPRMVIIPPGMEFHHIVPQDGDMVGEVEGIEEYPSSPDPPIWSEIMRFFSNPRKPMILALARPDPKKNISTLVKALGECRPLRELANLTLIMGTRGGFVQPSGC

SEQ ID NO: 75830 - protein, 134 aa, Gossypium hirsutum
  Clone ID: GOSHI-09MAY01-C73144_1.pep
RRPGYGSCVKAVRAKRGKTLDEGQRLQSAIDFKTASNSDVDHFKDANGSTLQFDSTRDGTVQVGSQIEDKNCSTLKEVAETGGAASTANGLPSSGYSMPAEVEKEENHGAINEEENNTVGSGDENATRVGEASI

SEQ ID NO: 75831 - protein, 288 aa, Gossypium hirsutum
  unsure (1)..(288): unsure at all Xaa locations
  Clone ID: GOSHI-09MAY01-C73164_1.pep
MNLNNLKVPKMPGGGALPALLKIGVIGGLGLYGVANSLYNVDGGHRAIVFNRILGIKDKVYSEGTHLMIPWFERPIIYDVRARPHLVESTSGSRDLQMVKIGLRVLTRPKSTQLTEIYRTLGENYNERVLPSIIHETLKAVVAQYNASQLITQRENVSREIRKILTERAAYFNIQLDDVSITSLTFGKEFTAAIEAKQVAAQEAERAKFIVEKAEQDKKSAVIRAQGEAXSAQLIGQAIAKNPAFITLRKIEASREIAQTIANSANKVFLNXKDLLLNLXEMDLDPTQ

SEQ ID NO: 75832 - protein, 124 aa, Gossypium hirsutum
  Clone ID: LIB3825-006-Q1-N6-E9.pep
TERAAYFNIQLDDVSITILTFGKEFTAAIEAKQVAAQEAERAKFIVEKAEQDKKSAVIRAQGEAKSAQLIGQAIAKNPAFITLRKIEASREIAQTIANSANKVFLNSKDLLLNLQEMDLESHPK

SEQ ID NO: 75833 - protein, 103 aa, Gossypium hirsutum
  unsure (1)..(103): unsure at all Xaa locations
  Clone ID: LIB3493-047-P1-M1-E3.pep
MNLNNLKVPKXRRGXALAALLNIGVIGGLGLYGVANSLYNVDGGHRAMVFNRILGIKDKVYSEGTHLMIPMVEKAIIYDVRARPYLIEKTFCSPELQMGQNGL

SEQ ID NO: 75834 - protein, 94 aa, Gossypium hirsutum
  Clone ID: uC-gsronu33B086e06b1.pep
PRVRRNPSIPLFEGCHFVALSKMNLNNLKVPKMPGGGAPSALLMIVVIAGLCIIIYLIFYLFFIFFILIYFLSLIFFFTISLHFFFSSYFSFTF

SEQ ID NO: 75835 - protein, 81 aa, Gossypium hirsutum
  Clone ID: GOSHI-09MAY01-C73124_1.pep
ARGDLRRAFKVNSRFSLFYSCLRVKIKNKQKIKPKKKNAPEISVRKSPLRIGWFLLLLLFYAHFWGYVAFECVICMCIFHS

SEQ ID NO: 75836 - protein, 270 aa, Gossypium hirsutum
  unsure (1)..(270): unsure at all Xaa locations
  Clone ID: GOSHI-09MAY01-C73354_1.pep
VVVYYDKLLSGESGIGLIDRFDASKFPTRFAGQIRGFTSEGYIDGKNDRRLDDCLRYCIVAGKKALEDADLGGDKLSKIDKERTGVLVGTGMGGLTVFSDGVQNLIEKGHRKITPFFIPYAITNMGSALLAIELGFMGPNYSISTACATSNYCFYAAANHIRRGEADLMIAGGTEAAIIPIGLGGFVACRALSQRNEDPQTASRPWDKERDGFVMGEGAGVLVMESLEHAMKKKCTFIAEYLGGAVXCDAYHMTDPKAQRPGVSHSPKKP

SEQ ID NO: 75837 - protein, 187 aa, Gossypium hirsutum
  Clone ID: GOSHI-09MAY01-C73344_1.pep
AKDICRCTIHCKEASPVTMMNGMDDLSFIFGAASMSGEFEEVAGESEERRRARLGRHQRTQDRVARAVADMNQRDRQSQNEQEERYRIAEAWDFEIKRWAAGKEGNMHALLSSMERVLWPECGWEPVSLTDLITSGSVKKVYRKATLCVHPDKVQQKGATLEQKYIAEKVFDILKEAWNKFNKEELS

SEQ ID NO: 75838 - protein, 135 aa, Gossypium hirsutum
  unsure (1)..(135): unsure at all Xaa locations
  Clone ID: GOSHI-09MAY01-C68904_1.pep
MRKEAVPSTAPFTATTVGKKLFLCFETKPFVVTLLALTLVMLLWNFPPYYQNLSTTRPCSAAPLASVVAAASTSLFSTNASLPYTATPAGEKKYYSDPXVKPRDPNKRVFEAYGNAAALSVQMGAYRGGPTTFAV

SEQ ID NO: 75839 - protein, 156 aa, Gossypium hirsutum
  unsure (1)..(156): unsure at all Xaa locations
  Clone ID: GOSHI-09MAY01-C68864_1.pep
LISPDSPSSQPNLKRVKEDPETGGFMNLDENLLYEVLKHVDARTLAMASCVSKLWLKTARDERLWELICTRHWANIGCGTQQLRSVVLPLGGFRRLHSRYLWPLSKPQAASPLPWAPPKIINSKPPARWGKDEVHLCLSLXSIQYYEKMHFTSRRR

SEQ ID NO: 75840 - protein, 236 aa, Gossypium hirsutum
  unsure (1)..(236): unsure at all Xaa locations
  Clone ID: GOSHI-09MAY01-C68504_1.pep
MVNDLAVSNIVCDNKHMLLGLSDGSLYSISWKGEFYAAFGFDSSQHNDNEVTSLSHSLANSIASGEAERAFASNYRVSKKSAIAQLEFCVSMRLLLVLYSDGQLVACSVSKKGLKPVESIKAXEKVLGNGDAVCTSIAGDQLILAVGTRRGVVELFDLADSGSLIRTVSLYDWGYTMEDTGSVSCISWTPDNSAFAVGWKLRGLTVWSVSGCRLMSTIRQIGLSSGFFPVVKPNQD

SEQ ID NO: 75841 - protein, 164 aa, Gossypium hirsutum
  unsure (1)..(164): unsure at all Xaa locations
  Clone ID: GOSHI-09MAY01-C68414_1.pep
MISLHRSCFLNNTGISGSSSPFSYKLKKLPPASVKVTALGPNRDRNSSVLIENNNYXLKEIKEDGTSSVADVDPNPTVTGEDRDLYYDAAATDDQLVTPWSLSVASGYSLLRDPHHNKGLAFNEKERDSYYLRGLLPPTVISQELQVKNKMYSIRQYQVPLQKY

SEQ ID NO: 75842 - protein, 158 aa, Gossypium hirsutum
  unsure (1)..(158): unsure at all Xaa locations
  Clone ID: GOSHI-09MAY01-C68714_1.pep
LILIRSLYQAAXIGEGDEMIDGMKSAGFGDQLGKKEYYGFLKILCGIERVEHAMSVFKKMKADGCKPGIKTYDLLMGKWCAHYRLDRANALYNEALKNGVPVEPRPYRVDPRYMKKTKAVKKKKKRETFSEKMARKRRRLKQIRLSFVKKSKGRMRSA

SEQ ID NO: 75843 - protein, 141 aa, Gossypium hirsutum
  Clone ID: GOSHI-09MAY01-C69824_1.pep
MDHSVAVEESGSLRNSLEVTKSLSDKHLDLLRPSARYYSVFKGQAPDAVGKGKYTLIKDEEDFQTGIFDKPLPCFGCGIGWFSFLVGFMCPLMWYYATFLYFGNHYRKDPRERAGLAASAIAAMACSVVVLIVIIFVLFST

SEQ ID NO: 75844 - protein, 185 aa, Gossypium hirsutum
  Clone ID: GOSHI-09MAY01-C69574_1.pep
YADCFPLIVNKEVTEYQWNGYLENPEEWTEAEYYGDTVELESISPLDFVSIVDIRYKDKTICSKVLWGIPNANGSNSWFHNCPFRIDLLNYAARDDDSESEVTLSVSDGLPPITSMEKERKDGKLWKELRDGLRLSWIVVNRKVKQAANPCKLEPSWRTETLANGQRFRDKVRVCASCQGHPSMS

SEQ ID NO: 75845 - protein, 141 aa, Gossypium hirsutum
  unsure (1)..(141): unsure at all Xaa locations
  Clone ID: GOSHI-09MAY01-C69174_2.pep
CLLRKRRKKETPLNAILAGCIAGLSILALDDPNRRRTLSLYLLARVAQCAYNSAKSKNKFHLWGSHWRHGDSLLFSLAWAQVMYAFVMRPGCLPKSYKDFIQKTGPVAAPVYKAVRESCXSGPVDVESISAYLNSRGKSDT

SEQ ID NO: 75846 - protein, 171 aa, Gossypium hirsutum
  unsure (1)..(171): unsure at all Xaa locations
  Clone ID: AI054582.1.pep
FLYQVMYAFVMRPESLPKAYQDFIQKTXGPVAAPVYXAVRENCXGAPVNVASISAYLSSRGKAICXIXKEFPSIIPCSIIHPDXNSCLSHNAKAASATFRKNVPLYFSXTFVPFCCLHLKKFWIXFSYLLLAVKXLFDSXNFLXAFVEFFSVICMHRRCIKDHNLYMGCVI

SEQ ID NO: 75847 - protein, 294 aa, Gossypium hirsutum
  unsure (1)..(294): unsure at all Xaa locations
  Clone ID: GOSHI-09MAY01-C69234_1.pep
MASHAHLDDDDDFGGDFPGSHSARHSGNKRSFGDLEDDEDDIFGSKKAXTKVEETAPGVATGMILSLPGALPWGKDTLATCQTELEAAKSEIQKWHSAFQNEPFIPAGIAPEPKLVMNYLQTLKSSEETLKEQLEKAKKKEAAFIVTFAKREQDIAELKSAVRDLKVQLKPPSMQARRLLLDPAIHEEFTRLKNLVEEKDXFVKELQENIAAVSFTPQSKMGKMLMAKCRTLQEENEEIGTQAEEGKMHELAMKLALQKSQNAELRSQFEALYKQMEGLTNDAERSNEMVFILH

SEQ ID NO: 75848 - protein, 134 aa, Gossypium hirsutum
  unsure (1)..(134): unsure at all Xaa locations
  Clone ID: GOSHI-09MAY01-C69224_1.pep
DMNHSTLETEDTFASLLELAANNDVEGFKRSIQRDPSGVDEVGLWYGRPKGSKQMVYIERTPLMVAATYGSIDGIKLILSSSDADINRVCGHDKSTALHCAASGGASNAVDVVKLLLAXGADANIVDAYVHFSL

SEQ ID NO: 75849 - protein, 89 aa, Gossypium hirsutum
  Clone ID: GOSHI-09MAY01-C64904_1.pep
KKITIKTTKTSSSNYTKKTENQSLLFYIYDPHPYPHQRSQFYYFAFLFLLLFLTKEKKFFFFSSVKKSILFNFLGFLILTHFRFSIDLQ

SEQ ID NO: 75850 - protein, 242 aa, Gossypium hirsutum
  unsure (1)..(242): unsure at all Xaa locations
  Clone ID: GOSHI-09MAY01-C64804_1.pep
ETYHHLKAVITEKYGANGCNVGENGGFVPDISSVREGLDIVREAIGRTGYNDKIKIGIGVAATEFCIGTKYDLEFKSPNKSGQNFKSGEDMIQMYKDLCIDYPIASIEDPFDKEDWEHSKRFCGLGLCQVVGDDLLMSNPKRIERAIHESACNSLLLKINQIGTVTEAVDVVKMAKEAHWGVVVSQRFGETNDCFIADLXLALGAGQIKQGLLARKRVAKYNQLLRIEQELSDQAVYAGEDW

SEQ ID NO: 75851 - protein, 121 aa, Gossypium hirsutum
  unsure (1)..(121): unsure at all Xaa locations
  Clone ID: GOSHI-09MAY01-C64574_1.pep
MASTRKDMDRIKGPWSPXEDEALQRLVQTYGPTPXTLISKSIPGRSGKSCRLRWCNQLSPEVEHRPFTPEEDDTIIRAHARVGNKWATIARLLNGRTDNALXNHWNSTFKPKCLSMTEGFN

SEQ ID NO: 75852 - protein, 223 aa, Gossypium hirsutum
  Clone ID: GOSHI-09MAY01-C64494_1.pep
MSMSKSSKMLQFINYRMRVTIQDGRQLVGKFMAFDRHMNLVLGDCEEFRKLPPAKGKKNPSTNEEREDRRTLGLVLLRGEEVISMTVEGPPPPEESRSKSAAANAVPGPGIGRAAGRGIPTGPLVQAQPGLAGPVRGVGGPAPGMMQPHISRPPVPQLSAPPMTYPAASGAPPVIRAPGQMPPGGYPGQPQAPQMQRGPPSQVPPPAFGVRPPQQFPVPPPQY

SEQ ID NO: 75853 - protein, 97 aa, Gossypium hirsutum
  unsure (1)..(97): unsure at all Xaa locations
  Clone ID: LIB3493-043-P1-M1-E6.pep
PAGRLLNGDSSRRKEGPLNKSIEXTPLPPRRKNKDQSVSTILHXXPHWVLGVFSSPFSRRANLRELPPQSTEVREFIVTNRKAINLTHQLTARSWNK

SEQ ID NO: 75854 - protein, 242 aa, Gossypium hirsutum
  Clone ID: GOSHI-09MAY01-C64174_1.pep
MAIALPSTVWRAAKFQPQRPLLQRRRPLLVQSFRRSDFDTFTRRMASGEALKEAWRTANDGFEQFVFEAKKTAERLDRQYSVSRRLSSAAQSAADRAREIDREFEIGLRWRTFSMDFSRNWPRYRKQLNDFLDTPLGRSFATIFFLWFALSGWMFRCLIFATWILPFAGPLLIGTVANNLVIKGACPACKRQFVGYKNQIVRCVSCGNIVWQPEGDFFSRDSRGTNSRKSEPDIIDVEFEEK

SEQ ID NO: 75855 - protein, 133 aa, Gossypium hirsutum
  Clone ID: GOSHI-09MAY01-C64104_1.pep
MGFLDKLWDETLAGPMPETGLGKLRKYGSFSAASSSPATADTSQVMITRSITILKSNSGLKNLSMDPGSAPGSPSGSSNPGTPLSPGTPTGDFRRFTRRKSPAEALQSEEPRSPTVYDWFSLSLFLLLMKLQK

SEQ ID NO: 75856 - protein, 128 aa, Gossypium hirsutum
  unsure (1)..(128): unsure at all Xaa locations
  Clone ID: GOSHI-09MAY01-C64384_2.pep
MNLMILFLFSSLFIKAFSLKPEPAKNNAQITVMGLVYCDICSNNSFSRHSYFLPGAEVQIACNFRAFVPKTREQVSFSVNRTTDKHGVYRLEIPSVDGIACAEAAIASSCXQASLVGTSSTSCNILVT

SEQ ID NO: 75857 - protein, 143 aa, Gossypium hirsutum
  unsure (1)..(143): unsure at all Xaa locations
  Clone ID: GOSHI-09MAY01-C64384_1.pep
MWKFVSHLPKSAAMNLMILFLFSSLFIKAFSLKPEPAKNNAQITVMGLVYCDICSNNSFSRHSYFLPGAEVQIACNFRAFCSXTREQVSFSSHRTSIXLGVYRLEIPSGDGIRCADAAIASSCQXSLIGDLFTSCNISVTEDY

SEQ ID NO: 75858 - protein, 173 aa, Gossypium hirsutum
  unsure (1)..(173): unsure at all Xaa locations
  Clone ID: GOSHI-09MAY01-C64334_1.pep
MLVSTSGLLLPVCLLFLLIFGTVTATDHIVGANKGWNPGINYTLWANNQTFYVGDLISFRYQKTQYNVFEVNQTGYDSCTTEGAVGNWSSGKDFIPLNESKRYYFICGNGQCFXGMKVSVVVHPLPSPTASPAASHSSNSSNAAGLVILPRGITGFRTLVVALASIWFGSGWV

SEQ ID NO: 75859 - protein, 170 aa, Gossypium hirsutum
  Clone ID: GOSHI-09MAY01-C65894_1.pep
MAKAPRLKITVINLLCLVVLCGATESPQYEVVHAESDFEIRHYRDATWMSATVNELSFQKATLFGFHRLFQFIQGANLNYSRVAMTAPVVTSLVPGAGPLHSLAYVVRFYLPAKFQDSPPTPLPELNLKPYAWDSHYVAVRKFSGFATDDIVVKQAAKLATSLSLSPWAN

SEQ ID NO: 75860 - protein, 177 aa, Gossypium hirsutum
  unsure (1)..(177): unsure at all Xaa locations
  Clone ID: GOSHI-09MAY01-C65864_1.pep
MGSLFTPLLLPLFCLCLTLISPTHSTDCSSLKLSGGKKQYSNCTHLPTLNATLHFTYNATNSSLSIAFSAPPAKAGGWIAWAVNPTGTGMAGSQALLAFKNNGSMVVKTYNISSYSSIVEGKLSFDVWDLAAGAGSHGKMVLYGSLKVEESADXLNQVWQVGPGIAGGHPMKHEFDK

SEQ ID NO: 75861 - protein, 179 aa, Gossypium hirsutum
  unsure (1)..(179): unsure at all Xaa locations
  Clone ID: GOSHI-09MAY01-C65754_1.pep
EPTKLPDSDPPRNEDEWEEEYVEKGNGTPAAAQGAAEPATADVAEGFDDRVADLKRCLVDSVYGTELGFRAGQELRAEILELVNQLEAXNPTRAPIEATQLLDGNWILLYTAFSEXLLPLLAAGATPLLKVKSISQSIDTXEVSLIVNSTTLSGPFXADLSFSASATFEVRSPSRIQLN

SEQ ID NO: 75862 - protein, 111 aa, Gossypium hirsutum
  Clone ID: GOSHI-09MAY01-C65654_1.pep
KIGTYTVVLKEAYKRGLLIENNPLMNIRNRYLHLMHTVKEHGKDISMSTGTNQEKKAASNASKKEAGDDDSEEENNGLSVTFSGSETENGDSGRRGSREAVAVSRRTTPRS

SEQ ID NO: 75863 - protein, 89 aa, Gossypium hirsutum
  Clone ID: LIB3828-010-Q1-N6-A7.pep
MTQRPKYRLDRLRKLQPQNPRVLFLLCRSLHQWPPVPYTPPGAMPTPHTPAHTLVHTPRTCTCKEIDKTTTTTMANTKKERNCILLFLF

SEQ ID NO: 75864 - protein, 74 aa, Gossypium hirsutum
  unsure (1)..(74): unsure at all Xaa locations
  Clone ID: LIB3272-021-P1-K1-D7.pep
PKDXNTGSIGSENYNPRILGFFFSCAAAFTSSPQCRTLLLAHSHTPYASTHPRTHATHLYLRLMPSNPRLSHHD

SEQ ID NO: 75865 - protein, 193 aa, Gossypium hirsutum
  unsure (1)..(193): unsure at all Xaa locations
  Clone ID: GOSHI-09MAY01-C65084_1.pep
VLIFWVFFSEGXFGDNVMVSVATQQASNPVHTVANSLSLPGLQLITKKLELPVKIVFPRNLLGGASPGGNSADFMMLGLGDMAIPAMLLALVLCFDHRKTRETVNLLDLHSSKGHKYIWYALPGYAVGLVTALAAGILTHSPQPALXYLVPSTLGPVIFIXWLRKDLVELWERNNAKISMTWASHIGSLSHFF

SEQ ID NO: 75866 - protein, 240 aa, Gossypium hirsutum
  Clone ID: GOSHI-09MAY01-C65314_1.pep
MARTALFHLLRSQSKQLISRNIHSGYRFRFATLSGTQYAKPNLNYATSIFSVQKRWASQAKTSEDDDKISIGPRKSKEDDEDEKDAGVVYYGPISSTIKKVKMLSLSTCCLSVSLGPVITFMTSPDMNVIVKGAVASSVIFFSATTTAALHWFVSPYIHKIRWQPGSDSFEVEMMSWLATYIPRTIKFADIRPAETNRPFVTFKANGNFYFVDAEHCHNKALLARLTPQKATHESALKNL

SEQ ID NO: 75867 - protein, 148 aa, Gossypium hirsutum
  unsure (1)..(148): unsure at all Xaa locations
  Clone ID: uC-gsronu33B109d02b1.pep
KILGWKQLISRNIHSGYRFRFATLSGTQYAKPNLNYATSIFSVQKRWASQAKTSEDDDKISIGPRKSKEDDQDEKDAGVVXYYGPISSTIKKVKMLSLXSTCCLSVSLGPVITFMTFPDMNVIVKGAVASSVIFFSATTTAALYWFVS

SEQ ID NO: 75868 - protein, 254 aa, Gossypium hirsutum
  unsure (1)..(254): unsure at all Xaa locations
  Clone ID: GOSHI-09MAY01-C65244_1.pep
LFNIDDAAGGLXIKKIQMSPHTKEFRYLDRAALKDPPLNDQANKRNLATLTDAEEVKLELMMLPIWATTVIFRTVYAQMTTFSVSQATTMNRHIGKSQIPPASLTVFFVGSILLTVPIYDRLIAPIARKLLKNPQGLTPLQRIAVGLVLSIIAMVAAALTEIKRLRAATTNGLANNPTAQIPLSVFWLVPQFLLVGAGEAFTYIGQLDFFLRECPKGMKTMSTGLFLSTLSLGFFVCSLLVTIVHKVTGNKHPW

SEQ ID NO: 75869 - protein, 128 aa, Gossypium hirsutum
  Clone ID: GOSHI-09MAY01-C66504_1.pep
ELVIVFSLPPDSFWIMAISDVVVGNLLIIYVAVIAGIKAYGLVCGRNFGGWFVLMASTTVVGLILVGALTWDVSRKATQAISGEDQDAGSLQVHEMCKGGICWHGVAVRFPASQLRFSLPQQIPDGSL

SEQ ID NO: 75870 - protein, 309 aa, Gossypium hirsutum
  Clone ID: GOSHI-09MAY01-C66474_1.pep
MAPQRLLLLFIFLFYFSSFPSTARFITGPSSPTDLVSDGISTVKNPPFLSLKPLFSAEESCEQTYGFLPCTTTVLGNLFLIIVYGYLMFLAATYLSNGSELLLEILGPGIVGGLFLPILGALPDAMLILVSGLSGTAETAQDQVSVGMGLLAGSTVMLLTVIWGSCVVVGRCDIRDSVAVDGTITKGFHLTETGVSTDIWTCYAASIMAISIIPFVIVQLPQVLNSTSGRHLAVLIALIISVSMLVSYCVYQVFQPWIQRRRLAFAKHKHVISGILRHLKKQAFGKLLTEDGEPNTEIIRKVFETIDEN

SEQ ID NO: 75871 - protein, 125 aa, Gossypium hirsutum
  Clone ID: GOSHI-09MAY01-C66434_1.pep
MKSFSGLGIGLSLVFGCLVLALVAELYYLLWWKKRIANAEVEYDYTNYAKDLVQLLCWKKSASLHATTIPNSNQDSNGVEPDLELGSTKGLMLKGFGEEGVESELMRLHNLVGPPKFLFTIKEET

SEQ ID NO: 75872 - protein, 82 aa, Gossypium hirsutum
  Clone ID: LIB3272-032-P1-K1-C6.pep
HTSKLNKLLYKEIAHTPPPNHIYLYLLSLSFSTLLLCFQLFQSVFQLPQNKKFPFLFPLPISTLFSCLLRKFGMYKVNFPSL

SEQ ID NO: 75873 - protein, 136 aa, Gossypium hirsutum
  Clone ID: GOSHI-09MAY01-C66034_1.pep
MAKSYLPANFGFMASRMLLFGLFMVSLYTTSAQIGVCYGQLGNNLPSRPEVISIFNQRNIRRMRLYAPDQPSLQALRGTNIELMLGVPNSDLQRIAASQANANIWVQNNVRNFGNVKFRYIAVGNVVQPSDPAAQF

SEQ ID NO: 75874 - protein, 73 aa, Gossypium hirsutum
  Clone ID: GOSHI-09MAY01-C66384_1.pep
FVLQKGSVSSCLEKKNPQERGINQKEKRGVTVVTNAHVLSFLEAFIRSLLLPFESASTFRKFPEFSSSSPVTD

SEQ ID NO: 75875 - protein, 403 aa, Gossypium hirsutum
  unsure (1)..(403): unsure at all Xaa locations
  Clone ID: GOSHI-09MAY01-C67924_1.pep
MSGPLDRFARPCFEGFSGSDERRERKSDFENSEDERRTKIGSLKKKAINASTRFKHSLKKKSSRRKSDGRVSSVSIEDVRDVEELQAVDQFRQALIMEELLPEKHDDYHMMLRFLKARKFDIEKAKHMWADMLQWRKEFGADTITEDFEFNELNEVLRYYPHGHHGVDKEGRPVYIERLGKVDPNKLMQVTTMDRYVKYHVREFEKAFTVKFPACTIAAKRHIDSSTTILDVLGVGFKNFTKSARDLIMRLQKIGGDNYPETLHQMFIINAGPGFRLLWNTVKTFLDPKTTSKIHVIGNKYQNKLLEIIDASELPEFLGGSCTCADXGSCLRSDKGPWKNPEILKMVLNGEARCAKQVVKVLSSEGKVIAYAKPQFPMLRGSDTSTAESGSEAEDIASPKAMN

SEQ ID NO: 75876 - protein, 56 aa, Gossypium hirsutum
  Clone ID: LIB3272-051-P1-K1-D12.pep
MSGPLDRFARPCFEGFSGSDERRERKSDFENSEDERRTKIGSLKKKAINASTRFKH

SEQ ID NO: 75877 - protein, 93 aa, Gossypium hirsutum
  Clone ID: LIB3543-061-Q6-K6-G8.pep
MPSTIQKAIGAVKDQTSIGLAKVASNMAPDLEVAIVKATSHDDDPADEKYIREILNLTSYSRGYVHACVSAVSKRLGKTRNWIVALKALVLVH

SEQ ID NO: 75878 - protein, 35 aa, Gossypium hirsutum
  Clone ID: LIB3272-050-P1-K1-F11.pep
MPSTIQKAIGAVKDQTSIGLAKVASNMAPDLEVAI

SEQ ID NO: 75879 - protein, 145 aa, Gossypium hirsutum
  Clone ID: GOSHI-09MAY01-C67494_1.pep
NFRSALFQSLLFEACGRTVNPVNGAVGLLWTGNWHVCQAAVETVLREGTVRAVPELMAPSPASGEKSEATKIACMLKLQETETKFNSTCRFSTSRSKVSPKRIKGEEFSKFQPSDLDLCLTPSSTGNRLPDNRRPGTPSLNSEES

SEQ ID NO: 75880 - protein, 110 aa, Gossypium hirsutum
  Clone ID: LIB3272-045-P1-K1-H2.pep
MSCNGCRVLRKGCSESCILRPCLQWIDGPEAQGHATIFVAKFFGRAGLMSFISAVPESQRSALFQSLLLEACGRTVNPVNRAVGLLWTGNWHVCQAGVETVLRGGTVGRS

SEQ ID NO: 75881 - protein, 375 aa, Gossypium hirsutum
  Clone ID: GOSHI-09MAY01-C67434_1.pep
QRGRMASRTNGGGSNGPVDKGADFANYFCTYAFLYHQKEMLSDRVRMDAYYNAVFQNKHHFQGKAVLDVGTGSGILAIWSAQAGARKVYAVEATKMSEHARTLVQANNLQDIVEVIEGSMEEVVLPEKVDVIIFLWMGYFLLRESMFDSVISARDRWLKPSGVMYPSHARMWVGPIRSGLVDQKKNDYEAAMDDWYGFLEDTKDYYGVDMSVLTRPFSNEQEKYYLQTSLWNNLHPNQVIGTAAVIKEIDCLTASVNDILEVKSSFSSAISMAPTRLCGFAGWFDVHFRGKGEDPAQKKIELTTAPSSNNGTHWGQQIFMLHPPVHVDEEINLDVSFSMNRFKENHRLMEVEFDVKISKPSGKILPPINKKFYIE

SEQ ID NO: 75882 - protein, 112 aa, Gossypium hirsutum
  Clone ID: GOSHI-09MAY01-C67424_1.pep
MEINPPTKSVEIKEKDLFKAAEKGDSSIFKPLSQDHLTKSVKLRNEDARSLLHVAVSSAHPEVVKLLSAAADESVVNGIDEESWAPIHSAASIGNLENMEILLNKGANGNVK

SEQ ID NO: 75883 - protein, 128 aa, Gossypium hirsutum
  Clone ID: GOSHI-09MAY01-C67054_1.pep
MGLDGPTGNEGVRRRGCSCTKDDFLPEESFKSWGNYVQALQQTPRRVMDRVFTRSLDSTELHEIKARGQHEMKKTLSWWDLIWVGIGGVIGAGIFVLTGLQAREVSGPAVVISYVVSGISAMLSVFCY

SEQ ID NO: 75884 - protein, 115 aa, Gossypium hirsutum
  Clone ID: GOSHI-09MAY01-C67364_1.pep
FTMAAASPAIACSPQTLSFYLKKTHLSILPSHLHGPTARSNDLFLRSKVQNREYVPIPSSRTRASSNGFLNAAHTSREDEILPSFGEAPVNIIFWVVFWASLSLVWYAASGDAKA

SEQ ID NO: 75885 - protein, 198 aa, Gossypium hirsutum
  Clone ID: GOSHI-09MAY01-C67334_1.pep
MRFRSTPVHKSAATVISAVIFLFLIHGAHCFDLPGAATEIFQKIGEERKISLAPHCGSNPPILDPDRGGGHVEKLADFNSYVSGSPECKHAVLLASDVYGYEAPNLRKIADKVADAGFYAVVPDFFNGEPYDPNNPERPKDAWLKDHSPEKGFEDAKLMIDALKSKGFSSIGAAGFCWGAKAGVELTKAKLIQAAVIL

SEQ ID NO: 75886 - protein, 113 aa, Gossypium hirsutum
  Clone ID: LIB3825-030-Q6-N6-G1.pep
REKKGSRFWYKSIRERLISLAAFLLILISFPKLNSPFLHGLVLDPPCHPSISLYFLHIFSLFTLFGISFVTGNSHVLRKIAGLSAPLCYYFSLNSACLSQFLVVVVPLLRSCF

SEQ ID NO: 75887 - protein, 112 aa, Gossypium hirsutum
  Clone ID: LIB3196-020-P1-M1-E7.pep
MIIMINFDIILFILVDIDGWQGGSSTSPWRKGELSFGKLIKINKNAANDINLSLIDLYQNLLPFFSLQLLIKQPSFFIDNFLLFPFLFYFILFYYYSKVINFNYLKFKIELI

SEQ ID NO: 75888 - protein, 66 aa, Gossypium hirsutum
  Clone ID: GOSHI-09MAY01-C60824_1.pep
ITESLCSLLLPSSLQLGFRPQPWSVTSPPSDSVADHAKKERNERPEVWTILLGRALCKRKERKTKE

SEQ ID NO: 75889 - protein, 54 aa, Gossypium hirsutum
  Clone ID: GOSHI-09MAY01-C60404_1.pep
LSVNQELAHFLKNGPEGKYLCFMGHTVCHNYSMKAAVHNTEMNECGYVLIKLYL

SEQ ID NO: 75890 - protein, 155 aa, Gossypium hirsutum
  Clone ID: GOSHI-09MAY01-C60774_1.pep
MGKLLCDPTAVAETFQTSSPTVTWREPNAATLEAVDLVDQTLTAAAGTTWDDVIGLEDQQRRHLSKLHAKGVLWKHPSEHGSSVVFRLSHGGDVSTDGNCLFTASKKAMAREVDPRDLRKRTVKRFLEDLGSAKEEERQMINEVIKNMYSPDLRN

SEQ ID NO: 75891 - protein, 301 aa, Gossypium hirsutum
  unsure (1)..(301): unsure at all Xaa locations
  Clone ID: GOSHI-09MAY01-C60104_1.pep
VSSGNHQLILGAVIRHLDHKNVSHDPQLKSNIVQVAAALARQTRSRGVLAETGFVSDLCRHLRKSFQATLESVGQQESNLNILLQNSIEDCLLEIAKGIDNALPLFNMMAISLEKLPSSGIVARATIGSLMVLAHMISLALISSRSQQVFPEDLLVQLMKAMLHPNVEVRMGAHHIFSALLIPSSSHPRHEVASLRSGFVYEPRRWRSTNASAFASISALLEKLRREKDGIKLEKNGXQYGGGLETRPCREESPNIYTITSIIDRTAASNMVEAEPYIMKLTEDQIMQLLSGFWIQTNLLI

SEQ ID NO: 75892 - protein, 70 aa, Gossypium hirsutum
  Clone ID: LIB3196-010-P1-M1-G12.pep
RKGQFGGGSKQGLFVKSFPNIYTITSIIDRTAASNMVEAEPYIIKLTEDQIMQLLSGFWIQTTHSYNLPS

SEQ ID NO: 75893 - protein, 203 aa, Gossypium hirsutum
  unsure (1)..(203): unsure at all Xaa locations
  Clone ID: GOSHI-09MAY01-C60124_1.pep
GCDCLGYIKYFDAHFTNFTGGVETIENCVCLHEEDHGILWKHQDWRTGLAEVRRSRRLTVSFICTVANYEYGFYWHFYQDGKIEAEVKLTGILSLRALQXPGESRKYGTXIAPGLYAPVHQHFFGARMDMAIDCKPGEAFNQVGEVNAKVEEPGENNIHNNAFYAEETLLKTELQAMRDCNPLTARHWIGRNTRTVNRSGQLT

SEQ ID NO: 75894 - protein, 52 aa, Gossypium hirsutum
  Clone ID: GOSHI-09MAY01-C60384_1.pep
NRWFTEFIRTNPMTSQTPFRIVLPLITLHPHNTESVKQPSIDKIKKCGAKEL

SEQ ID NO: 75895 - protein, 303 aa, Gossypium hirsutum
  unsure (1)..(303): unsure at all Xaa locations
  Clone ID: GOSHI-09MAY01-C61404_1.pep
MESGNPTEQLIRNLYPPIXSYSTGFLKVSDVHTIYWEQSGNPDGHPVVFLHGGPGGGTSPSNRRFFDPEFYRIILFDQRGAGKSTPHACLENNTTWDLIDDIEKLREHLKIPEWQVFGGSWGSTLALAYSESHPDKVTGLVLRGIFLLRKKEIDWFYEGGAAVIYPDAWEPFRDLIPEKERESFVTAYHRRLNSEDLEIQYAAARAWTKWEMMTAHLLPNDENIKRGDDEYFSLAFARIENHYFVNKGFFPSDSFLLDNVDKIRHINTTIVQGRYDVCCPMMSAWDLHKXFPEADFKVVQMRG

SEQ ID NO: 75896 - protein, 73 aa, Gossypium hirsutum
  Clone ID: GOSHI-09MAY01-C61184_1.pep
EELELSGCERLENLPELSALQKLKILNLNGCSNLKSLPDLTSLLKLEKLDLHGTVLWSEDVVKSLSHIKDLQI

SEQ ID NO: 75897 - protein, 138 aa, Gossypium hirsutum
  Clone ID: GOSHI-09MAY01-C61134_1.pep
KPTIFDCKLFFEGGIQAHFYTLNTKKREKKGIYTYNSNRIQRLNILQRWFLFIFFLRLHFSISASKSIKNAKRKRKRSLPCEASRRFPFTSSKSKSEWGLKGQNHSFRARTRRSLFVWHISAEGSILGLIGQQKGEVD

SEQ ID NO: 75898 - protein, 117 aa, Gossypium hirsutum
  Clone ID: GOSHI-09MAY01-C61004_1.pep
MAALGLQSINWQTVFNRQAHHTHKFSSRELILRRGQNFQVLMLMNKGLGSNERLEFIVSTGPYPSESAMTKAVFPLSNGSSGGWSAVLQAINGNTLTISISSPASAPIGQYTMALQI

SEQ ID NO: 75899 - protein, 100 aa, Gossypium hirsutum
  Clone ID: LIB3196-030-P1-M1-B10.pep
RWSACRHRPDFPDATHTFAALGLEGINWQTAFNRQAHHTHKVYSRELILRRGQNFHVLMLMNKGLGSNERLLFIGCTRPYLFVAVMTKAAVTLSNCNTGG

SEQ ID NO: 75900 - protein, 101 aa, Gossypium hirsutum
  unsure (1)..(101): unsure at all Xaa locations
  Clone ID: GOSHI-09MAY01-C62494_1.pep
VLSNPEFLAXGTALNDLKYPHRVLIGGDETPEGQTAVHALCAVYEHXLPRVKILTTNTWSLELYKLAANASLAQRISSINSISALCEATGADVXEVATAIG

SEQ ID NO: 75901 - protein, 158 aa, Gossypium hirsutum
  Clone ID: GOSHI-09MAY01-C62464_1.pep
PGVGSQFLFVCRWHRHLTMQIFVKTLTGKTITLEVEPSDTIENVKAKIQDKEGIPPDQQRLIFAGKQLEDGRTLSDYNIQKESTLHLVLRLRGGMQIFVKTLTGKTITLEVEPSDTIENVKAKIQDKEGIPPDQQRLIFAGKQLEDGRTLSDYNIQKE

SEQ ID NO: 75902 - protein, 189 aa, Gossypium hirsutum
  Clone ID: GOSHI-09MAY01-C62754_1.pep
ILKITCHSLHCKEYFQYLFRSRGVRNPELVLEGVARCINDETNEKLTVEYSADEIKAALKSMGPTKAPGEDGFPVIFFQKCWHIVGTEITSLGRATFEPDDADKILRTPLASEAHPDMIFWRGEHSGEFAVRSTYKMLQNQRPTTYPIDSHNTAHSFYKQLWELQLPNKIKILAWKVSWNFIPTMVNLH

SEQ ID NO: 75903 - protein, 130 aa, Gossypium hirsutum
  unsure (1)..(130): unsure at all Xaa locations
  Clone ID: GOSHI-09MAY01-C62064_1.pep
SAGGGRYEAAAAAAAEAGGDDARCVRLSAERAQALLADVDTLLFDCDGVLWRGETAVPGAPEALRALRARGKRLGFITNNSSKTRAAYAEKLRRLGFGGPAGPGAGLEVLGTXYWTGLYLRQRLGGATAP

SEQ ID NO: 75904 - protein, 92 aa, Gossypium hirsutum
  Clone ID: GOSHI-09MAY01-C62344_1.pep
MAISGVPVLGFFIIAVLMSAQESWAIKEEHVIIQAEFYLNPDQSGEFMFDFDGDEIFHVDMAKKETVWRLVDFGRFASFEAQGALANIAVDK

SEQ ID NO: 75905 - protein, 164 aa, Gossypium hirsutum
  Clone ID: GOSHI-09MAY01-C63824_1.pep
MGEQREEREMSEKQLADEVCDDREDGDDDDDKEDGAGALAGFVPGPLLSLKEQIEKDKDDDSLRRWKEKLLGCVEEDLNGQMEPEVKFHSIGIISNDLEEVSYPLPLDLNREGLVLFTLKEGSRYQLKLTFSVLHNIVSGLTYSNTVWKAGLKVDQNKGMLGTF

SEQ ID NO: 75906 - protein, 314 aa, Gossypium hirsutum
  Clone ID: GOSHI-09MAY01-C63764_1.pep
MANSNHQRTPMYGSGAANMQRNIDEEEDDDVPGGAGGGGEESVDNPQIGFQENGAVVAVMNNGMDEASHAHVYGQGSDSTSAPGNGGADQLTLSFQGEVYVFDSVSPDKVQAVLLLLGGYEIPSGIPAMGTVSVTQTGLSDFPGRSIQPQRAASLNRFWEKRKERCFEKKGRYTVRKEVALRMQRKKGQFTSSKAISEEVASASSGWSGTPGSGQDENIQEVLCTHCGISSKKTPMMRRGPAGPRTLCNACGLKWANKGVLRDLSKVSTVAIPDPTVKTAEQSDAEANESEAVTVTPDVVSSSNGDNSTVTAER

SEQ ID NO: 75907 - protein, 75 aa, Gossypium hirsutum
  unsure (1)..(75): unsure at all Xaa locations
  Clone ID: LIB3825-029-Q6-K6-E7.pep
KGARPFLFFFWPXFFFFFFFFFFFFFFFFFFFFFFFFFFFFFFFFFFKRKKSFLIFLQTPCRLYFAILQLHNDRQ

SEQ ID NO: 75908 - protein, 156 aa, Gossypium hirsutum
  Clone ID: GOSHI-09MAY01-C63604_1.pep
LITITLIIVIISNISHAATRTIQQNQHENKKQYIGISDDTIKIENYRLNLTHPLPPTFPAIFFASFSPTGGAGAFPFSLAEALITAANAAWYCFLVKVRGSSISNDDALSRLGEGCLSILLLSHNGSPHQLALYFKLYEPKNKKTITTENLFRTRG

SEQ ID NO: 75909 - protein, 123 aa, Gossypium hirsutum
  Clone ID: GOSHI-09MAY01-C63074_1.pep
MVQGRFRAVAATVLLCCLLLHFEVAQSASFTVGGRGGWTFNAAAWPKGKPFKAGDTLVFNYNPSIHNVVAVNRAGYKSCKAPKGAKVFKSGKDQIKLKKGQNFFICNYIGHCQAGMKIAVTAA

SEQ ID NO: 75910 - protein, 132 aa, Gossypium hirsutum
  Clone ID: GOSHI-09MAY01-C63314_1.pep
MAWNTNLRWRLPLTCLLLQVAMVILFGVFVRYDFDADAHWWTERKHKNLSEVENEFYYRYPSFQDVHVMVFVGFGFLMTFLQRYGFSAVGFNFLLAAFGIQWALLMQGWFHFLEGRYIVVGVENLINADFCV

SEQ ID NO: 75911 - protein, 139 aa, Gossypium hirsutum
  Clone ID: GOSHI-09MAY01-C63324_1.pep
LLAKCFLDHKTLYYDTDPFLFYVMTEYDCKGFHIVGYFSKEKESTEDYNVACILTLPPYQRRGYRKLLIEVSYELSKVEGKTGTPEKPLSDLGLLSYRSYWSQTILEILMGLKSESGERPQITINEISEITSIKKEDVI

SEQ ID NO: 75912 - protein, 70 aa, Gossypium hirsutum
  Clone ID: GOSHI-09MAY01-C18914_1.pep
MGFLVTALIFSVIAVIASLCTRICCNRGPSANLLHLTLVITATVCCWMMWAIVYLAQMKPLIVPILSEGE

SEQ ID NO: 75913 - protein, 513 aa, Gossypium hirsutum
  unsure (1)..(513): unsure at all Xaa locations
  Clone ID: GOSHI-09MAY01-C18934_2.pep
PVSTHASAHASADAWGFSVMGKDNVXFHTVMFPXTLLGTSENWTLMKSISVTEYLNYEAGKFSKSKGIGVFGNDVKDTKIPVEVWRYYLLTNRPEVSDTLFTWDDLQAKLNNELLSNLGNFINRVLSFIAKPPGQGYGSAIPDSPTAESHPLTKALSEKVGKHVEQYIEAMEKVKLKQGFRTAMSLSCEGNAYLQESQFWKXYKEDQPSCSIVMRTAVGLVHILACLXEPFIPSFSVEVFKQLNLPPQAQISLCDEKGDIDRASRPWEIIPAGHKIRDPKPLFEELKTERVEELRQQYAGSQADRRARAEADAAKTAEQLKKTKISDSKKEKAKKSSANSKEKPTAEPEISITRLDIRVGKIIKAQKHPDADSLYVEEIDVGEAQPRTVVSGLVKYIPLEEMQDRMVCVLCNLKPATMRGIKSHAMVLAASNNDHTKVELVEPPKSAKVGERVPFPGFTGEPDDVLNPKKKVWETLQVDLPSDANLVACYKDIPLPPSAGICKVSPITNGSIR

SEQ ID NO: 75914 - protein, 231 aa, Gossypium hirsutum
  unsure (1)..(231): unsure at all Xaa locations
  Clone ID: GOSHI-09MAY01-C18934_1.pep
LNPTELKXPRCKACQNTPHIRDTRHLFLELPLLKDKLVEYINKMSVDGSWSQNAINTTQAWLTEGLKARCITRDLKWGVPVPHENFKDKVFYVWFDAPIGYVSITKCYTFDWEKWWKNPENVELFQFMGKDNIPFHTVMFPSTLLGTSENWTLMKSISVTHSFAHAAGKFSKSKGIGVFGNDVKDTKIPVEVWRYYLLTNRPEVSDTLFTWDDLHAKLNNRVLSNLCNFIN

SEQ ID NO: 75915 - protein, 132 aa, Gossypium hirsutum
  Clone ID: LIB3825-026-Q6-K6-C3.pep
MRSIFFLLHLKVFKQLNLPPQAQISLCDEKGDIDRASRPWEIIPAGHKIGDPKPLFEELKTERVEELRQQYAGSQADRRARAEADAAKTAEQLKKTKISDSKKEKAKKSSANSKEKPTAEPEISITRLDIRV

SEQ ID NO: 75916 - protein, 246 aa, Gossypium hirsutum
  unsure (1)..(246): unsure at all Xaa locations
  Clone ID: GOSHI-09MAY01-C18894_2.pep
PLITGIPSVFLDRLGQVLRLVKPPLVWIVVEEKVASFETAEILRRTGVVYRHVVCTRSPSEPKDRGVHQRNAALGHIERHKVDGIVFFADDDNVYTVELFESLRTIXRFGTWPVAMLAPSKNKAILEGPVCNGSQVIGWHTNEKSKRLRRPPRPPSRPAFNSSIWWDPKRWARPFSNPIRQLDTVKEGFQETTFIEQVAEDESQMEGIPPGCSRIMNWHLHLDTDNLFYPKGWLLEKNLEVILPIK

SEQ ID NO: 75917 - protein, 231 aa, Gossypium hirsutum
  Clone ID: GOSHI-09MAY01-C18894_1.pep
RNVGTEGSTDIIEPLKQLIVVTPTYNRGFQAYFLNRLGQVLRLVKPPLVWIVVEEKAASHETAEILRKTGVMYRHVLCAFNSSSVKDPRVHQRNAALEHIERHKLDGIVFFADDDNVYTLELFESLRTISRFGTWPVAMLAQSKNKAILEGPVCNASKVIGWHTNDKSKRIRRFYVDMSGFAFNSSILWDPKRWARPSSNPIRQLDTVKEGFQESTFIEHVVEDESQMEEF

SEQ ID NO: 75918 - protein, 99 aa, Gossypium hirsutum
  unsure (1)..(99): unsure at all Xaa locations
  Clone ID: GOSHI-09MAY01-C18874_1.pep
DLRPEHLGSLIQTLSNRVGPINHLPVLIPEGNKWAXTLMEWAKKHQRGVEDRGEEVKKSVSVKAEVXFRGLEDIYSEPGGVMDYEEDRSRPKRRRHPRS

SEQ ID NO: 75919 - protein, 202 aa, Gossypium hirsutum
  unsure (1)..(202): unsure at all Xaa locations
  Clone ID: GOSHI-09MAY01-C18804_1.pep
MASSASRFIKCVTVGDGAVGKTCMLICYTSNKFPTDYIPTVFDNFSANVVVEGTTVNLGLWDTAGQEDYNRLRPLSYRGADVFVLAFSLVSRASHENVLKKWIPELQHYAPGVPVVLVGTKLDLREDKHYLADHPGLLPVSTAQGEELRKQIGAAYXIECSSKTQQIVKAIFDAAIKVVIKHPQKRKRKRLTQFKMSIKCLL

SEQ ID NO: 75920 - protein, 205 aa, Gossypium hirsutum
  unsure (1)..(205): unsure at all Xaa locations
  Clone ID: GOSHI-09MAY01-C18564_1.pep
MSGRKKSSSATTENDAVDQLLQAAQDEMLLKLSVDSHMSRVAPDYLNPDLRRRFQALRSRPSSSHSQQKKQSSAPPPSPPKHNRSXMTMRIRIEIEELNPRVRDDLSARFAALKASLSSSSSNPTAATSISTNEVRIGLEKSDGEDDEEDEVERVVQWAKDAARLDPSPASDEDDDDLIGSDSDDKDTDYDDDPKHKKKESKLRK

SEQ ID NO: 75921 - protein, 157 aa, Gossypium hirsutum
  Clone ID: GOSHI-09MAY01-C18784_1.pep
MGSDSEVEKTQQKEKERKKMLAIAPIAKPLAGKKLSKKTLKLVRKASEHKCLKRGVKEVVKSIRRGHKGLCVIAGNISPIDVITHVPILCEEAEIPYVYVSSKEDLATAGATKRPTCCVLVLTKPTKGELAIEEQEKMKADYSQIVSDVSELTSSLF

SEQ ID NO: 75922 - protein, 70 aa, Gossypium hirsutum
  Clone ID: LIB3582-031-P1-K1-D11.pep
MGSDSEAEKSQQRKEKEKKKMLAVAPIAKPLAGKRLCKKTFKLVRKAAEHKCLKRGVKEVVKSIRRGHKG

SEQ ID NO: 75923 - protein, 158 aa, Gossypium hirsutum
  Clone ID: LIB3582-038-P1-K1-B6.pep
MGSDSEAEKSQQRKEKEKKKMLAVAPIAKPLAGKRLCKKTFKLVRKAAEHKCLKRGVKEVVKSIRRGHKGLCVIAGNISPIDVITHVPILCEEADIPYVYVPSKEDLATAGATKRPTCCVLVLTKPTKGELDPSEQEKIKADYSQVVADISELTSSLF

SEQ ID NO: 75924 - protein, 95 aa, Gossypium hirsutum
  Clone ID: LIB3148-036-Q1-K1-B6.pep
IRRGHKGLCVIAGNISPIDVITHVPILCEEADIPYVYVPSKEDLATAGSTKRPTCCVLVLTKPTKGELSPEEQQKLKADYSHIVEDVSELTSSMF

SEQ ID NO: 75925 - protein, 75 aa, Gossypium hirsutum
  Clone ID: GOSHI-09MAY01-C18754_1.pep
WNPESYLGPAALLHANRWISDSRDEYAKERLDAINDELKLYRCHTILNCARACPKGLNPGKQITNIKHLQLTGGA

SEQ ID NO: 75926 - protein, 190 aa, Gossypium hirsutum
  unsure (1)..(190): unsure at all Xaa locations
  Clone ID: GOSHI-09MAY01-C18744_1.pep
MEIEHYSFIKVWILAIISLCYCYYISSKLPKGIFKLXSLTPIFIFFLYLPLTVSTFHLVGISAFFLSWLANFKLLLFCFDQPPLSPPPSNLFHFISLASLPIKPKQKTPSQNKSKPPQRSILFAIKVLLLALLYHCYSYKQNLHXNVVLAMYWVHTYIELELTLALAAIPARAMFGLEIEPQFNETYLTT

SEQ ID NO: 75927 - protein, 227 aa, Gossypium hirsutum
  Clone ID: GOSHI-09MAY01-C18684_1.pep
MLLSLVQSSFLSPSTPLCKFHSNLNPLKPSFLLPKSLSHKKSLCLSPKYATAIRASMIEAPVLWAGRLCIYYALLKSGLAGSQANPLVSGLEENGDSVGESGDLGFSKWLDNIRGKPDKEAADKRKLVSKWHPTTKGTLKRNYRVPSKSEGRRLLKAVASLLSDDDHFTDATSHKGCQIRRESAHGESVCCNNVRALFDELPTPHLTVEITPFPAGPLTEIDYIKAE

SEQ ID NO: 75928 - protein, 110 aa, Gossypium hirsutum
  unsure (1)..(110): unsure at all Xaa locations
  Clone ID: LIB3145-058-Q1-K1-C11.pep
ASMIEAPVLWAGRLCIYYALLKSGLAGSQANPLVSGLEENGDSVGESGDLGFSKWLDNIXGNQLHSTLDFKQRTFSERMNLIVDKEAADKRKLVSKWHPTTKGTLKKNYR

SEQ ID NO: 75929 - protein, 161 aa, Gossypium hirsutum
  Clone ID: GOSHI-09MAY01-C18184_2.pep
MPRYYCDYCDTYLTHDSPSVRKQHNAGYKHKANVRTYYQQFEEQQTQSLIDQRIKEHLGQAAAFHQVGAAFNQHLMAQRPRLPVLPTPVMPIPRVAPLRINQPMVPGIRPPVLPRPVPGAPPYAPVPGMPPTVAPPGAPSFPGQINGLPQPPTLVPPSTVT

SEQ ID NO: 75930 - protein, 172 aa, Gossypium hirsutum
  Clone ID: GOSHI-09MAY01-C18184_1.pep
MPRYYCDYCDTYLTHDSPSVRKQHNAGYKHKANVRTYYQQFEEQQTQSLIDQRIKEHLGQAAAFQQVGAAFNQHLMAQRPRLPVMPIPGAPLPVNQPMVPGMRPPVLPRPIPGAPGYIPVPGMPPMMAPPGAPWPGQVNGLPRPPTLAPPTTVSGTATTPSSSNGAPTSSAP

SEQ ID NO: 75931 - protein, 193 aa, Gossypium hirsutum
  unsure (1)..(193): unsure at all Xaa locations
  Clone ID: GOSHI-09MAY01-C18154_1.pep
MSKGPGLFVDIGKKAKDLLTKDYTSDQKFTVSTYTGAGVALTSTALKKGGLSTGDVAALYKYKNTQFDVKVETDSNISTTLTFTEILPSTKTIASFKVPDYKSGKLEVQYFHDHATVTTTVGLNQTPGVDVSATIGTPTIAVGAHAGYDTTSGNFTKGTAGISMTKPDSCASIILGDKGDSIKAXYVHYMDQL

SEQ ID NO: 75932 - protein, 130 aa, Gossypium hirsutum
  unsure (1)..(130): unsure at all Xaa locations
  Clone ID: GOSHI-09MAY01-C18144_1.pep
KEPANPYFANCKLHLXHVPAGATPKDGPSAGCPMITSMLSLAMKKPVRKDLAMSGEVTLTRKILPIGGVKEKTIAAKRSEVRPIIFPAANRRDYDELAPNVTEGLDVPFVDDYSQIFSLAFEYDDTTMVN

SEQ ID NO: 75933 - protein, 101 aa, Gossypium hirsutum
  Clone ID: GOSHI-09MAY01-C18054_1.pep
GYHINMHKYLRTIQSNLHKTKCHVYIYSPYNPPEPLQNQYHAYTFFVQSGRTSTKYLKASTDYTCLAFPYHLSLFFSVSGFGVNLFIVHFSGPRVIRSFRI

SEQ ID NO: 75934 - protein, 372 aa, Gossypium hirsutum
  Clone ID: GOSHI-09MAY01-C18034_1.pep
MKRGFPESLSSSLGPPQSRFKHNPEGDAQFPEDESTKIFARKVADHYSARTNQTLEEREASPIIHLKKLNNWIKSVLIQLYARKGDAVLDLACGKGGDLIKWDKAKVEYYVGVDIAEGSIEDCRTRYNGDADHHQRRKKFTFPARLLCGDCFEVRLDKVLANDAPFDICSCQFAMHYSWSTEARARRALANVSALLRPGGTFIGTMPDANVIVKKLREAEGLAFGNSVYWIRFDEEFSDKKFKSSSPFGIKYKFHLKDAVDCPEWIVPFHVFKSLAEEYDLELVFVKNSHEFVHEYMKKPEYIELMRRLGALGDGNQAQSPFSPDEWEAAFLSLAFVLKKRGQPDRTQANSRKDKGQMQIAKEAILYINSDD

SEQ ID NO: 75935 - protein, 92 aa, Gossypium hirsutum
  Clone ID: GOSHI-09MAY01-C18284_1.pep
MWSFASNTIASIGLKSSKEANQACSECSDDELCSNGSRDEGLECPICWEPFNIVENVPYVLWCGHTLCQNCFLGLQPAVLKLPTQQSRSPCS

SEQ ID NO: 75936 - protein, 161 aa, Gossypium hirsutum
  Clone ID: GOSHI-09MAY01-C18274_1.pep
MEASSVTENSSTGNDHEQEPVLNHGGTESNPETNREEEELDGEQVRRVLQVSAATGKFWHNWDKLKSMLSFQLKLVLSEYPEAKMTVEQQNASLGETYLELVTRLNEELHSFIEGPPFTLQRLCEILLDARSIYPKLSKLALALEKNLLVTSTLTVCTEPY

SEQ ID NO: 75937 - protein, 73 aa, Gossypium hirsutum
  Clone ID: GOSHI-09MAY01-C19954_1.pep
RLKLKLALLFPLPPNSITNERRRRELLVPRKIRNFCSSLKTSLTGLAKEGTSPTRSRRSQTSSRAGTKSRQKR

SEQ ID NO: 75938 - protein, 47 aa, Gossypium hirsutum
  Clone ID: AI055651.1.pep
MAPPDSMIKPRDACIVGVARTPMGGFLGSLSYYSASHLGSFNHLICP

SEQ ID NO: 75939 - protein, 92 aa, Gossypium hirsutum
  Clone ID: LIB3083-027-Q1-L1-B1.pep
MAPPDSMIKPRDACIVGVARTPMGGFLGSLSSSSATHLGSLAIKAALQRANLDPSLVQEVFFGNVLSANLGQAPARQAALGAGIPNSVICTT

SEQ ID NO: 75940 - protein, 282 aa, Gossypium hirsutum
  Clone ID: GOSHI-09MAY01-C19804_2.pep
MIEPHEPSPTTKDDAPQPKLDDDDDHHHQQSSANEPRSSSSSEEDTKQWGTHVMGPPAIPIVHPDNQKAALWVAGDHQQIHELPYLVYTPAEKPTQNSFELVINVFNTWSRKAEIVARSVWHNLRSGSSVSDAAWGKVNLTAKAITKGGFDSLFKKIFATDPNEKLKNAFACYLSTTTGPVAGTLYLSTARVAFCSDRPLSFVAPSGQETWTYYKVMIPLFDIGTVYPVVMKENLASESYIEVVTVDGHDFWFMGFVKFEKASFALLNNVLDFKATTEPVAA

SEQ ID NO: 75941 - protein, 104 aa, Gossypium hirsutum
  Clone ID: uC-gsronu33B031b03b1.pep
MMKTTVRSGSSVSDAAWGKVNLTAKAITKGGFDSLFKKIFATDPNEKLKNAFACYLSTTTGPVAGTLYLSTARVAFCSDRPLSFVAPSGQETWTYYKVIHTSNR

SEQ ID NO: 75942 - protein, 78 aa, Gossypium hirsutum
  Clone ID: GOSHI-09MAY01-C19834_1.pep
FKFISSILYGTERMANKTDGYVEFEHHTFHKSNSGMQQFHSIIATDTQIIPIKTANNIITHFPPLFEPTTVNETSNIT

SEQ ID NO: 75943 - protein, 84 aa, Gossypium hirsutum
  Clone ID: GOSHI-09MAY01-C19594_1.pep
PIEAFPTTNHRAERHLKTKLKIPLCLPFFLLPSVSKETTSLQFQRPFFIIIKFVFILCTFIAQLQSPFLSSRFIWDAKGNASGQ

SEQ ID NO: 75944 - protein, 150 aa, Gossypium hirsutum
  unsure (1)..(150): unsure at all Xaa locations
  Clone ID: GOSHI-09MAY01-C19574_1.pep
KIYRNSTSCPRNSAKMLPRDFNYPTLTALVPAGKPFTVNFHRTVTNVGIARSTYNATISTLSEPEIQVGPQVLSXKSLTEQKSYHVIVSGKALGETSMVSATLIWSDGTHNVRSSIVIHTYKVSVGLFESKISPHFVFICSVNFLQSINK

SEQ ID NO: 75945 - protein, 119 aa, Gossypium hirsutum
  Clone ID: GOSHI-09MAY01-C19564_1.pep
GFVKGLALGIVVLEAIIFLLALMVRAANVPADYDSDDEFIAPRQQIRQPLINRPPVPATGVPVTGSLDQRPSRNDAWSARMREKYGLDTSEFTYNPSESNRYQQAAPQPAEESSRCTIM

SEQ ID NO: 75946 - protein, 240 aa, Gossypium hirsutum
  unsure (1)..(240): unsure at all Xaa locations
  Clone ID: GOSHI-09MAY01-C19734_2.pep
EYESQERLKRQMTIEKISLPPNISYGLVRSYLLHYGYEDTLNSFDLASKSTIPPVYIAQENGFDEQDIGYALNQRKILRQLIRNGEIDAAISKLRDWYPQIVQDDKSATCFLLHCQKFIELVRVGALEEAVKYXGRIELANFFRLAGFDDLVQDCAALLAYEHPQESCVGYLLEESQRDLVADTVNAMILSTNPNTQDMEGCLQSYLERLLRQLTACCLERRSANGEQGEAFLLRRVLNS

SEQ ID NO: 75947 - protein, 158 aa, Gossypium hirsutum
  unsure (1)..(158): unsure at all Xaa locations
  Clone ID: GOSHI-09MAY01-C19734_1.pep
ESEKEMKGRLFPTXATHKQDEEVHVNFGQNKFAFDLKEYEAQERLKRQMTIEKISLPPNIRYGLVRSYLLHYGYEDTLNXFDFARXSTIPPVYIAQENGSDEQDIGYALNQRKILRQLIRNGEIDAAISKLRDWYPQIVQVCTLFDFVYCCENIYQLS

SEQ ID NO: 75948 - protein, 103 aa, Gossypium hirsutum
  unsure (1)..(103): unsure at all Xaa locations
  Clone ID: LIB3493-033-P1-M1-E12.pep
FIEFVXVXALXEAVKYGXIELAKFFRLAGFDDLVQDCVALLAYEHSQESCVGYLLEESQRDLVADTVNAMILSTNSNTQDMEGCLSFLSWGGGEENYNLFFFK

SEQ ID NO: 75949 - protein, 339 aa, Gossypium hirsutum
  Clone ID: GOSHI-09MAY01-C19684_1.pep
MASQAFYLLVSIIVLLSAIVVSGSGSVGINYGRVANNLPSPEKVVELLKSQGINKVKLYDTDATVLTALADSGITVVVALPNELLSSTAADQSFADNWVEANITKFYPKTKIEAIAVGNEVFVDPANTTKYLVPAMKNIHASLVKSKLDSAIKISSPIAFSALKTSYPSSAGSFKPELIEPVIKPMLDFLKQTGSYLMVNAYPFFAYSANSDQISLDYALFKDNPGVVDSGNGLKYSSLLEAQIDAVFAAMSAIKYDDVKMVVTETGWPSMGDEDEIGASESNAASYNGNLVRKVLTGNGTPLRPQDPLNVYLFALFNENKKPGPTSERNYGLFYPNEQ

SEQ ID NO: 75950 - protein, 163 aa, Gossypium hirsutum
  Clone ID: GOSHI-09MAY01-C19624_2.pep
MMSGGYTSIDNQKVSGSVPAVSDSGRVPVQFADSGLQTFPPSGVQGKISGGTLPPSDADDSFSRPAGGSSSGSDEPQASGWLHKFTVAAYKPYFDVDTTDVLDRLKESLYPFRGTFTEKTATNPDLYGPFWICTTLIFVAASIGTFVTYVAHKLRDKEWNYDI

SEQ ID NO: 75951 - protein, 228 aa, Gossypium hirsutum
  unsure (1)..(228): unsure at all Xaa locations
  Clone ID: GOSHI-09MAY01-C19624_1.pep
MMSGGYTSIDNQKVSGSVPAVSDPSHVAVKFTDSNLQTFPPSGAQGKISGGTQPPHDADDTFSKPAGGSQPGSGEPQGSGWFRTFTIAAYKPYFDVDTSDIIDRLKESLFPFRGTFTEKTATNPDLYGPFWICTTLIFVAASIGTFVTYIAHKLKKKEWDYDINLVTWSAGVFYGYVTVVPLILYVIXSYFPPPPGLFNLFXCYEYPXLFFIPQFCLSVVPLGIFQMG

SEQ ID NO: 75952 - protein, 134 aa, Gossypium hirsutum
  Clone ID: LIB3584-035-P1-K1-G3.pep
MMSGGYTSFVNQKVSGSVPAVSDSGRVAVQFADSGLQTFPPSGVQGKISGGTLPPSDADDSFSRPAGGSSSGSDEPQASGWLHKFTVAAYKPYFDVDTTDVLDRLKESLYPFRGTFTEKTATNPDLYGPFWICT

SEQ ID NO: 75953 - protein, 268 aa, Gossypium hirsutum
  unsure (1)..(268): unsure at all Xaa locations
  Clone ID: GOSHI-09MAY01-C19314_3.pep
RSDSRSPTVARSKAAWQRXANRCFVQEDAKRAPKLACCQSSSSTKQADSNPSGVADKHNHPAIGFMPLNRTPSYSNLPPDTRWWLQLQPNYGPQMSLTNEQLNALEDEVESLKAEINSSKVSSDLQQDAHDISITDRKKNNGGSLDSTETVRSFELLEMESVECRASMKTNDCCSDPESPWAGGGKAEPWWRTTDKDELASLVAQKSLDFIENCDLPPPQKMHVRRYLCASSGSYGGNRKSEAGPMLGPILNAQGSPDSVITLGRKMQ

SEQ ID NO: 75954 - protein, 242 aa, Gossypium hirsutum
  Clone ID: GOSHI-09MAY01-C19314_1.pep
MAAAEARAVWQRTANRCFVQEDAKRAPKLACCQSSSHCKQADSSPTGVADARDHPAVDLNALNRNPSYSNLPLDMRWWLQLQPSYGPQKGLTNEQLYALEDEVESLKAEIKSPSNVSRVHPHDAQDASGVDRKKNNGGSLDSTETVRNYELLEMESVECHVSKKINDCCYDPESPWAGDGKAEPWWRTTDKDELASLVAQKSLDFIENCDLPPPQKMHVRRYSCASSGSYGGNESVFFGSEV

SEQ ID NO: 75955 - protein, 120 aa, Gossypium hirsutum
  Clone ID: LIB3825-010-Q1-K6-E7.pep
MAAAEARAAWQRTANRCFVQEDAKRAPKLACCQSSSSTKQADSNPSGVADKHNHPAIGFMPLNRNPSYSNLPPDTRWWLQLQPNYGPQMGLTNEQLNALEDEVESLKAEINSSKETMESF

SEQ ID NO: 75956 - protein, 179 aa, Gossypium hirsutum
  Clone ID: GOSHI-09MAY01-C19334_1.pep
KGMEQIGEQRVLEAQLRMRQQELQDEEERMQKRRESSTSTGVAPGEVQNSSVAARSSGAEEVVSFQDSQPALMIKQPSNPRSNRDEFDIDLEGIMVTEAIWQSIQENCGHRNSSCRDAASLVQHVSGYRYISPAMTTVAGSSSSAFAGHVCAVAGLTEWQQMTGESSPNYNVNLPAFHM

SEQ ID NO: 75957 - protein, 50 aa, Gossypium hirsutum
  Clone ID: GOSHI-09MAY01-C19234_1.pep
GNETNTPGPGAHSTLTAIATSRMKIGRIEDGPPISTDSTRKKGGRRGRRL

SEQ ID NO: 75958 - protein, 110 aa, Gossypium hirsutum
  Clone ID: GOSHI-09MAY01-C14954_1.pep
MRVNWKSWSLNKDHLVKLAIGILLVGFAFKLLVFRSKGFGVDLEFPEVEKEYVQKPDLKSPLPVQIPENDDQMPLDVVIEKCDLFTGDWVPNPSGPTYTNGSCPLIEVIR

SEQ ID NO: 75959 - protein, 95 aa, Gossypium hirsutum
  Clone ID: GOSHI-09MAY01-C14924_1.pep
MTMSNNIGQFGDTTLTKVFVGGLAWETPREAMREHFEKYGEILEAVIISDKVTGRSKGYGFVTFKEAEAAKKACEDANPIINGRRANCNLASLGA

SEQ ID NO: 75960 - protein, 105 aa, Gossypium hirsutum
  Clone ID: LIB3189-048-P1-K1-B9.pep
MTMSNNIGQFGDTTLTKVFVGGLAWETPREAMREHFEKYGEILEAVIIFDKGNGRYKGYGFSTFNEARAGKQGWELSLSIINGRRGYLNLDSLEAYNPMSTLTVY

SEQ ID NO: 75961 - protein, 649 aa, Gossypium hirsutum
  unsure (1)..(649): unsure at all Xaa locations
  Clone ID: GOSHI-09MAY01-C14854_1.pep
MPKMEASSSTSHDPALFHAPLLHHPRRRSSRPLKGFAVIFGSVVFLLSLVTLIVNQSPEPLASNPSSVTEAGSYSMAAQPRGIAEGVSAKSNPSLFDKVGFNWTNAMFYWQRTAYHFQPQKNWMNDPDGPLYHKGWYHLFYQYNPDSAIWGNITWGHAVSKDLIHXGSISHSPWFLINGTIXNGCWTGSATLLPDGRIVMLYTGSTNESVQVQNLAYPANLSDPLLLQWLKYPGNPVVVPPTGIEDNEFRDPTTAWLGPDGSWRITVGTRFNTTIGTALVFQTTNFSDYQLLDGVLHAVPGTGMWECVNFYPVAINGSVGLDTTALGPGIKHVLKASLDDTKVDHYAIGTYDMITDKWTPDNPEEDVGIGLKVDYGRYYASKTFFDQSKQRRILYGWVNETDTEADDLEKGWASIQTIPRSVLYDNKTGTHLLQWPVEEVESLRLNATVFKDVVVEAGSVVPLDIGTATQLDILAEFEIETLVSNSTEDEVSDCGDGAVDRNTYGPFGVLVIADDSLSELTPIYFRPLNISDGSLETYFCADETRSSKAPNVTKRVYGGKVPVLDDENYNMRVLVDHSVVESFGEGGRTVITSRLFPTEAIYGAARLFLFNNASGVNVKATLPIWEMNSAFIRPFPFEETLFQEMVAST

SEQ ID NO: 75962 - protein, 276 aa, Gossypium hirsutum
  unsure (1)..(276): unsure at all Xaa locations
  Clone ID: GOSHI-09MAY01-C14844_1.pep
MSFDEEESFEHTLLVVREVTVYKIPPRSTSGGYKCGEWLQSDKIWSGRLRVVSCKDRCEIRLEDPNSAELFAACFIYPGQRESSVEPALDSSRYFVLKIEDGNGKHAFIGLGFNERNEAFDFNVALSDHDKYVSRENEKEASEKNATDSLIDIHPAVNHRLKEGETIRINIQPKPSSGTGMLSAAALSGAILKPNTLCLAPPPAGSGKIRSPXLPPPPNDPAAARMTSTSQGVGQRAPTENTRQTDPLTNFSQLERNLPASGSGSRKTTASGWAAF

SEQ ID NO: 75963 - protein, 267 aa, Gossypium hirsutum
  Clone ID: GOSHI-09MAY01-C14814_1.pep
LSSNGEIPHRVNKGHSRLLSMSPNARKERIASLENMLSMSSNALTAMASQLSEAEERERGSVGRGRWNQVRSINDAKNLLQYLFNTTAESRCHLREKDLEIKDLKQQLKDLTALLWQSEAQKKELVKEQMMREQAVAIALATSASGNSRSSSKHFADDLSGPLSPVSLPAPKQLKFTPGFVNVSVRDSAAFLDQTRKMVPVGHLSMMKLTTKGQTGKLWRWKRSHHQWLLQFRWKWQKPWKLSEWIKHSDETIMRSKPRALALTDRI

SEQ ID NO: 75964 - protein, 175 aa, Gossypium hirsutum
  Clone ID: GOSHI-09MAY01-C14804_1.pep
YFTNTFIAGFSEDCIVCTGTTDSIAAFLAARATKPGKAVSSLGSSLALKLLSTTRIEDARYGVYSHRLDNKWLVGGASNTGGAVLKENFSDEQLEKLSEHINPMEASPLDYYPLKSVGERFPVANLKMEPSELLHPRPESDVEYLHGILESIARIEAKAYMLFKDLSATQLDEVF

SEQ ID NO: 75965 - protein, 72 aa, Gossypium hirsutum
  Clone ID: LIB3148-027-Q1-K1-A5.pep
LLQTLRLDQNAIEFSILFRLHPRPESDVEYLHGILESIARIEAKAYMLLKDLGATQVDEVFTAGGGAKNDKW

SEQ ID NO: 75966 - protein, 358 aa, Gossypium hirsutum
  Clone ID: GOSHI-09MAY01-C14834_1.pep
MELTLLFPLFFFFTLSSATYISTLTLNQNHPSSSSSWRSDDEVMGLYKSWVIQHGKAYNGIGEEEKRFEIFKDNLRFIDEHNSNNNTTYKLGLNKFADLTNQEYRAKFLGTRTDPRRRLMKSKIPSSRYAHRAGDNLPDSVDWRDHGAVSPVKDQGSCGSCWAFSTIATVEGINKIVSGELVSLSEQELVDCDRSYDAGCNGGLMDYAFQFIIDNGGIDTEKDYPYLGFNNQCDPTKKNAKVVSIDGYEDVPNNENALKKAVAHQPVSIAIEAGGRAFQLYESGVFNGECGLALDHGVVAVGYGSDDNGQDYWIVRNSWGSNWGENGYIRMERNINANTGKCGIAMEASYPGKNGANI

SEQ ID NO: 75967 - protein, 84 aa, Gossypium hirsutum
  Clone ID: LIB3149-021-Q1-K1-A4.pep
FIDEHNSNNNTTYKLGLNKFADLTNQEYRAKFLGTRTDPRRRLMKSKIPSSRYAHRAGDNLPDSVDWRDHGAVSPVKDQGSCGE

SEQ ID NO: 75968 - protein, 122 aa, Gossypium hirsutum
  Clone ID: LIB3189-041-P1-K1-B1.pep
NRQPSASPQKVIAEGGLELAGKVVQIHGVLMDTPRHHNLHILNKIITTRRNILVMHHRHHIIIYRERLGVYIGLWRGNTQGFMITTRHGTRPILMGQQCHSKWISTGKFSRVLDKLAAEPNA

SEQ ID NO: 75969 - protein, 67 aa, Gossypium hirsutum
  Clone ID: uC-gsronu33B139b03b1.pep
SPNPIPFIFPPISLNRQPSASPQRVVAEGGLELAGQVVQIHGDLMDDNYQTLDQAVCVLFYFCSKIY

SEQ ID NO: 75970 - protein, 372 aa, Gossypium hirsutum
  unsure (1)..(372): unsure at all Xaa locations
  Clone ID: GOSHI-09MAY01-C14544_1.pep
MKLLWVWVVLPFAFAQLVTAFFDFNETELSLIESLEYGVSKINYNPLMVGLTLIHTAGAKGAVCLDGTLPGYHWHRGYGSGANSWLVQLEGGGWCNNIRTCVYRKKTRRGSSTYMEKQIPFTGILSEKAEENPDFFNWNRVKLRYCDGASFTGDSENKGAQLQFRGQRIWLAGMEDLMSKGMRYANQALLSGCSAGGLAAILHCDEFRGLFPRTTRVKCLSDAGLFLDAVDVSGGHTIRSLYSGVVGLQGVQHNLPRICTNHLDPTSCFFPQNVINHIRTPLFILNAAYDSWQIQSSIAPPSADPHGYWHDCRLNHAKCSASQLRYLQGFRTQMLNAIKGFSMSRQNGLFINSCFAHCQSERQDTWXADNSP

SEQ ID NO: 75971 - protein, 142 aa, Gossypium hirsutum
  Clone ID: GOSHI-09MAY01-C14564_1.pep
MGKTRGMGAGRKLRTHRRRQRWADKAYKKSNLGNEWKKPFAGSSHAKGIVLEKIGIEAKQPNSAIRKCARVQLIKNGKKIAAFVPNDGCLNYIEENDEVLIAGFGRKGHAVGDIPGVRFKVVKVSGVSLLALFKEKKGKPRS

SEQ ID NO: 75972 - protein, 374 aa, Gossypium hirsutum
  Clone ID: GOSHI-09MAY01-C14494_1.pep
MSENEIAEKQIVCEDKTVGNPAQASVAKIETATVVQEESSLELPKSDPEGTKGSDNQISRELEPIENTEITSSPVKEYVPIDLQDKVAESSEKAEVEDVKEVYLKEAEVGHGGDKITDESSEEITKKSTSVEDSTEIKELKDEHAGDKTNETSETPILENQNEKLTVEALKDDGSNNNFKKEIVEEDRTVKDHEQAPVAVKEAITVPGEAIEKPEARDLQPEKAEVDNGEEKTDNSGVEIKLEPASTGSGNLSFSDLLQQSTEKKVEMAERVIEERELTVSKEAAPVEAAGTIQAKDLKTDEVPEGEEQNKTDSGSDAPVMVEAPREAETKPPKKSQNILSGVGSKVKNSISKVKKAITGKSSHPKEPKAISPK

SEQ ID NO: 75973 - protein, 117 aa, Gossypium hirsutum
  Clone ID: GOSHI-09MAY01-C14474_1.pep
MAGIAILLDLYQKKPSFCSPQSFHSSGLFSASAAAASAAATVAAGTPFASRFLFGYPKVSHCDAGAVLPEHYISNTQRSSEHFFKNDALKFSVKEFKIELEPLVSAFELRAICLTTL

SEQ ID NO: 75974 - protein, 381 aa, Gossypium hirsutum
  unsure (1)..(381): unsure at all Xaa locations
  Clone ID: GOSHI-09MAY01-C14424_1.pep
MEFWGVLISGVLVSWWVLSVNGANLPPCQFPAIYNFGDSNSDTGGISAAFEPIRAPYGVPYFHKPSGRDSDGRLIIDFIAERLKLPYLHAYLNSLGANFRHGANFATGGSTIRRPNETIYEYGISPFGLDMQIIQFEQFKARATEMYNQAKDPSEKDKLPRPEDFSKALYTFDIGQNDLSVGFRKLSFDQLRAAIPDIINQLASAVHHLYEQRGRSFWIHNTXGPIGCLPVNYFYILNPEPGYVDQYGCVKKQNEMAMDFNRQLKDRVIKFRTELPEASVTLVDVYTAKIAMIGNAKNLGMADPLKPCCGYHVNYDHVWCGNKAIINKTEVFGVSCKNPSMFVSWDGVHYTQAANQYVADRTLNGSLSDPAIPVTLACHKQ

SEQ ID NO: 75975 - protein, 77 aa, Gossypium hirsutum
  Clone ID: GOSHI-09MAY01-C14754_1.pep
RCAAPVGHRCLTPPPWPTVHGAKSGTCAGIPLTWHGGAAHDAGRVKVVRQLRATARRNSRIPERVLILGRLGLVYPI

SEQ ID NO: 75976 - protein, 437 aa, Gossypium hirsutum
  Clone ID: GOSHI-09MAY01-C14734_1.pep
WWPTVRPAFVDNYTFRTDLFEIKKVSDIEPSLKRQLLISTVLMTAGIAVVSFFALPSEFTLFNFGTEKEVKNWHLFFCVAIGLWAGLIIGYTTEYYTSNAYSPVQDVADACRTGAATNVIFGLALGYKSVIIPIFAIAIAIYVSFSLAAMYGIAVAALGMLSTIATGLAIDAYGPISDNAGGIAEMAGMSHKIRERTDALDAAGNTTAAIGKGFAIGSAALVSLALFGAYVSRAGIKTVDVLTPKAFIGLIVGAMLPYWFSAMTMKSVGSAALKMVEEVRRQFNTIPGLMEGRVKPDYANCVKISTDASLREMIPPGALVMLTPLIVGTLFGVETLAGVLAGALVSGVQVAISASNTGGAWDNAKKYIEAGVSEHAKSLGPKGSECHKAAVIGDTIWDPLKDTSGPSLNILIKLMAVESLVFAPFFAAHGGFLFQFI

SEQ ID NO: 75977 - protein, 215 aa, Gossypium hirsutum
  unsure (1)..(215): unsure at all Xaa locations
  Clone ID: LIB3543-037-Q1-K1-H3.pep
TXVRXXHGXPTXXRPXXKPLWXXQYXXYGXLMXLXXAXXIGXPXIKQKVKXEGXAXXPIXRXXPXPNSXAXXVFXLQXVLKXIGFFXXEXLVXXHXXXPFXCXXTXXXXLXXLXWXXHMXXRXXKXXVXLXXAXXIPPKXGXXAXXPYPLXXPSXXSXHVNXSDXXMXXIMAAYMHRFXYXPXXPXXQXXXPXCXXXLPVPCKGHXAXXPCTXXL

SEQ ID NO: 75978 - protein, 63 aa, Gossypium hirsutum
  unsure (1)..(63): unsure at all Xaa locations
  Clone ID: LIB3135-056-Q1-K1-C9.pep
PRVRLGPKGSECHKAAVIGDTIGDPLKDTSGPSLNILIKLMAVESLVFAPFFAAHGGXLFKFI

SEQ ID NO: 75979 - protein, 392 aa, Gossypium hirsutum
  unsure (1)..(392): unsure at all Xaa locations
  Clone ID: GOSHI-09MAY01-C14694_1.pep
MDVGYHSYETESTHTAGKVITCRAAVAWGPGQPLVIEDVQVAPPQKMEVRVKILFTSICHTDLSSWKGENEAQRAYPRILGHEAAGIVESVGEGVENMKIGDHVIPFFQGECGTCICCRSQKXTNLCQKFGVNPLKSVMVNDGKTRFSTMDGNPIFHFLNTSTFSQYTVLDSACVVKIDTKAPLEKMSLLSCGVSTGVGAAWNVANVQPGSSVAIFGLGAVGLAVAEGARVRGASKIIGVDINPSKFFKGKAVGITEFINPKDLDVPVHEKIGAITEGGVDYSFECVGNLEVLREAFLSTHTGWGLTVLLGIHPSPMLLPLHPMELFNGRQIVGSIFGGFKGKTQLPKLAEQCMCGTLNLDEFITHELPFHNIMKLFXLLIEGKSLRCLLHL

SEQ ID NO: 75980 - protein, 126 aa, Gossypium hirsutum
  Clone ID: GOSHI-09MAY01-C14194_1.pep
MGSSRFSVSFLAICAILAIHVAASASSPMLDFGGNHFLSIKSECSGSIAECLMLSGEYSSDFDAEFAMDSEINRRILAARRYISYGALRRNTVPCSRRGASYYNCRPGAQANPYSRGCSRITRCRR

SEQ ID NO: 75981 - protein, 157 aa, Gossypium hirsutum
  Clone ID: GOSHI-09MAY01-C14184_1.pep
MALVSFIGRVLFASVFILSAWQEFNEFGVDGGPAAKELRPKFNVFSKTVSSHTGLQVPEFDIKYVVAAAVAFKGVGSILFTFGSTVGAYLLVLHQLVLTPIVYDFYNYDTEKKEFGLLFTKFSQNLTLLGALLFFIGMKNSIPTRQLKKKAPKTKTV

SEQ ID NO: 75982 - protein, 79 aa, Gossypium hirsutum
  Clone ID: uC-gsronu33B160a09b1.pep
SSLMEGKGTKSGKTRAQKDAHNARCVQYRQKTNRRLEELEQVKTKYYEMLPIFKQMQTENQQMKMELKQNESIIQYMQN

SEQ ID NO: 75983 - protein, 118 aa, Gossypium hirsutum
  Clone ID: uC-gsronu33B160a03b1.pep
LGEFNEFGVDGGPLAKVLRPKFNVFSKTVSSHTGLQVPEFDIKYVVAAAVAFKGVGSILFTFGSTVGAYLLVLHQLVLTPIVYDFYNSDTVQNECGPELTRMLITPVAYSTGRKLKGG

SEQ ID NO: 75984 - protein, 94 aa, Gossypium hirsutum
  Clone ID: LIB3147-060-Q1-K1-F1.pep
PRVRPLVRPLFRPRVRPRVRVFNLSSTKGFHNFSLQSAVYLYGFCHSHGTFNHGIVVILDDILGNILMRLVWVHLLVKLFNLFMNWIGIWHSFL

SEQ ID NO: 75985 - protein, 121 aa, Gossypium hirsutum
  unsure (1)..(121): unsure at all Xaa locations
  Clone ID: GOSHI-09MAY01-C14054_1.pep
MMPSEQQSHDQHRDPLSCVIYELSALVLNLLRSPPTPVPTKISAVGFAWLMLGISVSLMLCGSVTFFLGFVLMPWVLGLLMFFDVAGXIVSTISMLGRSILCYARAPPSPTKGITEWNPLW

SEQ ID NO: 75986 - protein, 134 aa, Gossypium hirsutum
  Clone ID: GOSHI-09MAY01-C14034_1.pep
MPTLTKLYTMQEASQHNTKAARRIVIDGKVYDVTSYLDEHPGGDDVVLESTGKDATDDFEDAGHSKSAKELLQSFCIGELDTSSPIIPELEISSKREAVKYSEKLMDLTKQYWTIPVAIVGISVLVGFLYLHKK

SEQ ID NO: 75987 - protein, 72 aa, Gossypium hirsutum
  unsure (1)..(72): unsure at all Xaa locations
  Clone ID: LIB3149-055-Q1-K1-D5.pep
KTFVLFLSYQLIIKNWGTISIQQPIGENIILVYFLCRYKKPTNTEMPTIATGMVQYCFVQSMSFSEXXXASL

SEQ ID NO: 75988 - protein, 107 aa, Gossypium hirsutum
  Clone ID: GOSHI-09MAY01-C14024_1.pep
TTAWRFNRTFSKVQSKTSATLSPLIPGEPIFPHHRLNQIRYIVNPTPTDPSSPSLHCQDMRCFIYLTRHKDIERHLPQPAAESTSYARILKLSHKPVPLPQKNHLHF

SEQ ID NO: 75989 - protein, 126 aa, Gossypium hirsutum
  Clone ID: GOSHI-09MAY01-C14394_1.pep
MATTLAFSLSTPIRASTGSLQRPDPSRRKPVSSSSWGAPLFGLSSNPDYLNDGHIGVTSERNPEVSESDSDPGRSRSKSTLRCFTEEKAKQLRRKTMENASFHDMMYHSAIASRLASDTSGWPVCD

SEQ ID NO: 75990 - protein, 250 aa, Gossypium hirsutum
  Clone ID: GOSHI-09MAY01-C14344_1.pep
HFLLSLAMAADVSSLHRVLSGYKDDLMVGNESGGAKPTALITRDLLGGGGGGAGGASPFINMKTDQSEELNLDLQVPNGWEKRLDLKSGKVYLQRCNSSSSSQSSDGSKHQINQTVPKLQDLNFPASSSKPLLNLFDDTHLELELVSSPTPTYYQSGCTLDKVKFALERAEKEPIKKRSPSYSSSSSSIKDSQNSEGDQDKLFASPVAAGCPGCLSYVLIMKHNPKCPRCNTLVPMPVAKKPRIDLNISI

SEQ ID NO: 75991 - protein, 219 aa, Gossypium hirsutum
  unsure (1)..(219): unsure at all Xaa locations
  Clone ID: GOSHI-09MAY01-C14304_1.pep
MGQKINPLGFRLGTTQSHHSLWFAQPKKYSEGLQEDKKIRDCIKNYVQKNTRLSSGVEGIARIEIQKRLDLIQVIIYMGFPKLLIEDKPRKLEELQMNVQKXELNCMNRKLNIAITRIGNPYGHPNILAEFIAGQLKNRVSFRKAMKKAIELTEQADTKGIQIQIAGRIDGKEIARVEWIREGRVPLQTIGAKIEYCSYRVRTIYGVLGIKIWIFIDEE

SEQ ID NO: 75992 - protein, 127 aa, Gossypium hirsutum
  Clone ID: GOSHI-09MAY01-C14284_1.pep
MAQARGGAMAVAAVAAAVLCLLLSHFELAQAATYTVGGTGGWAFNVAGWTKDKRFKAGDTLVFKYNPSIHNVVAVNRAGYSSCTTPKGAKVYQSGKDQIKLVKGQNYFICNYSGHCQAGMKIAVTAA

SEQ ID NO: 75993 - protein, 154 aa, Gossypium hirsutum
  Clone ID: GOSHI-09MAY01-C14224_1.pep
ILKSFQAMSTTQQGTHSLAFRVMRLCKPSFHVEPPFRLDPADLFVGEDIFDDPLAAANLPPLLSSQLTKSMDSSDLTYGNRFLLHHPSDAMGFSGLLLLPQSFGAIYLGETFCSYISINNNSNFEVRDIIIKAEIQTERQRILLLDTSKSPVES

SEQ ID NO: 75994 - protein, 129 aa, Gossypium hirsutum
  unsure (1)..(129): unsure at all Xaa locations
  Clone ID: GOSHI-09MAY01-C15974_1.pep
MAISLSTNLLPNTFQCNGNHNHRSTRLFPNQPLSFGLKHRRDENKLFTPRNPPVLSAVSGSTGLESSAGSEDTGDLLDTVTVFDLNGNGIPISDLWKDRKAVVAFARHFGCVFCRKRADYLAXKKDVMD

SEQ ID NO: 75995 - protein, 133 aa, Gossypium hirsutum
  Clone ID: GOSHI-09MAY01-C15914_1.pep
KIPRRRCWKNMNNLVLSLAPKFTKLLTLVLRQENPQLEDTAVETIAKFCHDLQDLDLSKSFKLGDRSLYALAHGCPNLTKLNISGCTSFSDEGLEYLTKFCRKLKILNLCGCVKAATDCALQACALLCFTLQS

SEQ ID NO: 75996 - protein, 100 aa, Gossypium hirsutum
  unsure (1)..(100): unsure at all Xaa locations
  Clone ID: AI726808.1.pep
KIPRRRCWKNMNNLVLSFTPKFTKLLTLVLRQENPQLEDTAVETIAKFCHDLQDLDLSKSFKKYWYRXIGDLXVMSLAYGCPDLRCLDLCGCVRIIKRKA

SEQ ID NO: 75997 - protein, 99 aa, Gossypium hirsutum
  Clone ID: GOSHI-09MAY01-C15934_3.pep
ENKHFRTNLHHFQSKNEMTLDPLVPNQTVIQCRHPHRFRHSINSTPANLSSSAFHHQLVRRFIHQPRHSTNLLPQLVLESTSYSQRLKPSHKPLLLAQT

SEQ ID NO: 75998 - protein, 117 aa, Gossypium hirsutum
  Clone ID: AW187524.1.pep
VVLGFIWGYKQDICLNHMHFCPFPRFMVKEIWRPPDHGIIKLNFDASFLKEKGLVVTAVLARDFTSEIVGEETYLFKDVANAFVAEARACERALIFASMLCFQRLVVEGDSCCASIG

SEQ ID NO: 75999 - protein, 129 aa, Gossypium hirsutum
  Clone ID: LIB3543-052-Q1-K1-H12.pep
RPPNQGVIKLKFDASLLKEEKLAVTAVLARDFTGEIVGAEIYLFKDVAYAFVAEARACERVLIFASIMCFRRLVVEGDSLAVPRLINEAAHTLALEGRRRKIYGGWINGVLELVRLAALQDRLAWDQRS

SEQ ID NO: 76000 - protein, 180 aa, Gossypium hirsutum
  Clone ID: GOSHI-09MAY01-C15844_1.pep
MSQEDQEEEVGKLAVRLANAVVLPMVLKSALELNIIDTISAAGDGAFLSPSQIASALPSKNPDAPVLLDRMLRLLASHSILKCAVKAKEKGEIERLYGAGPLCKFLVKNQDGGSIAPLLLLHHDQVFMQSWYHLNDAILKGRVPFSKAYGMTAFEYPGTDQRFNRVFNQAMSNHTALIMR

SEQ ID NO: 76001 - protein, 80 aa, Gossypium hirsutum
  Clone ID: GOSHI-09MAY01-C15864_1.pep
CLGCFNGSLYIFPFTRSMGKKWALGVLLIGVEESNRINCFLDRFAKPFFILTILLVFISKFLDASGVMYSMNNTFSIKIK

SEQ ID NO: 76002 - protein, 154 aa, Gossypium hirsutum
  Clone ID: GOSHI-09MAY01-C15814_2.pep
KASGDPLLQVKGSCASLRLGGVRSYSVLSNDQLRINGVKDVIAVASGKGGVGKSTTAVNLAVALANKCGLKVGVLDADVYGPSVPTMMNIHQKPEVNNDMKMIPIENYGVKCMSMGFLVDKDAPIVWRGPMVMSALQKMSREVAWGVLDILVVD

SEQ ID NO: 76003 - protein, 154 aa, Gossypium hirsutum
  unsure (1)..(154): unsure at all Xaa locations
  Clone ID: AI725911.1.pep
MKGFWRPFARLGGARSYSVLSNDQLRINGVKDVIAVASGKGGVXKSTTAVNLAVALXNKCGLKVGVLDAHVYGPSVPTMMNIHQKPEVNNDMKMIPIENYGVKCMSMGFLLDKDAPIVWRGPMVMIALHKMSKEIAWGILDIPVVEMPPSRLLT

SEQ ID NO: 76004 - protein, 172 aa, Gossypium hirsutum
  unsure (1)..(172): unsure at all Xaa locations
  Clone ID: uC-gsronu33B117c03b1.pep
MKGFWRPFARLGGARSYSVLSNDQLRINGVKDVIAVASGKGGVGKSTTAVNLAVALANKCGLKVGVLDADVYGPSVPTMMNIHQKPEVNNDMKMIPIENYGVKCMSMGFLVDKDAPIVWRGPMVMSALQKMSREVAWGVLDILVVDMPPGTGAXIVSTPQDVALIDARRGVR

SEQ ID NO: 76005 - protein, 122 aa, Gossypium hirsutum
  Clone ID: GOSHI-09MAY01-C15804_1.pep
MQTAEDIRNLPIDITFSRLGEWLVDRKRIPSDWRKRLAAIRSKISKEFSALPKDIDPYFQTLDPEWIGYLEAKKIYDILLKLTPESRNIFGPLSGAAGSWEPIGRSFEKDHLYLASCSIYQK

SEQ ID NO: 76006 - protein, 139 aa, Gossypium hirsutum
  Clone ID: GOSHI-09MAY01-C15554_1.pep
PTRPIFRELSSLFAETSNKGRNVFLDWTCSKNKDKNLNEIMTWLEWILSHTLLRTAESNPQGLDNFWLKQGAALLLSLMQSSQVDVQERAATGLATFVVIDDENASIDRGRAEAVMRDGGIRLLLNLAKSWHEGLQSEA

SEQ ID NO: 76007 - protein, 110 aa, Gossypium hirsutum
  Clone ID: GOSHI-09MAY01-C15504_1.pep
MEVENAEKVNLEQKKKHKGKHDKPKPWDEDPNIDRWKIEKFDPSWNPDGLLEVSSFSTIFPRYREKYLQEAWPKVKSALKEYGIAAELNLVEGSMTVSTTRKTRDPYVII

SEQ ID NO: 76008 - protein, 258 aa, Gossypium hirsutum
  Clone ID: GOSHI-09MAY01-C15764_1.pep
LLSLLLLVNFIFIYQSHSSPDNSVTKAQSQIKPKKVHLSLYYESLCPYCRSFIVSQLVKVFNTDLLNIINLRLVPWGNAQYVKPKKTIICQHGEDECYLNTIHACAISIWPDPRKHFNFIYCIENQGLPIKDNQHSDGMEAVWKACSARSGMDQKLIKDCYDSGYGRKLLLQYATETDHLYPKHLYVPWVTVNNQPLYDKYEDFITYVCNAYKDKDLVRACLSNSLKVTEEKFSRSPVCYVEIRSQIQQRLHCCSGGT

SEQ ID NO: 76009 - protein, 152 aa, Gossypium hirsutum
  Clone ID: GOSHI-09MAY01-C15714_1.pep
MGDKEEEEEWTGTESGDLTSEDEGTEDYRRGGYHAVRIGDTFKNGRYVVQSKLGWGHFSTVWLAWDTHRSCYVALKVQKSAQHYTEAAMDEITILQQIADGDKEDKKCAVKLLDHFKHSGPNGQHVCIVFEYLGDNLLTLIKYSDYRGMPIH

SEQ ID NO: 76010 - protein, 149 aa, Gossypium hirsutum
  Clone ID: GOSHI-09MAY01-C15614_1.pep
MLSSTSLNPITNPKIPFFSSFSIQSPSLLSFHLPFSPSKTLLKPISATLIPSTPPPQQQQLYQPFRPPPSPLPPKFRSLDAQGRLDVLANRNGLWFEYAPLIPSLYQEGFSPPSIEEITGITGVEQNTLIVASQRYHPVKQIHGVLIGT

SEQ ID NO: 76011 - protein, 228 aa, Gossypium hirsutum
  Clone ID: GOSHI-09MAY01-C15604_1.pep
KGESTGEFSVRSAYKLLHELTLDPNELFLHTETINFYRKLWTLQIPSKIKMTIWRISWNYIPSFLNLKIKRVLVNTKCPRCESEEESSRHILQQCPAAIEVWYHLNLSWILNYNNEDLWRWLTGIFGQGNEEQLRLFCCGLWYIFHTSDCYQQVFKRGWATVHFDAAFDSQTFRSASGLIVWNGEGEILAYLAVLHSNIEDSFTAEAHAGLQAITLEKGVPETVSRVL

SEQ ID NO: 76012 - protein, 70 aa, Gossypium hirsutum
  Clone ID: LIB3145-035-Q1-K1-A9.pep
LKILRSTPLTKLEDLHVQTPTMLSSILSSLQLYLKIITDRNPITSTQSSAYTFFKHTFFLPNTTTRFFPL

SEQ ID NO: 76013 - protein, 90 aa, Gossypium hirsutum
  Clone ID: LIB3135-014-Q1-K1-C11.pep
IWFSKNQLIYGKKRMSGLEIARKIRNYLTELEAAKKDKPTFHTSDCYQQVFKRGWATVHFDAAFDSQTFRSASGLIVWNGEGEILAYLAV

SEQ ID NO: 76014 - protein, 39 aa, Gossypium hirsutum
  Clone ID: GOSHI-09MAY01-C15104_1.pep
APQSIPHIVNYTSERAFFLALTKNPQNLNSNYVSLKCRL

SEQ ID NO: 76015 - protein, 170 aa, Gossypium hirsutum
  Clone ID: GOSHI-09MAY01-C15064_1.pep
MGAERRFFVKFELMLMAILMVSMESSMAALHRVGGKLGWNPNVNYSEWSDHERFYVGDWLLFNFDKRYFNVLEVNETSYDNCNDQGFVKNITRGGRDVVELTQARPYYFLSSGGYCYHGMKVAVNVEMLPPAPEPAPVKNGSLTSDAVSLKIFRYMISFAVAYYYLVLLF

SEQ ID NO: 76016 - protein, 292 aa, Gossypium hirsutum
  Clone ID: GOSHI-09MAY01-C15024_1.pep
MVRMTKMPLNLTSIELPALVSDWWDEINESTKWQDGIFYTLCAAYALVSSVALIQLVRIELRVPEYGWTTQKVFHLMNFIANGVRAIVFGFHRQVFVLFPQGLPFYVVGSSGPFCFSSPSTLLVLFGAEIYHQAKSFPPDKLRILYVSFNAVIYFIQVCVWVYLWIDDNSVVDFIGKIFIAVVSFIAALGFLLYGGRLFFMLRRFPIESKGRRKKLHEVGSVTAICFTCFLIRCFVVVLSAFDADASLDVLDHPVLNLIYYTLVEILPSALVLYILRKLPPKRVSAQYHPIR

SEQ ID NO: 76017 - protein, 457 aa, Gossypium hirsutum
  Clone ID: GOSHI-09MAY01-C15374_1.pep
HGKTVTQVTLAHLKEKPAPSTPTSSSSSYSASSGVRSAAARWLGAGNGSRTLGFAGGNGGSKSIGSTSRIGSLGASSSSNSITNMNFDGKGTYLIFNVGDAIFISDLNSQDKDPIKSINFSNSNPICHAFDQDAKDGHDLLIGVNSGDVYSVSLRQQLQDVGKKLVGAQHYNKDGSVNNSRCTGIAWVPGSDGVFMVAHADGNMYVYEKNKDGAGDSSFPVVKDQTQFSVSHARYSKSNPIARWHVCQGSINSIAFSHDGAYLATVGRDGYLRVFDYSKEQLVCGGKSYYGALLCCAWSMDGKYILTGGEDDLVQVWSMEDRKVVAWGEGHNSWVSGVAFDSYWSSPNSDGTRETVMYRFGSVGQDTQLLLGDLEMDEIVVPLRRCPPGGSPTYSTGSQSSHWDNISPLGTLQPAPSIRDVPKVSPLVAHRVHNEPLSGLIFTQESVLTVCREGHIK

SEQ ID NO: 76018 - protein, 122 aa, Gossypium hirsutum
  unsure (1)..(122): unsure at all Xaa locations
  Clone ID: GOSHI-09MAY01-C15364_1.pep
LVPVDLVIDHSVQXDVARSENAMQANMEREFQRNKERFAFLKWGSNAFDNMLVVPPGSGIVHQVNLEYLGRVAFNTNGVLYPDSVGGTDSHTTIIDGLGVAGWRAGGVEAEAVMLGQPMSMV

SEQ ID NO: 76019 - protein, 226 aa, Gossypium hirsutum
  Clone ID: GOSHI-09MAY01-C15314_1.pep
MDRPRFVIDAVEAEQMAKQSGKTVLQLLPSLVKSAQSVARPPISKYQVGAVGIGSSGRIFFGANLEFPGLPLNHSVHAEQFLITNLSLNAEPRLKYIAVSAAPCGHCRQFFQELRGAPDVKMLITSSDDEKENKISNTCNDKDQEFTPLSHFLPHRFGPDDLLGKDAPLLLDPRRNGLSFTSDGGEYDELKHAALDAANMSYAPYSGCPSGVALIDVEGKIYQGSY

SEQ ID NO: 76020 - protein, 53 aa, Gossypium hirsutum
  Clone ID: GOSHI-09MAY01-C15304_1.pep
ALNWFIILPPFFRIFYYIFTNAHMLLCMSGLKRAFKKKNLVTKFCDSSLTNSA

SEQ ID NO: 76021 - protein, 76 aa, Gossypium hirsutum
  Clone ID: GOSHI-09MAY01-C16804_6.pep
VNYCDDNYRLLKNPLNYKEHLLLRLQGASEFRIKTSKMSGLMELVILVPCCFFLVALIKFLYDYLWVPLRIQHLWP

SEQ ID NO: 76022 - protein, 149 aa, Gossypium hirsutum
  Clone ID: GOSHI-09MAY01-C16804_2.pep
MKLLILAPCCLLFIALIKLLYDYLWIPLRIQHMLNSQGIKGPPYRFIHGNNKEVTKMKQKALSKSVGLTDDLFPKVQPHIYTWTNRYGKNCVYWNGARAELVISEPELVKEVLRNSEQIFQKKKLTDIGRKFLGNGLIFIEGEKWAKHR

SEQ ID NO: 76023 - protein, 224 aa, Gossypium hirsutum
  unsure (1)..(224): unsure at all Xaa locations
  Clone ID: GOSHI-09MAY01-C16804_1.pep
MSALTELVILVPCCFFLVALIKFLYDYLWVPLRIQRLLNSQGIKGPPYKFIHGNNEEATKMRQEALSKPMALRHDIFPKVQPHIYTWINRYGRNYLYWNGIRPELVISEPELLKEVLKNSENTFPKKKPSIFLSNLLGNGLVPLQGEKWVKRRKLANHVVHXESLKGXMDTQQGICHAPETMSSRSAKGQEGKEIEVLQEFRLLTSELISRTALGSNHLEGEKI

SEQ ID NO: 76024 - protein, 82 aa, Gossypium hirsutum
  Clone ID: uC-gsronu33B179d06b1.pep
SSSLSDYLWVPVSIQHMLNSQGIKGPPYRFIHGNNKEIIKMRKEAMSKPKALTHDMFIKLQPHTHSWIKEYGKMDACFSLCC

SEQ ID NO: 76025 - protein, 60 aa, Gossypium hirsutum
  Clone ID: LIB3149-019-Q1-K1-A9.pep
SCQMTKGVKEQIEPRETHGRDMLSTLKGDQRTSLQIHPWQQQGSYQNETKSFKQICGLDR

SEQ ID NO: 76026 - protein, 115 aa, Gossypium hirsutum
  unsure (1)..(115): unsure at all Xaa locations
  Clone ID: uC-gsflnu33B100c01b1.pep
VVLMELVILVPCSLLLIALIKFLYDYLWVPLSIQHMLNSQGIKGPPYRFIHGNNKEIIKMRKEAMSKPKALTHDIFAKTQPHMYSWIXKYGKNFVYWNGIRAEVVISEPELVKRF

SEQ ID NO: 76027 - protein, 129 aa, Gossypium hirsutum
  Clone ID: GOSHI-09MAY01-C16824_1.pep
GVPVWRPCSPLAQMEFQSFDEMPLAAVTDEANGSQSGRKASVSISKLDVLSANELLDSALETARQVVSFSVSPAPIPYDQMKSQCEASVMGKQQKMSILHHFKHQQEASATSEEIENEILYLPSEKAES

SEQ ID NO: 76028 - protein, 104 aa, Gossypium hirsutum
  Clone ID: GOSHI-09MAY01-C16764_1.pep
WNSVLESINGGVPMICRPFFGDQQLNTRTVEVVWGFALGLEGGTLTKGGAKKALKLILCSQEGKKMREKIRVQKELVCKAVKPNGSSIENFKTLVKLLQHLPPS

SEQ ID NO: 76029 - protein, 152 aa, Gossypium hirsutum
  Clone ID: GOSHI-09MAY01-C16104_2.pep
MKKMSSDDPNQPGLVITVTESIRSFLLSASNDHRLSKELRELALTLSSAANAPYKQIRSIWMESAFDSRPGLIPLFSGSNFVFTSPKPREKSEELKERLRKLKELAERKEYQELVKDITPKKDLTEPFSTYKDQIGFEFCWRYSWIGVWHAS

SEQ ID NO: 76030 - protein, 263 aa, Gossypium hirsutum
  Clone ID: GOSHI-09MAY01-C16104_1.pep
PSCPDFQGGFFPPNPLISHFKLSIFYLLPFIFSVVLPPYPFLLAFLQIQERFLPVNEKESSDDPNQPGLVITVTESIRLFLVAASNDRRLSEELRELALTLSSAANAPYKQIRSIWMESAFDTRPELISLFSGSNFVFTSPKPREKSEELKERLRKLKELAERKEYQELVKDITPKKDLNEPFSTYKDQIGFGLHVALTMFTGYLLGYFAFRALFNHSPIMNSAGGILGLVFGMLLETFLFIIRTSEPNLKSPSSTSRFKKNQ

SEQ ID NO: 76031 - protein, 98 aa, Gossypium hirsutum
  Clone ID: GOSHI-09MAY01-C16054_5.pep
MGEPDTCNPAGSGLPSEEASVKTAKKIHNQKFAELSGNDIFKGDVPPGSAEKPLSAAKLREMSGSNIFADGKVESRDYFGGVRKPPGGESSIAFGLTS

SEQ ID NO: 76032 - protein, 124 aa, Gossypium hirsutum
  Clone ID: GOSHI-09MAY01-C16054_4.pep
AKCKELIGHYIWAPPPEILPRPTTIRALALKDSFDLGESHTHNSSDEARVKTAKKIPNQKLAELSGNDISKGDVPPGSAEKPLSMAKMREISGSNIFADGKVESRDYFGGVRKPPGGESSIALV

SEQ ID NO: 76033 - protein, 152 aa, Gossypium hirsutum
  unsure (1)..(152): unsure at all Xaa locations
  Clone ID: GOSHI-09MAY01-C16054_3.pep
MEKSTPVRKPHTSTADLLTWSETPQPDFTASAARSTRPHQPSDGIRKVVFGGQVTDEEFESLNKRKPCSGYKMKEMTGSGIFAADGENDESEPGSANPTPNNKTAIRMYQQSLAGISHISFAEEESITPKKPTTLXEVAKQRELSGTLQSED

SEQ ID NO: 76034 - protein, 164 aa, Gossypium hirsutum
  Clone ID: GOSHI-09MAY01-C16054_2.pep
MERSTPVRKPHTSTADLLTWSETPQPDPDTSAARSVRPHQPSDGIRKVVFGGQVTDEEFESLNKRKPPSGYKMKEMTGSGIFAANVENDESEPGSANPASNNKTGLRMYQQALAGISHISFAEEETISPKKPTTLPEVAKRRELSGTLESEDSKLKKQLSDAKC

SEQ ID NO: 76035 - protein, 289 aa, Gossypium hirsutum
  Clone ID: GOSHI-09MAY01-C16054_1.pep
MERSTPVRKPHTSTADLLTWSETPQPDSSASAARPTRPHQPSDGIRKVVFGGQVTDEEFENLNKRKPCSGYKMKEMTGSGIFAANGENDESELGSANPIPNSKTGLRMYQQALAGISHISFAEEESISPKKPTTLPEVAKQRELSGTLQSEEAKLKKQLSDAKSKELGGHDIFAPPPEIVPRPTTVRALALKDNFDMGEPDTHKPAGGSTPSEETVVKTAKKIHNQKFAELSGNDIFKGDVPPGSAEKPLSVAKLREMSGSNIFAEGKVESRVSSGRKPPGGESTIALV

SEQ ID NO: 76036 - protein, 95 aa, Gossypium hirsutum
  Clone ID: uC-gsronu33B139e07b1.pep
MERSTPVRKPHTSTADLLTWSETPQPDPDTFAARSVRPHQPSDGIRKVVFGGQVTDEEFESLNKRKPPSGYKMKEMTGSGIFAANVENDESEPGS

SEQ ID NO: 76037 - protein, 135 aa, Gossypium hirsutum
  Clone ID: LIB3083-082-Q1-L1-B3.pep
GDPRAGGIRARAQRRNPHTSTENHRTWSKTPKPDLTASAERSTRPNKPWDGIRKVVFGGQVTDEEFESLNKRKPCSGYKMKEMTGSGIFAADGENDESEPGSANPTPNNKTAIRMYQQSLAGISHISFAEEESIT

SEQ ID NO: 76038 - protein, 346 aa, Gossypium hirsutum
  unsure (1)..(346): unsure at all Xaa locations
  Clone ID: GOSHI-09MAY01-C16074_1.pep
VWQDSSSFTNIFDVDHFINVLQDEVSIVKELPREYSWSSREYYATGIRATRIKTAPIHASADWYLENVLPVMRSYGIAAISPFSHRLAFDKLPVEIQXLRCKLQASGTEVLRERTDDTEKGRAGKFVVLHLRFDKDMAAHSACDFGGGKAEKLALAKYRPVLWRAGVLNSQFTDHELRNQGRCPLTPEEIGLLLTALGFNNNTHLYLASHKVYGGEARISTLRAMFPLMEDKKSLASAIELAEVEGKASLMAAVDYYVSLKSDIFISASPGNMHNALLGHRAYLNLKTIRPNMLLLGPLFLNKTIEWSEFQHAVINGHKNRQGQTRLRKEKQSIYTYPAPDCMCRA

SEQ ID NO: 76039 - protein, 134 aa, Gossypium hirsutum
  Clone ID: LIB3145-028-Q1-K1-C3.pep
PRVRIAAISPFSHRLAFDKLPVEIQHLRCKVNFEALAFVPRIRLIGETLVNRLRDPSGKLQASGTEVLRERTDDTEKERAGKFVVLHLRFDKDMAAHSTCDFGGGKAEKLALAKYRQVLWQGRVLNSSFTDHEL

SEQ ID NO: 76040 - protein, 164 aa, Gossypium hirsutum
  Clone ID: LIB3585-041-P1-K1-E9.pep
LEHEYSVLIPAGAKESRRSPTYDAYPRRRSRSKSRSYSPSYSRRHARGGYSDDSHRRKPKAPKIEYITEFGGSGDGNGPKLDGVSPPSSPPSQADILNRPSSGHILEALHGDPASGVSLNKEKSGEVLKPAFSGTSALAKLTKASAFGGPSKQGQVEKKETSQE

SEQ ID NO: 76041 - protein, 126 aa, Gossypium hirsutum
  unsure (1)..(126): unsure at all Xaa locations
  Clone ID: LIB3197-024-Q1-M1-A7.pep
EDDDEFDSDDSNDEGMEIIAKGFGVKRYGWLVYMDKKAKEEEKRQKEVIKGDPAIRKLSRKERRKASQIEREREREAARITGTRVLRNLGVVQXYDAYPRRRSRSRSRSYSPSYSRRHARGGYSDD

SEQ ID NO: 76042 - protein, 150 aa, Gossypium hirsutum
  Clone ID: GOSHI-09MAY01-C16374_1.pep
MYSSNLKGFILAMVSSAFIGSSFIIKKKGLRKAGVNGPRASSGGYGYLLEPLWWVGMLTMIIGEISNFVAYIYAPAVLVTPLGALSIIVSAVLAHFMLKEKLQKMGMLGCLLCIVGSTIIVLHAPEERSISSVEEIWEFATQPAFLLYTA

SEQ ID NO: 76043 - protein, 248 aa, Gossypium hirsutum
  Clone ID: GOSHI-09MAY01-C16314_1.pep
LLFQPAEEGGAGASHMIKEGALGDAEAIFGMHIDYSTLTGSITLVSGPVLAATCIFEAKIKGVGGHAAGPHSTVDPILAASFAILALQQLISREADPLHSQVLSVTFIRGGSAFSVIPSYVEFGGTLRSLTTEGLHKLQQRLKEVIKGQAAVHRCKAFIDMKEKDHPLYPAVVNDDGLHQHVQKVGSLLLGPENVKKGKKIMAGEDFAFYQEKIPGFMLSIGIRNEELGSIHPPHSPYFFLDEESSPA

SEQ ID NO: 76044 - protein, 215 aa, Gossypium hirsutum
  unsure (1)..(215): unsure at all Xaa locations
  Clone ID: GOSHI-09MAY01-C16304_1.pep
NQQRIAICNAVAVAKILNATLILPVLKQDQIWKDQTKFEDIFDVDHFIDYLKDDVRIVRDIPGWFTDKSELFTSIRRTVKNIPKYAPAQFYIDNVLPRVKEKKIMALKPFVDRLGYDNVPPEINRLRCRVNYHALKFLPEIEQMADLLVSRMRXHGSPNPYMXLHLRFEKGXVGLSFCDXGTRGEKARMAEXRQKEWPRRYKNGXHLWQLALQKR

SEQ ID NO: 76045 - protein, 238 aa, Gossypium hirsutum
  Clone ID: GOSHI-09MAY01-C16254_1.pep
VIERLERKFSTMAAEHPFKAVLTSLPKPGGGEFGKFYSLPALNDPRIDKLPYSIRILLESAVRNCDNFQVKKEDVEKIIDWQNTSPKQVEIPFKPARVLLQDFTGVPAVVDLACMRDAMHKLGSDTSKINPLVPVDLVIDHSVQVDVTRSENAVQANMELEFQRNKERFSFLKWGSSAFRNMLVVPPGSGIVHQVNLEYLGRLVFNTDGILYPDSVVGTDSHTTMIDGLGVAGWGVGG

SEQ ID NO: 76046 - protein, 99 aa, Gossypium hirsutum
  Clone ID: GOSHI-09MAY01-C16264_1.pep
LIFSELWLFIPLLHADFHLDFASHARLNVVQTPSLYQFKGKSVSWTPIYRLRLIVLMQKQHFVSLLPTHLTDNIGVVLQSAGYLHLKEVLPSVTVALVP

SEQ ID NO: 76047 - protein, 50 aa, Gossypium hirsutum
  Clone ID: GOSHI-09MAY01-C16214_1.pep
IFKRALRSTTSRTYTNTGPSINSNKYLKKKEIHTPKLIIRNPKFKKIPSR

SEQ ID NO: 76048 - protein, 168 aa, Gossypium hirsutum
  Clone ID: GOSHI-09MAY01-C17864_1.pep
MGVDYYKILQVDRNAKDEDLKKAYRKLAMKWHPDKNPNNKKDAEAKFKQISEAYDVLSDPQKRAVYDQYGEEGLKGQMPPPGAGGFGGGDSGGPTTFRFNTRNPDDIFSEFFGFSSPFGMGDMGGPRAGASGFPRGMFGEDIFGSFRGGAGEGSTTMPPKGAPIDRPF

SEQ ID NO: 76049 - protein, 144 aa, Gossypium hirsutum
  Clone ID: GOSHI-09MAY01-C17804_1.pep
NLKVPSHAPQPATPASSWHHAPSRTHASTTPYTSRQGPTHSPVLVPAKENRQKQQRRKKKNCIFIYLLIYFTFGYKSLLIFDCKVFFLRETHKYKHRQQINRKAIDQEGDLFERLVLFFLFFFASVSYSFRFHMFLYNKIKEGE

SEQ ID NO: 76050 - protein, 61 aa, Gossypium hirsutum
  Clone ID: uC-gsronu33B055c03b1.pep
MTTFGDPPFLLFHSLQRGTHRFKPRNPISDFDFSEGDEVFNSSYAKVKFHSPSFILLYRNI

SEQ ID NO: 76051 - protein, 145 aa, Gossypium hirsutum
  unsure (1)..(145): unsure at all Xaa locations
  Clone ID: GOSHI-09MAY01-C17584_1.pep
LLGRKPIFPGTECLNQLKLIINIXLGSQKDLEFIDNPKARNYIKSLPYSHGIPFSCLYPNAHPLAIDLLQKMLVFDPSKRIGVTEALQHPYVAPLYDPNCNPPAQVPIDLDIDEDLGEEMIREIMWKEMLYYHPEAANANGEVCV

SEQ ID NO: 76052 - protein, 236 aa, Gossypium hirsutum
  Clone ID: GOSHI-09MAY01-C17444_2.pep
QCLKEFETELETIGSIKHRNLVSLQGYSLSPSRNLLFYDYMENGSLWDLLHVSTKRKGLGWGMRLRIALGAAQGLAYLHHDCSPRIIHRDVKSSNILLDKDFEAHITDFGIAKSLCISKSHTSTYIMGTIGYIDPEYARTSRLTEKSDVYSYGIVLLELLTGRKPVDNESNLHHLLLSKAANNSVMETVDPEITDTCKDLGAVKKGFQLALLCTKRQPSDRPTMHEVTRVLGSLMP

SEQ ID NO: 76053 - protein, 255 aa, Gossypium hirsutum
  Clone ID: GOSHI-09MAY01-C17444_1.pep
MLGIFKKELMNPPKELHSPASLTSSNKPKLPNQIINHFLSSNPNNAFSMGFGSSACFAYAPTENRFPSHQRLFCGVDEIYCIFLGDLNNLSSLLKQYGLSKGTNEAMFIIEAYRTLRDRGPYPADQVLKDLEGSYGFVVYDSKAGSVFAALGADERVNLYWGVAADGSVVVSDNLKLIKESCAKSFAPFPPGCMFHSEQGLMSFEHPRSKMKAMPRIDSEGVMCGANFMADAQSRTSRMPRVGSEANWALRGSKA

SEQ ID NO: 76054 - protein, 106 aa, Gossypium hirsutum
  Clone ID: LIB3148-030-Q1-K1-G8.pep
PRVRPRVRPRVRPRVRDGSVVVSDNLKLIKESCAKSFAPFPPGCMFHSEQGLTSFEHPRSKMKAMPRIDSEGVMCGANFMADAQSRTSRMPRVGSEANWALRGSKA

SEQ ID NO: 76055 - protein, 134 aa, Gossypium hirsutum
  Clone ID: LIB3148-046-Q1-K1-D2.pep
APTSAHAVRPRRSLSQWFGSSACFAYAPTENRFPNHQRLFCGVDEIYCIFLGDLNNLSSLLKQYGLSKGTNEAMFIIEAYRTLRDRGPYPADQVLKDLEGSYGFVVYDSKAGSVFAALGANERVKLYWGVAADG

SEQ ID NO: 76056 - protein, 131 aa, Gossypium hirsutum
  unsure (1)..(131): unsure at all Xaa locations
  Clone ID: LIB3582-021-P1-K1-G6.pep
MTSIEKKELMNPPKELNSTAALTXSNKPKLPNQIINHFLSSNSKNAFSMEFGSXLALLMLPQRIVIPSHQRLLCGVDEIYCIFLGDLNNLSSLLKQYGLSKGTNEAMLIIEAYRTLRDRGSYPADQVLKDL

SEQ ID NO: 76057 - protein, 47 aa, Gossypium hirsutum
  Clone ID: uC-gsronu33B148h07b1.pep
IIQALEPRSAQLASLPTRGHPTCSRLSIGHKIGTTHHPFAVNLLALH

SEQ ID NO: 76058 - protein, 218 aa, Gossypium hirsutum
  unsure (1)..(218): unsure at all Xaa locations
  Clone ID: GOSHI-09MAY01-C17434_1.pep
MENPGSNQLPEVDSLPDGFVESPSEILAPKTPISKEEKPLLPDCREGDLVSSEFGANKGQKQRTFPVPLSEADGFEGSADYVEGKVVCPELSNSLPEAAECSEVKEVKGKCESTETCIGRGSETNLTALKESSSSESIDLPXKKTETTETKRKTAKRTSKSEKEFLEFSLKYQQVIAERDTAIAVRDKLQSLCXELPRQNQMLMDECXRFPPEGQTLK

SEQ ID NO: 76059 - protein, 121 aa, Gossypium hirsutum
  Clone ID: GOSHI-09MAY01-C17754_1.pep
MANSKKPGGLREMLESMYSVIALLFILVACVELCDAAAPVDVYRLIQYDMSGSPFGSRFAALNHHAASLHFPPGVDLSRTVLIIPLRELNITFVREYINQKKPLGRLLVLLPEVLILKLEE

SEQ ID NO: 76060 - protein, 102 aa, Gossypium hirsutum
  unsure (1)..(102): unsure at all Xaa locations
  Clone ID: GOSHI-09MAY01-C17714_2.pep
MSEVFEGYERQYCELSANLSKKCTASGALNGEKMKQKLSEIKARLEDAEALIRXMDLEARSLQPNVNAVLLAKLREYKSDLNNLKSEVKRIASGNLNPSARE

SEQ ID NO: 76061 - protein, 221 aa, Gossypium hirsutum
  Clone ID: GOSHI-09MAY01-C17714_1.pep
MSEVFEGYERQYCELSANLSKKCTAAVALTGEQKKQKLSDVRAGVEDAEALIRKMDLEARSLQPNVKAVLLAKLREYKSDLNNLKSEVKRIASGNLNAAARDELLESGMADTLTASADQRSRLMMTTERLNQSSDRIKDSRRTMLETEELGVSILQDLHSQRQALLHANNTLHGVDDNIGKSKKILTAISRRVSRNKWIIGTIIAVLIIAIALVLDFTLAK

SEQ ID NO: 76062 - protein, 244 aa, Gossypium hirsutum
  unsure (1)..(244): unsure at all Xaa locations
  Clone ID: GOSHI-09MAY01-C17704_1.pep
MMNLSTMIAYGYRHCTPPIKQLLNYTTFLHLHHHHHHHHHHHHLQGRPLSFNSLNLPNLNLLLTGNCLFFRMQRFWIGNGINKNKQMVEHLQRYGVISSMKVAEVMETIDRALFVPDGASAYADSPLAIGYNATISAPHMHATCLQLLEQNLQPRMHALDVGSXTGYLTACFAIMVGPXGRAVGVKHIPELVASSIKNIEKSAAAPLLKESSLSXHAGDGRQGWPKCAPYDAIHVGAAAPENTQ

SEQ ID NO: 76063 - protein, 84 aa, Gossypium hirsutum
  Clone ID: GOSHI-09MAY01-C17694_1.pep
MTSTSVATSSSRICFNSVCNDLKSERPRKGWRLRTGELAELCDRCASIYDEGRPCDTFHLMASGGGTSEPWSSEALWPKRCPFL

SEQ ID NO: 76064 - protein, 98 aa, Gossypium hirsutum
  Clone ID: LIB3083-104-Q1-L1-A6.pep
MGGGTHRPTMDLLRSEPMQLGQLIIPIESAHRSISYLGDLGFFQFKDLNSEKSPFQRTYATQIKRCGEMARKLRFFKEQMVKAGLSPSTRSAISDDVD

SEQ ID NO: 76065 - protein, 75 aa, Gossypium hirsutum
  unsure (1)..(75): unsure at all Xaa locations
  Clone ID: LIB3197-037-Q1-M1-F9.pep
MGGGTHRPTMDLLRSEPMQLVQXIPIESAHRSISYLGDLGFFQFKDLNSEKSPFQRTYATQIKRCGEMARKLRFF

SEQ ID NO: 76066 - protein, 75 aa, Gossypium hirsutum
  Clone ID: GOSHI-09MAY01-C17164_1.pep
HFWLFLLAVHQYCLKFLSFVNYILINFGVVFELRPHSSSCSMLMETYLHYWRGLFSGKFSPLLITKNCSCTSRYD

SEQ ID NO: 76067 - protein, 470 aa, Gossypium hirsutum
  Clone ID: GOSHI-09MAY01-C17094_1.pep
MEMDRESGKLEQIVSQFRSKILHVILDSRVPSLHHHHQLQQQESLSHSRVRKTDKWFNLVLGDRPPALENLNFSLRNLLDPMVIDIILVHRGSCSSSVDNLYSPSAPAVGPADETVIERWVVQYDCPRFIATPSGADASVSYKKIYKKSIILLRSLYTQMRLLPAYRIFKQLSSLSQTYNFDLVYKVSSFSHPFSREEESGMKEYSFAPVEALSGYLSVSVTYRATLSDFNLEPLVSLPPKIITDYVGSPTTDPMRSFPSSEKGAHATSFPLRGARPPSSSPFQRPHSWSSGFHRGFPSTKTQSLAGSPPAYRTSPKPYDIASTPTDLYGNRIQNQRVSTLQQVTAYDEYKSSPPFSPSASPSTPSYLSGANPLLTRHCSETAPVTIPLPLTGRSTRYLSPNSSDPSRHSLPPLSPRSSKHDASSQESPSGIRSYRKIEALRAGESPSGLSNNYSAQKVVRDSKDDSGRF

SEQ ID NO: 76068 - protein, 193 aa, Gossypium hirsutum
  unsure (1)..(193): unsure at all Xaa locations
  Clone ID: LIB3828-026-Q6-K6-B6.pep
GSTQRLLRHTYLVRGGGGTRHCSETAPVTIPLPLAGRSTRYLSPNSSDPSRHSLPLLSPRSLKHEGGGSXSPSGIRSSRRVEALRAGESPSGLSNXYSAQKVVXDXKDDSGXFSXLLSSSGSPHIGFSRSSSGLSFQDDLDDCEFSCPFAVGDVCCSDSSSPNTEGQNGFGNSLHSLVWLVIISHDACCWASC

SEQ ID NO: 76069 - protein, 53 aa, Gossypium hirsutum
  Clone ID: GOSHI-09MAY01-C17054_1.pep
CRIPALTPHMTNGRMLLHKVLDGAQISLEEYEVMKDLIIPLGRAPHFSAQSGA

SEQ ID NO: 76070 - protein, 134 aa, Gossypium hirsutum
  Clone ID: GOSHI-09MAY01-C17074_1.pep
MSPPLLGVEEEGQSRVSSPSVECISHNGLGIREWNYLGLSDFCSVDSSGVPDDNGNNLNLKATELRLGLPGSQSPERETELCFLNSGKLDEKTLFPLLPSKDGICSSSQRSVVTGNKRGFSEVKGTIYTEKKWM

SEQ ID NO: 76071 - protein, 91 aa, Gossypium hirsutum
  unsure (1)..(91): unsure at all Xaa locations
  Clone ID: LIB3145-037-Q1-K1-E6.pep
MSPPLLGVEEEGQSXVSSPSVECISHNGLGIRERNYLGLSDFCSVDSSGVPDDNGNNLNLKATELRLGLPGSHSPERETEHCFLNSGKLDE

SEQ ID NO: 76072 - protein, 351 aa, Gossypium hirsutum
  unsure (1)..(351): unsure at all Xaa locations
  Clone ID: GOSHI-09MAY01-C17064_1.pep
PRVAHASGLSNRIYAGILNAVKESGTLKERLFNAAYNSKKQAIMNGKSPSPIWDRLVFNKIKARLGGRVRFMASGASPLSPDVMDFLKICFGGHIIEGYGMTETSCVISCMDEGDILSGHVGSPNPACEIKLVDVPEMNYTSDDQPYPRGEICVRGPIVFQGYYKDEMQTREVLDEDGWLHTGDIGLWHTGGRLKIIDRKKNIFKLAQGEYIAPEKVENVYAKCKFIAQCFIYGDSLNSSLVAIVSVDQDALKAWASSQGIKYKDLEQLCNDPRARAAVQAEMDAVGRDAQLRGFEFAKSVTLVLEPFTMENGLLTPTFKIKRAQAKAYFAKAXISDMYAELTTSDSSHVK

SEQ ID NO: 76073 - protein, 90 aa, Gossypium hirsutum
  Clone ID: GOSHI-09MAY01-C17344_1.pep
SKPSTDLLCCLFDQGIHLPYRPISFSSCKRDTAALSRTVSLPLSMSSLMAMVSFNSCIISFCILIQMEKRKSLKQYDEKQMGIQGLSNSR

SEQ ID NO: 76074 - protein, 78 aa, Gossypium hirsutum
  unsure (1)..(78): unsure at all Xaa locations
  Clone ID: LIB3197-040-Q1-M1-H5.pep
PTRXRRNPKISLEISSLFFPILFFPNHFSPTPIPFIFSPNFLKSAALCISVGSPLLYLCRHLLSVALSLFVYYHCFYL

SEQ ID NO: 76075 - protein, 62 aa, Gossypium hirsutum
  Clone ID: uC-gsflnu33B111a11b1.pep
NFTGNFFSFFPHFIFPKPFLPYPDSLYFSPNFLKSVALCISVGSPLLYLCRHLLSRKRNGWK

SEQ ID NO: 76076 - protein, 157 aa, Gossypium hirsutum
  Clone ID: GOSHI-09MAY01-C17274_1.pep
MDGTGVVAVYGNGAMTETHNKSTFSVKVGLAQMLRGGVIMDVVTPEQARIAEEAGACAVMALERVPADIRAQGGVARMSDPQLIKEIKQAVTIPVMAKARIGHFVEAQILEAIGIDYVDESEVLTPADEENHINKHNFRIPFVCGCRNLGEALRRIR

SEQ ID NO: 76077 - protein, 170 aa, Gossypium hirsutum
  unsure (1)..(170): unsure at all Xaa locations
  Clone ID: LIB3828-009-Q1-K6-C12.pep
TSSSRLKKPAACAVMALERVPADIRAHGGVARMSDPQLIKEIKPAATIRVMAKARIGHFDEAQILQAIGIDYVDESEVLTPADXENHINKHNFRIPFNXGCRNLGEALRMIREGAAMIRTKGEAGTGNIIEAGRHVKSVMGDIRVLRNMDDDEVFSFSKRIHSPYDLVMQ

SEQ ID NO: 76078 - protein, 162 aa, Gossypium hirsutum
  unsure (1)..(162): unsure at all Xaa locations
  Clone ID: GOSHI-09MAY01-C10994_1.pep
MKNESAMSCSVAVCNSPVFSPSSSLFCGKTSIISQSPEALNLSLTHLKPSSSSPASPSPSSPSSPFRLRLQKPTSWVSFXSTPSSSSVSGSTILKRKRPSRLDIPVSTTALCFGVPATPCEVAREVEREGDGYSVYCKRGRREAMEDRFSASVELQGDSKQA

SEQ ID NO: 76079 - protein, 168 aa, Gossypium hirsutum
  Clone ID: GOSHI-09MAY01-C10954_1.pep
MSFSRIGRSLSRSSRSNFRTNVISRKLLRYESNVPSPVTNTCISRVNKRLGLVKGYFAPAGVGKQLSTNTPLSNLDSILANPRIRRFFCSEGPKKRNYENYFPKVQWLIPKANEQKSGSKEDSGAGEPGNSQNIQRLVQNIVTTLIVIGITYSLLSGPYEQQEISFQE

SEQ ID NO: 76080 - protein, 110 aa, Gossypium hirsutum
  Clone ID: GOSHI-09MAY01-C10964_1.pep
TIGLAFIEASMLEAKLIFEASYVWQYHTSRGVHSMHFPRKDNGLFVMYWKLDRQKIVLALPMIRILQYLCMPMLSIYYMTELPPHHHLIGDPAPNIAILMDNCSISSAEK

SEQ ID NO: 76081 - protein, 225 aa, Gossypium hirsutum
  Clone ID: GOSHI-09MAY01-C10884_3.pep
MSSSDPNKLISKADKLTRLSLTRWSADWKSATLLYEQAANGFRVSKDYEKAKLAFEKASKGQEMLASPWDAAKHMESAAALAKELRNWTEVIDFYRRASELYMQCDRPQPASDSLAKAARALEDALPDDAVQLYTDACVILEDDGKEQMAFDLYRAAASIYVKLEKFTDAATFLLRLGLAADKCNARNSQCKAYLSAIIVYLYAHDLKQAEKCYNDCSQIDAFLR

SEQ ID NO: 76082 - protein, 120 aa, Gossypium hirsutum
  Clone ID: GOSHI-09MAY01-C10884_2.pep
MVQRLTYRTRHSYATKSNQHRVVKTPGGKLVYQTTKKRASGPKCPVTGKRIQGIPHLRPAEYKRSRLPRNRRTVNRAYGGVLSCSAVRERIIRAFLVEEQKIVKKVLKIQKSKEKQASKS

SEQ ID NO: 76083 - protein, 120 aa, Gossypium hirsutum
  Clone ID: GOSHI-09MAY01-C10884_1.pep
MVQRLTYRTRHSYATKSNQHRVVKTPGGKLVYQTTKKRASGPKCPVTGKRIQGIPHLRPAEYKRSRLPRNRRTVNRAYGGVLSGSAVRERIIRAFLVEEQKIVKKVLKIQKTKEKQSSKS

SEQ ID NO: 76084 - protein, 128 aa, Gossypium hirsutum
  unsure (1)..(128): unsure at all Xaa locations
  Clone ID: LIB3585-033-P1-K1-C6.pep
PADRLQVDQASAHASGTRHSYATKSNQHPDVNTRGGKLIYQATKKRASGPNSPLTGRRIQDIPHSRPAEYKRSRLPRNRXTVNRAYGGVLSGSAVRERIIRAFLVEEQKIVKKVLKIQKTKEKQSSKS

SEQ ID NO: 76085 - protein, 93 aa, Gossypium hirsutum
  Clone ID: uC-gsflmaxxa006a12b1.pep
MSSSDPNKLISKADKLTRLSLTRRSADWKSATLLYEQAANGFRVSKDYEKAKLAFEKASKGQEMLASPWDAATKSNQHRVVKTPGGKISLSDY

SEQ ID NO: 76086 - protein, 131 aa, Gossypium hirsutum
  Clone ID: GOSHI-09MAY01-C10584_1.pep
MEAVNGCSSSTSSSDASSSDSYLSARGSNKAEKIKGPWSAEEDRILTRLVERYGPRNWSLISRYIKGRSGKSCTLRWCNQLIPNVEHRSFSQAEDDTILAAHARYGNRWATIARLLPGRTDNAVKNHWNST

SEQ ID NO: 76087 - protein, 534 aa, Gossypium hirsutum
  Clone ID: GOSHI-09MAY01-C10544_2.pep
MAEMSTLCTFLFSLLLFASHPLILPTAADGRWQLLQKSIGISSMHMQLLKNDRVVMYDRTDFGPSTLPLASGKCHNDPTNTAVQVDCTAHSVEYDVLSNKFRALTVQSNVWCSSGAVMPDGKLVQTGGFSDGELRVRVFSPCESCDWHETPNGLAAKRWYATNHVLPDGRQIVVGGREQFNYEFVPKNIAADTFKLHFLSETNERGVENNLYPFVFLNVDGNLFIFANNRAILLDYVNNKVVKTYPKIPGGEPRSYPSTGSAVLLPLKNLTAATIQAEVLVCGGAPKGSFVQALQGKFVKALNTCARISITDPKPKWVLETMPLARVMGDMVLLPNGKVLVINGARSGSAGWDLGRDPVLNPVLYMPDNEIESRFKILNPTKIPRMYHSTAVLLRDGRVLVGGSNPHAYYNFTGVLYPTELSLEAFYPGYLDAKFNNLRPTIVAPKSMSGIRYSKKLKIQVVITGEVTLNLLSVTMVSPAFNTHSFSMNQRLLVLGNDQVMASGKSTYKIEVMTPGSGNLAPAGFYLLLGFIKT

SEQ ID NO: 76088 - protein, 442 aa, Gossypium hirsutum
  unsure (1)..(442): unsure at all Xaa locations
  Clone ID: GOSHI-09MAY01-C10544_1.pep
MGSELIYRGHETQLASDSYSPKPVKPWASVTRVVRYMLREQRLLFVLVGIAIATLVFNIFPASRAAHGPHLHSTTPLLDSIPYFPIETQNKFSYAHRLGFGSGNPTXRIPLGLKRKGLRIVVTGGAGFLGAXLLDRLIARGDSVIVVDNFFTGGKENVMHHFGNPNFELIRHDVVEPLLLEVDQIYHLACPASPVHYKFNPVKTIKTNVVGTLNMLGLAKRVGARFLLTSTSEVYGDPLQHPQKETYWGNVNPIGVRSCYDEGKRTAETLTMDYHRGAGVEVRIARIFNTYGPRMCIDDGRVVSNFVAQALRKEPLTVYGDGKQTRSFQYVSDLVEGLMRLMEGEHVGPFNLGNPGEFTMLELAEVVQETIDPNAKIEFRPNTEDDPHKRKPDISRAKELLGWQPKVSLRKGLPLMVSDFRQRIFGDHKVGSSTTTTNDSSS

SEQ ID NO: 76089 - protein, 193 aa, Gossypium hirsutum
  unsure (1)..(193): unsure at all Xaa locations
  Clone ID: uC-gsflmaxxa047a01b1.pep
MSTLCTFLFSVLLFASQPLILPTAADGRWQLLQKSIGISSMHMQLLKNDRVVMYDRTDFGPSTLPLASGKCHNDPTNTAVQVDCTAHSVEYDVLSNKFRALTVRSCYDEGKRTAETLTMDYHRGAGVEVRIARIFNTYGPRMCIDDGRVVSNFVAXALRKEPLTVYGDGKQTRKFQICSDLGEGLMRLMEGDM

SEQ ID NO: 76090 - protein, 182 aa, Gossypium hirsutum
  Clone ID: LIB3585-061-P1-K1-G4.pep
AYASDQIYHLACPASPVHYKFNPVKTIKTNVVGTLNMLGLAKRVGARFLLTSTSEVYGDPLQHPQKETYWGNVNPIGVRSCYDEGKRTAETLTMDYHRGAGVEVRIARIFNTYGPRMCIDDGRVVSNFVAQALRKEPLTVYGDGKQTRSFQYVSDLVEGLMRLMEGEHIGPFNLVKSRRIYH

SEQ ID NO: 76091 - protein, 86 aa, Gossypium hirsutum
  Clone ID: LIB3197-034-Q1-M1-H4.pep
PLARVMGDMVLLPNGKVLVINGARSGSAGWDLGRDPVLNPVLYMPDNEIESRFKILNPTKIPSMYHSTAVLLRDGRVLVGGSNPDA

SEQ ID NO: 76092 - protein, 46 aa, Gossypium hirsutum
  Clone ID: LIB3135-002-Q1-K1-F4.pep
MSKIKNKKLHPTSIIKIHYNNNCFNREKTRRSSFPLNHYIFLSLCL

SEQ ID NO: 76093 - protein, 143 aa, Gossypium hirsutum
  Clone ID: GOSHI-09MAY01-C10574_2.pep
MPRRSSGRSASRPAPRPAPARSPPPQPAQHAPPPAPAQSGSGGSLLGGIGSTIAQGMAFGTGSAVAHRAVDAVMGPRTIQHETVVSEAAAAPANSFTGSDACSIHSKAFQDCLNSYGNEISKCQFYMDMLSECRKNSGSMLGA

SEQ ID NO: 76094 - protein, 144 aa, Gossypium hirsutum
  Clone ID: GOSHI-09MAY01-C10574_1.pep
MPRRSSGRSASRPASARSPPPQPAHHAPPPAPAQSGSGGSLLGGIGSTIAQGMAFGTGSAVAHRAVDAVMGPRTIQHETVVSEAAAAPAPATTSNSLAGTDSCSIHYKAFQDCLNSYGSELSKCQFYMDMLTECRKNTGSMLGA

SEQ ID NO: 76095 - protein, 47 aa, Gossypium hirsutum
  Clone ID: uC-gsflnu33B140a02b1.pep
AGTDSCSIHYKAFQDCLNSYGSELSKCQFYMDMLTECRKNTRSMLGA

SEQ ID NO: 76096 - protein, 237 aa, Gossypium hirsutum
  unsure (1)..(237): unsure at all Xaa locations
  Clone ID: GOSHI-09MAY01-C10514_1.pep
ERVGFVTLLLHVCFSRADKIVALPGQPKVSFQHFSGYVTVHDEKPHRQRALFYYFVEAETIPASKPLVLWLNGGPGCSSVGAGAFIEHGPFKPNGKTLTKNXQYWDAEANMLYLESPAGVGFSYSANNSFYTDLNDEVVARDNFVFLERWLLMFPQYKNRDFYITGESYAGHYVPQLTLHIIHSNLKLNLKGIAIGNPLLEFVTDMNSADQYYWSHGLISDSAYELLLSFGNSSRLM

SEQ ID NO: 76097 - protein, 58 aa, Gossypium hirsutum
  Clone ID: LIB3166-026-P1-K1-H4.pep
TEGPWLFILLEQGAFIEHGPFKPNGKTLTKNVHSWNKEANMLYLESPAGVGFSYSANN

SEQ ID NO: 76098 - protein, 150 aa, Gossypium hirsutum
  Clone ID: GOSHI-09MAY01-C10504_1.pep
MESDGIISLFDSCWFEMEIFKKQTSPSTSTVSEPNQDLRVEETSSKPEFTRTPSLHTRSMSDQLSLNSTSFIGSASLSPDSVLHSPKLHKIISGKEMTEEELQDNGSRIQEEPKKKETAASNRRSSRRKKGTCKSLSDLEFEELKGFMDL

SEQ ID NO: 76099 - protein, 126 aa, Gossypium hirsutum
  Clone ID: LIB3166-026-P1-K1-G4.pep
FFFIFFYLILLLLLFCLFVLLLLLLLLAAVSFFLGSSWILLPLSCNSSSVISLPEMILCSFGEWRTESGDNEAEPMKLVLFKLNWSLMDLVWRDGVRVNSGFDDVSSTRRSWFGSETVNVDGDVCF

SEQ ID NO: 76100 - protein, 265 aa, Gossypium hirsutum
  Clone ID: GOSHI-09MAY01-C10534_1.pep
MPQRHSKNNNDLAFFTYDEKRKLGYGTQKERLGKDSIKPFDACCLCLKPFIDPMSCQKGHVFCKECILECLLAQKKDIQRKLAAHAAQQKQEEEEEEERLILEKARELDAFDQQNHGALPQYNDKNHSRDKNGFHGANSVKVTSFEEEALRTMKAFWLPSATPEAPIKVDTPSTSTVCPEGKEKLKLKTLFPIYFTEDESEQKKSNLDKTYICPSCKVTLTNTLSLVAVSSCGHVFCKKCADRFMAVDKVCLVCDKPCRERNLVT

SEQ ID NO: 76101 - protein, 181 aa, Gossypium hirsutum
  unsure (1)..(181): unsure at all Xaa locations
  Clone ID: AI726900.1.pep
MPQRHSRRGGEGAFFTYNKKRKLRYGTQKERLXKDSIKPFDACCLCLKPFIDPMSCQKGHVFCKECILECLLAQKKDIQRKLAAHAAQQILYEEEDKDRLILETARDLDAFDQQNHGALPPYNQQIPADTRMVSTEHTVSKXTSFDYEALRTMTAFWLRSPTPESPIRVVSXSTFTFCPLG

SEQ ID NO: 76102 - protein, 127 aa, Gossypium hirsutum
  Clone ID: GOSHI-09MAY01-C10484_1.pep
SECNPLFSFQLVQYNFAGQESSSAGIIFRSGSIKTLFSLLLTLPTLHEPNDGLRSSSRASGGKVESEEDGTLRQGTFSDSSAIKLEFLIVSMFKSSLILFKFSFVARCPLQIARVDAISFSKKNLSF

SEQ ID NO: 76103 - protein, 533 aa, Gossypium hirsutum
  Clone ID: GOSHI-09MAY01-C10454_1.pep
MTEASKKSMNPEPVHVQSTASSNETRSNNNLPNFLLSVRLKYVKLGYHYLISNAMYLMLVPLLAIASAHLSTLTVLDFVQLWDQLKFNLVSVTLCSGLLVFLATLYFMSRPRKVYLVDFACYKPEPERTCTREIFMERSNLTGSFTEENLAFQKKILERSGLGQKTYLPEAVLRVPPNPCMAEARKEAEAVMFGAIDELVEKTGVNANDIGILVVNCSLFNPTPPLSAMIVNRYKLRGNILSYNLGGMGCSAGLISIDLAKQMLQVQPSSYALVVSMENITLNWYFGNDRSMLVSNCLFRMGGAAILLSNRSSDRRRSKYQLIHTVRTHKGADDKCHNCVFQREDDTKRIGVSLSKDLMAVAGEALKTNITTLGPLVLPMSEQLLFFITLVARKVFKMKIRPYIPDFKLAFEHFCIHAGGRAVLDELEKNLELSDWHMEPSRMTLYRFGNTSSSSLWYELAYSEAKGRIRKGDRTWQIAFGSGFKCNSAVWKALKTINPAKEKSPWIDEIDEYPVYVPKVAPVSSSSSSQKTI

SEQ ID NO: 76104 - protein, 148 aa, Gossypium hirsutum
  Clone ID: GOSHI-09MAY01-C10464_1.pep
MLLRPVSSLCVQAKQGDNLICSLKGSPVTSSSSSALSFLPRKHGRALGVYASIGTDNHALTGVVFQPFEEVKKEELDIPIAPHLSLARQKYADACEAAINEQINVEYNVSYVYHSLYAYFDRDNVALKGFCKFFKESSEEERKHAEKL

SEQ ID NO: 76105 - protein, 127 aa, Gossypium hirsutum
  Clone ID: LIB3585-013-P1-K1-A8.pep
MLLRPVSSLCVQAKQGDNLICSLKGSPVTSSSSSALSFLPRKHGRALGVYASIGTNNHALTGVVFQPFEEVKKEELDIPIAPHLSLARQKFADACEAAINEQINVEYNVSYVYHSLYAYFDRDNVAL

SEQ ID NO: 76106 - protein, 62 aa, Gossypium hirsutum
  Clone ID: LIB3166-047-P1-K1-G7.pep
VKKEELDIPIAPHLSLARQKYADACEAAINEQINVEYNVSYVYHSLYAYFDRDNVALKGFAK

SEQ ID NO: 76107 - protein, 398 aa, Gossypium hirsutum
  Clone ID: GOSHI-09MAY01-C10404_1.pep
MSTAGEMEPLTSGASNRIIPILKTLRTPLIFIQSVILYILILLFPRRRQFRTDVAAVDGATSGPQSPAKTARLKSLWRLEEEDTLRRRSLAEGLNMGFETEDGEIQYRWNTSLFFGVRRNALFSRSWLPATGELKGILIIIHGLNEHSGRYAQFAKQLISCNFGVYAMDWIGHGGSDGLHGYVPSLDHVVADTGAFLEKIKSENPGVPCFLFGHSTGGAVVLKAASHPRIERMLEGVVLTSPTLRVKPAHPIVGAVAPLFSLVAPKLQFKGANKKGIPVSRDPAALLAKYSDPLVYTGPIRARTGHEILRISSYLMRNFKSVTVPFFVLHGTADKVTDPLASQDFYNEASSTFKDIKLYEGFLHDLLFEPEREEIGQDIINWMEKRLGTIAENIDHIW

SEQ ID NO: 76108 - protein, 87 aa, Gossypium hirsutum
  Clone ID: LIB3165-048-Q1-K1-B1.pep
ILVGILIIIHGLNEHSGRYAQFAKQLISCNFGVYAMDWIGHGGSDGLHGYVPSLDHVVVDTGAFLEKIKSENPGVPCFLFGHSTGGA

SEQ ID NO: 76109 - protein, 132 aa, Gossypium hirsutum
  Clone ID: GOSHI-09MAY01-C10794_1.pep
LRRILTSTTNRSILLIEDIDCITTASHDRTKVIEKCEAEEDEDENKRPFSINYRVTLSGLLNFIDGLWSSCGNERIIIITTNHKEELDPALLRPGRMDVHIYMGYCSPAGFRKLAASYLGIKDDKLLKWHNN

SEQ ID NO: 76110 - protein, 129 aa, Gossypium hirsutum
  unsure (1)..(129): unsure at all Xaa locations
  Clone ID: LIB3166-030-P1-K1-D4.pep
FRPWKRGSLFFGPPGTGKSXLVAAIANYMRYNVYDLQFQSVRNDSDLRRVLTSTTNRSILLIEDIDCSTKVTNDRTKVKENCEEEENDELKHPYGTDPGVTLSGLLNFIDGLWSSCGNERIIIFTTNHK

SEQ ID NO: 76111 - protein, 178 aa, Gossypium hirsutum
  unsure (1)..(178): unsure at all Xaa locations
  Clone ID: GOSHI-09MAY01-C10784_1.pep
MGVYLSTPKTEKFSEDGENDRVRYGLASMQGWRSTMEDAHAAYPDLDASTSFFGVYDGHGGKXVVAKFCAKYLHQQVLKNEAYAAGDIGTSVQRAFFRMDEMMRGQRGWRELAILGDKXHKFSGMIEGLIWSPRXGNSNDQVDNWAFREGPTLTFLDPHLGARLCCKSKKHQLFVQCL

SEQ ID NO: 76112 - protein, 101 aa, Gossypium hirsutum
  Clone ID: GOSHI-09MAY01-C10684_1.pep
GISASNFNLEDLKSQAALIHDYDDVPNAEDRDGSNGVVGLSPERMSSEMASNSIASSSQEDGPNDLHDLKSSLAAVPIKPLQALKGCFDIGEDDEDVNSPN

SEQ ID NO: 76113 - protein, 200 aa, Gossypium hirsutum
  unsure (1)..(200): unsure at all Xaa locations
  Clone ID: GOSHI-09MAY01-C10654_1.pep
MADVQDSDGKPCEESLPCTSQKQETRDEMLSRHRREISELQNKEISLKKAAAKGSKAEQKAKKKQVEEEISQLSTNLKAKHAEELASLGYSNGNDKSNMDNLVKAIAGVSVAPQQDHPKPSKGAKRRVKRAQQEAAREQRIQEEQSNIVSDRMIDDEKLEEKLKPLGFTINEIKPDGHXLYRAVEDQLALLSGGSSPYTY

SEQ ID NO: 76114 - protein, 158 aa, Gossypium hirsutum
  Clone ID: GOSHI-09MAY01-C10614_1.pep
HRSPTRSPTRAPTRTPPRPEAQKTRENGIVQKHIKDAVVVDRGQASAVGIETTTESSSKVSIAERNQILNDVQLTDETTKTASDEQIPRECDHIENLEITSLVVGEYVRIDLQDRVDPQKAEIGDVKEIYSGGIEHAGDKTVNNSSEEIIKESVSMED

SEQ ID NO: 76115 - protein, 68 aa, Gossypium hirsutum
  Clone ID: GOSHI-09MAY01-C10194_1.pep
MLSLIFSRSHHFHKKNFQISQIILAFQPSSQKLSDSKSNDSVPPKNLPTSIGHHSFLRSNQNHAQQIS

SEQ ID NO: 76116 - protein, 167 aa, Gossypium hirsutum
  Clone ID: GOSHI-09MAY01-C10184_1.pep
LLSICFPPLFLWSLASKPATLKNIYFQIIANCWSSKELKKGDHIGVVGDHIWCVKEMESGCSKNGGSCPKLLDLIPQEREWHLKGEEERRDGSSQEKKLELRLGPPGENNWSNKNNTERDESLLSLGYFSSMKSNGKQTHKFPCPRTTLLVSFVHSMGQKPPSAADN

SEQ ID NO: 76117 - protein, 48 aa, Gossypium hirsutum
  Clone ID: LIB3166-028-P1-K1-E11.pep
YLHKFRVVSLVPSLLIVNICWFHDVGLHYFELWLSDSFKIIANCWSSK

SEQ ID NO: 76118 - protein, 111 aa, Gossypium hirsutum
  Clone ID: LIB3146-004-P1-K1-E6.pep
LLFCSVSTQSVSYLQSIGFVGPAVALVGLTAAKTPSTASAWLSLAVGLKAFSHCGFLVNLQEIAPHYSGVLHGLSNTAGTFAAIIGTVGAGFFVELVGSFQGFLLLTSILY

SEQ ID NO: 76119 - protein, 126 aa, Gossypium hirsutum
  Clone ID: LIB3166-022-P1-K1-G8.pep
LQQLGTSITLTRKIMQCRGFVGPAVALVGLTAAKTPSTASAWLSLAVGLKAFSHCGFLVNLQEIAPHYSGVLHGLSNTAGTFAAIIGTVGAGFFVELVGSFQGFLLLTSLLYFLAGLFYIKFSTGE

SEQ ID NO: 76120 - protein, 182 aa, Gossypium hirsutum
  unsure (1)..(182): unsure at all Xaa locations
  Clone ID: GOSHI-09MAY01-C10104_1.pep
QTTAPLKKFLVIGPVPGKKXSEITFPILSPDPASNKDAHFLKYPIYVGGNRGRGQIYPDGNKSNNTVYNATATGIVSKIIRKEKGXYEITITDALDGHQVVDIIPPGPELLVSEGESIKLDQPLTINPNVGGFGQGDAEIVLQDPLRVQGLLFFLASIVFAQIFLVLKKKQFEKVQVSEMNF

SEQ ID NO: 76121 - protein, 86 aa, Gossypium hirsutum
  Clone ID: GOSHI-09MAY01-C10124_1.pep
GPVGEELVSWAEQSTYKRRWVSPEEAYKLCRYDWMSEALEKHLRRMERNSNIEKAEKLVEHQMLSAGCSTKPSNLEESFSKCIVQG

SEQ ID NO: 76122 - protein, 260 aa, Gossypium hirsutum
  unsure (1)..(260): unsure at all Xaa locations
  Clone ID: GOSHI-09MAY01-C10094_1.pep
PRPKPFFLTFSLTSFRSISWNQKEMANNNNLEESSPLLSKQVSVEEDEKKNLNVNNSTDVAASPAARTGAGFGWTANGLPLVHGSVVGEPMGRSQWDSSLLACLGRNDEFCSSDVEVCLLGSVAPCVLYGSNVERLGSAPGTFANHCLPYSGLYLIGNSFFGWNCLAPWFSYPTRTAIRRKFNLEGTCEALNRSGGCCLEDEVQREQCESPCDFATHVFCHACALCQQGRELRRRLPHPGFFAHXVLVIIPPVEQTMGRG

SEQ ID NO: 76123 - protein, 195 aa, Gossypium hirsutum
  Clone ID: GOSHI-09MAY01-C10054_2.pep
QEFDLRCAIPLRFYHAALNFEICSGVIFPWGSGFLNRTTSIPERFFLGGNLSPVCALGGPKASWGFKTRATSSYEPKSQIDDEIADVASRDSLGGNFTVTALADLSFDLPTRWFRERGIHAHVFAYAGNVAMLTENEFRSFSMQKFIGSLRSSAGIGIVIPTNRFCMELNYCYILKKFANDHAKAGFWLTFSRPS

SEQ ID NO: 76124 - protein, 78 aa, Gossypium hirsutum
  Clone ID: GOSHI-09MAY01-C10054_1.pep
RPRVRRRVGQCMGEWVLKQDYIHTRKILLTRQSIYSTGFKGGQKHHGDLRQGQRVPMNLKVRLMMRSLGKIRWLKRPR

SEQ ID NO: 76125 - protein, 71 aa, Gossypium hirsutum
  Clone ID: LIB3148-053-Q1-K1-H2.pep
PRVREKKVVNRCSGCRKRVGVTGFRCRCGELFCADHRYSDRHDCSYDYKTVGREAIARENPVVKAAKIIKV

SEQ ID NO: 76126 - protein, 124 aa, Gossypium hirsutum
  Clone ID: GOSHI-09MAY01-C10044_1.pep
NSEENEYLKKRSQILKGQISVQVPTKLMQKPMKRQRLTPVPPPSVHRLSPEHEISIMVAALKNVVAGYTPTSTSAVSVSAVDIPSDFVPLVTSTVSTAGISRDFDDALFQANEVTDRCHVCRFD

SEQ ID NO: 76127 - protein, 132 aa, Gossypium hirsutum
  Clone ID: GOSHI-09MAY01-C10074_1.pep
GNDSQGFDGFKHYYTPGKRGTGSRSSDQERKKGVPWTEEQHRLFLMGLKKYGKGDWRNISRNFVTTRTPTQVASHAHKYFIRQVTGGKDNRRSSIHDITTVNVPDTPSSSPDRCKHSSSSDSSAVIQAQQQA

SEQ ID NO: 76128 - protein, 228 aa, Gossypium hirsutum
  unsure (1)..(228): unsure at all Xaa locations
  Clone ID: GOSHI-09MAY01-C10064_1.pep
MFTLNLIPSTPITFSKSTHQYFPIKRIQSPKNLAESPVFFTKSTPLNFNKIHACPFGRSQALSTKTTHLGKILENPSRKAGSHVPKAAASSESNPEGEAESVEAAAAAKSKAKALQLALVFGFWYFQNIVFNIYNKKALNVFPFPWLLASFQLFAGSIWMLVLWSLKLQPCPKITKPFIIALLGPAFFHTISHISACVSFXKVAVSFTHVIKSSEPCVSVVFSSFLVI

SEQ ID NO: 76129 - protein, 217 aa, Gossypium hirsutum
  Clone ID: GOSHI-09MAY01-C10014_1.pep
MSTSPSVTELQVENFTFPPTVKPPGSTKTLFLGGAGERGLEIQGKFIKFTAIGVYLEDSAVNCLGVKWKGKSAVELTESVEFFRDVVTGDFEKFIRVTMILPLTGQQYSEKVSENCVAIWKSLGIYTDAEAKAIEKFIEVFKDENFPPGSSILFTISGQGSLTIGFSKDSSVPEGGKAVIENKLLANSVLESIIGKNGVSPAAKESLASRLSPLFND

SEQ ID NO: 76130 - protein, 96 aa, Gossypium hirsutum
  Clone ID: GOSHI-09MAY01-C10374_2.pep
EIQRVSENFQRSFLEALIRLGGKTREAAVNSSSHPLEKRKSPETGESFQPNKSRRTMEGIKNLNFIQESYLRIQSNLKYLSEERQCRTISMINYLD

SEQ ID NO: 76131 - protein, 73 aa, Gossypium hirsutum
  Clone ID: GOSHI-09MAY01-C10374_1.pep
EIQRVSENFQRSFLEALIRLGGKTREAAVNSSSHPLEKRKSAETGESFQPNKSRRTMEGVDCKFFYLPTDNSR

SEQ ID NO: 76132 - protein, 256 aa, Gossypium hirsutum
  unsure (1)..(256): unsure at all Xaa locations
  Clone ID: GOSHI-09MAY01-C10324_3.pep
PLFRPRVRPPSARAFYRPCGAAEAIEKILTHNSKGIKFQILSNPEFLAEGTAIQDLFNPDRVLIGGRETPEGNKAVQALKEVYAHWVPEERILTTNLWSAELSKLAANAFLAQRISSVNAMSALCRASGADVTQVSYAVGKDTRIGPKFLNASVGFGGSCFQKDFLNXLFTFCECYGLPVVAVYLLVFLLYQCLLYILILSPFLFFNVYLFLFFFYFFNNSFFLFLFLSFLSFIFYSLYFSLFFFLFFYFSFFFFF

SEQ ID NO: 76133 - protein, 137 aa, Gossypium hirsutum
  Clone ID: GOSHI-09MAY01-C10324_2.pep
MVKICCIGAGYVGGPTMAVIALKCPSIEVAVVDISVPRINAWNSDQLPIYEPGLDAVVKQCRGKNLFFSTDVEKHVREADIVFVSVNTPTKTRGLGAGKAADLTYCESAARMIADVSKSDKIAVRETTVPVKTAEAI

SEQ ID NO: 76134 - protein, 479 aa, Gossypium hirsutum
  Clone ID: GOSHI-09MAY01-C10324_1.pep
MKICCIGAGYVGGPTMAVIALKCPDIEVAVVDISVPRIAAWNSDQLPIYEPGLDGVVKECRGRNLFFSTDVEKHVREADIVFVSVNTPTKTRGLGAGKAADLTYWESAARMIADVSKSDKIVVEKSTVPVKTAEAIEKILTHNSKGIKFQILSNPEFLAEGTAIQDLFNPDRVLIGGRETPEGNKAVQALKEVYAHWVPEERILTTNLWSAELSKLAANAFLAQRISSVNAMSALCEATGADVTQVSYAVGKDTRIGPKFLNASVGFGGSCFQKDILNLVYICECNGLPEVAEYWKQVIKINDYQKNRFVNRVVSSMFNTVSNKKIAILGFAFKKDTGDTRETPAIDVCKGLLGDKARLSIYDPQVTEDQVQRDLSMNKFDWDHPLHLQPMSPTTVKQVSCVWDAYEATKDAHGICILTEWDEFKKLDFKRIYDNMQKPAFVFDGRNIVNADELREIGFIVYSIGKPLDPWLKDMPAVA

SEQ ID NO: 76135 - protein, 62 aa, Gossypium hirsutum
  Clone ID: LIB3493-034-P1-M1-C4.pep
LGTHPLHLQPMSPTTVKQVSCVWDAYEATKDAHGICILTEWDEFKKLDFKRIYYNMQKPAFV

SEQ ID NO: 76136 - protein, 59 aa, Gossypium hirsutum
  Clone ID: LIB3083-099-Q1-L1-H2.pep
VSSSVALNLWSLFEEQVLRLRSKKRKWCKSGALTLLMLSVLAGRESRLVADQLPPLLLI

SEQ ID NO: 76137 - protein, 247 aa, Gossypium hirsutum
  Clone ID: GOSHI-09MAY01-C10274_1.pep
GARALDLIEQAEVEVERLDQLKSSRMKELAFKRQVELEEIFAHAHIDIDPEAAREKIMALIDSGNVEPAELLADMDNQIAKAKEEALSRKEILDRVEKWMSACEEESWLDDYNRDDNRYNASRGAHLNLKRAEKARILVNKIPGMVDTLVAKTRAWEEDRGISFKYDGVPLLAMLDEYAMLRQEREEEKRRLRDQKKFGEQQNTEQEPIFGSRSTPARPASTKKVVGPRTNGTPSRRLSLSASQNGS

SEQ ID NO: 76138 - protein, 111 aa, Gossypium hirsutum
  Clone ID: uC-gsronu33B038b09b1.pep
IAARMRVAANEKAEAEKILQIKRAEGDAESKYLAGLGVARQRQAIVDGLRDSVLAFSENVPGTSSKDVMDMVLVTQYFDTMKEIGASSKSNSVFIPHGPGAVRDIASQIRD

SEQ ID NO: 76139 - protein, 129 aa, Gossypium hirsutum
  unsure (1)..(129): unsure at all Xaa locations
  Clone ID: LIB3166-023-P1-K1-D6.pep
FNLVIRASVPKLDLDAVLEQKNHLARAVEKELEKAMSHYGYEMVQTLMGIXPDEHVKRXMDEINAAARMKVAANEKXEAEKILQIKRAEGDAESKYLAGLGVARQRXAIVDGLRDSVLAFSENVPGTSS

SEQ ID NO: 76140 - protein, 97 aa, Gossypium hirsutum
  Clone ID: GOSHI-09MAY01-C10204_1.pep
MVDSNKSSGPPEETPSHNPNGNVPSESDLALDEITEKVQESLGLEKRHKFWESQPVGQFKDLGDTSLPEDPIEAPTPLSEVKQEPYNLPTMYEWITC

SEQ ID NO: 76141 - protein, 111 aa, Gossypium hirsutum
  Clone ID: GOSHI-09MAY01-C11954_4.pep
SSYVLLSPVPAPSAAVPLRNFDDFLVRRRSSNLRLNLSCKFPLRSIRMEISDNCTPLSANNESRGTLVVFEGLDRSGKTSQCGRVVSYLEGMGHSVEIWRFPDRTTSVGQM

SEQ ID NO: 76142 - protein, 177 aa, Gossypium hirsutum
  Clone ID: GOSHI-09MAY01-C11954_3.pep
MPALVRVSKAWNFGVLAVRRSLNLGLNISCKRSVRSIRMENGNNCNLMGASNESRGALVVFEGLDRSGKTSQCGKLLSYLEGMGHSVELWRFPDRTTSVGQMIFRISGLYNPSWIDHHQSLHLLFSANRWEKRSMMEAKLKAGTTLIVDRYSYSGVAFSSAKGLDFEWCKAPENGLI

SEQ ID NO: 76143 - protein, 210 aa, Gossypium hirsutum
  Clone ID: GOSHI-09MAY01-C11954_2.pep
WLHFISVRSIRMENGNNCNLMGASNESRGALVVFEGLDRSGKTSQCGKLLSYLEGMGHSVELWRFPDRTTSVGQMISAYLTNKSQLDDHTIHLLFSANRWEKRSMMEAKLKAGTTLIVDRYSYPGVAFSSAKGLDFEWCKAPEIGLIAPDLVVYLDIPPEKAAERGGYRGERYEQLEFQRKVAQHYKLRKDSSWKVIYMYMLAIDESFLC

SEQ ID NO: 76144 - protein, 277 aa, Gossypium hirsutum
  Clone ID: GOSHI-09MAY01-C11954_1.pep
WLQFLSVCSISRNITYACSSFSVSKALNFDDFLVRRRSLNLRLNLSSEFPLRSIRMEISDNCTPLSANNESRGALVVFEGLDRSGKTSQCGRLVSYLEGLGHSVELWRFPDRTTSVGQLISAYLTNKSQLDDHTIHLLFSANRWEKRSMMETKLKAGTTLIVDRYSYSGVAFSSAKGLDFEWCKAPENGLIAPDLVVYLDIPPEKAAERGGYGGERYEQLEFQKKVAQHYKLLEDSSWKMIDASQCIEDVEKQVEEIVLEHVVTCQKGKPLSSLWSC

SEQ ID NO: 76145 - protein, 83 aa, Gossypium hirsutum
  Clone ID: LIB3083-069-Q1-L1-E3.pep
NLRGHKGARELANWVKEGNLVFLSCAGNGFAFYKVSIVFPIKTLSFSVFLFLSNGCISSQEFWSFGREEVIEFGIEYFLQAFS

SEQ ID NO: 76146 - protein, 113 aa, Gossypium hirsutum
  Clone ID: uC-gsflnu33B080e10b1.pep
MPKSKKIEGQRLVMKERILGDNESDAAGGKEIRNLDHVLSQFVYEGDHGEETGLKEPEIARIRIGKRKIGDVPVRKVLPYFQGNCQRQLMSITQVVYKGCSNEKLFEEGENFT

SEQ ID NO: 76147 - protein, 61 aa, Gossypium hirsutum
  Clone ID: LIB3166-045-P1-K1-C12.pep
PTTLNYQCRISREFRGRIPHLSHNALKCHFLRHLSFLMPESKKIEGQRLVMKERILGDLEK

SEQ ID NO: 76148 - protein, 245 aa, Gossypium hirsutum
  unsure (1)..(245): unsure at all Xaa locations
  Clone ID: GOSHI-09MAY01-C11804_2.pep
MRSSLETSVIPAFEMSCKSMSGEIGVTCDPRLREHTRTAHQQSENSHSSLAAALQEAIKSATSITQTLSGELANAQRNLLAIAAAGGNSNAGNPLVSQLSNGPLTHLHEMPDAHLDPTKQSARLIAEKKYEQAFTSALHRSDVSIVSWLCSQVNLQGILSMKPCPLSQGVLLSLFQQLAFDVNKETSRKLVWMTDVAVAIIPSYPTISMHVXPIFKQVFQIGDHLQSIVPHLPQKPAAYGFLRLS

SEQ ID NO: 76149 - protein, 181 aa, Gossypium hirsutum
  Clone ID: GOSHI-09MAY01-C11804_1.pep
ANAQRNLLAIAAAGGNSNAGNPLVSQLSNGPLTHLHEMPEAHLDPTKELARLIAEKKYEEAFTSALHRSDVSIVSWLCSQVNLQGILSMKPCPLSQGVLLALFQQLACDINKETSRKLVWMTDVAVAIIPSDPTIAMHVVSIFRQVSQIVDHLQSMSTTSASETASIRVLKFVINSVLNCK

SEQ ID NO: 76150 - protein, 184 aa, Gossypium hirsutum
  Clone ID: AI726050.1.pep
ADYNRLKALPEAVGKIETLEVLSVRYNNIKQLPTTMSSLANLKELDVSFNELESLPESLCFATTLVKMNVGNNFADMRSLPRSIGNLEMLEELDISNNQIRVLPDSFRMLTRLQVLRVDQNPLEVPPRHIAEQGAQAVVRYMADLVEKRDVKLQPVKQKKSWAQICFFSKSNKRKRNGMDYVKA

SEQ ID NO: 76151 - protein, 56 aa, Gossypium hirsutum
  Clone ID: LIB3166-040-P1-K1-G7.pep
SIGNLEILEELDISNNERRVLPDSFRMLTRLQVLRVDQNPLEVPPRHIAEQGAQVI

SEQ ID NO: 76152 - protein, 143 aa, Gossypium hirsutum
  Clone ID: GOSHI-09MAY01-C11554_4.pep
PTRPENASVGKTTYVHCKAGRGRSTTIVLCYLVEHRHMTPDAAYEYVRSIRPRVLLAPAQQQAVQDYYLDKVNDNGICGDWCLMIMQNTLGAAYSQASDHLCYRLSRQRPAEVRHKSALLVLKNCEETGLALGFSFLLVAQGN

SEQ ID NO: 76153 - protein, 257 aa, Gossypium hirsutum
  Clone ID: GOSHI-09MAY01-C11554_3.pep
MHIEELKEGEQQDQDQSQLCEDRLVVWDAKRVLVGAGARALFYPTLLYNLVRNKIQSEFRWWDRVDEFILLGAVPLPPPVPRLKDLGVSGVVTLNEPYETLVPTSLYHAHNIHHLVIPTRDYLFAPSFADICQAVDFIHDNASVGKTTYVHCKAGRGRSTTIVLCYLVEHRHMTPDAAYEYVRSIRPRVLLAPAQQQAVQDYYLHKVNNNGICGDSCSMIIKKTLVVPEKQDIAVFDDGSVVVVTESDLDGYDASFD

SEQ ID NO: 76154 - protein, 181 aa, Gossypium hirsutum
  unsure (1)..(181): unsure at all Xaa locations
  Clone ID: GOSHI-09MAY01-C11554_2.pep
LLSSCDSNSQSRHEVTRCRAGRGPRTSTVPRASWGNNGHMTPDAAYEYVRSIRPRVLLAPAQQQAVQDYYLHRVNNNGICGDSCSMIMKKTLVVPAKQDSAVFDDGSVVVVTESDLDGYDASFAQMXLSSKMLDEGSLAGRLQFASQAAMTRLSCLWLRCRAEQKASRKLLSSLGIDIRVY

SEQ ID NO: 76155 - protein, 68 aa, Gossypium hirsutum
  Clone ID: GOSHI-09MAY01-C11554_1.pep
MTTSRRLAERKVEKFQKNITKRGAVPETTTKKGKDYPVGPVLLGFFIFVVIGSSLFQIIRTATSGGMA

SEQ ID NO: 76156 - protein, 110 aa, Gossypium hirsutum
  Clone ID: uC-gsflnu33B051c02b1.pep
PRVRSVIMTTSRRLAERKVEKFQKNITKRGAVPETTTKKGKDYPVGPVLLGFFIFVVIGSCKDSFFAIIFPYSMCMDNLSGFFVGKCNMFSFSWCSVNFIIVIFKDICLN

SEQ ID NO: 76157 - protein, 68 aa, Gossypium hirsutum
  Clone ID: uC-gsflnu33B058b05b1.pep
MTTSRRLAERKVEKFQKNITKRGAVPETTTKKGKDYPVGPVLLGFFIFVDIGSSFFQIIRTATSVGMA

SEQ ID NO: 76158 - protein, 68 aa, Gossypium hirsutum; identical to SEQ ID NO: 76155
  Clone ID: LIB3148-022-Q1-K1-F12.pep

SEQ ID NO: 76159 - protein, 48 aa, Gossypium hirsutum
  Clone ID: LIB3585-003-P1-K1-A12.pep
MTTSRRLAERKVEKFQKNITKRGAVPETTTKKGMDYPAGPVLLEALHI

SEQ ID NO: 76160 - protein, 73 aa, Gossypium hirsutum
  Clone ID: LIB3543-043-Q6-K6-D8.pep
VCLFFVILFFFFSSPLFFFFFFFFFFFFFFGSTTNISVFCPSHCINEKSSRQSTMTRQRKGRSYSNSELSQLS

SEQ ID NO: 76161 - protein, 462 aa, Gossypium hirsutum
  Clone ID: GOSHI-09MAY01-C11544_1.pep
PRPPSVRPRVRVNMNLDWRESLPHPDERVEYEFWTNSNDECGPKCDSQIEFVKNFKGAAQILERKGYTMFTPHYITWYCPEAFILSKQCKSQCINHGRYCAPDPEQDFSKGYDGKDVVVQNLRQACLFKVANESGKPWLWWDYVTDFAIRCPMKEKKYNKECADKVIQALGVDLNKVDKCIGDTEADVDNPVLKAEQDAQIGKGSRGDVTILPTLVINNRQYRGKLDRGAVLKAICAGFQETTEPAICLTEDIQTNECLENNGGCWQDKSANITACRDTFRGRVCECPLVNGVKFSGDGYTHCEASAALRCEINNGGCWRETREGRTYSACIDDHSHGCKCPYGFRGDGVKSCEDVDECKEKLACQCPGCKCKNTWGSYECSCSGGSLYMREHDTCISKNVKTEVSWGSVWVIILGLVAAGAGGYAIYKYRIRRYMDSEIRAIMAQYMPLDNQPNNVHHPDI

SEQ ID NO: 76162 - protein, 168 aa, Gossypium hirsutum
  Clone ID: GOSHI-09MAY01-C11574_1.pep
MLVYQDLLTGDELLSDSFPYKEIENGMLWEVEGKWVVQGAVNVDIGANPSAEGGDDDEGVDDQAVKVVDIVDTFRLQEQPAFDKKQFVTFMKRYIKNLTPKLEPEKQESFKKNIEGATKFLMSKLKDLQFFVGESMHDDGSLVFAYYKDGATDPTFLYFAYGLKEIKC

SEQ ID NO: 76163 - protein, 87 aa, Gossypium hirsutum
  Clone ID: LIB3166-045-P1-K1-H8.pep
MLVYQDLLTGDELLSDSFPYKEIENGMLWEVEGKWVVQGAVNVDIGANPSAEGADDDEGVDDQAVKVVDIVDTFRLQEQPAFDKKQF

SEQ ID NO: 76164 - protein, 154 aa, Gossypium hirsutum
  Clone ID: GOSHI-09MAY01-C11564_1.pep
NMENERKKRKMGNEEEKDDEDEDEDDDEQEKVDKFFALIRSTREMRDRLRNAAVPNGPKEEEYQKKKQEDKAVVVGGGGVGQWNPKFQAEDFMEGSISRSGNNSLGLNVAGPSSSKVQREPGKKEPRTTAEKVEVVWTLSFLYLCSGLSWCFCM

SEQ ID NO: 76165 - protein, 65 aa, Gossypium hirsutum
  Clone ID: GOSHI-09MAY01-C11434_3.pep
RVIPLIFFIKLKIKNIYNFLGHAISFVSKVQWTTRENRKPAERHSLLLTSNPPFLVIIFPLHSYL

SEQ ID NO: 76166 - protein, 204 aa, Gossypium hirsutum
  Clone ID: GOSHI-09MAY01-C11434_1.pep
PTRPRKFSYCLVDRSASSKPSSLVFGDAAIPRGALFTPLLTNPKLDTFYYVELLGISVGGTRVPKISPSLFKMDQDGNGGVIIDSGTSVTRLTQPAYTATRDAFRLGATNLKRAPDFSLFDTCFDLSGQTSAGVPPLVLHFRGADLSLPATNYLIPVDSSGTFCFAFAGTMNGLSIIGNIQQQGFRVAYDLAGSRVGFSPRGCA

SEQ ID NO: 76167 - protein, 70 aa, Gossypium hirsutum
  Clone ID: LIB3493-020-P1-M1-D2.pep
PTLVLHFRGADLSLPATNYLIPVDSSGTFCFAFAGTMNGLSIIGNIQQQGFRVAYDLAGSRVGFSPRGCA

SEQ ID NO: 76168 - protein, 220 aa, Gossypium hirsutum
  Clone ID: GOSHI-09MAY01-C11424_2.pep
PGGPTRPERTCSSIKFVRLCSEPDQRAGGPTANSGVAPDAAEIQLKSPNWLFGQRKFEEVGSGPKVSVREIKNGGANGEMKLDDFCDLNWLSSYVDDEQDIFQRYLSMTSVDEANGWYGGTLLGDQDESSEIYRHYAELCQGPAMEPFQHDLEREKHYTDVLQMNTIDVVDDASVEAEMAEALKEYDLIGADLGIFPVSCKSFTEDPSRLTRWIIVEEKM

SEQ ID NO: 76169 - protein, 57 aa, Gossypium hirsutum
  Clone ID: LIB3582-038-P1-K1-G5.pep
ANGEMKLDDFCDLNWLSSYVDDEQDIFQRYFRIIHSCLPQEECMIFLFSQHEGIILV

SEQ ID NO: 76170 - protein, 338 aa, Gossypium hirsutum
  Clone ID: GOSHI-09MAY01-C11784_1.pep
MHQFPVLLSLIAVSVLLMVTPVIGYRPWPHLKPNSSDLTFGSSKKFEGSSEFVQMRYHMGPVLTANITVHIVWYGRWQKSQKKIIREFINSISAVDAKRPSVAGWWKTVQLYTDQTGANISHTVHLGEEKNDRFYSHGKKLTRLSIQSVIKSAVTASTKPLPINPSSGLFLLLTSDDVYVQDFCGQVCGFHYFTFPSIVGYTLPYAWVGNSAKLCPGVCAYPFAVPKYMTGFKPLKSPNGDVGVDGMISVIGHEIAELATNPLVNAWYAGQDPVAPVEIADLCEGIYGTGGGGSYTGQLFNDKDGATFNMNGIRRRYLVQWVWNHILNYCTGPNALDQ

SEQ ID NO: 76171 - protein, 91 aa, Gossypium hirsutum
  unsure (1)..(91): unsure at all Xaa locations
  Clone ID: LIB3189-025-P1-K1-A7.pep
YKLWQMRHRMQRRLTDCIRALIVRIGSWERSRKKIIREFMNSIYGVDAKHPYVAACXKTVQLYTDQTGANIFHTVHLXGKEKNDRFYSHRK

SEQ ID NO: 76172 - protein, 216 aa, Gossypium hirsutum
  Clone ID: GOSHI-09MAY01-C11754_1.pep
MPTFLFRIFLLYNLLLDYLVPRKLKSFLSPSCTTTTPFVSVGGETEKNPSPAVALASVSPRCPLKRMDAAELKRVFQLFDKNGDGSISKKELNDSLENMGICIPDPELTQMIEKIDVNGDKCIDIDEFSELYRSIMDNKDEEEDMKEAFNVFDQNGDGYISVEELRSVLESLGLKQRIGIEDCSTMITNVDVHRDRRVNFMEFNHMIKGGGFTAMA

SEQ ID NO: 76173 - protein, 350 aa, Gossypium hirsutum
  Clone ID: GOSHI-09MAY01-C11714_1.pep
DYLVKSGRSTDCCTDYLKGNCRRGASCRFAHDGATDGFSKRTTNEISSERENTKRNRIRTPDRDGEREARRSSDIPCKFFASGNCHNGKYCRFSHHGQARASPDRRSRGDKGVWCPSSINVDRLQDGPTLKDTDASFNVNKSWNAPGRSDANVINEAEIPWTGPKWSDLDASNDANNSWTGSKWSDAEASNDANNSWTGSKWSDTGAYLGATKFSKDTIAKNGASEPRFSNWSMDERWRHNYDVSGKNIEADVQYKTVDIDKDEQTPTKIENSGVNIGVSEPKGAEESLGDMEMSPEWNYKIKSSVKKELTHGSKPSLVETLLHSQERNISEAASGQVHDGLAALQPMSN

SEQ ID NO: 76174 - protein, 233 aa, Gossypium hirsutum
  Clone ID: GOSHI-09MAY01-C11704_1.pep
MESQIPRKPRILCLHGFRTSAEIFKRQVLRWPAAVLDKLDLIFLDAPYPAQGKSGVERFFDPPYYEWFQATEDFTEYTNFEECLAFIEDNMMKSGPFDGFLGFSQGALLSAALPGMQRDGLALTRVPRIKFLIIISGAKFGGPKFVHHKLTSNAYSSPLECPSLHIIGETDFMKQESISLLEYFVDPFVINHPKGHTIPELDEKSTEVMLGFIERIQKTMATAVEQIYLNAET

SEQ ID NO: 76175 - protein, 230 aa, Gossypium hirsutum
  unsure (1)..(230): unsure at all Xaa locations
  Clone ID: GOSHI-09MAY01-C11624_1.pep
MEITLIFVFAGSQMVVVEADGNHVQPFAVNDLDIYSGESYSVLLKTDQNPYKNYWVSIGVRGRDPKTNQALTLLSYSATPASKLPTTQPPVTPRWDDYNHSKAFTKSIYALMGSPQPPKTYDRRIILLNTQNRLNGFVKWAINNVSLVLPSTPYLGSIKFGLNNAFDQKSPPDNYDSSYDIMKPAPNQNTTQGXGFTSITLNTTXDVILQNANALSKRIVSENTSHGHFA

SEQ ID NO: 76176 - protein, 150 aa, Gossypium hirsutum
  Clone ID: uC-gsronu33B162e12b2.pep
VQYNCSLAAKFRNSSISQCKFEGNEKCAPQVLKVRPNKTYRLRIASTTALASLNLAIEGHKMVVVEADGNHVQPSAVNDLDIYSGESYSVLLKTDQNPYKNYWVSIGVRGRDPKTNQALTLLSYSATPASKLPTTQPPVTPRWDDYNHSK

SEQ ID NO: 76177 - protein, 64 aa, Gossypium hirsutum
  Clone ID: GOSHI-09MAY01-C11184_1.pep
MSSKQGGKAKPLKQPKAEKKEYDEHDLANIQKKKEEEKALRELRAKASQKGSFGGSGLKKSGKK

SEQ ID NO: 76178 - protein, 69 aa, Gossypium hirsutum
  unsure (1)..(69): unsure at all Xaa locations
  Clone ID: LIB3149-056-Q1-K1-E10.pep
VRAXYFLCSSVSFYLXRISLQTLILNSQSCXSKQGGKAXLLKQPKSEKKEYDEHDLATIRKEEERRPKS

SEQ ID NO: 76179 - protein, 57 aa, Gossypium hirsutum
  Clone ID: uC-gsronu33B087b04b1.pep
FHSEFAIKNIVCNFVTYNLINSSSTFVFFVYTFVNRLLLWFKSQFFMPSPLSTACTY

SEQ ID NO: 76180 - protein, 229 aa, Gossypium hirsutum
  Clone ID: GOSHI-09MAY01-C11164_1.pep
MTSIVQGFSKSLAMTVLSEIGDKTFFAAAILAMRHPRKLVLLGCLAALIVMTILSAVVGWAAPNLISRKWTHHITTLLFFGFGLWSLWDAFMENGEAEELAEVEAKLDADWKANPGTVKGGNKADDDSKKERQPFLTQFFSPIFLKAFSITFFGEWGDKSQLATIGLAADENPFGVVLGGILGQALCTTAAVLGGKSLACQISEKIVALSGGVLFIVFGIQSLLSTVES

SEQ ID NO: 76181 - protein, 165 aa, Gossypium hirsutum
  Clone ID: GOSHI-09MAY01-C11094_1.pep
MGINKLLCWFAVFFFLLGFSACSSISDGVFDSFTSTGRHLLQAKKACPVNFEFLNYTIITSQCKGPKYPPESCCSAFKEFACPYAEQINDLTTECASTMFSYINLYGKYPPGLFASECREGKEGLACPALSPSASASENANGSQQLIRNPWMLVMAAIIAAAMLL

SEQ ID NO: 76182 - protein, 43 aa, Gossypium hirsutum
  Clone ID: uC-gsronu33B039d10b1.pep
LESYTSVGFKKSNRIQVLIYPHQFFFRRLCSRSGFASLRGRVL

SEQ ID NO: 76183 - protein, 150 aa, Gossypium hirsutum
  Clone ID: GOSHI-09MAY01-C11384_1.pep
PRVRSPSTPMVVGSPTTSISRSAGGSPRTTGSTSTGNKGWQASSLSSQLTKNSPSVPSQISSPVGGRSVPSVLGNPHLSSSSSMGTKPQSVLHQQQLQQQKHALHPAQLFFSNAYIQAQAQHSPTTTAASGFFLQRHRNEQQQALPSRSS

SEQ ID NO: 76184 - protein, 207 aa, Gossypium hirsutum
  unsure (1)..(207): unsure at all Xaa locations
  Clone ID: GOSHI-09MAY01-C11354_1.pep
QQLLHHLLSFDMANLPDGVDSMFDSPQFKENLCYFQQLLEERVFSVSAPLVKVXRXKTLQRLALFLLTKSHWVERLPTLKKCDSFQGSMNATGPNAIASNNFVTMKRSRNSQIQNFPESRSLKSPKRVIMKASCENKELIDNDGSCFSPRSLFALPSDRSSLMLDSLHFVDESSDQDLLLDVPSNGSFPQAETASSCFKFWATGKHQ

SEQ ID NO: 76185 - protein, 93 aa, Gossypium hirsutum
  Clone ID: GOSHI-09MAY01-C11364_1.pep
NAKRTSAVALPQPKSAKVLPTISASIPTERKHWSYEQILGDSTEPSPKFKANSSTTLRLPPPRNPVLSHRLLNQIGDIRIPDPISLSPSSFDG

SEQ ID NO: 76186 - protein, 139 aa, Gossypium hirsutum
  Clone ID: GOSHI-09MAY01-C11304_1.pep
ALLLQPINDKDPTDSASASSLSSNLVESVKTICNVTRYPDSCFTALSSLNASTKPDLEAFLDLSLQVAITHLSDLSSSFKSLNDLHSQPALKDCLTLFDDALSRLNDSVSAMKVGTGKELVLTKEKISDIQTWISAAMT

SEQ ID NO: 76187 - protein, 70 aa, Gossypium hirsutum
  unsure (1)..(70): unsure at all Xaa locations
  Clone ID: GOSHI-09MAY01-C11284_1.pep
MALETLNSPTSAPPLLHHDDXLTTTVLSSWTRRKRTQRPRTDNPPTVEEYLALCLLMLAKGTTRNNPSCS

SEQ ID NO: 76188 - protein, 181 aa, Gossypium hirsutum
  Clone ID: GOSHI-09MAY01-C11204_1.pep
MATFAGTTQKCKACEKTVYLVDQLTADNKVYHKACFRCHHCKGTLKLSNYSSFEGVLYCKPHFDQLFKMTGSLDKSFEGTPKTVRVDRSADQVTNSKFSGLFAGTQEKCVACKKTVYPIEKVAVDGTSYHKACFKCTHGGCVISPSNYVAHEHRLYCRHHHNQLFKQKGNFSQLGKHEEAK

SEQ ID NO: 76189 - protein, 136 aa, Gossypium hirsutum
  unsure (1)..(136): unsure at all Xaa locations
  Clone ID: LIB3147-019-Q1-K1-B8.pep
PGPTQSSHPCYHKNNVCKKTLYLDDHNGGDNKVHHKTCFXYHHCKGTLKLRNYSSSKGVLYCKPHFDQLFTMTSSLDKNLEGTPKTVKVYRSTDQVTNNKFSGLFAGTHEKCVACKKTVYPNEKVAGDGTSYHKAC

SEQ ID NO: 76190 - protein, 145 aa, Gossypium hirsutum
  Clone ID: GOSHI-09MAY01-C12954_1.pep
MPPKFDPTQVVDVFVRVTGGEVGAASSLAPKIGPLGLSPKKIGEDIAKETAKEWKGLRITVKLTVQNRQAKVTVVPSAAALVIKALKEPERDRKKTKNIKHNGNISLDDVIEIAKVMRPKSMAKDMKGTVKEILGTCVSVGCTVD

SEQ ID NO: 76191 - protein, 60 aa, Gossypium hirsutum
  Clone ID: GOSHI-09MAY01-C12964_1.pep
MSYLYAKGWMTKGDRIWQMAFKSGCDCNTRYGSSIQPSKNQHMGLGRIASIVFPPISTKL

SEQ ID NO: 76192 - protein, 83 aa, Gossypium hirsutum
  Clone ID: GOSHI-09MAY01-C12904_1.pep
TFTLLFTLSNPFGCLENEGEDRKKIPRKQKEVQNQLLLSSNTFKNSIQLRYGFGERRSKLNQILKSRNIGKHTWFLEVIFAFY

SEQ ID NO: 76193 - protein, 102 aa, Gossypium hirsutum
  Clone ID: GOSHI-09MAY01-C12814_1.pep
RGIDCISERRDCTKGGFFPFLSKKTEFGFLVPPANLKSIKTSQESSKGDFFCFLFCYSVSISTEIRGIERTRDLPELYHVHTVEGSCPIRRSQILGGGCRPE

SEQ ID NO: 76194 - protein, 94 aa, Gossypium hirsutum
  Clone ID: LIB3166-057-P1-K1-E7.pep
QLKWRRGKHCAYILKSVLQTLLRDGLTLMALVTATFMSLDDVAEALILSIASMLVETETDWQTLEHTRSPPESTCMIFIDFSLLVVLKNVTRFS

SEQ ID NO: 76195 - protein, 80 aa, Gossypium hirsutum
  unsure (1)..(80): unsure at all Xaa locations
  Clone ID: GOSHI-09MAY01-C12594_4.pep
FLSFSIFFFPDNLGEDCPVFENLFEFCQIYTGGTIDAARRLNNQLCDIAINWAGGLHYAKKCEAXGFCYINDLVLGILEF

SEQ ID NO: 76196 - protein, 96 aa, Gossypium hirsutum
  unsure (1)..(96): unsure at all Xaa locations
  Clone ID: GOSHI-09MAY01-C12594_3.pep
RRSCPKKCARLPPWSPAIVGTARLRINYQRFVTILGEDSPVFENLFEFCQIXYAGGTIDAARRLNNQLCDIAINWAGGLHHAKKCEASSFCYINDL

SEQ ID NO: 76197 - protein, 145 aa, Gossypium hirsutum
  Clone ID: GOSHI-09MAY01-C12594_2.pep
MRSKDKISYFYDGDVGSVYFGTLITPMKPHRLCMTHHLVLAYDLHKKMEIYRPHKAYPVELAQFHSADYVEFLHRITPDTQHLFSNELARYNLGEDCPVFENLFEFCQIYAGGTIDAARRLNNQLCDIAINWAGGLHHAKECEAS

SEQ ID NO: 76198 - protein, 62 aa, Gossypium hirsutum
  Clone ID: AW536058.1.pep
FPSFSIFFFPDNLGEDSPVFENLFEFCQIYAGGTIDAARRLNNQLCDIAINGLGGLHHAQEV

SEQ ID NO: 76199 - protein, 179 aa, Gossypium hirsutum
  Clone ID: GOSHI-09MAY01-C12584_1.pep
PTRPPFSLVFPQDLVLHSFSHRSTMSATSSYWCYSCSLLFRISASDNATNEAIVCPYCDGGFIEEIESSDDHSPRFPPTYIIPSNRRDSDRNRNPVSRRNRWIPIGHLNINPIIVLRGTTGDESTTATDGNNNNSSEFDFFYDDGSGSGLRSIPTSMSESLMGLGFNRLLAHLSQIEIT

SEQ ID NO: 76200 - protein, 185 aa, Gossypium hirsutum
  Clone ID: GOSHI-09MAY01-C12514_1.pep
RPRGEKIWRFLSEIEDLHWLMDPDDFLRLKSQLMIKSVNETEALCFRSKGLVEITKMSKELKHKVPFILGVEVDPKGGPRIQEAAMKLYAEKQEGNKVFLVQALQAIEGALKRFFYGYKQVLVVVMGSLEAKGNRVVTSSDSGDSLSQIFLEPTYFPSLDAAKTFLGEFWSRGQGASGLTRWMKK

SEQ ID NO: 76201 - protein, 118 aa, Gossypium hirsutum
  unsure (1)..(118): unsure at all Xaa locations
  Clone ID: LIB3197-045-Q1-M1-D6.pep
KVPFILGVEVDPNGGPRIQEAAMRLYSEQKEGNKVSLVQALQAIEAALKRFFFGYKQVLMIVMGSLEAKGNRVVACSDSGDSLSQIFLEPTYFPSLDAAKTFLGEXWSREQGESRSKK

SEQ ID NO: 76202 - protein, 189 aa, Gossypium hirsutum
  unsure (1)..(189): unsure at all Xaa locations
  Clone ID: GOSHI-09MAY01-C12534_1.pep
MCVVNLLLTMDLDDERVAKRRKTMLEDDRGVGQQTTTEMETLPHEIIVDILSRLPITSLVQFKFVCKGWRALAQDPLLADMPTFLESSXTNPCLILHCDFPIRNQLYFVDLSVHNHDKDRVKRLYVPFQTSLPEFDVVGTCNGLLCLSDSLYNEALYVYNPFTMDFMELPKSRQYSDQEVVFGFGFHQK

SEQ ID NO: 76203 - protein, 172 aa, Gossypium hirsutum
  Clone ID: LIB3543-058-Q6-K6-C11.pep
MCSLNLSTMDLDDDKRAKRRKTQTEDEGEHHHHHQPQPTAMETLPNEIIVDILSRLPITSLVQFKFVCKRWRALTQDPVLADMHLSWKADGNDPCLILHCDFPIRNQLYFLDLSAHNQDKDKVKRLYVPFQATMPEFDVVGSCNGLLCLSDSLYNDALYVHNPFTMDCIELP

SEQ ID NO: 76204 - protein, 136 aa, Gossypium hirsutum
  Clone ID: GOSHI-09MAY01-C12404_2.pep
MNHNRQSNDGKHDDDSALSDFLASLMDYTPTIPDELVEHYLPKSGFQCPDGSGIRLVPVATQKFAAEVANDALQHCKARQAAVVKDKREKQQKDKRLILTMDDLSKSLREYGVNVKQQEYFADSPSTGMDPATRDE

SEQ ID NO: 76205 - protein, 136 aa, Gossypium hirsutum
  Clone ID: GOSHI-09MAY01-C12404_1.pep
MNHNRQSNDGKHDDDSALSDFLASLMDYTPTIPDELVEHYLAKSGFQCPDVRLIRLVAVATQKFVAEVANDALQHCKARQAAVVKDKREKQQKDKRLILTMDDLSKSLREYGVNVKQQEYFADSPSTGMDPATRDE

SEQ ID NO: 76206 - protein, 136 aa, Gossypium hirsutum
  Clone ID: LIB3147-024-Q1-K1-G8.pep
MNHNPQSIDGKHDDDSARSGFLASLMDYAPTIPDELVEHYLAKSGFQCPDVRLIRLVAVATQKFVAEVASDALQHCKARQAAVVKDKREKQQKDKRLILTMDDLSKSLREYGVNVKHQEYFADSPSTGIDPASREE

SEQ ID NO: 76207 - protein, 312 aa, Gossypium hirsutum
  Clone ID: GOSHI-09MAY01-C12774_1.pep
YIYIHRDIKPDNLLLDKNGHMKLSDFGLCKPLDCSNLQEKDFSLAKNLSGALQSDGRPAPPKRTQQEQLQHWQRNRRMLAYSTVGTPDYIAPEVLLKKGYGMECDWWSLGAIMYEMLVGYPPFYSDEPMSTCRKIVNWRTHLKFPEEAKLSPEAKDLISKLLCNVEQRLGTKGANEIKAHPWFKGIEWDKLYQMKAAFIPEVNDELDTQNFEKFEEADNQIPSATKSGPWRKMLSSKDVNFVGYTYKNFEIVDDNQLPGIAELKKKSSKPKRPSIKSLFEDESAAAASQPVQGSFINLLPPQHEAPENHYRK

SEQ ID NO: 76208 - protein, 117 aa, Gossypium hirsutum
  Clone ID: LIB3135-057-Q1-K1-D1.pep
AIHPWFKGIEWDKLYQMKAAFIPEVNDELDTQNFEKFEEVDNQIPSAAKSGPWRKMLSSKDINFMGYTYKNVEIVNNNQLPGIAELKKKSSKPKRPSIKSLFGKIFSLLLSLGHCKQ

SEQ ID NO: 76209 - protein, 163 aa, Gossypium hirsutum
  Clone ID: GOSHI-09MAY01-C12714_1.pep
SYLVSSSIRQALDNPLNYARIYLADLLETCIQKVIYLDSDTIVVDDIQELWNINLTGSRTIGAPEYCNANFDKYFTRDFWSSPGFSKVFEGKRACYFNTGVMVMDLGRWRQGDYTREIEKWMRVQKDKRIYELGSLPPFLLVFGGDIEAIDHRWNQHGLGGDN

SEQ ID NO: 76210 - protein, 195 aa, Gossypium hirsutum
  unsure (1)..(195): unsure at all Xaa locations
  Clone ID: GOSHI-09MAY01-C12704_1.pep
KEQAKLSWYYAISXNVNPETWPSKKVLQLYNNAEENIKKGMLMWEELQVQRLRELSKPNEEQNQIMGLDGLFKDISADEVAEQALTMSAQINLLWGAILYERSIMEFKLGLPLWQECLEVAVEKFELAGASTMDIAVMVKNHCSNNNAPEGLGFTIDEIMQAWNETYEAKKWQSRIPSFRLEPLVQRQVSKNYHA

SEQ ID NO: 76211 - protein, 114 aa, Gossypium hirsutum
  unsure (1)..(114): unsure at all Xaa locations
  Clone ID: GOSHI-09MAY01-C12144_1.pep
DSAGLTSQRILLKXFRLQAMEQQAQLKDALNEALAAEVQRLKLTAAEFSGEVHLSNCMAQQLSIDHQMLQLQPQQQQQLNIYQMQQQHQPQQGHDNQSQTQQQNGDASAANESK

SEQ ID NO: 76212 - protein, 493 aa, Gossypium hirsutum
  Clone ID: GOSHI-09MAY01-C12164_1.pep
AERETVSKFVGSHPVSYCLSKKTLSRTVMRSGITMGGVVYSKGLLCSQALSRRGFASDAGLPPRQEIGMPSLSPTMTEGNIARWLKKEGDKVSPGEVLCEVETDKATVEMECMEEGYLAKIIKGDGSKEIKVGEIIAITVEEEGDIAKFKDYSPPASDSGAPAAKDSAAPPPPKQEPVEQPASSPEPKTPKPTSSPSEDRIFASPLARKLAEDHKVPLSSIKGTGPDGHIVKADIEDYLASRGKEVSAPTPKTKDAKLAALDYVDIPHSQIRKVTASRLLFSKQTIPHYYLTVDTCVDKLMDLRSQLNSLQEASGGKRISVNDLVIKAAALALRKVPQCNSSWTDDYIRQYNNVNINVAVQTENGLYVPVIRDADKKGLSSIAEEVKNLAQKAKENSLKPEDYEGGTFTVSNLGGPFGIKQFCAIINPPQSGILAVGSAEKRVIPGSGPDQFKFASFMSVTLSCDHRAIDGAIGAEWLKAFKGYIENPESMLL

SEQ ID NO: 76213 - protein, 207 aa, Gossypium hirsutum
  unsure (1)..(207): unsure at all Xaa locations
  Clone ID: AI730744.1.pep
FIFLLYFPFFFSIALNKFAVIFENHGYASRIINHSKKLRNVPNLLRQDHAVLVRCFSNGAQSSVCKIEAAERKRVSKFVACNHVSSGLPRNNCSRAIMKLGIPTVGVAYSKELTCSQVQSRRGFASNAVSSLPPHQEIGMPSLSPTMTEGNIAKWLKKXGDKVNPGEVLCEFETDKXTVEMECMXEKGYLAXNYKGDGSXDLKVGEI

SEQ ID NO: 76214 - protein, 158 aa, Gossypium hirsutum
  Clone ID: GOSHI-09MAY01-C12034_1.pep
MASCIAPVAISGGSHLQASEICFAKSSTFGKIPSLAVQRKPKASNHRFSVCAEYRDGTKGGGNDFAAGFLLGGALFGTLGYIFAPQIRRSLLNEDEYGFRKAKRPIYYDGGLEKTRQTLNAKIRQLNSAIDNVSSRLRGGNNSPSVPVETDPEVEATM

SEQ ID NO: 76215 - protein, 120 aa, Gossypium hirsutum
  Clone ID: GOSHI-09MAY01-C12294_1.pep
ALNSGHHWNRRKLKANKWIMSVGGQPITNRRISDMGSAKNFTIHSTLKWLNSQLPKHPHLKAFYRSISPRHFLNGDWNSGGSCNNTIPMSIGQEVLQEESTDQSAANAVRGTRIALLDIT

SEQ ID NO: 76216 - protein, 126 aa, Gossypium hirsutum
  Clone ID: GOSHI-09MAY01-C12244_1.pep
PRVRQVLACENLISNDVCRLEVKDNKYVLGEFLEFKGKQEDILALRNIKRSKVSRLVIQKISMFGLAHSKLQVLYSPRDYRSGGASASEWKEVSVRSSTEVIFQPQNSTKVCKFKLSSIMSMSLSA

SEQ ID NO: 76217 - protein, 203 aa, Gossypium hirsutum
  unsure (1)..(203): unsure at all Xaa locations
  Clone ID: GOSHI-09MAY01-C12274_2.pep
DFYLTNCPNIFPQPGCPLFSRATKVIKALSGPKYDGKFLHNVVRDRRGETRLHQTLTNVVIPTFDVMHLQPAIFSSYQVKKKPTLDALLSDICIATSAAPTYPPAHYFKIQTDNGDVREYNLIDGGVAXANNPTLVAMGEVSKEIIKGNPDFXPTKPMDYGEFLVISLGTGSKRRKEINANSREWVCRWLTSVVTPLWSFTKL

SEQ ID NO: 76218 - protein, 222 aa, Gossypium hirsutum
  Clone ID: GOSHI-09MAY01-C12274_1.pep
YQVFPFIAHNYYHKYHLDSIYIDRYIDMEGAKEQLQAPTYGDLITILSIDGGGIRGIIPGTILGFLESQLQELDGEDARLADYFDVIAGTSTGGLVTAMLTCPNEKNRPLFAAKDIKDFYLTNCPNIFPQPGCPLFSRTTKVIKALSGPKYDGKFLHKVVRDRLGETRLHQTLTNVVIPTFDVMHLQPAIFSSYQVKKKPNLDALLSDICIATSAAPTYPPA

SEQ ID NO: 76219 - protein, 244 aa, Gossypium hirsutum
  Clone ID: GOSHI-09MAY01-C13954_1.pep
VSERIETLMDRMYRQKMTDQEADMKSILWLYHRVKTLPLVNTQNIKTNDGKFKDGHLAENEMMKKFLETYELKQNLLCEKLDLQLSEDSGNASLPTEQNEFSLACAPAQDRGSCKSFESKFVHFINQLYDNDNNEVEYKDFQGLEDALANTAWGEVPDYLKSIGIRIEDARGKATEFFHTGIQILVCAVIKEMEDMSLEDLDWGTLKKWVAALNYANEHGFQVGFADNLLQRNVVAYFQKKELS

SEQ ID NO: 76220 - protein, 158 aa, Gossypium hirsutum
  Clone ID: GOSHI-09MAY01-C13944_1.pep
MMVGKDQDLGLSLSLSYSQNHHSLQLNLGPSLVPSSANQCYSPSDPNMESLRAETRSFLKGIDVNRLPSTVDCEEEAGVSSPNSTISSSLSGKRSEREGNNNGDELEIERASSHGISDEEDGDTSRKKLRLSKDQSAILEKCFKKHNTLNPKQKVGFG

SEQ ID NO: 76221 - protein, 95 aa, Gossypium hirsutum
  Clone ID: GOSHI-09MAY01-C13914_1.pep
MGNSGFLATLLLPTFLCVHLFGGFVDGLGVNWGTMATHKLPPETVVQMLKDNGIKKVKLFDADSKTMDALSGSDLEVMVGIPNDQLLAMKSYDRA

SEQ ID NO: 76222 - protein, 53 aa, Gossypium hirsutum
  Clone ID: LIB3189-018-P1-K1-F7.pep
KETLEWLHEKLIWETSNKEPTIRSKGGTESNLKQPAYITKSLVGTETSNLKLH

SEQ ID NO: 76223 - protein, 51 aa, Gossypium hirsutum
  Clone ID: LIB3189-018-P1-K1-F2.pep
TLEWLHEILIWETSNKEPTIRSKGGTESNLNNQLTSHNLWWVLNIKYYKIK

SEQ ID NO: 76224 - protein, 199 aa, Gossypium hirsutum
  unsure (1)..(199): unsure at all Xaa locations
  Clone ID: GOSHI-09MAY01-C13844_2.pep
MLKELFIGITEVPVICAGEVSLWVLAAMKDVGLGFLIGVGFAAFSFVFALGTIVGAMKGQTTETGSFSGTGLGAVAGATTDLQLLESLADGELLSQITVLVRLVSENVFIAWVNSAMLKAFQWEXGAKGLSRSRIQKLPMHEIQASPMFQSCCSICLQGLXHGERARNLPRCKHMFHLNCIDEWLSRVGTCPMCRDHVF

SEQ ID NO: 76225 - protein, 216 aa, Gossypium hirsutum
  Clone ID: GOSHI-09MAY01-C13844_1.pep
MLKELFIGITEVPFRCAEEVSLWVLAAMKDVGIGFLIEVGFAAFSFVFALETIVGAMKGQTTETGLFNGAGLGAVAGAITAVQLLESLADGELLSQVALLVRLVSQKVFIARVNSAMLKAFQWEMNIFESTYTEISNICDVDGAKGLSRSWIQKLPMHEIQASPMFQSSCSICLQGLKHGEMARNLPRCEHMFHLNCLDEWLSRVGTCPMCRDHVF

SEQ ID NO: 76226 - protein, 71 aa, Gossypium hirsutum
  Clone ID: GOSHI-09MAY01-C13864_2.pep
NWRTIIMWWVKLQILESLQLLYYYITNMNARANKYREQHMKKQTFISHFIVAFSETQHIKTKIIFTSHDCQ

SEQ ID NO: 76227 - protein, 97 aa, Gossypium hirsutum
  Clone ID: LIB3189-018-P1-K1-D1.pep
KPKSFSPAMTANRQPSIFSTGPPAVSGLHPPRRLDGCEHRYSFGQGSLVPGRLLFLHLNLMNHNLGNFLLMGSIGGACGTRCCFIIIGPWLRTLALA

SEQ ID NO: 76228 - protein, 141 aa, Gossypium hirsutum
  Clone ID: GOSHI-09MAY01-C13594_1.pep
FRKPFAIIKTPCRNLSNSPKETEALRGEHKRTGETLRSLLIPIMPATKCCIVFICLLLMFSSSWDVAMGGRYIPSSVPSTMRPASVDYVKMNPQVLLNHKHKVSHEKEVKGCMPKGFRRSSAPSRYVNYQTLGSSCATKAH

SEQ ID NO: 76229 - protein, 264 aa, Gossypium hirsutum
  Clone ID: GOSHI-09MAY01-C13584_1.pep
MEFSKIFTICFSVLLLYSSLAYGQARSPPPVAMSPTPAPAPAPAPAYVNLTYLLSVAGPFHTFLDYLESTKVIDTFQNQANNTDQGITVFVPKDSAFKDLRKPSFSNLSDDQLKSLILYHALPRFYTLADFNELSTKGSISTLAGGEYTLNFTDDSGTVHVGGGWSKTKVTSAVHSTDPAAIYQVDKVLLPEAIFGTDIAATPAPSPAPVPDVSPAADSPSAESKERGSSPKSAPSTSSCNSLMNLCIWRQFVLAVSAGVVLFF

SEQ ID NO: 76230 - protein, 88 aa, Gossypium hirsutum
  unsure (1)..(88): unsure at all Xaa locations
  Clone ID: LIB3145-042-Q1-K1-E9.pep
MELSKIFTICCSVLLLCSSLAYGQARSPPAPVAMSPTSTPVPAPAPSYVNLTYLLXVADAFXTFLDYLESTKVIDTFXNQANNTDQGI

SEQ ID NO: 76231 - protein, 87 aa, Gossypium hirsutum
  Clone ID: LIB3189-013-P1-K1-A11.pep
LSYSYVQHWYPRADFALNSLGQELVITTESKSNFGGKWSFPRFYDMFSDCSWLLVARSSKGPPAPVAMSPTHTSPSTGTAYVTYLLL

SEQ ID NO: 76232 - protein, 282 aa, Gossypium hirsutum
  Clone ID: GOSHI-09MAY01-C13494_1.pep
KPNASAILEYLEGNTDRLSSPFFPEKLPSYTDYDSATQFRKRLKSLASKEHPIDVPRNVTTQMYITASMDKIVHNFSAYMDYTLLSSLNNISWVNPSTDVLQAYYRNLSGFYTLDFLDEPPYYFDFVADLRDDSTHPLKGTKVKVLEYSEEVEIVFQSTNLLNASDEHSMYIHGHKFYVLGEGYGNFNSTRDTETYNLVDPPYLSTASLPVKGWLTIRFKANNPGVWAMHCQEGRHLIWGMNTVLIVKNGSNPETSIRTPPPNMPSCASYPSIHKALEVSAE

SEQ ID NO: 76233 - protein, 104 aa, Gossypium hirsutum
  Clone ID: GOSHI-09MAY01-C13404_1.pep
VNPQRPTRSSMSSTVESFSGPRPAQLPPQKSTDFAAVSTRKNRPRTPPLAPEDCHSDCDSSSSVVDDGVIASSSRRRMLPFDLNFPPLDDADDLPCTALCPCPR

SEQ ID NO: 76234 - protein, 103 aa, Gossypium hirsutum
  Clone ID: uC-gsflmaxxa046h03b1.pep
MEVEEKENEEEEEEEEKRGEEEEKESEDEGTKKVKGSSRKGSSRKSGRDSAEKKEPVTPSSDRPTRERKVVERYSAPSVAGLPSLKLSIEKVCSLFWKAWVHR

SEQ ID NO: 76235 - protein, 183 aa, Gossypium hirsutum
  Clone ID: LIB3543-060-Q6-K6-E10.pep
EEKREEEEEESEDEGTKKVKGSSRKGSSRKSGRDSAEKKEPVTPSSDRPTRERKVVERYSAPSVARYSSSKTLSRISSEGLYGRDGKRYKPYLVRVGNAKTVHPNSLPFYIDTLVDHRLAEEKMHTNDARNDLSMEASSTVLRSNLEKVVENIRFCETKRANIRDGNSSIKKTSKGSNKEMDV

SEQ ID NO: 76236 - protein, 91 aa, Gossypium hirsutum
  Clone ID: LIB3148-021-Q1-K1-F2.pep
KSKPSFIQIRIRTSFINHVLCSFFSAESRPDFLELPFLLLPLTFLVPSSSLSSSSSSPVFSSSSSFSSSSFSFSSISICFSKTLTDRGRVG

SEQ ID NO: 76237 - protein, 204 aa, Gossypium hirsutum
  Clone ID: GOSHI-09MAY01-C13424_1.pep
MSCNGCRVLRKGCSETCVLRSSLRWIESAEAQGNATLFLAKFFGRSDLLSLISSVPESQRPALFQSLLFEACGRTVNPVNGAVGLLSSGNWHICQAAVETVLQGGALRPISAGSWTPSCDESSDRFCVNSCNFESKPLTTTMMMTGNQSVLTAPSDLSLSVTAKLGGEMRTKTVSFYSEESEITTLGSNGNEETQDTKILNLFV

SEQ ID NO: 76238 - protein, 115 aa, Gossypium hirsutum
  Clone ID: GOSHI-09MAY01-C13754_3.pep
MENGGVENAHAHGDGNGNGQAASYTYWVRETTADAAPLPVPKKLTAQDILSTQSQSTSIVSVWNKAGTWEEKNLNNWATQRLKELLKSVGSLDLSCGKAEISDVTKCVGDAFLVT

SEQ ID NO: 76239 - protein, 197 aa, Gossypium hirsutum
  Clone ID: GOSHI-09MAY01-C13754_1.pep
MENGGVENAHGDGNGNGQAASYTYWVRETTADAAPLPVPKKLTAQDILSTQSQPTSLGSVWNKAGTWEEKNLNNWATQRLKELLKSVGSLDLSCGKAEISDVTKCVGDAFLVTVRNKKRVGYTYELTLKIKGEWHLREEKKTVKGHIDIPEFSFGELDDLQMAVQLSEEKDFVQQDKQQIIQDLKKRFLQPVREKLL

SEQ ID NO: 76240 - protein, 112 aa, Gossypium hirsutum
  Clone ID: LIB3189-016-P1-K1-D10.pep
KKKLGQYIGSIPLTYKEMENGGVENAQAHAHGDGNGNGQAASYTYWVRETMAGATPLPVPKKLTAQDILSTQSQSTSLGSVWNKAGTWASLDLSWGKASSVLVMPFWATVRN

SEQ ID NO: 76241 - protein, 79 aa, Gossypium hirsutum
  Clone ID: GOSHI-09MAY01-C13744_1.pep
CTWLVAACMSVTYGKDQSRSPLFNSSASASSNRLGRWARNKRKALLSQCCGGGATPNKDVGLISSFRGSTIQGLMASCL

SEQ ID NO: 76242 - protein, 154 aa, Gossypium hirsutum
  Clone ID: GOSHI-09MAY01-C13774_1.pep
KDLNKENEKKKIYNRDELEDVSIDGSALNYDSDEFTENNKVEEALKNGGNTSNANSTVTGGDQKGKRKGLPAKNLMAERRRLKKLNDRLYMLRSVVPKISKMDRASILGDAIEYLEELLQRINDLHNVSASNPGCSVVTHTNIFIHYLSSLFPC

SEQ ID NO: 76243 - protein, 400 aa, Gossypium hirsutum
  unsure (1)..(400): unsure at all Xaa locations
  Clone ID: GOSHI-09MAY01-C13704_1.pep
RPSVFPRVRQRGGGGERVVASTGTVSTVLXKDYVRSSPWRDPAAVAPAKSVLATEEAEQFLCSMRGEECELSMAVVRDVLCQCGYNVEKALDALLDLSASSYEKSKSFNDKLNSRQDTGFVIECADNLTDRTSDRISKLLESELQDSIWSAGYGHRNYSKVLASSEAMQPPCPRSNVSNLPQEVLDSLFKIPKSSEHEPSTMSWRNVVKKMQLLGPPIDFCPSTDAEPQQDLYAKGDEYHKFRESAREHWDSMRSYYQKAATAYSKGELEYAAYLSDQGKIQTKLAREADERASQNIFKARNKAFENVITIDLHGQHVKQAMKLLKLHLLFGIHVPSVQTLRVITGCGTHGMGKSKLKQSVTKLLEKEGIQWREENRGTVLIKLGGYREFSFLESNSDTE

SEQ ID NO: 76244 - protein, 86 aa, Gossypium hirsutum
  Clone ID: LIB3543-021-Q1-K1-F7.pep
PSFKYILACPFICFPCQFSLYIFLLRCKVLSSQNFILKPTLGTSFDIRHHIDVKQKRRQVKNYGILSPVLMLLHFCCQCFLFKICQ

SEQ ID NO: 76245 - protein, 189 aa, Gossypium hirsutum
  unsure (1)..(189): unsure at all Xaa locations
  Clone ID: LIB3827-001-Q1-K6-E2.pep
MKRTATKKNRRPRATKTPAVNDSSRHALSQRDQRREGEGEDDEEQKRLLGSLMEAFGSISLEEATSAYNQADGDLDKAAEILSNLIDXGXNSEDPDPSTSSISSGSSSXGSSGFGFSETSCLQNLNSGRGRSRWGKQQKRVVASTVTVSTVLGKEFVRSSPWRDRAAVAPAKSVLATEEAAQFLCSMLG

SEQ ID NO: 76246 - protein, 79 aa, Gossypium hirsutum
  Clone ID: LIB3825-018-Q1-N6-B6.pep
TNQLKPATKSKIEQLGCHWKLPNFKYQNNNKIDFPTSQNLALLRHSATLQAKQSPTILPSCQTNRLPAAGKMLHTKPSF

SEQ ID NO: 76247 - protein, 48 aa, Gossypium hirsutum
  Clone ID: LIB3189-014-P1-K1-H2.pep
NKELTNHLATLQAKQSPNILPSCQINRLPSFKYILACPFICFPCQFSL

SEQ ID NO: 76248 - protein, 92 aa, Gossypium hirsutum
  Clone ID: GOSHI-09MAY01-C13644_1.pep
FLILMYCCPFLLTTSPISFASQLSHLPHFFPCKRSVISHSLNAIFLSNFAFVRQLSKIFFLLLKTRLLNSFLLGIRVLSFLRFGKPFCFIGH

SEQ ID NO: 76249 - protein, 421 aa, Gossypium hirsutum
  unsure (1)..(421): unsure at all Xaa locations
  Clone ID: GOSHI-09MAY01-C13674_1.pep
KRLSIGYTEAEKVVASSLACLTDSKSSFGCGDPTTNFQQCPLLNITYCPASEADLSHGKNLIVVVYNSLGWKREDVIRFPVVNEDVTVHDSEGRKIESQLVPIVDAYVDLRKYYARAYLGSSPDDVPKYWIAFTVSVPPLGFSTYTISASKKPGAGSTKSSIYKFQKGEKPAIEVGEGNLTLTISAPSGKIINYVNNRNLVEESVEQSFSYYTGYNGVNDKAPQNSGAYIFRPNGTYHIKAEQPSLTVIQGPLVNEVHQQINPWIFQTTRLYKEKEHVEVEFIVGPVPIDDGFGKEIXTQITTSLENSKTFYTDSNGRDFIKRIRDFRTDWDLKVNQPVAGNYYPINLGIYIRDSKKEFSVLVNRSLGGSXIVDGQIELMLHRRLLLDDSRGVDEALNETVCVLDDCRGXTVPGKYYYRID

SEQ ID NO: 76250 - protein, 111 aa, Gossypium hirsutum
  Clone ID: uC-gsflmaxxa009c08b1.pep
YNRNVVEESVEQSFSYYTGYNGVNDKAPQNSGAYVFRPNGTYHIKAEQPSLTVIQGPLINEVHQQINPWIFQTTRLYKEKEHVEAEFIVGPVPIEEGFGKEVTTQIADQSG

SEQ ID NO: 76251 - protein, 60 aa, Gossypium hirsutum
  Clone ID: LIB3189-014-P1-K1-E6.pep
MILIESIYNSLGWKREDVIRFPVVNENVTVHDSEGRKIESQLVPIVDAYLDLMKYYARAY

SEQ ID NO: 76252 - protein, 143 aa, Gossypium hirsutum
  Clone ID: GOSHI-09MAY01-C13114_1.pep
MAKKKAFTPLLYLASIVFLPWWISLSFNKSLKSWITNWWDTRQSETFLNDIQEKSILEQFIEVEELFLLDEMIKEYPETHLQKLRIGIQKETIHFIKLHNEDHIHTILHFSTNLICFVILSAYSILGNEELLILNSWGQEFLY

SEQ ID NO: 76253 - protein, 280 aa, Gossypium hirsutum
  unsure (1)..(280): unsure at all Xaa locations
  Clone ID: GOSHI-09MAY01-C13094_2.pep
GNRNINQNIIENKKRDSLIAPNEKQIIGLENRNQEEKEPIGEGGLVSDAQKQGNFKSVLSNQEKDVEEDYDKSDKKKRXKKKQYKSNTEAELDFFLKRYLRFQLSGGEGLNQRIINNIKVYCLLLRLINPNEIVISSIQRGEMNLDILMIQKDLTLRELMKKGILIIDPVRLSVKNDGQFILYQTISILLVHKNNRQINQRYQEKTYIDKNHFXEFIARHQKMTENKDKNHYDLFVPENILSPNHRRELRIXISFNSRDKNKNIQIKTVLWAVGDAYNYR

SEQ ID NO: 76254 - protein, 130 aa, Gossypium hirsutum
  Clone ID: uC-gsflnu33B056a04b1.pep
RTRGLIAPNEKQIIGLENRNQEEKEPIGEGGLVSDAQKQGNFKSVLSNQEKDVEEDYDKSDKKKKRRKKKQYKSNTEAELDFFLKRYLRFQLRWDDSLNQRIINNIKVYCLLLRLIKSKNLNSSFESVLG

SEQ ID NO: 76255 - protein, 79 aa, Gossypium hirsutum
  unsure (1)..(79): unsure at all Xaa locations
  Clone ID: LIB3189-004-P1-K1-A12.pep
KKFYNILLVKNSQKKNYIDNNHLYVYIARHQKMPENKDXNHYDLFVPENILSPNHRRELRIRISFNSTDKNGMPTNAVF

SEQ ID NO: 76256 - protein, 203 aa, Gossypium hirsutum
  unsure (1)..(203): unsure at all Xaa locations
  Clone ID: GOSHI-09MAY01-C13064_1.pep
MGRMRQYLAMKTDPVAQELISSDIKELKLAAIKLMDDATKLGGLGFGTSFLKWVASFSAIYLLILDRTNWRTNMLTSLLVPYIFFSLPSGLFSFLRGDVGKWIAFIAVVLRLFFPRHFPDWLEMPGSLILLLVVAPNFFAVTLKDSLVGVFICLLIGCYLLQEHIRASGRFRISFTQSDGISNTIGIIFLXFYPVWGLVLHFA

SEQ ID NO: 76257 - protein, 42 aa, Gossypium hirsutum
  Clone ID: GOSHI-09MAY01-C13014_1.pep
KSRAAHTLPKKKKKKKKFISNKKNTKIGSNTKFYWEKNIYYL

SEQ ID NO: 76258 - protein, 103 aa, Gossypium hirsutum
  Clone ID: GOSHI-09MAY01-C13364_1.pep
LLTHLFLFFLKLSLHNLYEIGGFFLGIFRLHFFYSIQISHLMAARAACKRVGQIGPNSWTIGGVSRFKGVLSPLDASTFPPSAIRLSLSPSPFSQRRQVSHSS

SEQ ID NO: 76259 - protein, 44 aa, Gossypium hirsutum
  Clone ID: GOSHI-09MAY01-C13314_2.pep
VVHRALSLCKRALFWGVPTTLKLGPDQQVSNATIWSNRIGYLGK

SEQ ID NO: 76260 - protein, 843 aa, Gossypium hirsutum
  Clone ID: GOSHI-09MAY01-C13314_1.pep
MVEPRRLLLIFFLSTLLIAYSNANVEEIQKDTEEGDEEVKVGGQKALGVTYDARSLIINGKRELLFSGAIHYPRSTPDMWPDLIKKAKQGGINAIETYVFWNGHEPVEGQSNFEGEFDLVKFIKLIHEHKLYAVVRVGPFIQAEWNHGGLPYWLREVPGIIFRSDNEPFKKHMKRFVTLIVDKLKQEKLFAPQGGPIILAQIENEYNTIQRAFREKGDSYVQWAGKLALSLNANVPWIMCKQRDAPDPIINTCNGRHCGDTFYGPNKRNKPALWTENWTAQYRVFGDPPSQRSAEDLAYSVARFFSKNGSMVNYYMYYGGTNFGRTSASFTTTRYYDEAPLDEFGLQREPKWGHLKDVHRALSLCKRALFWGVPTTLKLGPDQQAIVWQQPGTSACAAFLANNNTRLAQHVNFRGQDIRLPARSISVLPDCKTVVFNTQLVTTQHNSRNFVRSEIANKNFNWEMYREVPPVGLGFKFDVPRELFHLTKDTTDYAWYTTSLLLGRRDLPMKKNVRPVLRVASLGHGIHAYVNGEYAGSAHGSKVEKSFVLQRAVSLKEGENHIALLGYLVGLPDSGAYMEKRFAGPRSITILGLNTGTLDISQNGWGHQVGIDGEKKKLFTEEGSKSVQWTKPDQGGPLTWYKGYFDAPEGDNPVAIVMTGMGKGMVWVNGRSIGRYWNNYLSPLKKPTQSEYHIPRAYLKPKNLIVLLEEEGGNPKDVHIVTVNRDTICSAVSEIHPPSPRLFETKNGSLQAKVNDLKPRAELKCPGKKQIVAVEFASYGDPFGACGAYFIGNCTAPESKQVVEKYCLGKPSCQIPLDSIPFSNQNDACTHLRKTLAVQLKCA

SEQ ID NO: 76261 - protein, 91 aa, Gossypium hirsutum
  Clone ID: LIB3828-018-Q1-N6-G11.pep
KVHQKEATEIFCDNQSSVAIAKNPVFHGRTKHFSIKLHVVREMEQAQEVKLIHCNSEDQLADILTKALNVTRFECLRRKLGVCSMQTKEEY

SEQ ID NO: 76262 - protein, 112 aa, Gossypium hirsutum
  Clone ID: LIB3828-033-Q6-K6-E7.pep
RSANSRFKKKGGKKKKKKKKKKKKKKKKKKKKKKKKKKKKKKKKKKKKKKKKKKKKKKKKKKKKKKKKKKKKKKKKKKRGGGFYLKKKYFWGGMKKKFFFFWEKKKNFWGGF

SEQ ID NO: 76263 - protein, 98 aa, Gossypium hirsutum
  Clone ID: GOSHI-09MAY01-C13284_2.pep
MIGGAKGVDRKEKGKQQPTWRIFSLKELHSATNNFNYDNKLGEGGFGSVYWGQLWDGSQIAVKRLKVWSNKAEVQFSVEVEILARVRHKNLLSLRGYC

SEQ ID NO: 76264 - protein, 120 aa, Gossypium hirsutum
  unsure (1)..(120): unsure at all Xaa locations
  Clone ID: GOSHI-09MAY01-C13284_1.pep
MAFCSMICCGKGVDRKKEKGKKQPAWRIFSLKELHSATNNFNYDNKXLGEGGFGSVYWGQLWDGSQIAVKRLKVWSNKAEVEFSVEVEILARVRHENLLSLRGYCAERSKHLIVYEYMPN

SEQ ID NO: 76265 - protein, 255 aa, Gossypium hirsutum
  Clone ID: GOSHI-09MAY01-C13254_1.pep
MSIALERIESAGFGRVMNCACDSSKFESPPPVKETKQLLLAETAAVEEEEDDWRVSSSTTTSSSIGKNSDEVSGISSDGGDCEENEVQSSYNGPLDMMNSLEQVLPMRRSISSFYNGKSKSYTSLVDASSASSIKDIAKPENAYTRRRRNLLAINHIWDKNRSKKFIRPISSSKSTLALAVAMSGSETDSFSSAGEDSSSTSSPRLLLPPLHPQTKMVSLYNNSISITPSSSPSSGGRNFSNWRSFSLADVREYN

SEQ ID NO: 76266 - protein, 105 aa, Gossypium hirsutum
  Clone ID: uC-gsronu33B012d10b1.pep
NYNSQLYSRTSANEKDRQLEKFRPPLDGDEEGVILILLLYKETIFVCGCNGGSNNLGLEVEEESSPALEKLSVSEPLIATASANVLLLELIGLMNFLLLFLRTRE

SEQ ID NO: 76267 - protein, 128 aa, Gossypium hirsutum
  Clone ID: uC-gsflnu33B059b08b1.pep
MSIALERIESAGFGRVMNCACDSSKFESPPPVKETKQLLLAETAAVEEEEDDWRVSSSTTTSSSIGKNSDEVSGISSDGGDCEENEVQSSYNGPLDMMNSLEQVLPMRRSISSFYNGKSKSYTSLVDA

SEQ ID NO: 76268 - protein, 64 aa, Gossypium hirsutum
  Clone ID: LIB3189-007-P1-K1-C8.pep
TPIPSFIHICFSLRLFIRFFLWVFFLFDPFAILGGERLKNFDHVDRVGTDRIGGVRAGNELRLR

SEQ ID NO: 76269 - protein, 177 aa, Gossypium hirsutum
  unsure (1)..(177): unsure at all Xaa locations
  Clone ID: GOSHI-09MAY01-C13244_1.pep
MANSQLQKYGTLSREQLSYLFDRFXFLFAQPDFKKRILDAVNDKQEPVAVTTAVQEEIFLEMGVDPSFGLACLGKVNMTYENDQDLMIRYYRFVANEELACDEAELGPEGFAEKLHSQQKLHEQHLGMLKYMRKFHFDDQSAILEKLHHQTEDANFESEASILSAEQIQEIVRRKVS

SEQ ID NO: 76270 - protein, 256 aa, Gossypium hirsutum
  unsure (1)..(256): unsure at all Xaa locations
  Clone ID: GOSHI-09MAY01-C8877_2.pep
PLHNNVADSVAQEGQQPEKQTAENVDXAVMELPDANMNPEDLWMSHSKVVHPKPYRKDSPSWKAIQKVXIVGEKIGLKHFRPVKPLGSGDTGSVHLVELCGTGLYFAMKAMDKGVMLNRNKVHRACAEREILDMLDHPFLPALYASFQTLSHPCLITDYCPGGELFMLLDRQPTKVMKEDAVRFYAAEVVVALEYLHCQGWLNSNIPTNLIVLIKXSINSFSDYVSLLTGIIYRDLKPENVLLQDNGHVALTDFDL

SEQ ID NO: 76271 - protein, 255 aa, Gossypium hirsutum
  Clone ID: GOSHI-09MAY01-C8877_1.pep
DYCPGGELFMLLDRQPTKVMKEDAVRFYAAEVVVALEYLHCQGIIYRDLKPENVLLQDNGHVALTDFDLSCLTSCKPQLLIPATDEKKKRQKSQQNPIFMAEPMRASNSFVGTEEYIAPEIITGAGHTSAVNWWALGILLYEMLYGYTPFRGKTRQKTFANVLQKDLKFPKSIQVSLHAKQLMYRLLHRDPKNRLGAREGANEIKRHPFFKGVNWALVRWMTPPELEVPISATETRKEEDKAMDPQLQDLQTNIF

SEQ ID NO: 76272 - protein, 293 aa, Gossypium hirsutum
  Clone ID: GOSHI-09MAY01-C8817_3.pep
HTTKLPYCIAITGFACTWCPRAPPHLSALRVWLGCSTVRSSIYIIVACVLAAKDGANAPPRDYSIHGESSSRVFTTIGASANLVFAFNTGMLPEIQATVRQPAVKNTLKALYFQFTIGVVPMFAITLIGYWAYGASTSTYLLNSVSGPLWVKAAANISAFLQSIICLHIFASPTYEYLDTKFGIRGSALQLNSLSFRIAARGGYLVISTLVSALLPFLGDFESLTGALSTFPLTFILANHMYIVAKKDKLSTLQKFSRPLNVIIFALMSIAATIASLRLIAVDSKEYHVFADV

SEQ ID NO: 76273 - protein, 265 aa, Gossypium hirsutum
  unsure (1)..(265): unsure at all Xaa locations
  Clone ID: GOSHI-09MAY01-C8817_1.pep
MVPDNNRNEVEDYKLTVQVPETAHQVSTDSWLQAGFVLTTGVNSVFVLGYSGTIMVPLGWIGGIVGLLLATVLSLNANMLVAKLHEHGGKRHIRYRDLAAQIYGRRAYTITWAMQYINLFMINIGFLILGGSALKACFALFNYEHTMKLPYCIAITGFACTLFAISTPHLSALRVWLGCATVLSLIYIIVACVLAAKDGANAPPRDYSIHGESSSRGFTTIGASANLVFAFNXTGMLPEIQAAGCKSSFTAHHKPLKLSYTMIVA

SEQ ID NO: 76274 - protein, 42 aa, Gossypium hirsutum
  Clone ID: uC-gsflnu33B015g05b1.pep
LLQKFWHWLNVFIFALMSIAATIASLRLIAVDSKEYHVFADV

SEQ ID NO: 76275 - protein, 75 aa, Gossypium hirsutum
  Clone ID: LIB3135-055-Q1-K1-B4.pep
IRIGFLLILGLFNSPCRYHTAAHTWYSWESPAMSLRDAIVATMDMRAKIKTLSQRRDFSKVRSLTFFATMYRTRG

SEQ ID NO: 76276 - protein, 46 aa, Gossypium hirsutum
  Clone ID: LIB3048-038-Q1-L1-A12.pep
SSADLVAYLGANAPPRDYSIHGESSSRVFTTIGASANLVFAFNTGM

SEQ ID NO: 76277 - protein, 201 aa, Gossypium hirsutum
  Clone ID: GOSHI-09MAY01-C8807_1.pep
MDPTLDSKLISNEAFDMKIMKKLGDDDQRQGLTKAKKRSYALVSYKELPDYMKDNEFILNYYRANWSLKEALFSVFRWHNETLNVWTHLLGFLLFLGLTMANLLELPQVADLITFLTRSFLINGHTNVSYDSEDLFLGITNLVNLRQITTPESDVTLPVTPVTRWPFYVFLGGSLFCLLSSTVCHLFSCHSHHLNFTLLRL

SEQ ID NO: 76278 - protein, 123 aa, Gossypium hirsutum
  Clone ID: LIB3189-011-P1-K1-E7.pep
MDATLDSKLVSNEAVDMKIMKKLGDDDRRQGLTKAKNRSYALVSYKELPDYMKDNEFILNYYRANWSLKEALFSVFRWHNETLNDWTHLLGFLLFLGLTMANFYGIPTYCLSYYILYPFVNYL

SEQ ID NO: 76279 - protein, 134 aa, Gossypium hirsutum
  Clone ID: LIB3166-006-P1-K1-E10.pep
NEFILNYYRANWPLKEALFSIFRWHNETLNVWTHLLGFVLFLGLTMANLIEVPQVSDLVAFLTSSFPISGDSNVSQDPLLGTTTNLVDLKQITASEPDVSPVTRWPFYVFLAGSMFCLLSSSICHLFSCHSHHL

SEQ ID NO: 76280 - protein, 217 aa, Gossypium hirsutum
  unsure (1)..(217): unsure at all Xaa locations
  Clone ID: GOSHI-09MAY01-C8827_1.pep
PRVRPFSSLNPFLHFFPTEKKGLSLFSYTEIACKGFLLMCSGSKSELVPSNFTMEGELQGCKPDALSKCSVLLELAASDDLVAFKTEVEEKGLDLGEASYWYGRRIGSKKMGFEERMPLMIAAMFGSIDVLNYIVGTRKIDVNRACGADGVTAVHCAVAGGASSSVQVIKLLLDASADANCVDANGNKPIDLIVRVXKSLSNSKKKVIELLLKRVMM

SEQ ID NO: 76281 - protein, 87 aa, Gossypium hirsutum
  Clone ID: LIB3166-053-P1-K1-G8.pep
DAWADAWVGFEERTPWGIAAMFGSIDVLNYIVGTRKIDVNRACGADGVTAVHCAVAGGASSSVQVIKLLLDASADAYCVDANGNKLV

SEQ ID NO: 76282 - protein, 158 aa, Gossypium hirsutum
  Clone ID: GOSHI-09MAY01-C8597_2.pep
MDSQLSLWFCSMSTAFCFVFFSFTLLFSLFSLLIFVLRLKLWCTCETCQAYLTSSWTKDFDNLCDWYTHLLKNSATGTIHIHVLGNIITANPANVEHMLKTRFENYPKGKPFSTLLGDLLGRGIFNVDGDSWKFQRKMASLELGGVSVRTHAFDIVGS

SEQ ID NO: 76283 - protein, 142 aa, Gossypium hirsutum
  unsure (1)..(142): unsure at all Xaa locations
  Clone ID: GOSHI-09MAY01-C8597_1.pep
PTRPPTRPPTRSPTRPASRELGGVSVRTHAFDIVRSEIQSRLLPLLSSVAGQEQVLDLQDVFRRFSFDNICKFSFGLDPGCLDLSLLVSDLAVASDFASNFSAQRALGIFXLIWKVKRLLNLCTEKQLKEAIKVADESAEEM

SEQ ID NO: 76284 - protein, 173 aa, Gossypium hirsutum
  Clone ID: GOSHI-09MAY01-C8517_1.pep
LAQGRKKNMAPKSQPVNPNPNTTMNEIRYRGVRKRPWGRYAAEIRNPRKKARVWLGTFDTAEEAARAYDAAAREFRGAKAKTNFTYTNINDFTLSPSQSSTVESSSPPPLDLTLASGSISLPMTANHPVFFVDVFASAGKRLSDAGGAQSDSDSSSSVVDFERGVQPRVFEFD

SEQ ID NO: 76285 - protein, 264 aa, Gossypium hirsutum
  Clone ID: GOSHI-09MAY01-C8507_1.pep
MNGNDSTTTSESSSGELSLGPELESSRNLETQLVPAQNYMVRMLSWKKRRLSFRSSAKKTELLGFDFDGHPQTCSVVDSEKGEYWWEVKELVSRNGGARLKAQVFFASFDQRSERAAGESACTALVAVIAHRLHSNHASMPTRPEFDNLITQGSSEWRKLCSNTAYTNAFPDKHFDLETVLKADVRPVTVSHEKSFTGFFSPDEFEFLKGAMSFDEIWNEIKSCETNNCQPRVYIISWNDHFFVLKVESKAYYIIDTLGERLFE

SEQ ID NO: 76286 - protein, 242 aa, Gossypium hirsutum
  Clone ID: GOSHI-09MAY01-C8537_1.pep
MATLSIGIASSAPAATTFFSTKTKRTHFKLNISCVQWDPEGILGKPGSGHLARLEFKRRLERDAEAREAFEQHLREEKERRRALRQSRELPDTAEETIEYFLDTEAQEIEFEIARLRHRLDEDFFSHLKFEIGQIRFAVSKTEDMEDRLIELEALQKALQEGTEAYDKMQAELITAKKSLTKILSSKDIKATLLEMVEGNELNRSLLTLLDENIANANMDNQKQAAAFMEKIRAAVLKYLTV

SEQ ID NO: 76287 - protein, 92 aa, Gossypium hirsutum
  Clone ID: LIB3825-025-Q6-N6-C3.pep
ELEALQKALQEGTEAYDKMQAELITAKKSLTKILSSKDIKATLLEMVEGNELNRSLLTLLDENIANANMDNQKQAAAFMEKIRAAVLKYLTV

SEQ ID NO: 76288 - protein, 151 aa, Gossypium hirsutum
  Clone ID: GOSHI-09MAY01-C8457_1.pep
MREYSNSFASLLGVLAFCQSLLQLIFPPRPRFLCLKFFNRIVHLFSSYCYFDITEIDGVNTNELYNAVQLYLSSFVSINGSRLSLTRALNSSAITFGLSNNDCIVDTFSGVTVLWEHVVIQRQSQTFSWRPLPEEKRGFTLRIKKKNKSLI

SEQ ID NO: 76289 - protein, 200 aa, Gossypium hirsutum
  unsure (1)..(200): unsure at all Xaa locations
  Clone ID: GOSHI-09MAY01-C8787_1.pep
VRVVHGNALAAAEILNXIPKDVEEVFLTGATSKLGRAWALYLCRRRVRVLMLTLSTERFQKIQREAPADCQNYLVQVTKYQAAQNCKTWIVGKCITPRQQSWAPSGTHFHQFVVPPILAFRRDCXTYGDLAAMRLPDDVEGLGSCEYTMERGVVHACHAGGVVHQLEGWTHHEVGAIDVDRIDIVWKAALKHGLRPVSSM

SEQ ID NO: 76290 - protein, 350 aa, Gossypium hirsutum
  unsure (1)..(350): unsure at all Xaa locations
  Clone ID: GOSHI-09MAY01-C8747_1.pep
MAATMDFYRSSSGIYGGELMEALEPFMKSASSSSSSSPSPSPSPSSYSPSPSPSPSTSYLSFSSSQTHPNFYAVGCWYSPARDQFSGVQQPQLGSTIGLDGLTQAQINQIQAQFLFQNNQPSYLYQXLNLNANPNTNHMLSFLSPKPVPMKQMGSPPKPTKLYRGVRQRHWGKWVAEIRLPKNRTRLWLGTFDTAEEAALAYDKAAYKLRGDFARLNFPNLRHQGSHIGGDFGEYKPLHSSVDAKLQAICESLELNQKQANNKKTKKLSKENKVQLAEPEEKTVKVENSPSSLSPVLSENEGSTESSPLSDLTFSDFNEQPWPEVITSSESFMLSKYPSYEIDWDSILKA

SEQ ID NO: 76291 - protein, 157 aa, Gossypium hirsutum
  Clone ID: LIB3147-032-Q1-K1-D3.pep
PKPTKLYRGVRLRHWGKWVAEIRLPKNRTRLWLGTFETAEQAALAYDKAAYKLRGDSARLNFPNLRHQGSHIGEYKPLHSSVDAKLQAICESLEQDQKQGNKKKTSKEMKKDKVQVATPEPEEKTVKLENSSSSSSPVVSENEVSAESSPLPDLTFS

SEQ ID NO: 76292 - protein, 39 aa, Gossypium hirsutum
  Clone ID: LIB3147-045-Q1-K1-B11.pep
LNVYKNLKDVLHGCQLVFSCGTEREKFVSVHKSSIAFVI

SEQ ID NO: 76293 - protein, 117 aa, Gossypium hirsutum
  unsure (1)..(117): unsure at all Xaa locations
  Clone ID: GOSHI-09MAY01-C8777_2.pep
VKEGKRAVNVILAKHIWHATIYGDGKTKTLISGGHNWADGTPTFATATFAAAGKGSIAXGLGFINTAGAPKHHALAMRPGSDRSVFYRCAFDAYQDTLYSHSNRPFYRECDILGTID

SEQ ID NO: 76294 - protein, 181 aa, Gossypium hirsutum
  Clone ID: GOSHI-09MAY01-C8777_1.pep
VVEEMKAAMQNSTEYASNSLAIVARILGLLTDLNIRIHRRLLGLEKACSEFPAWVSPTERRLLQESKPTPNVIVAQDGSGNVLTINDAVKLVGKKNESRFVIYVKEGKYVENVILDKHMWNVMIYGDGKTKTLISGSHNFVDGTPTFATATFDTTREENKAEQGGGQGRVMEASSPEEVES

SEQ ID NO: 76295 - protein, 130 aa, Gossypium hirsutum
  Clone ID: GOSHI-09MAY01-C8647_6.pep
MVRVSVLNDALKSMYNAEKRGKRQVMIRPSSKVIIKFLLVMQKHGYIGEFEYVDDHRSGKIVVELNGRLNKCGVISPRFDVGVKEIEGWTARLLPSRQFGYIVLTTSAGIMDHEEARRRNVGGKVLGFFY

SEQ ID NO: 76296 - protein, 130 aa, Gossypium hirsutum
  Clone ID: GOSHI-09MAY01-C8647_5.pep
MVRVSVLNDALKSMYNAEKRGKRQVMIRPSSKVIIKFLLVMQKHGYIGEFEYVDDHRSGKIVVELNGRLNKCGVISPRFDVGVKEIEGWTARLLPSRQFGYIVLTTSAGIMDHEEARRKNVGGKVLGFFY

SEQ ID NO: 76297 - protein, 130 aa, Gossypium hirsutum; identical to SEQ ID NO: 76296
  Clone ID: GOSHI-09MAY01-C8647_4.pep

SEQ ID NO: 76298 - protein, 130 aa, Gossypium hirsutum; identical to SEQ ID NO: 76296
  Clone ID: GOSHI-09MAY01-C8647_3.pep

SEQ ID NO: 76299 - protein, 154 aa, Gossypium hirsutum
  Clone ID: GOSHI-09MAY01-C8647_2.pep
MFTSYNNELLGFLNLILQQLGFGRMVRVSVLNDALKSMYNAEKRGKRQVMIRPSSKVIIKFLLVMQKHGYIGEFEYVDDHRAGKIVVELNGRLNKCGVISPRFDVGVKEIEGWTARLLPSRQFGYIVLTTSAGIMDHEEARRKNVGGKVLGFFY

SEQ ID NO: 76300 - protein, 130 aa, Gossypium hirsutum; identical to SEQ ID NO: 76296
  Clone ID: GOSHI-09MAY01-C8647_1.pep

SEQ ID NO: 76301 - protein, 124 aa, Gossypium hirsutum
  Clone ID: AI731993.1.pep
MVRVSVLNDALKSMYNAEKRGKRQVMIRPSSKVIIKFLLVMQKHGYIGEFEYVDDHKSGKIVVELNGRLNKCGVISPRFDVGVKEFKILLLFWCFKFEFLVEWRCRTWFYQVFAYEFQVKLCCL

SEQ ID NO: 76302 - protein, 113 aa, Gossypium hirsutum
  Clone ID: LIB3145-040-Q1-K1-A2.pep
GGSTQAYAHAYVHASVIIKFLLVMQKHGYIGEFEYVDDHRSGKIVVELNGRLNKCGVISPRFDVGVKEIEGWTARLLPSRQFGYIVLTTSAGIMDHEEARRKNVGGKVLGFFY

SEQ ID NO: 76303 - protein, 90 aa, Gossypium hirsutum
  unsure (1)..(90): unsure at all Xaa locations
  Clone ID: LIB3146-038-P1-K1-B1.pep
MVRVSILNDALKSMYNAEKRGKRQVMIRPSSKVIIKFLLVMQKHGLFQHSIXSLPLYLFHRYANIGIAGYIGEYEYVDDHRSGKIVVELN

SEQ ID NO: 76304 - protein, 103 aa, Gossypium hirsutum
  unsure (1)..(103): unsure at all Xaa locations
  Clone ID: LIB3149-032-Q1-K1-E11.pep
DALKSMYNAEKRGKRQVMIRPSSKVIIKFLLVMQKHGYIGEFEYVDDHRSGKIVVELNGRLNKCGVISPRFDVXVKEIEGWTARLLPSRQVSRKTELHNFMLS

SEQ ID NO: 76305 - protein, 60 aa, Gossypium hirsutum
  Clone ID: uC-gsronu33B082e03b1.pep
PTRPATLTQLLFLFCGFQQQLVFGRMVRVSDSTDALPITSMAAKMRIRHAKILPSFMFIL

SEQ ID NO: 76306 - protein, 70 aa, Gossypium hirsutum
  Clone ID: uC-gsflnu33B004e08b1.pep
SHACAHACAHASDQLELWTMKKPEERMLVGKYLASSTEKFAFFILNRTHIIKMASFCSSAIMVLMFCLRL

SEQ ID NO: 76307 - protein, 28 aa, Gossypium hirsutum
  Clone ID: LIB3149-038-Q1-K1-H1.pep
VLTTSAGIMDHEEARRKNVGGKVLGFFY

SEQ ID NO: 76308 - protein, 258 aa, Gossypium hirsutum
  unsure (1)..(258): unsure at all Xaa locations
  Clone ID: GOSHI-09MAY01-C8677_1.pep
PPTPSSHASRTNPTKPSLHGEEIFTKITLSLILPLSFIYLVHMEVSNLFFRKIIHNEIELDHTRSGTPKCEKLSDLISDEWAYFWLFKAAYFTLFFIFSLLSTAAVVYTIACIYTARELTFNKVISVVPKVWKRLMVTFLCIFIAMFLYHVAALAILIGCVVSIGXKQFGFAVFVGLAILYSXGFLYLTPIWHLASAVSVLEEAYGFNAMVKGKNLLKGNLWLAMVIFLTLELRRHIQFAFKSGVEEALRMAIDWLQY

SEQ ID NO: 76309 - protein, 255 aa, Gossypium hirsutum
  Clone ID: GOSHI-09MAY01-C8667_1.pep
SLVGSFEESLLSGRFFSGKLNQRIDGFLAVLSITGGAFSPQSQKLPFSVTSVDGDCFLLYYASIDLSRNSSSNKCRDQKLKRGLGIDEPQPVRSRLRIPMKGRIQLVLSNPEKTPLHTFLCNYDLSDMPAGTKTFVRQKITLASSVPNFVLNSSEVKGNEGFDSIQITSCNNVRCKEHSDAYQRTNQKLSHSGIKINENTNGTGSLRYALHLRFLCTPPKKSPKSFQRGKSDLEPIPQKTGSDRNGDRRFYLYND

SEQ ID NO: 76310 - protein, 135 aa, Gossypium hirsutum
  Clone ID: LIB3166-004-P1-K1-F9.pep
HASEKQKRGLSIDESQPVGGRLRIPMKGPIQLVLSNPEKTPLHTFLCNYDLSDMPAGTKTFVRQKITLASSAPNSAELKPSFDTKVQDKVRLTSQENSSLCHNRHEKESCGIKGSEGLELLESTQPTGCNNDQCK

SEQ ID NO: 76311 - protein, 108 aa, Gossypium hirsutum
  Clone ID: GOSHI-09MAY01-C8617_2.pep
AGEKISPIEVDAVLLAHPAVAQAVAFGVPDEKYGEEINCAVIPRGGVSLDEAEITKYCKRNLASFKVPKKVFITDSVPKTATGKIQRRIVAEHFLTQMSAAKVPKFGA

SEQ ID NO: 76312 - protein, 161 aa, Gossypium hirsutum
  unsure (1)..(161): unsure at all Xaa locations
  Clone ID: GOSHI-09MAY01-C8617_1.pep
VCIRGLNVTXGYKNNPEANKSAFQFGWFHTGDVGFFDSDGYLHLVGRIKELINRGGEKISPIEVDAVLLAHPAVTQAVAFGVPDEKYGEEINCAVILRGGSLDEAEITKYCKRNLASFKVPKKVFITDSVPKTATGKIQRRIVAEHFLAQTSAAKVPKFGA

SEQ ID NO: 76313 - protein, 78 aa, Gossypium hirsutum
  Clone ID: LIB3146-024-Q1-K1-C4.pep
EKYGEEINCAVIPREGVSLDEAEITKYCKRNLASFKVPKKVFITDSAPKTVTGKIQRTIVTEHFSTQMSASKVPKFGA

SEQ ID NO: 76314 - protein, 289 aa, Gossypium hirsutum
  unsure (1)..(289): unsure at all Xaa locations
  Clone ID: GOSHI-09MAY01-C8627_1.pep
HFIFHTQSSLSTSPFFFKQLFPPHQITPYKTHLHSFLFPPRFPSPTRAASASIYYFLTLLLLCAIPFTFSELVKEQPLVLKYHNGPLLKGKITVNLIWYGKFSPTQRSIIVDFINSLSSAVKPKIPSASFWWKTTEKYKSGSSTLVVGKQILLENYPLGKILKNPHLPALAGKFNGVGTVSVILTAKDVAVDGFCMRCGTHGSNRVGRVRGTFIWVGNSETQCPGQCAWPFHQPIYGPQTPPLAAPNGDVGIDGMIITLATLXLAYTVTNPFNNGDFQGPADAPLEAVS

SEQ ID NO: 76315 - protein, 86 aa, Gossypium hirsutum
  Clone ID: LIB3189-021-P1-K1-H6.pep
TPTRAHERPTFFLFCAIPITFNELAKKEPLVLNYHNGPLLKGKITANLIWCRKFFPTQRSIIVDFINSLCFAVKPKIPAAWFWWKT

SEQ ID NO: 76316 - protein, 316 aa, Gossypium hirsutum
  Clone ID: GOSHI-09MAY01-C8157_1.pep
GFGQAWDYVIADAGHQGIRLRLSLVNNLQPYGGKTQYVNWAWQEGVGLSSSNDSFFFDPSIRKYFKNYVLTVLTRKNTITGIQYRNDPTIFAWELINEPRCMTDPSGDTLQDWVEEMSAFIKSIDKNHLLTIGLEGFYGPSSPKKATVNPEQWASALGADFMRNSNITNVDFASVHIYPDQWFHGLGFEEKRNYVSKWMHSHIEDCDKELKKPVMFTEYGLSDQNKDFQLSQREQLYRTIQDIIYKSAKKKGSGAGALVWQFFVEGMQEYSDDFGMVPWQSPPIYKLTIEHSCKLARIQGLIQENGNLKQLCSKRK

SEQ ID NO: 76317 - protein, 111 aa, Gossypium hirsutum
  Clone ID: LIB3148-049-Q1-K1-B5.pep
PRVRPRVRPRVREYGLSDENKDFQLSQREQLYRTIQDIIYKSAKKKGSGAGALVWQFFVEGMQEYSDDFGMVPWQSPPIYKLTIEHSCKLARIQGLIQENGNLKQLCSKRK

SEQ ID NO: 76318 - protein, 231 aa, Gossypium hirsutum
  unsure (1)..(231): unsure at all Xaa locations
  Clone ID: GOSHI-09MAY01-C8167_1.pep
RIKSPSLQSHKPFSKSHFSTEPNNVPFLFPSKTHPQLHRFKPNSISESSVSVPEEAFDDAEEDDPTSELSYLDSETDPSSVTEWELDFCSRPILDIRGKKIWELVVCDSSLSLQYTKYFPNNVINSVTLKDAMETISEDLGVPLPEKVRFFRSQMQTIITKSCKELGIKPVPSKRCLSLLLWLEXRYETIYMRHPGFQKGSKPLLALDNPFPMELPENLFGEKWAFVQVPF

SEQ ID NO: 76319 - protein, 82 aa, Gossypium hirsutum
  Clone ID: GOSHI-09MAY01-C8137_1.pep
THQTTRFGCWVFVFIFVFSHFCQLSTKHCSFLICGGFFFFLVCCLIHGFFPAGWSMKPSLSSEGEPQKRLGFWGSGLHGKQF

SEQ ID NO: 76320 - protein, 79 aa, Gossypium hirsutum
  Clone ID: GOSHI-09MAY01-C8387_1.pep
SIDSSSDGVTETSSSGESGAASRQNSETMNEIGLTERLTDIFADENDRDLLLQQSNRDDSVLQWLQSFTYAINRPLSDP

SEQ ID NO: 76321 - protein, 47 aa, Gossypium hirsutum
  Clone ID: LIB3166-001-Q1-K1-H12.pep
NLWLKSSMASSGNREFVDDHVDQNGDESIDSSSDGVTETSSSGESGA

SEQ ID NO: 76322 - protein, 54 aa, Gossypium hirsutum
  Clone ID: GOSHI-09MAY01-C8357_1.pep
EIYLFIHSFGALGFDYLFLRNKNFKVNFVFEGITSIMVLKFLIVVVKKWLTILS

SEQ ID NO: 76323 - protein, 181 aa, Gossypium hirsutum
  Clone ID: GOSHI-09MAY01-C8367_1.pep
MESTWVDTTLDLNINSSHNTIQVLKRESSGKLADSDVKVPVKQETGALVEELNRIIAENKKLTEMLTVLCERYSSLQNQYMELVSRNSGSDATAATSKKRKAECEDYVPMIGFSGKAESSFSDEDSCKKPKDCIKAKISRAYVRTNPSDNSLIVRDGYQWQKYGQKVTRDNPSPEAYFKCS

SEQ ID NO: 76324 - protein, 97 aa, Gossypium hirsutum
  Clone ID: LIB3166-058-P1-K1-H12.pep
MIGFSGKAESSCSDEDSCKKPKDCIKAKISRAYVRTNPSDNSLIVRDGYQWRKYGQKVTRDNPSPRAYFKCSFAPSCPVKKKVQRSAEDPSILVATY

SEQ ID NO: 76325 - protein, 339 aa, Gossypium hirsutum
  Clone ID: GOSHI-09MAY01-C8307_1.pep
MIGSTDFIDEIDCGSFFDDLIDFPNGDVEAYDSTAVINAAAFPTILTTQPESLPFSDSVFLNNSASELSTELFVPYEDIVQLEWMSKFVEDTQCGASLTTKKEDSSSISEGSNHQFQTCSPVSVLESSSSCSGVKPLPRSPETSAPGKRGRPRSKRPRLATFNHLPGVQMTSPASSVNENDIPQPFAVPKVLSDSENYAESRLLIKLPKQVNPEHKKKKIKLSVSAAAAIADYSQNPTGQAVTKCMHCEITKTPQWRAGPMGPKTLCNACGVRYKSGRLFPEYRPAASPTFVPSVHSNSHKKVLEMRTKSCALAPTTTMVANNLPELIPNKSNPALDYI

SEQ ID NO: 76326 - protein, 229 aa, Gossypium hirsutum
  Clone ID: GOSHI-09MAY01-C8337_1.pep
HNPLTNGSLGVQLGYFKDVLPSFCSSSSDCKDFLKKSLIVMGEIGGNDYNYAFLQGKNTVEILHFVPLVVDTIASAIAELIGLGAVTILVPGNLPIGCSPAYLTYFQGSDMADYDPLTGCITWLNQFSEFHNEQLQEKLDQIRKLHRNVNIIYADYYNIAMRFYHSRNQFGFTETLRACCGGGGRYNYSSSMACGDPPLTTSCKDPSSHVSWDGLHYTEATYRWISRVF

SEQ ID NO: 76327 - protein, 209 aa, Gossypium hirsutum
  Clone ID: GOSHI-09MAY01-C8217_1.pep
PIPSEEAKYSLRSSTSSRTNKISFQAPLSSQLPQNFKKLVVHTWSQNFRDATHIISAPLRLPLESDQVLLKVIYAGVNAGDVNFSAGRYFQGTKKDPGFEAVGIIAAIGDSVRNLEVGTPAAVMTIGCYAEFMKVPSKQILPIPRPDPEVVALLTSGLTASIALEELGQMKSGKVVLVTAAAGGTGQFAVQLAKLAGNKVVATCGRKEK

SEQ ID NO: 76328 - protein, 363 aa, Gossypium hirsutum
  unsure (1)..(363): unsure at all Xaa locations
  Clone ID: GOSHI-09MAY01-C8207_1.pep
FELEIKSSDNRILQEXLQNKCSENEELQAKVTLLEQQLASLSGDKLSSSAHGISEEHADELRKKIQSQEIENEKLKLEQVQLSEENSGLCVQNQKLAEEASYAKELASAAAVELKNLAGEVTRLSVQXNAKLEKELLAARGSANQTINGVNRKYSDSTRPGRKGRHSGHSNDFSGAAGDDFELWNLDLDDLKMELQARKQREAALEAALAEKEFIEDEYRKKVEEAKKREEALENDLANMWVLVAKLKKEGVATPESNTDEQHGNSIDNADNPKANSIDNNRQVSDVLSKPAIEMPKETLVFRLKARMQEMKEKELNSVGNGDAHSHLCTVCFESPNAAILLPCRHFCLCKSCSLACSECPIC

SEQ ID NO: 76329 - protein, 106 aa, Gossypium hirsutum
  Clone ID: GOSHI-09MAY01-C9977_1.pep
MAKLVATFFLALIAISMVQTLVMASHGHGGHHYDNKRYGPGSLKPYQCPSQCTRRCSQTQYHKPCMFFCQKCCRTCLCVPPGYYGNKQVCPCYNNWKTKEGGPKCP

SEQ ID NO: 76330 - protein, 106 aa, Gossypium hirsutum
  Clone ID: uC-gsflmaxxa009g08b1.pep
MAQLDATFFLALIAISMVQTLVMASHGHGGHHYDNKRYGPGSLKPYQCPSQCTRRCSQTQYHKPCMFFCQKCCRTCLCVPPGYYGNKQVCPCYNNWKTKEGGPKCP

SEQ ID NO: 76331 - protein, 90 aa, Gossypium hirsutum
  unsure (1)..(90): unsure at all Xaa locations
  Clone ID: LIB3493-007-P1-M1-D1.pep
PKKTPWLNLLLLSSWLSLPSPWFKLWLWHHMDMVVTIMITNVMDLKSQAYQCHPVHKEGSRPDHNHAVFAECAXMPCVLRIWDKQLPCQH

SEQ ID NO: 76332 - protein, 88 aa, Gossypium hirsutum
  unsure (1)..(88): unsure at all Xaa locations
  Clone ID: uC-gsflnu33B085d12b1.pep
MAKLVATVLLAIIAICMXVDFGYGTHTGHGGHHYDNKRSGPGSVKPYQCPCECTRRCIQTQMHKPCKQFCQKCCRTCLXAPAGYYGNK

SEQ ID NO: 76333 - protein, 58 aa, Gossypium hirsutum
  Clone ID: LIB3147-010-Q1-K1-D6.pep
MGPEVVIYTTPSQCTRRWGQTQYHKPCMFFCQICCRTCLCVSSRYYGNKQVCSCFNNW

SEQ ID NO: 76334 - protein, 281 aa, Gossypium hirsutum
  unsure (1)..(281): unsure at all Xaa locations
  Clone ID: GOSHI-09MAY01-C9917_1.pep
VCPRVRPRVRRRGGGLMVSANGAAETLTLAPDFIKGGRAMRSVFDLLDRKTEIEPDDPDATRVGRAPSGEVELKHIDFSYPSRPDVPIFRDLNLRARAGKTLALVGPSGCGKSSVIALIQRFYEPSSGRVMIDGKDIRKYNLKSLRKHIAIVPQQPCLFASTIYENIAYGHESAAEAEIIEAATLANAHKFISSLPEGYKTFVGERDSTFRRPKQKIAIARALVRKAXMLLDEATSALDAESERSVQKALDRACSGKTTIVVAHRLSTXRNAHVLAVINEG

SEQ ID NO: 76335 - protein, 160 aa, Gossypium hirsutum
  unsure (1)..(160): unsure at all Xaa locations
  Clone ID: uC-gsronu33B168f03b1.pep
VSFFNSENKIVGRFYXSLQAALRRCFWKGQIAGSGFGVAQFSLYASYALGLWDASWLVKHGISDFSKTIRVFMVLMVSANGAAETLTLAPDFIKGGRAMRSVFDLLDRKTEIEPDDPDATQVPDRLRGEVELKHIDFSYPSRPDVPIFRDLNLGARAGKT

SEQ ID NO: 76336 - protein, 138 aa, Gossypium hirsutum
  unsure (1)..(138): unsure at all Xaa locations
  Clone ID: LIB3166-020-P1-K1-A2.pep
RPVRTVAAFNSXNLIFRLFSSNGQAPLKHCFWKGQIAGSGFGVAQFALYASYALGLWYASWLVKHGISDFSKTIRVFMVLMVSANGAAETLTLAPDFIKGRRAMQSVFELLDRKTEIEPDDPDATQVPDRLRGEVELK

SEQ ID NO: 76337 - protein, 124 aa, Gossypium hirsutum
  Clone ID: GOSHI-09MAY01-C9897_1.pep
GGPGCIGTRGTRTMPRGRFRWREGSWFGGGSSRKWDTDKLLSLGRWWSVKNEVVWLRRRSGVGVLNISRVHEYEGLKTIRCLDFRVPMKVRRHRMLFLLCLLLFSVLSLHLFFTINHQTLNQPI

SEQ ID NO: 76338 - protein, 138 aa, Gossypium hirsutum
  unsure (1)..(138): unsure at all Xaa locations
  Clone ID: GOSHI-09MAY01-C9867_1.pep
GRSPCCSKEGLIIXAWTALEDKVLTSYIHVHGEGKWRNLPKRAGLKRCGKSCRLRWLNYLRPDIKRGNISHDEEELIIRLHNLLGNRWXLIAGRLPRRTDNEIKNYWNTTLGKRAKAQASIEAKTIPTESRLNEPSKS

SEQ ID NO: 76339 - protein, 288 aa, Gossypium hirsutum
  Clone ID: GOSHI-09MAY01-C9827_1.pep
MSCNGMAFFPANFMLQTPHEEDHHHQPPTSINQMLPSCTPQDFHGVAPFLGKRSISFAGIDHVCEGGNGEDDLSDDGSQAGEKKRRLNMEQVKTLEKNFELGNKLEPERKMQLARALGLQPRQIAIWFQNRRARWKTKQLEKDYDLLKKQYEAIKADNDALQAQNQKLHAEILALKGKEPTESINLNKETEGSCSNRSENSSDVKLGMSRTPTVIDSHPTSCRTLFPTSIRPTTAVAQLFQTSSSRPDNHLQCQKMDQIVKEEGLGNMFCNIEDQTGFWPWLEQHHFN

SEQ ID NO: 76340 - protein, 168 aa, Gossypium hirsutum
  Clone ID: GOSHI-09MAY01-C9587_1.pep
HASAHASEESELWDDSALIDAFDNAMSKYKKMHGKKNSEANVSVSVHQTGDEAIKPRDAGENSSSRANTGMEMEAAKDVEPVKESHTVKLQTPETYIDSSTSLPMQDNQDGNMAYSDSQAAQDYNQLLNQYYEVEDKRQMILQQLQQFGSWNYQYSGEGSSTAAQSCA

SEQ ID NO: 76341 - protein, 56 aa, Gossypium hirsutum
  Clone ID: GOSHI-09MAY01-C9567_1.pep
MKRWFDPWPVFFKREFNRTWPFLVGFAVTGTIITKFSLGLTEEDAKNSPFAQKHKR

SEQ ID NO: 76342 - protein, 76 aa, Gossypium hirsutum
  Clone ID: LIB3166-015-P1-K1-H12.pep
ELPGRAERRVSPRVRKSQRKIYWWFDPWPVVWKREFNRTWPFLVGFAVTGTIITKFSLGLTEEDAKNSPFAQKHKR

SEQ ID NO: 76343 - protein, 49 aa, Gossypium hirsutum
  Clone ID: uC-gsronu33B076c07b1.pep
GRISDNLNLSCSECNVEGLGVAATSMTRFCVGLTEEDANNCPFAQKHKR

SEQ ID NO: 76344 - protein, 171 aa, Gossypium hirsutum
  Clone ID: GOSHI-09MAY01-C9517_1.pep
SSEIYKTLPIREELLRAFLNADLIGFHTFDYARHFLSCCSRMLGLTYESKRGYIGVEYYGRTVSIKILPMGIHMGQLESVLSLPETEAKVTELLKQYCDQGKTMLLGVDDMDIFKGISLKLLAMEQLLLQHPECQGKVVLVQIALPARGRRKDVKEVHEETYSTVKRINET

SEQ ID NO: 76345 - protein, 126 aa, Gossypium hirsutum
  Clone ID: GOSHI-09MAY01-C9527_1.pep
RRRFQPKLVLIIIFVTLVVLTIIPVLYPLIGYPLYVSKASSSRPLPTTAYESQQPEPLPSIKISEGEDCDIFLGEWVPNHAAPYYTNTTCWAIHEHQNCMKYGRPDTEFMKWKWKPDGCELPVLNP

SEQ ID NO: 76346 - protein, 66 aa, Gossypium hirsutum
  Clone ID: GOSHI-09MAY01-C9497_1.pep
PTNKPNLINLNPKYPRPKIPTKLSANPSQQPGPQTPSVALTLHAPHRQAHKRLRHAVPTCVGAEKS

SEQ ID NO: 76347 - protein, 95 aa, Gossypium hirsutum
  Clone ID: GOSHI-09MAY01-C9457_3.pep
VIAYEPVWAIGTGKVATPQQAQEVHVAVHDWLKKNVSEEVASKTRIIYGGSVNGSNCAELAKQEDIDGFLVGGASLKGPEFATIVNSVTSKKVAA

SEQ ID NO: 76348 - protein, 307 aa, Gossypium hirsutum
  Clone ID: GOSHI-09MAY01-C9457_1.pep
MAMISTYCPHFNGLHRSSPKLDSSQSQSFLQHINSQLRLASSRKPCRAVTAMAGSGKFFVGGNWKCNGTKDSITKLVSDLNSAKLETDVDVVVSPPFVYLDQVTASLTGRIEVSAQNSWIGKGGAFTGEISVEQLKDIGCKWVILGHSERRHIIGEDDQFIGKKAAYALNEGLGVIACIGELLEEREAGKTFDVCFQQLKAFADVVPSWDNIVIAYEPVWAIGTGKVATPQQAQEVHVAVRDWLKKNVSEEVASKTRIIYGGSVNGSNCGELAKEEDIDGFLVGGASLKGPEFATIVNSVTTKKVAA

SEQ ID NO: 76349 - protein, 136 aa, Gossypium hirsutum
  Clone ID: LIB3828-012-Q1-K6-A8.pep
YCPHFSGLRRSSPNLHNAPCQSFLQHFSSQARLPSSPKPCRAVIAMSGSGKFFVGGNWKCNGTKDSTTKLVSDLNSAKLESDVDVVVAPPFVYLDQVTSSLTDRIEVSAQNSWIGKGGAFTGEIRLANLGFVHKTC

SEQ ID NO: 76350 - protein, 77 aa, Gossypium hirsutum
  Clone ID: LIB3585-063-P1-K2-D12.pep
VIYTFQKFLFLTSDSSSSSRGADPFSESTVAVFSVNTISHPISCYAGIFFIMEQLMYAYLFHSLVLFPSLMMLFFFV

SEQ ID NO: 76351 - protein, 43 aa, Gossypium hirsutum
  Clone ID: uC-gsronu33B139g11b1.pep
YGSNCAELAKQEDIDGFLVGGASLKGPEFATIVNSVTSKKVAA

SEQ ID NO: 76352 - protein, 104 aa, Gossypium hirsutum
  Clone ID: GOSHI-09MAY01-C9477_2.pep
MKREDTVRNGHFLADRRWFFPIVITGLIAGAIVTSSFIKAADYSLLCSVANTRSPQGVGKGSATPIQLQAIIHYATSRITPQQNFREISVTFDVLKKTSPCNFL

SEQ ID NO: 76353 - protein, 289 aa, Gossypium hirsutum
  Clone ID: GOSHI-09MAY01-C9477_1.pep
MKREETTKNRHFLADKRWFMPITIAGFIAGTILISSFIKTADYSILCSLAKTRSIAVEEYSSSPVQLQAIIHYATSSIVPQQNFKEISVTFDVLKKRSPCNFLVFGLGYDSLMWTSLNPNGNTIFLEEDPKWVQSVLKDAPILHARAVKYRTELKEADDLLSHYRSEPSCFPSKAYLRGNDKCRLALTGFPDEFYDTEWDLMMIDAPRGYFPEAPGRMAAIFSAAVMARNRKGPGVTHVFLHDVDRRVEKVFAEEFLCRKYLVKSVGRLWHFEIPSAANMSSHGGAQFC

SEQ ID NO: 76354 - protein, 119 aa, Gossypium hirsutum
  Clone ID: LIB3145-013-Q1-K1-E3.pep
PRVRPRVRPRVRETTKNRHVLGDKRWFMPITIAGFIAGTILISSFIKTADYSILCSLAKTRSIAVEEYSSSPVQLQAIMHYATSSIVPQQNFKEISVTFDVLKKRSPCNFLVFGLGYDS

SEQ ID NO: 76355 - protein, 61 aa, Gossypium hirsutum
  unsure (1)..(61): unsure at all Xaa locations
  Clone ID: LIB3166-056-P1-K1-E2.pep
SEVARPRGFFPLAPGRLAAGXLGSXLAWTXKGXGVTHVFLHDEDRREVLVFAEEFLCRKYL

SEQ ID NO: 76356 - protein, 88 aa, Gossypium hirsutum
  Clone ID: GOSHI-09MAY01-C9467_1.pep
LKILLCAEKVPHYSLVCLILSCIFHFFQEEMEELERTDNVSTLSEELLLIMETIPDPLLPLTNGPINPSWDRWFEGPQDAKGCRCQIL

SEQ ID NO: 76357 - protein, 54 aa, Gossypium hirsutum
  Clone ID: LIB3148-058-Q1-K1-G1.pep
AVMWYLFSTQHNFESLKFDIAQSRDMSIRAHHLSEKSRNDGTNCGSTVAKFMSL

SEQ ID NO: 76358 - protein, 345 aa, Gossypium hirsutum
  Clone ID: GOSHI-09MAY01-C9417_1.pep
MAVELMMSCRNGDSFAAKMEENAVKEAASGLESVEKLIRLLSQTQQQQQTNSNNQEKYQASSISTTSNSLDLEMDCKAEADAAVSRFKRVISLLGRTRTGHARFRRAPVQPDQEQETKVYYATPIQQIPPPVTTAYPLPPPPPPPPHHHHRDFMTVKTGGLERIDSSKTINFSYSSAGNSFLSSLTGDTDSKQPCSSSSAFQITNFSQVSSAGKPPLSSSSSFKRKCSSDNLGSGKCTSGSSGRCHCSKKRKLRSKRVVRVPAISLKMADIPPDDYSWRKYGQKPIKGSPHPRGYYKCSSVRGCPARKHVERALDDPSMLVVTYEGEHNHSLSVAETTNLILESS

SEQ ID NO: 76359 - protein, 72 aa, Gossypium hirsutum
  Clone ID: LIB3825-008-Q1-N6-B7.pep
MITASMCINHSASQRPTMIRVVELLKNKESPVEGELKYCGERGIIADSLDLQDYSRTSYLNDLNRHKQLVLE

SEQ ID NO: 76360 - protein, 113 aa, Gossypium hirsutum
  Clone ID: LIB3166-018-P1-K1-C7.pep
VDSARQSLVIWLKPLLQQNGGKELVDPGLGDNYDPSEMKRTMITAFMCINHSASKRPTMIRVVELLKNKKSPVEGELKCCGERGIIADSLDLQDYSRTSYLNDLNRHKQLVME

SEQ ID NO: 76361 - protein, 138 aa, Gossypium hirsutum
  Clone ID: LIB3148-018-Q1-K1-A12.pep
MLTSASISHSTPDTTTVAILELAREKRLLTFALQGSLNPSAVMGVSLERQKAIMVPYMEAHVPNYHLWMQDPALLQATGSEPLSLQQEYDVQFCWNQDPLKKTFIILDNEMVREKNVHVNPHVEAMVGDVNIYMNDLD

SEQ ID NO: 76362 - protein, 126 aa, Gossypium hirsutum
  Clone ID: LIB3166-017-P1-K1-E11.pep
TPHKTTVAIPELESEKSLLVFAFQGSLNPAVAMGVSLEGQKVIMVPYMEAHVPKYHLWMQDPALLQATGSEPLSLQQEYDMQLSWNQDPLKKTFIVLDKEMVGEKFVHGNPHVEAMVGDVNIYMND

SEQ ID NO: 76363 - protein, 79 aa, Gossypium hirsutum
  Clone ID: LIB3145-016-Q1-K1-C7.pep
KYHLWMQDPALLQATGSEPLSLQQEYDMQLSWNQDPLKKTFIVLDKEMVGEKFVHGNPHVEGHLIYYLCLNCTEFSETL

SEQ ID NO: 76364 - protein, 186 aa, Gossypium hirsutum
  unsure (1)..(186): unsure at all Xaa locations
  Clone ID: GOSHI-09MAY01-C9737_1.pep
MDELNSKKRARDDSNESGLDSPDVKRLRDDLFLDDSDSLPLNQDLASVMKSFEEEIAAVPSTSTGSMPVVDLTSDSSDSQPDLGYLFEASDDELGLPPPTASTTDTEGRSEATDLVRADSNSSGIDDLWGFEEQNPNYDSFEFGFVNNFNDGTAAYDALFEHSXDVYYDSSDISGQLWRPETLSAE

SEQ ID NO: 76365 - protein, 361 aa, Gossypium hirsutum
  unsure (1)..(361): unsure at all Xaa locations
  Clone ID: GOSHI-09MAY01-C9727_1.pep
FSHDISKGADNPPKNLGHRRAHSEIITLPDDINFDGDLGVVGAADGPSYSDETEDDMLSMYLDIDKFNSSSVTSMFQVGKSLTTTAPNSGPSAAVSMGAGTATSGEENASVGVGSSEKPRIRHQHSQSMDGSTSIKPEMLLSGSDGGSAXDSKKAMSAAKLAELALIDPKRAKRIWANRQSAARSKERKMRYIAELXERKVQTLQTEATSLSAQLSLVQRDTGALTAENSEVKLRLXQAMEQQVHLQDALNDAMKEEIQHLKMLTVHPMPNGGGMMNFASFGASQQYYPNNHAKHTLLAAQQFQQLQLHSQKHQHQHQHQFSPNQLHHQQEQTGEMRARGSMPSPNKKDSSSDVNSTASKD

SEQ ID NO: 76366 - protein, 113 aa, Gossypium hirsutum
  Clone ID: LIB3166-017-P1-K1-G11.pep
HASAHASGDLGVVGAADGPSYSDDTGEDMFSMFIDMDKFNSSSATSTFQVGESSAPAAAPATAHMAAAAWTGMNGENQSVTVGSSEKPRVRHQHSQSMDGSTSIKPEMLMSGA

SEQ ID NO: 76367 - protein, 136 aa, Gossypium hirsutum
  unsure (1)..(136): unsure at all Xaa locations
  Clone ID: GOSHI-09MAY01-C9617_3.pep
FQWLDKLTPAAFEKHSGRETARKWKNNVWVIVXGEKVSLSKTALLKYYNQASKNANGTNRSHNARVCHRDEFVRCSRCNKERRFRLRTKEECRIHHDALADVNWKCSDLPYDRITCDDEEELASRMAYRGLTRSPH

SEQ ID NO: 76368 - protein, 196 aa, Gossypium hirsutum
  Clone ID: GOSHI-09MAY01-C9617_1.pep
MENEVQRESGSMIFSDEELIEVSGLKKGRDFIEVTCGCTSHRYGDAVGKLRVFSNGDLEITCECTPGCNEDKLTPAAFEKHSGRETARKWKNNVWVIVNGEKVSLSKTALLKYYNQASKNANGTNRSHNGRVCLRDESVRCSRCNKERRFRLRTKEECRIHHDALADVNWKCSDLPYDRITCDDEEERASRRVYRG

SEQ ID NO: 76369 - protein, 78 aa, Gossypium hirsutum
  Clone ID: AW186912.2.pep
CKLRVFSNGDLEITCECTPGCNENKLTPAAFEKHSGRETARKWKNNVWVIVNGEKVSLSKTALLKYYNQASKNANGTN

SEQ ID NO: 76370 - protein, 87 aa, Gossypium hirsutum
  unsure (1)..(87): unsure at all Xaa locations
  Clone ID: AI055503.1.pep
MENGIDKVSGSMLFSEEELIEVSGLKKGGDFVEVTCGCTSHRYGDAVGKLRVFSNGNLEITCECTPGCNEDKLTPAXFEMHSGIDTL

SEQ ID NO: 76371 - protein, 73 aa, Gossypium hirsutum
  Clone ID: uC-gsflnu33B144h10b1.pep
KFQNHNFPGLQWQPPAPLLLLLVCGFLLILFSSLFFFCFTIILLFFLFGYNLMNTLLVKNNNCKSIHITLSDT

SEQ ID NO: 76372 - protein, 60 aa, Gossypium hirsutum
  Clone ID: LIB3145-019-Q1-K1-G9.pep
GWFHRAANTSRSWQWKNNVWVIVNGEKVSLSKTALLKYYNQASKNANGTNRSHNGRSWHR

SEQ ID NO: 76373 - protein, 152 aa, Gossypium hirsutum
  unsure (1)..(152): unsure at all Xaa locations
  Clone ID: GOSHI-09MAY01-C9627_1.pep
MAQRSVPAPFLTKTYQLVDDPITDDVISWNESGTSFVVWKTADFAKDLLPTYFKHNNFSSFVRQLNTYGFRKVVPDKWEFANDNFKRGQKQLLSEIRRRKTVTXTAADAPANGKTSGAAAPSSTDFGEDLGSTXTSTHRESKNPGSVETTRQ

SEQ ID NO: 76374 - protein, 57 aa, Gossypium hirsutum
  Clone ID: AI054692.1.pep
SYDLVSIPESKSLVLLLMETDTIKPCDNAVHSRFFLSGFYCWRWESLTALLLFSCSA

SEQ ID NO: 76375 - protein, 49 aa, Gossypium hirsutum
  Clone ID: uC-gsflmaxxa089h05b1.pep
LSFHVITSSVFGSSTSWYVFVTQGAAADLCAISIACHVTLATRSSLEYA

SEQ ID NO: 76376 - protein, 93 aa, Gossypium hirsutum
  Clone ID: LIB3166-016-P1-K1-E5.pep
MVQSSFSTPFLIKTYQLVDDPITDNVISWNENGTSFVVWKTADFAKDLLPNYFKHNNFSSFVRQLNTYGFRKVVPDKWEFANENFKRGQKELL

SEQ ID NO: 76377 - protein, 232 aa, Gossypium hirsutum
  Clone ID: GOSHI-09MAY01-C9187_1.pep
HASAHASGQPSDLVGHLPIHQLNYASNARLSSTSNPTPWFTQTTQAFDINSEFSSAAMPSFLPPLTASFLAAPMGYKPSVADSPSMASFTVNGSRYWETGASANNNSNSSSNSTELQSNSSFYDNNSSSWGLPDCSTPEKEAPLHLMESQAEDIKWSEYLNNPLLMAAALQNQTPQSLYNMDIKSETHFLTNNSSNSMWTHNQQQQQREPLQNPNMCAAKDIHRLTAAYGHV

SEQ ID NO: 76378 - protein, 178 aa, Gossypium hirsutum
  unsure (1)..(178): unsure at all Xaa locations
  Clone ID: AW186756.1.pep
MFRFWGSQEQQAQPRPQEGSSHSWYPPPGVSSTNSSRPSTPGSSASNSFNLQRPSERPHSPSQVSPSEAAGIIALLKDKSVDELRKLLSDKDAYNQFLLSVDXVKIQNNIRDELRKENLQLXNNLDKEPQIMELKNQCRIIWTTELAATLEKINDLEKPKEEILKFYPPHRLSQGSKF

SEQ ID NO: 76379 - protein, 79 aa, Gossypium hirsutum
  Clone ID: LIB3582-058-P1-K1-B5.pep
SLSYFLSVDELRKLLSDKDAYNQFLLSVDQVKIQNNIRDELRKETLQLARNNLDKEPQIMELRNQCRIIWTTELAAALE

SEQ ID NO: 76380 - protein, 139 aa, Gossypium hirsutum
  Clone ID: LIB3166-010-P1-K1-E7.pep
PTRPQGSYCSWYPPSDVGCRDSFRPGTPINRASNSFNSQTPAEWSHSLSTVSPTEAAGVIALLKDKSVDELRKLSSDKDAYNQFLLSADQVKIQNNIRDELRNETLQLARNNLYKEPQIMELRNQCRIIRTTELAAAQE

SEQ ID NO: 76381 - protein, 172 aa, Gossypium hirsutum
  unsure (1)..(172): unsure at all Xaa locations
  Clone ID: GOSHI-09MAY01-C9127_1.pep
HASEGPSAAVPTRPTATGRGRCIRLIDLDPEPCQVLPQAEPLAAAGPAFNRVEVVADKDIAMEGRSADKIVGVEEEASTTPVPETVQVGNSPVYRLERKLGKGGFGQVYVGRRTSGGSDRIGPDAIEVALKLEHRNSKGCNYGPPYEWQVYXNSLNGCYGIPSVHYKGRQGD

SEQ ID NO: 76382 - protein, 291 aa, Gossypium hirsutum
  Clone ID: GOSHI-09MAY01-C9087_1.pep
PTRPGRHKSLYCIYSKMLKKKLTMDEIHDIRGLRVIVENVDDCYEALRVVHQLWSEVPGKLKDYISRPKFNGYQSLHTVVMSEGTVPLEVQIRTKEMHLQAEFGFAAHWRYKEGDCKYSSFVLQMVEWARWVVTWHCETMSKDQSSICYIDSVKPPCTFPTHSDDCPFSYKPHCSQDGPVYVIMIENDKVCFLNSTSLLFQVEPVVMLWRGNSRWSPYGFPVKEELRPRLNHEPVSDATCRLKMGDVVELTPAIPDKSLTEYREEIQRMYNRGLSVSSTGPPASNMVALRR

SEQ ID NO: 76383 - protein, 174 aa, Gossypium hirsutum
  Clone ID: GOSHI-09MAY01-C9017_1.pep
MASTTLICDTQPWKDLKAHTEDIKKTHLRDLMNDKERCESMMVEFDGMFLDYSRHCATLETMDKLYKLAEAASLKQQINRMYSGEHINSTENRSVLHVALRAPRDAVINSDGKNVVPDVWNVLDKIKDFSEKVRNGSWVGATGKPLKDVIAIGIGGSFLGPLFVHTALQTGYAG

SEQ ID NO: 76384 - protein, 185 aa, Gossypium hirsutum
  Clone ID: LIB3543-010-Q1-K6-G5.pep
MASTTLICDTQPWKDLKAHTEDIKKTHLRDLMNDKERCESMMVEFDGMFLDYSRQCATLETIDKLYKLAEAASLKQQINRMYSGEHINSTENRSVLHVALRAPRDAVINSDGKNVVPDVWNVLDKIKDFSEKVRNGSWVGATGKPLKDVIAIGIGGSFLGPLFVHAALQTDPEAVEFAKGRQLRF

SEQ ID NO: 76385 - protein, 232 aa, Gossypium hirsutum
  Clone ID: GOSHI-09MAY01-C9357_1.pep
MGGNDDRLRTRDNIPPADGSRYALSGKIMLSAIVVLLFVVVLMFGLHLYARWYLLRARRRHSRNRRRHHRRSQLVFYVDPDVNGPPAVASRGLDAQVLKSLPVFTFSSETHPDSALECAVCLSEFEENESGRVLPKCKHSFHLECIDMWFHSHSTCPLCRTSVEGSVPVSDNAGDLVITINEPSNGESGSNQEPDSCQHEDGRPGSSAGRKLSIEVPVRNIEGFINESSECE

SEQ ID NO: 76386 - protein, 103 aa, Gossypium hirsutum
  unsure (1)..(103): unsure at all Xaa locations
  Clone ID: AI054593.1.pep
SLRFEWQNHAQCHRGFALRSGTYXLVSTFNARWYLLRARRRHSRXXTSSSTVDRSXVFYVDPDVNGPPAVASRGLDAQVLSRTGFTFSPNTPDSARCAVGCRI

SEQ ID NO: 76387 - protein, 71 aa, Gossypium hirsutum
  unsure (1)..(71): unsure at all Xaa locations
  Clone ID: LIB3147-027-Q1-K1-D4.pep
MVLFGLSEFEEXTNRVXVLPKCKHSFHSECIDMWFHSHSTCPLCRTSVERSVPVSDNAGDLVITINEPSGG

SEQ ID NO: 76388 - protein, 138 aa, Gossypium hirsutum
  Clone ID: GOSHI-09MAY01-C9377_1.pep
FLWSQMAKLRVTITGDGSSKVVKMGDDAMGGHRRMNGNKRFLQDKPWRNVGNRRHQINGVQWRSNGFKGQGSRIAGKDLRFKLMRKRGPFQFRDTFEDHRRNMEKPSNLFSHHKIVTSILSEPGPNGITILNQILTIT

SEQ ID NO: 76389 - protein, 44 aa, Gossypium hirsutum
  Clone ID: uC-gsflmaxxa119d05b1.pep
FLWSQMAKLRVTITGDGSSKVVKMGDDALVVHSILIVNISFFPV

SEQ ID NO: 76390 - protein, 113 aa, Gossypium hirsutum
  Clone ID: GOSHI-09MAY01-C9367_1.pep
MERTLTRSLIAVVISSFAAIRSYRRKSLDLSGALAGFLVMTIHFVAGYRFGAMLLAFFFTSSMLTKVGEDKKRRVDADFKEGGQRDWIQVLYNSGIAAVLSVLIGNLTGWEDK

SEQ ID NO: 76391 - protein, 53 aa, Gossypium hirsutum
  Clone ID: GOSHI-09MAY01-C9317_1.pep
PRVRSFVVDIPDGNTKDETCYFVEALIKCNLKSLADVSERLAVQDRTEPIKIM

SEQ ID NO: 76392 - protein, 223 aa, Gossypium hirsutum
  Clone ID: GOSHI-09MAY01-C9337_1.pep
MNHSDNSDHPQLPSIKIRHPSSPHHPSSAATPTPTAGARRKIGVAVDLSDESAFAVRWAVQNYLRPGDAVIVLHVSPTSVLYGADWGPLPHTPQSAETPESQKQIEDEFDAFTASKVADLARPLKESGVPFKIHIVKDHDMRERLCLEVERLGLSAVIMGSRGFGAEKTGSDGKLGSVSDYCVHHCVCPVVVVRYPDDKDGGSGEPVITIKEAEVEEEASKDA

SEQ ID NO: 76393 - protein, 109 aa, Gossypium hirsutum
  Clone ID: LIB3825-002-Q1-K6-D5.pep
LVYPKKKFSILSIIKPRRKMAASLLFPVASSTKTAAPPTYSPRKPIPSGHRFFSFPSKTKPLLKFTGNSNKHRSFTAKAIEESKESTEDTLTAKEVDTEPESSEESELS

SEQ ID NO: 76394 - protein, 138 aa, Gossypium hirsutum
  Clone ID: LIB3165-033-P1-K1-G4.pep
GGRPTRPPTRPAASLLFPVASSTKTGAPPTYSPRKPVPSGHRFFSFPSKTKPLLKITGNSNKHRSFTAKAIEESKESTEDTLTAKEVETEPESSEESELSAIGAEIKTAMKEREANNSDNSLAGGVAEEIREIEWPAF

SEQ ID NO: 76395 - protein, 90 aa, Gossypium hirsutum
  Clone ID: LIB3166-013-P1-K1-B11.pep
LVYPKKKFSILSIIKPRRKMAASLLFPVASSTKTAAPPTYSPRKPIPSGHRFFSFPSKTKPLLKFTGNSNKHRSFTAKAIEKSKESTEDT

SEQ ID NO: 76396 - protein, 256 aa, Gossypium hirsutum
  unsure (1)..(256): unsure at all Xaa locations
  Clone ID: GOSHI-09MAY01-C4977_2.pep
MAAAANPRSFYSGSNPPHPNRFVFSADPPPKISLTPDQFNYCSEALKLFSQKLQMPDEINREFSHLQANRITPSEMMRRCTVGFNGANLDPRRRSDVIPCTLKSLFFFQIDTNRVVLNSCKDYRPTAKGYINASFVTTSSSENISKFIATQGPLPHTYEDFWEMVIQCHCPVIVMLTRLVDNYKTVKCGDYFQAENGPRQFGNICIDTKWIQETEPLLWIHTWEVIYRESEAPLLXVWHIQYPEWPDHGVPTDTLA

SEQ ID NO: 76397 - protein, 249 aa, Gossypium hirsutum
  unsure (1)..(249): unsure at all Xaa locations
  Clone ID: GOSHI-09MAY01-C4977_1.pep
HLQANRITPSEMMRRCTVGFNGANGDKNRYSDVIPFDTNRVVLNSCKDYRPAAKGYINASFVTTSSSENISKCIATQGPLXHTYQDLWENGYPMPIALSIVMLTRLVDNYXTVKCGDYFQXAENVPRQFGNICIDTKWIQETETSLLIRNLEVNSKESEDPPLSVLHIQYPEWPDHGVPTDTLAVREILKRVLQVPVNIGPILVHCSASIGRTGTYCAIHNTVQRILIGDMSALDLANTISMFKSQRIG

SEQ ID NO: 76398 - protein, 347 aa, Gossypium hirsutum
  Clone ID: GOSHI-09MAY01-C4967_1.pep
MGGPQEPHRPFFHFANPFRKNSHKGSQFNPKLRSLLNDFETALSKKLQKLVPNDKGARVRPRGRKLAMESLSDIHCDIKNLITELDLPVTEWDEKWMDVYLDISVKLLDISIAFTSELTRLNQGHLLLQYGLHKLESDSPELFSRASSSLNSWKQHIGSKNPRVETCRPILDNLVESLNLPKVKNSSKGKVLMRAMYGAKVATTYICSVFAAALSGSSKNLLDLTVPNTLPWAQVFSDVQNTVNVEIRNIFSCGKFTVVRELDAVDACVKELSTLLQDGVGTSERESFKNSVSDLRKTEEKLSQGLDNLLKVIDSFFKVVLMGRDALLCNLRKAGGAVPDSVIGKNV

SEQ ID NO: 76399 - protein, 61 aa, Gossypium hirsutum
  unsure (1)..(61): unsure at all Xaa locations
  Clone ID: LIB3165-059-P1-K1-G11.pep
MMSRPQEPHRPFFHFANPFRKYSHKGSQFNPXLXSLLNDFDTALSMKLLKLEPNDMGDILC

SEQ ID NO: 76400 - protein, 65 aa, Gossypium hirsutum
  Clone ID: GOSHI-09MAY01-C4937_1.pep
PSQFHCQKNTVQPSNLVHEGHCLRIADSVGKQLILSSCPFTIFPRRDLQIQNVVIVSQIINVLNH

SEQ ID NO: 76401 - protein, 64 aa, Gossypium hirsutum
  Clone ID: LIB3083-054-Q1-L1-A1.pep
SVLLMETTAQPWRQLVLRPEHTFAKASPLKPSHANVFNVFGMPSAALPLLYKMLSNTVIRAHFL

SEQ ID NO: 76402 - protein, 48 aa, Gossypium hirsutum
  Clone ID: LIB3083-107-Q1-L1-H12.pep
SLIICMFLAKAVRSSLEKSAGKHTAHPNSPLVDAVFWNWLLKPPYAAS

SEQ ID NO: 76403 - protein, 146 aa, Gossypium hirsutum
  Clone ID: GOSHI-09MAY01-C4897_1.pep
MNCAAMVVVGYRPVLSPKCFASNPKINTDQLRYQLDQLHAEAETTRAKANNARLRFLRLSEAAEKLRRQAAVSMQRGKENEARDLLFQKKRVMQALEKSKSRIELLDKLATKLNEVINVKETQLIGNIVSDSEIGEEDGSSPVRII

SEQ ID NO: 76404 - protein, 295 aa, Gossypium hirsutum
  Clone ID: GOSHI-09MAY01-C4827_1.pep
MASVCASSAIAAVAISSPSSQKTGSVVGTTKASFLTGKKLRSVRKYTKPAAGPTFPVCAAADPDRPLWFPGSTPPPWLDGSLPGDFGFDPLGLGSDPETLRWNVQAELVHCRWAMLGAAGIFIPEFLTKIGILNTPSWYSAGTEEYFTDTTTLFIVELIFIGWAEGRRWADILKPGCVNTDPIFPNNKLTGTDVGYPGGLWFDPLGWGSGSPEKIKELRTKEIKNGRLAMLAVMGAWFQHIYTGTGPIDNLFAHLADPGHATIFAAFTPSETLGGGNPNSHENVGEKSMVVIRTP

SEQ ID NO: 76405 - protein, 184 aa, Gossypium hirsutum
  unsure (1)..(184): unsure at all Xaa locations
  Clone ID: LIB3582-014-P1-K1-B10.pep
PRVRPRVRPRVRPRVRGRVGAAIAAVAISSPSSQKTGSVVGTTKASFLSGKKLRSVRKYTKPAAGPTFPVCAAADPDRPLWFPGSTPPPWLDGSLPGDFGFDPLGLGSDPETLRWNVQAELVHCRWAMLGAAGIFIPEFLTKIGILNTPSWYSAGTEEYFTDTTTLFIVELIFIGWAXRRRWAD

SEQ ID NO: 76406 - protein, 126 aa, Gossypium hirsutum
  Clone ID: LIB3166-038-P1-K1-D6.pep
HPSAHASVLASAHASAKGALFVLTSAIATVAISSPSSQKTGSVVGTTKASFLTGKKLRSVRKYTKPAAGPTFPVCAAADPDRPLWFPGSTPAPWLDGSLPGDFGFHPLGLGSDPETLRWHVQAELV

SEQ ID NO: 76407 - protein, 62 aa, Gossypium hirsutum
  Clone ID: LIB3165-006-P1-K1-C6.pep
PAEGPTFPVCAADDPNRPLRFPGSTPAAWLDGSLPGDYGFDPLGLGSAPETLRWNVQAELVH

SEQ ID NO: 76408 - protein, 64 aa, Gossypium hirsutum
  Clone ID: LIB3166-003-P1-K1-B3.pep
AKWPLLVASSAVAAVAISSPSSQRSGSVVRTTKASFLTGKKLRSVKKYTKPAAVRTVPVCAVAD

SEQ ID NO: 76409 - protein, 288 aa, Gossypium hirsutum
  Clone ID: GOSHI-09MAY01-C4547_1.pep
KVARLVREDQIPTAKETSTAAAAAASPSHDTSLHSVNFCETTIKNGTGAILPEKPVSTGQTNNLISAKTSETALLDERSLLACIVRTIPTGGKIRISSTLPNRLGKMLAPLHWHDYKKYGKLDDFVASHPALFLIEGDYIQLREGAQEMIAATAAVAKVAAAAAASSPYSSILPSVAVTPMAQPNRLKKGLPTADSNHAKNENAAFKGYAVISKTAAGDHSQLSGMQNQHPNGGSGGVAGNLSNVKILSKSNGANSERSSLKNVERQASGQGRSNSNFAGKQQGRYVA

SEQ ID NO: 76410 - protein, 216 aa, Gossypium hirsutum
  Clone ID: GOSHI-09MAY01-C4577_1.pep
INSLIHRVLAAAYTDIEEVLECVDWLDNELSSLADERAVLKHFKWPERKADAMREAAIEYRAPAWVESEISSFEDDTSIPCGVALKRMAGLLDKSERSIQRLIKLRNSVIRSYQECKIPVDWMLDTGMVYKIKQASMKLVTMYIKRVGTELQLVRSLDKESAQEALLLQGMHFANRAHQFAGDLDSETLCAFEEIKECIPGHLVGSKELLAGISSA

SEQ ID NO: 76411 - protein, 160 aa, Gossypium hirsutum
  unsure (1)..(160): unsure at all Xaa locations
  Clone ID: LIB3584-053-P1-K2-F8.pep
PTRAATRTPVAVAAAAWNQTKPTAISVHSSIAGEIXNRSPHLLSITADVDSKGEVIICLIHRVLAAAYADIEEVLKFVDWLDNELSFLADERAVLKHIKWTERNAYATREAAIEYRDLKVLELEMSFFADDTSIPCGVALKRMAGLLDKSERSIQRLIKL

SEQ ID NO: 76412 - protein, 146 aa, Gossypium hirsutum
  Clone ID: GOSHI-09MAY01-C4517_2.pep
WSGNGDSEVQRTMLELLNQLDGFEASNKIKVLMATNRIDILDQALLRPGRIDRKIEFPNPNEESRFDILKIHSRRMNLMRGIDLKKIAEKMNGASGAELKAVCTESGMFALRERRVHVTQEDFEMAVAKVMKKESEKNMSLRKLWK

SEQ ID NO: 76413 - protein, 417 aa, Gossypium hirsutum
  Clone ID: GOSHI-09MAY01-C4517_1.pep
MATVDIERKQAASAEEICTAKSGAKQGEGLRQYYIQHIHELQLNLRQKTHNLNRLEAQRNELNSRVRMLREELQLLQEPGSYVGEVVKVMGKNKVLVKVHPEGKYVVDIDKNIDITKITPSTRVALRNDSYVLHLILPSKVDPLVNLMKVEKVPDSTYDMIGGLDQQIKEIKEVIELPIKHPELFESLGIAQPKGVLLYGPPGTGKTLLARAVAHHTDCTFIRVSGSELVQKYIGEGSRMVRELFVMAREHAPSIIFMDEIDSIGSARMESGSGNGDSEVQRTMLELLNQLDGFEASNKIKVLMATNRIDILDQALLRPGRIDRKIEFPNPNEESRLDILKIHSRRMNLMRGIDLKKIAEKMNGASGAELKAVCTEAGMFALRERRVHVTQEDFEMAVAKVMKKETEKNMSLRKLWK

SEQ ID NO: 76414 - protein, 122 aa, Gossypium hirsutum
  unsure (1)..(122): unsure at all Xaa locations
  Clone ID: LIB3083-060-Q1-L1-B9.pep
MATVAIERKQQASAEEMCTAKSGAKQGEGXRQYYLQHIHELQLNLRQKTHNLNRLEAQRNELNSRVRMLREELQLLQEPGSYVGEVVKSMGKNKVLVKVHPDGKYXVDIDKNIDITXITPST

SEQ ID NO: 76415 - protein, 48 aa, Gossypium hirsutum
  Clone ID: LIB3147-049-Q1-K1-A3.pep
DAWVCTEAGMFALRERRVHVTQEDFEMAVAKVMKKETEKNMSLQKLWK

SEQ ID NO: 76416 - protein, 162 aa, Gossypium hirsutum
  Clone ID: GOSHI-09MAY01-C4537_1.pep
MSEEDKNEAKVVETPRKPPRLNERILSSMSRRSVAAHPWHDLEIGPGAPAIFNCVVEIPKGSKVKYELDKKTGLIKVDRVLYSSVVYPHNYGFIPRTLCEDNDPLDCLVIMQEPVLPGCFLRARALGLMPMIDQGEKDDQIIASWGDDPEYQHFTDIKKLSP

SEQ ID NO: 76417 - protein, 136 aa, Gossypium hirsutum
  Clone ID: uC-gsflmaxxa003g08b1.pep
MAEGEANANETSRQAPKLNERILSSLSRRSVAAHPWHDLEIGPDAPNVFNCVVEIAKGSKVKYELDKKTGMIKVDRVLYSSVVYPHNYGFILRTLCEDNDPIDCLVIMQEPVVPGWFVRARALGLMPMIDPGEKDD

SEQ ID NO: 76418 - protein, 366 aa, Gossypium hirsutum
  unsure (1)..(366): unsure at all Xaa locations
  Clone ID: GOSHI-09MAY01-C4527_1.pep
FATGPYAHXTQLVSPPVFSTFTTEPSTAPLTPPPELAHLTTPSSPDVPFARFLTSSADLESANKTNYIAANDLQATYSLYPGSPASSLRSPSSRTSADCLSSSFPEREFPPQWDPSISPQNGKHSRSGSGRLFGHDVTGSSIGSQDTNFFCPATFAEFYLDQNPLPHAGGXRLSVSKDSDVYPTSCSGHQNKQSKSPKQDVEELEAYRASFGFSADEIITTTQYVEITDVTDDSFTMRPFPIDKPAFEESTEPASIAKGSKTDRIQENFLDEKKGKSKSDIVNWAVHHDVQVACNGYEDQKSRRQVGDVSGSSTPINHTLTDEEDIYLKKSSSRSRKYQLGLSSSDAEIDYRRGRSLRGKGDFECH

SEQ ID NO: 76419 - protein, 295 aa, Gossypium hirsutum
  unsure (1)..(295): unsure at all Xaa locations
  Clone ID: GOSHI-09MAY01-C4457_1.pep
TARSSIPSSKPASRAATPTRRPSTPSSTPSISAPPIKSSSSVTKPTPAASRSSVPSRGASPTVASRPWKPSEMPGFSLDAPPNLRTTLPDRPLSATRGRPGAPSARSSSVEPGAIGRPRRQSCSPSRGRLPNGAMLHLSGGSVPAVSRGYSKASDNVSPVVIGTKMVERVINMRKLAPPKQDDKNSPQRNSSGKSASPDSTGFGRTLSKKSLDMAIRHMDIRRSIPGNLRPLMTNIPASSMYSVRSGHTRSRTISVLDSPLATSSNGSSELSVNNNGHCFDGSEXKDDIGSERVG

SEQ ID NO: 76420 - protein, 116 aa, Gossypium hirsutum
  Clone ID: GOSHI-09MAY01-C4477_1.pep
GPHKNCGIPICMQDVYFSGTVPFYNVPNSDGELFSNHMNTSCDVDGAITGIRTRSRPSRSQLDSENPLAQGNASRRLRLQCKLQVHSLHCDNAIYNRSDVEIEDDSKSVVTKVRSL

SEQ ID NO: 76421 - protein, 166 aa, Gossypium hirsutum
  Clone ID: LIB3585-052-P1-K1-B4.pep
PTRPPTRPAEDCGIPNSDGEGGSNHMNTSCDVDGAITGIRTRSRPSRSQLDSENPLAQGNASRRLRLQCKLQVHSLHCDNAIYNRSDVEIEDDSKSVVTKEEKVVEKDITVGCNADFGIVLGSKTIVSVRKETSSRWSKVFSVHHSRKPFAVVFRVAVMLILVIVL

SEQ ID NO: 76422 - protein, 176 aa, Gossypium hirsutum
  Clone ID: GOSHI-09MAY01-C4467_2.pep
HVVLAQEGHCRPGEVLLGTDSHTCTAGAFGQFATGIGNTDAGFVLGTGKLLLKVPPTLTFVMDGEMPPYLLAKDLILHIIGEISVAGATYKAMEFVGTTVESLNMEERMTLCNMVVEAGGKNGVVPADSTTFKYLEGKTSLPYEPVYSDAQASYLSEYRFDISKLEPLVAKPHSSD

SEQ ID NO: 76423 - protein, 290 aa, Gossypium hirsutum
  Clone ID: GOSHI-09MAY01-C4467_1.pep
FGGIILTGYVQPPRPPTLTSAMDGEMPPYLLAKDSILQIIGEISVAGATYKAMEFVGTTAESLYMEERMTLCNMVVEAGGKNGVVPADSTTFKYLEDKTSVPYEPVYSDAQASFLSEYRFDISKLEPLVAKPHSPDNRALARECKDVKIDRVYIGSCTGGKTEDFLAAAKVFLASGKKVKVPTFLVPATQKVWLDLYTLPVPGSGGKTCSQIFEEAGCDTPASPSCGACLGGPKDTYARMNEAKVCVSTTNRNFPGRMGHKEGQIYLASPYTAAASALTGYVTDPREFLQ

SEQ ID NO: 76424 - protein, 68 aa, Gossypium hirsutum
  Clone ID: GOSHI-09MAY01-C4417_1.pep
VDVYRCLMQASKQAEDAPKKIIRVQKRCWRSIPHLSKPGEKTSNLMKPNRKSPQPEIVDANNMLLYSP

SEQ ID NO: 76425 - protein, 95 aa, Gossypium hirsutum
  Clone ID: GOSHI-09MAY01-C4407_9.pep
MASKRILKELKDLQKDPPTSCSAGPVAEDMSHWPASIMAPPDSPYAGRVLLGSIHFPPDYPFKPPKAAFRTKVFHPNINSNGSICLDILKEQWSP

SEQ ID NO: 76426 - protein, 113 aa, Gossypium hirsutum
  unsure (1)..(113): unsure at all Xaa locations
  Clone ID: GOSHI-09MAY01-C4407_8.pep
MHQGSPDMPYSGGRPLGTIHXPADYPFKPPKVAFKTKVFHPNINSNGSICLDILKEQWSPALTISKVLLSICSLLTDPNPDDPLVPEIAHMYKTDRAKYETTARSWTQKYAMG

SEQ ID NO: 76427 - protein, 148 aa, Gossypium hirsutum
  Clone ID: GOSHI-09MAY01-C4407_4.pep
MASKRILKELKDLQKDPPTSCSAGPVAEDMFHWQATIMGPPDSPYAGGVFLVTIHFPPDYPFKPPKVAFRTKVFHPNINSNGSICLDILKEQWSPALTISKVLLSICSLLTDPNPDDPLVPEIAHMYKTDKSKYETTARSWTQKYAMG

SEQ ID NO: 76428 - protein, 148 aa, Gossypium hirsutum
  Clone ID: GOSHI-09MAY01-C4407_3.pep
MASKRILKELKDLQKDPPTSCSAGPVAEDMFHWQATIMGPPDSPYAGGVFLVTIHFPPDYPFKPPKVAFRTKVFHPNINSNGSICLDILKEQWSPALTISKVLLSICSLLTDPNPDDPLVPEIAHMYKTDRNKYETTARSWTQKYAMG

SEQ ID NO: 76429 - protein, 148 aa, Gossypium hirsutum
  Clone ID: GOSHI-09MAY01-C4407_2.pep
MASKRILKELKDLQKDPPTSCSAGPVAEDMFHWQATIMGPPDSPYAGGVFLVTIHFPPDYPFKPPKVAFRTKVFHPNINSNGSICLDILKEQWSPALTISKVLLSICSLLTDPNPDDPLVPEIAHMYKTDRAKYETTARSWTQKYAMG

SEQ ID NO: 76430 - protein, 373 aa, Gossypium hirsutum
  Clone ID: GOSHI-09MAY01-C4407_1.pep
MDGKRIEGNEVYALAMCVSILLFAPIVVSQPIPADKSQVEAWFNGIIKPVKERGTTLDPELVQAETEPRIIKVMQGGGGEFDTITKAIESVPSGNAKRVIISIGPGSYKEKIRIERNKPFITLLGDPKNMPNLTFDGTAKQYGTVDSATLITESNYFVGANLNIVNSAPRPDGKMVGAQAVALRVSGDRSAFYNCKIIGFQDTLCDDRGNHFFKDCHIRGTVDFIFGSGTSLYLNTEIFVVGDPEGDPEMAIITAHARESSSEDTGYSFVHGRITGTAKDVFLGRAWKSSPRVVYSYTEMDEIVHPGGWSSNRQPERADTVYYGEYKCTGKGATPATREKFVKQLSDAEAKPFLVLDYVEGTKWLLPPPTVPK

SEQ ID NO: 76431 - protein, 73 aa, Gossypium hirsutum
  Clone ID: uC-gsflmaxxa009d12b1.pep
RRPEWALNLEKQSQQGLMQFELRIRKEKEARCWRLGRNTSRDHLASSSFRRKIRHECDGGQNKRCDAREADHR

SEQ ID NO: 76432 - protein, 46 aa, Gossypium hirsutum
  Clone ID: LIB3148-050-Q1-K1-F4.pep
RPKSQGMKPSYYIRSRTLTKRMFYGKVKNGCMKVVKNKFYKKRTIY

SEQ ID NO: 76433 - protein, 138 aa, Gossypium hirsutum
  Clone ID: uC-gsflmaxxa009c10b1.pep
MASKRILKELKDLQKDPPTSCSAGPVAEDMFHWQATIMGPPDSPYAGGVSIVTIDLPPDYTFPPPIDAMQGKGGEPNTITKAIVSVPLWNAQRVTISIGPGSYKEKIRIERNKPFITLLGDPKNMPNLTFDGTAQQYG

SEQ ID NO: 76434 - protein, 48 aa, Gossypium hirsutum
  Clone ID: uC-gsflnu33B101a03b1.pep
PSYSIRSSTLNNRVFLGPAPTGCVKHCSCPHHIQGVAVDLLARDGSKT

SEQ ID NO: 76435 - protein, 64 aa, Gossypium hirsutum
  Clone ID: LIB3135-021-Q1-K1-D1.pep
MASKRILKELKDLQKDPPTSCSAGPVAEDMFHWQATIMGPPDSPYAGGVFLVTIHFPPDYPFKP

SEQ ID NO: 76436 - protein, 110 aa, Gossypium hirsutum
  Clone ID: LIB3147-013-Q1-K1-D5.pep
MASKRILKELKDLQKDPPTSCSAGPVAEDMFHWQATLMGPPDSPYAGGVFLVTIHFPPDYPFKPPKVAFRTKVFHPNINSNGSICLDILKEQWSPALTIFKVLLSICSLL

SEQ ID NO: 76437 - protein, 65 aa, Gossypium hirsutum
  Clone ID: LIB3189-030-P1-K1-B8.pep
MASKRILKELKDLQKDPPTSCSAGPVAEDMFHWQATFMGPPDSPYAGGVFLLSLVVFLSLHIFFH

SEQ ID NO: 76438 - protein, 88 aa, Gossypium hirsutum
  Clone ID: LIB3145-024-Q1-K1-F8.pep
KVEPLILHRLDNAIKPKLPLGIYQPVLDVTQQSEQRGEYLHTLLEHILHCPRFFFHPFPPPPSFLLIKREICLFSSGNVSGRSGRTRG

SEQ ID NO: 76439 - protein, 96 aa, Gossypium hirsutum
  Clone ID: GOSHI-09MAY01-C4437_1.pep
HASAILEGRFITVERSRGKRPRTPTPGHYLGLKNTRDYGRGERGRYRGGGRDDYGYRRSPRRSPYRGRDYSPRYSPHGGRSRRERSYSPPYSRGSR

SEQ ID NO: 76440 - protein, 66 aa, Gossypium hirsutum
  Clone ID: LIB3584-045-P1-K2-H12.pep
LNIKLVFSTFQSRTKRSMTPTPGHYLGLKNTIDYGRGERGRYRGGGRDDYWYRQSPTRSPYRGRDY

SEQ ID NO: 76441 - protein, 42 aa, Gossypium hirsutum
  Clone ID: GOSHI-09MAY01-C4787_3.pep
MAGFEQRIKERAKELKVFFKKGVKIVGESCKKGWYKVKHIRG

SEQ ID NO: 76442 - protein, 373 aa, Gossypium hirsutum
  unsure (1)..(373): unsure at all Xaa locations
  Clone ID: GOSHI-09MAY01-C4787_2.pep
NAEKKRGSKRKVEEMASKLLRQTLTKTNRTAAIRCFFTAASVASPSEYEYPTGITMKGVKISGRPLYLDMQATTPVDPRVLDSMLPFYLSRYGNPHSRTHLYGWESETAVETARAQVAALIGASPKEVVFTSGATESNNISIKGVLHFYKDKKRHIITTQTEHKCVLDSCRHLQQEGFEVTYLPVGSDGLIDLDRLRKEIRPDTGLISVMAVNNEIGVVQPVEEIGKICKEFNVPFHTDAAQALGKIKVDVEKWNVSLMSLSGHKIYGPKGVGALYMRRRPRIRVEPQMNGGGQERGIRSGTVPTPLVVGIXAACDLAMKEMEYDEKRIKGLQEMLLNGIREKIDGVVVNGTMDTRYVGNLNLSFAYVERESL

SEQ ID NO: 76443 - protein, 166 aa, Gossypium hirsutum
  Clone ID: GOSHI-09MAY01-C4787_1.pep
MFLRMISRPLLAKVKETTGIVGLDVVPNAREVLIGLYNKTLKEIQAVPEDEGYRKAVESFTRHRLKVCQEEEDWEMIEKRLGCGQVEELIEEARDELTLIGKMIEWDPWGVPDDYECEVIENDAPIPKHVPQHRPGPLPEEFYKTLEALSKKDEPKVTSGDPQIKE

SEQ ID NO: 76444 - protein, 77 aa, Gossypium hirsutum
  Clone ID: uC-gsronu33B179g01b1.pep
LTKISTWKAQRMQDDGRQKNQPLMCLALYQPFLHDSPTIFTPFLKKTLSSLALSFIGCSNPAMAAIPRRGLIDPNVI

SEQ ID NO: 76445 - protein, 65 aa, Gossypium hirsutum
  Clone ID: LIB3148-024-Q1-K1-C5.pep
KFRAVHFTSTWGVPDDYECEVIENDAPIPKHVPQHRPGPLPEEFYKTLEALSKKDEPKVTSGDPK

SEQ ID NO: 76446 - protein, 42 aa, Gossypium hirsutum; identical to SEQ ID NO: 76441
  Clone ID: uC-gsflnu33B036a04b1.pep

SEQ ID NO: 76447 - protein, 159 aa, Gossypium hirsutum
  unsure (1)..(159): unsure at all Xaa locations
  Clone ID: AW187336.1.pep
KSLXXXLIWXTKRKQDDGRQKNPLVSHLQLLSWLLAWLPFPSQVVLISKHVRFGSLSPTPLGKKPSLVLRRKTLSSKIPFPSVCLIFAMAAGGWRNLMSVCWCSFSGGGCGRKLLGIPFGGGKMKKIRFLGXTMKCRIPLTGLSNRFVIDRKVRDQVAV

SEQ ID NO: 76448 - protein, 76 aa, Gossypium hirsutum
  Clone ID: uC-gsflnu33B136h03b1.pep
FHASAHASDRCHGWVRAASKGASQGAHGFLQEGCEDRGRIMHERLVQSQAHERLMLSTHIILCSSRFPCRDLCESS

SEQ ID NO: 76449 - protein, 122 aa, Gossypium hirsutum
  Clone ID: GOSHI-09MAY01-C4717_1.pep
PTRPKRWDRQSRAFYNLFRQADRVEKLAEIIQRLEQGDLKLRVRALESERAFQRVATVQKTVGSAVAAGSLINLATILYLNSIRVPAVAAYVICAFFSFQVLIGVIKVKRFDQRERLITGTA

SEQ ID NO: 76450 - protein, 41 aa, Gossypium hirsutum
  Clone ID: LIB3148-006-Q1-K1-A1.pep
KFTKLKAFIYVELTNKKCSVSMPLTLFLWVEIDLSSKFPPS

SEQ ID NO: 76451 - protein, 372 aa, Gossypium hirsutum
  unsure (1)..(372): unsure at all Xaa locations
  Clone ID: GOSHI-09MAY01-C4737_1.pep
MKSVFSAPGDYIYFKSQVPLHKIPIGTKQWRYYDFGPKVVTPLICLPGTAGTADVYYKQIMSLSMKGYRVISVDIPCVWNHQEWIQSFEKFLDAIDVHHIHLYGTSLGGFLAQLFAQHRPRRVKSLILSNTFLETRSFAAAMPWAPIVGWTPSXFLLKRYVLTGIRDGLHEPFIADSVDFVVSQVETLSRDELASRLTLTVDSASVKPLLLSDSFITIMDTNDYSAIPQQLKDQLSERYPGARRAYLKTGGDFPFLSRPDEVNLHLQLHLRRVGLEAQPELVQSIPKDGTGGGPSKENDKEDRDDEQKDDGGNPESNSEESQPSPSAPESSESHGLDEQLLSNAEIHYIDQKDSIIFKPSAMSMNQHGAAGG

SEQ ID NO: 76452 - protein, 111 aa, Gossypium hirsutum
  Clone ID: LIB3165-017-P1-K1-C5.pep
MKGVSLAPGDYIHFKSQVPLHKIPVRFFQVPLHKIPIGTKQWRYYDFGPKVVSPLICLPGIAGTADIYYKQIMSLSMKVWNHQEWIQSFEKFLDVINVHHIHLYGTSLGGF

SEQ ID NO: 76453 - protein, 77 aa, Gossypium hirsutum
  Clone ID: LIB3196-003-P1-M1-E12.pep
TSEEFFIQGYRVISVDIPQVWNHQEWIQSFEKFLDVINVHHIHLYGTSLGGFLAQLFAQHRPRRVKSLILSNAFLET

SEQ ID NO: 76454 - protein, 73 aa, Gossypium hirsutum
  Clone ID: LIB3083-014-Q1-L1-D7.pep
MERNKINVGSVSTMKGVSLAPGDYIHFKSQVPLHKIPIGTKQWRYYDFGPKVVSPLICLPGIARTANIYYKQI

SEQ ID NO: 76455 - protein, 168 aa, Gossypium hirsutum
  unsure (1)..(168): unsure at all Xaa locations
  Clone ID: GOSHI-09MAY01-C4697_1.pep
MNGFSTVDGFVEITESLAEMIKFVANEPSVGLFYIQQHTENAIPNVVNLXNHVVEKSHEATLHTQDLEDSITTVRSMKECGFPIADEMIKDIKSSLMLMSSKQPKRGLIHSPASSFQMGRTSSSGPMSWNPAGNIQFDGSNYFSTVIKSAEHKACNFKWPQLDTRNRW

SEQ ID NO: 76456 - protein, 263 aa, Gossypium hirsutum
  Clone ID: GOSHI-09MAY01-C4687_1.pep
MQFSRNFMIICSALLLCSSLTYGQTASPPAPVAMTPTPTPAPAPAPEYVNLTYLLSVAGPFHTFLNYLESTKVIDTFQSQANNTEQGITIFVPKDDSFKGLKKPSLSNLSDDQLKSLILFHALPKYYALADFNYLSTKGPITTLAGGQYTLNFTDDSGTVHLDSGWSKTKVSSAVHSTDPVAIYQVNKVLLPEAIFGTDIPPTPAPSPAPDISPAADSPSADSKEGGSPSKALPSDSAAHRVMKLSIWSHLVLAVFGGLGLLF

SEQ ID NO: 76457 - protein, 160 aa, Gossypium hirsutum
  Clone ID: GOSHI-09MAY01-C4647_1.pep
PRVRPRVRPRVRPRVRPPARAALTEFFSHLYTVTVVFFTLLLLEVAILIRSLTGGLSDSEKRLITTTQYLKFIEEKNPTIIYSTRSSSRVDLSSNECTVCLSELEEGEKVRKLKCKHTFHKDCLDRWLQQYWATCPLCRTKVLPDEVGANFHRLQNQCRV

SEQ ID NO: 76458 - protein, 55 aa, Gossypium hirsutum
  Clone ID: GOSHI-09MAY01-C4637_1.pep
MNGHSNGFGSVAAVAAAEYIRRHHLHEIGENQCSSTLVKHIKAPVPLVWSLVRRF

SEQ ID NO: 76459 - protein, 258 aa, Gossypium hirsutum
  Clone ID: GOSHI-09MAY01-C4627_1.pep
KDKIILGSERKSAVISEESRKLTAFHEAGHALVAIHTEGALPVHKATIVPRGMALGMVSQLPEVDQTSFSRKQMLARLDVALGGWVAEELIFGENEVTSGPRSDLENATELARSMVTNYGMSKEVGLVTHSYNDDGRSLSTETRHLIEKEVKYLLEKAYNNAKTILTTHSKEHHALANALLEHETLTGAQINALLAQVNSQQQQQEQHQEVIVAQNGPQSNPVPPSPSPAASAAAAAAAAAATATAAAKAKGVAPVGS

SEQ ID NO: 76460 - protein, 277 aa, Gossypium hirsutum
  Clone ID: GOSHI-09MAY01-C4047_1.pep
MMISVQKLHQFFGERLIPFLKGVSSLSEDARSVLPAAYALDNELGQLYTSSLEEQKVQHSPRPYLDHYQIEKVSGPLIIDWVIGQHTHILEWARRALDLEDWEPLSFHQRQAASIVEVVRILEETVDQLFGMNLPLDITHLQALLSIVFHSLDAYLQRVLNQLVEKNHLYPSAPPLTRYTETAIPLIKKRLNEYKVLDDIMLDRLNELTIPKLCIRLNTLQYIQKQVGVLEDDIRNSWAAVRPSLNQTQAEEEPVEILESDSLTHNETVDELLVRPL

SEQ ID NO: 76461 - protein, 143 aa, Gossypium hirsutum
  Clone ID: GOSHI-09MAY01-C4017_1.pep
MQEALRAGLHSESSHSSDSEKQESGALGNNEDDTFNSVVSRSSQTCRIDLLEEVIEDAKHNKKTLFQAMQSIMNLMREVELQEEAAEQAKEECAMGGSDILVKVEELKQMRPHAKEANDMVVRLVGNSPLFLSHKTYCSSIFF

SEQ ID NO: 76462 - protein, 145 aa, Gossypium hirsutum
  Clone ID: GOSHI-09MAY01-C4037_2.pep
MSDLQAPLRPKRKKGLVDFLVQFRWIFVIFFVLPFSTLYYFLIYLGDVRSEMKSYKQRQKEHDENVLKVVKRLKQRNPKKDGLVCTARKPWIAVGMRNVDYKRARHYEVDLSAFRNILEIDRQRMIARVEPLVTMGQITRVTVPM

SEQ ID NO: 76463 - protein, 563 aa, Gossypium hirsutum
  Clone ID: GOSHI-09MAY01-C4037_1.pep
MSDLQAPLRPKRKKGLVDFLVQFRWVFVIFFVLPFSALYYFLIYLGDVRSEMKSYKQRQKEHDENVKKVVKRLKQRNPKKDGLVCTARKPWIAVGMRNVDYKRARHYEVDLSAFRNILEIDRERMIARVEPLVNMGQITRVTVPMNLSLAVVAELDDLTVGGLINGYGIEGSSHIYGLFSDTVVAYEIVLADGRVVRATKDNEYSDLFYAIPWSQGTLGFLVAAEIKLIPVKEYMRLTYTPVVGNLQDLAQGYMDSFAPRDGDQDNPEKVPDFVEGMVYSPTEGVFMTGRYASKEEAKKKGNKINNVGWWFKPWFYQHAQTALKKGEFVEYIPTREYYHRHTRCLYWEGKLILPFGDQWWFRFLLGWLMPPKVSLLKATQGESIRNYYHEMHVIQDMLVPLYKVGDALEWVHHEMEIYPIWLCPHRLFKLPVKTMVYPEPGFEQQHRQGDTPYAQMFTDVGVYYAPGPVLRGEVFDGAEAVRKMEQWLIKNHSFQPQYAVSELNEKDFWRMFDADLYEHVRRKYGAVGTFMSVYYKSKKGRKTEKEVQEAEQAHLETAYAEAD

SEQ ID NO: 76464 - protein, 183 aa, Gossypium hirsutum
  unsure (1)..(183): unsure at all Xaa locations
  Clone ID: GOSHI-09MAY01-C4387_1.pep
FWRKGRLGGKNSVEKELRGLDLQTGIFSLRQIKAATKNFDTENKIGEGGFGCVYKGLLSDGTVIAVKQLSSKSRQGNREFVNEIGMISALLHPNLAKLQGVVXEGNQLLVVYXEHMGNNWLSRALFGKNATCKLKLNWPTRQKICLGIPGGLAYLHEQSRIKIVHRGLXNSYVLLDKDLNAKF

SEQ ID NO: 76465 - protein, 188 aa, Gossypium hirsutum
  unsure (1)..(188): unsure at all Xaa locations
  Clone ID: LIB3584-045-P1-K2-C9.pep
RTRGIGMISALQHPNLVKLYGCCVEGNQLLLVYEYMENNCLSRALFGKNATCKLKLNWPTRQKICLGIARGLAYLHEESRIKIVHRDIKTSNVLLDKDLNAKISDFGLAKLNEDDKTHISTRIAGTIGYMAPEYAMRGYLTDKADVYSFGVGALEXVSGKSNTNYRPSEDYVYLLDWAYVLRERGKLL

SEQ ID NO: 76466 - protein, 92 aa, Gossypium hirsutum
  Clone ID: GOSHI-09MAY01-C4357_1.pep
DFTAYPRLFRRDVWLTSRSSEHVPGNQYTGTGWLLPHACQNNSENPPPNLYRQELPGGTGVPSGRIPPGECFTGVVLSHCARSLLSNQPWGS

SEQ ID NO: 76467 - protein, 266 aa, Gossypium hirsutum
  unsure (1)..(266): unsure at all Xaa locations
  Clone ID: GOSHI-09MAY01-C4377_1.pep
PTRPPTRPQRYHYNVADVRLAQHIEKGSEDGLFISSVASCSNLWALIMDAGTGFTAQVYELSPYFLHKEWIMEQWEKNYYISAIAGANNGSSLVVMSKGTQYLQQSYKVSDSFPFKWINKKWREGFXVTAMATAGSRWAIVMSRGAPFSDQVVELDFLYPSEGIHRRWDSGYRITSTAATWDQAAFVLSVPRRKPADETQETLRTSAFPSTHVKEKWAKNLYIASVCYGRTVSPTPPRSRGFRCNSFCSILHLYNEGRLYCFNLRN

SEQ ID NO: 76468 - protein, 231 aa, Gossypium hirsutum
  Clone ID: GOSHI-09MAY01-C4307_2.pep
PTRPVQDVLGDGLISAGHDISDGGLLVCALEMAFAGNCGIALDLASLGNSVFQSLFAEELGLILEVGGNNVHSVMDKLSSVDVSAELIGRVTTSPVIELKVDGITHLNEKTSLLRDMWEDTSFQLEKLQRLASCVELEKEGLKFRHEPSWPLSFTPSVTDEKFFTTALKPKVAIIREEGSNGDREMSAAFYAAGFEPWDVAMSDLLNGVISLNEFRGIAFVGGFSYADVLD

SEQ ID NO: 76469 - protein, 151 aa, Gossypium hirsutum
  unsure (1)..(151): unsure at all Xaa locations
  Clone ID: LIB3583-026-P1-K1-C7.pep
DVSAEFISRVSSSPVIELXVDGITHLNEKTSLLRDMWVDSCFLLEKLLXIGFLSGSGXVGLLFRHEPSWPLSFTPSVTDEIFFTTALKPKVAIIREVGSYGVRVMSAAFYDAGFEPWDVAMSDLLYRVISXYEFRGIASSGGFSYADELVS

SEQ ID NO: 76470 - protein, 175 aa, Gossypium hirsutum
  Clone ID: GOSHI-09MAY01-C4227_1.pep
MAYALITILLLAIYHHTAQSAAPPPATTAPPSMLPPAARDFLQAHNQARAAVGVAPLKWSQQLANASSLIARYQRNKMGCQFANLTNHKYGANQLWGSGAAVTPLMAVETWVKEKDYYDYGTNTCAPNHKCGVYTQVVWKNSSDLGCSQATCKDQVTLTICFYIPPGNYIGEKPY

SEQ ID NO: 76471 - protein, 78 aa, Gossypium hirsutum
  Clone ID: GOSHI-09MAY01-C5947_3.pep
PNQRFIHSCPGSALQLNFQGQKCHRWVHMLYQDKNRLLRGGGRKGEGEDRGLGFLRNHNRLVSILELVCLNNKDVNME

SEQ ID NO: 76472 - protein, 116 aa, Gossypium hirsutum
  Clone ID: GOSHI-09MAY01-C5947_2.pep
PNSINKSEVLDVKPVRTLVPIFPEPYEGPPFVCVPPNGPFPSGFSPFFPFSGSNPNPNPNQNDINPTPAPVRPFTAETSNGQNVSPMGTHVNQGQKPAPSYPVKKRGRGRPRTRFP

SEQ ID NO: 76473 - protein, 140 aa, Gossypium hirsutum
  Clone ID: GOSHI-09MAY01-C5947_1.pep
PNSAHNQQPQCAVRLLVHLQRTQRPKHDQFCTKKARFILPIPVDFTSTGLESPSPETIFGVGIGPRRRRKVSPCFGLFGLEDRALRWRSRTGLKSPPFLAPTTAREGALAFGTAARRRGPCLAAGNLERERIGSVFFFFK

SEQ ID NO: 76474 - protein, 97 aa, Gossypium hirsutum
  unsure (1)..(97): unsure at all Xaa locations
  Clone ID: LIB3583-059-P1-K1-E9.pep
KHNRGPKWHNPSPIQHHNQQPQCAVHLLVPSQRTRRPKHDRFCTKMVWVILPTPVDLAQNLTASTSWCRIPPWPSPESGRKEVVHPFSFFGXAVEKA

SEQ ID NO: 76475 - protein, 72 aa, Gossypium hirsutum
  Clone ID: uC-gsflnu33B112d11b1.pep
LHQYRSRKPVDGDHLRLWSGNKKFFYGLLLATRTFGLHPQPFSSSSKHSLIKPHSQIGPPAYIIAQSIPKIS

SEQ ID NO: 76476 - protein, 283 aa, Gossypium hirsutum
  Clone ID: GOSHI-09MAY01-C5967_1.pep
KSPVESPFSYCDAQRGHPSPKLSSAAKPNSVGFNRNSSLAAVSSSSMYWPNRVENVTESVAPVVNKESSERKQGTGNGCKLFGIQLLDKINMEENSPLATISGTGVDDQPLHSLNANSDQQSDPSNLNQSDLPSISCEPEKCLRSPQESQSKQIRSCTKVHMQGMAVGRAVDLTRFDRYEDLLKKLEYMFDIKGQLCGSTKNWQVVYTDDEDDMMMVGDDPWNEFCSMVRKIFIYTSEEVRKLSPKIKLPVNDDDDDDSKATKAGVDTVINPEDRSSIVGQGC

SEQ ID NO: 76477 - protein, 70 aa, Gossypium hirsutum
  Clone ID: LIB3583-059-P1-K1-H12.pep
HDEDDMMMVGDDPWNEFCSMVRRIFIYTSEEVRKLSPKIKLPVNDDDDDSKATKAGVDTVINPEDRSSGT

SEQ ID NO: 76478 - protein, 303 aa, Gossypium hirsutum
  unsure (1)..(303): unsure at all Xaa locations
  Clone ID: GOSHI-09MAY01-C5847_1.pep
MEETFVPFRGIKNDLKGRLLCYKQDWTGGLSAGIRILAPTTYIFFASAIPVISFGEQLERNTDGSLTAVQTLASTALCGIIHSLVGGQPLLILGVAEPTVLMYTFMFNFAKDRKDLGHKLFLACTGXRAFRGMVEELGIPHRENPDQTAWQASWRFGNGMLALVLSFGLLLTALKSRKARSWRYGTGWLRGFVADYGVPLMVLLWTAVSYIPVNDVPRGIPRRLFSPNPWSPGAYSNWTVINEMVNVPPLYIIGAFIPATMIAGLYYFDHSVSSQLAQHKEXNLKNPPLYHYDLLLLGFLVIL

SEQ ID NO: 76479 - protein, 200 aa, Gossypium hirsutum
  Clone ID: GOSHI-09MAY01-C5877_1.pep
QIIINSDTPVDKALEKSGDKTAAAAAYKASVLQQIAEGRLLLTSSNENSEALALIVDGKSLTYALEDDVKDAFLELAIGCASVICCRSSPKQKALVTRLVKTKTGSTTLAIGDGANDVGMLQEADIGVGISGVEGMQAVMSSDIAIAQFRFLERLLLVHGHWCYRRISSMICYFFYKNIVFGFTLFFYEIYASFSDKLYT

SEQ ID NO: 76480 - protein, 139 aa, Gossypium hirsutum
  Clone ID: GOSHI-09MAY01-C5867_1.pep
MGHCFSKDKSDGSDSEQAVEFVGGNVHRVTSKEDWDQKLSEAKRDGKIVIANFSATWCGPCRMLAPFYCELSEKHPSLMFLLIDVDELTDFSTSWDIKATPTFFFLKDGQQIDKLVGANKPELQKKLTAVLDSVGNHGK

SEQ ID NO: 76481 - protein, 74 aa, Gossypium hirsutum
  Clone ID: LIB3585-009-P1-K1-H3.pep
SLPTFFCLNTYCNPAWVMSSTWLKLFDTCVTCRISLTDLIQNRLLSLLVEMCTGLPLKRIGIRSCLKQREMARL

SEQ ID NO: 76482 - protein, 132 aa, Gossypium hirsutum
  Clone ID: GOSHI-09MAY01-C5837_1.pep
MASLHEPWLVENGLKGSSKEIRHGRTAHNMSSSSLRKKSDLTLVSKVRYAMLRQFLANLQEVILGTKLSVLFPAIPLAIVAECYGFGRPWVFALSLLGLTPLAERVSFLTEQIAYYTGPTVGGPVHATCGNA

SEQ ID NO: 76483 - protein, 169 aa, Gossypium hirsutum
  Clone ID: GOSHI-09MAY01-C5547_4.pep
MAETETFAFQAEINQLLSLIINTFYSNKEIFLRELISNSSPPVRKIRFESLTDKSKLDAQPELFIHIVPDKTNNTLSIIDSGVGMTKADLVNNLGTIAWSGTKEFMEASAAGPDVAVRDLETQNRGTGLGDQGFTRLTQEAGTQYRGQCQDRTQPSRVQHQSCHEDPWR

SEQ ID NO: 76484 - protein, 128 aa, Gossypium hirsutum
  Clone ID: GOSHI-09MAY01-C5547_3.pep
RLEQLEKTKTEKRKPAAVPANKRTRASNGGPMPPAKAGRSTNAYVSSFAAPPSIVRSPSHPQYPAAVPAYPSPPPAMYGTQTPPTCPYMYSPEAAPQLAGSYPGAPMNYPAYGGYGNGIAPAYQQAYY

SEQ ID NO: 76485 - protein, 210 aa, Gossypium hirsutum
  unsure (1)..(210): unsure at all Xaa locations
  Clone ID: GOSHI-09MAY01-C5547_2.pep
MGSVPNPGELTELTQPSLDEFQHQTSLMAGCTLMWKELSDHISSLEANLMRQSEALKRKIEALDSETKTSLDSLKKRELSIDDSVKIAVNRVELLKKDALKTLNDDNPDGEVDNGDGLLQILKSTCLRMEAKEFWNFVSGRKKDIELLREKIPEALSECIDPAKFVMEAISEVFPVDKRRNEXRNDLGWACVLVLKSLIPAVVDPVIGKS

SEQ ID NO: 76486 - protein, 520 aa, Gossypium hirsutum
  Clone ID: GOSHI-09MAY01-C5547_1.pep
MGSIPNPGELTELTHPSFDEFQRQTSLMTSCTLLWKELSDHINSLEQNLMKQSETLKRKIEALDSETKASLDSLKKRELSIEDSVKIALSRVEFNTKAAMRTLGDDVEDNPDGEVDDGDGLLQHLKSTCLKMEAKEFWSFVIGKKKEIDLLREKIPAALSECIDPARFVMEAISEVFPVDKRGNEGGSDLAWACVLILESLIPVVVDPVIGKSRILVTPSMKEQAKEIAETWKKSLEERGGIENVKTPDVHTFLQHLVTFGIVKKEDLEFYRKLVVASAWRKQMPKLAVSLGLGDQMPDMIEELISKGQQLDAVHFTYEVGLVDKFPPVPLLKSFLRDAKKAASSILDDPNNTGRAAQLAARKEQSALRAVIKCIEEYKLEAEFPPENLKKRLEQLEKTKTEKRKPVVVPANKRTRVNNGGPMPPAKAGRLTNAYVSSFPAPPPFVRSPSHTQYPTPVPGYPSPPPMYGSRSPPTNPYAYSPEAAPPPLAGSYPGAPMNYPAYGGYGNGLAPAYQQAYYR

SEQ ID NO: 76487 - protein, 69 aa, Gossypium hirsutum
  Clone ID: uC-gsflmaxxa009a05b1.pep
MGSIPDPGELTELTQPSFDEFQRQTSLMTSCTLLWKELSDHINSLEQNLIKQSETLKRIIEALDSATKA

SEQ ID NO: 76488 - protein, 89 aa, Gossypium hirsutum
  Clone ID: LIB3165-037-P1-K1-B2.pep
MGSIPDPGELTELTQPSFDEFQRQTSLMTSCTLLWKELSDHINSLEQNLIKQSETLKRKIEALDSETKASLDSLKKRELSIEDSVKIAL

SEQ ID NO: 76489 - protein, 130 aa, Gossypium hirsutum
  unsure (1)..(130): unsure at all Xaa locations
  Clone ID: LIB3585-046-Q6-K1-G6.pep
DPGVRSTCLKMEAKEFWSFLIGKKKELGELREKIPAALSECIDPARFVMEAISEVFPVDKRRNEGGSDLAWACVLILESLIPVVVDPVIGKSRVLDTPSMKEQAKEIAETWKKSLEXRGRIENVKTPDAH

SEQ ID NO: 76490 - protein, 201 aa, Gossypium hirsutum
  Clone ID: GOSHI-09MAY01-C5537_1.pep
MGCSSSLPDRSSGRSTGLNNADNPEGPDAKNLRVKLVLLGDSGVGKSCIVLRFVRGQFDPTSKVTVGASFLSQTIALQDSTTVKFEIWDTAGQERYAALAPLYYRGAGVAVIVYDITSPESFTKAQYWVKELQKHGSPGILMALVGNKADLQEKREVPVQDGIDYAEKNGMFFIETSAKTADNINQLFEEIAKRLPRPSPS

SEQ ID NO: 76491 - protein, 109 aa, Gossypium hirsutum
  Clone ID: LIB3584-048-P1-K2-B1.pep
CGTEPPVRPTTHAGAGVAVIVYDITSPESFTKAQYWVKELQKHGSPGIVMALVGNKADLQEKREVPVQDGIDYAEKNGMFFIETSAKTADNINQLFEEIAKRLPRPSPS

SEQ ID NO: 76492 - protein, 58 aa, Gossypium hirsutum
  Clone ID: LIB3135-022-Q1-K1-F12.pep
SPSYFPSANTPNNVTVISCPESFTKAQYWVKELQKHGSPGIVMALVGNKADLHEKREI

SEQ ID NO: 76493 - protein, 115 aa, Gossypium hirsutum
  Clone ID: GOSHI-09MAY01-C5497_1.pep
DPGIAFSDGKEREMVVLSKESLLLRVQGKEKPEIKRTIFGEGAFDPTGSDAAKLSPLPQPDEVKLIEPELEQSMQTYPVAAANSPAVPALAALQAIRHQLSTEARLAGKSNEDWT

SEQ ID NO: 76494 - protein, 180 aa, Gossypium hirsutum
  Clone ID: GOSHI-09MAY01-C5457_1.pep
MVMKLVLLWVLGLWSVSGIDLSRAESFLSYLDEEVTMSPGSTTTLIVPLTLIQGAASKGAVCLDGTLPGYHLHRGFGSGANSWVIHLEGGGWCNTIRSCVFRKTTRRGSSKFMEKSINFTGILSNKAEENPDFYNWNRVRVRYCDGASFAGEGQNEAHKLYFRGHRIWLAALEELMAKGM

SEQ ID NO: 76495 - protein, 147 aa, Gossypium hirsutum
  Clone ID: GOSHI-09MAY01-C5417_1.pep
MAGAVEIKTASPNVTRRNFDPTAVVPEPLPPVVTAANGEDAGVDKLDKKSREIVLGKNVHTTCFAVTEPEANDEFTGDKEAYMAGVLARYRKSLMERTKHHLGYPYNLDFDYGALAQLQHFSINNLGDPFIESNYGVHSRLFGYGCA

SEQ ID NO: 76496 - protein, 312 aa, Gossypium hirsutum
  Clone ID: GOSHI-09MAY01-C5407_1.pep
MRISKVYSWFYGYYPWMVVFATTLVLFGSFPRARNNQDEVPLKASKFQKPLRLPNKGYGYPPVLAYWISGSKGDSNKMVRLLKAIYHPRNQFLLQLDSGSSDYERENLGFLIESPTRPQTFGNVSVDGRSYAVNKMGSSALAATLHAAALLLKINSDWDWFIPLSASSYPLMNQDDLLHAFTFLPRDLNFIDYTSNPGWKQRGEINRIVVDPNLYYKSNTPINYDVETRKPDAFEIFGGSPWVILSRPFMEFCIYGWDNIPRKLLMYFTNVAYPLETYFHTVICNSFEFQNTTLSNDLRYDIIPKSPKPKIL

SEQ ID NO: 76497 - protein, 241 aa, Gossypium hirsutum
  Clone ID: GOSHI-09MAY01-C5427_1.pep
RRVNNAGFYSDRFINVPKSLRLPNSPKMFASKPTLERFILSHFPTADVNAFFASFVWKIPATLEPPAKVTPVAVGIEEAKKESNLEDAKIESNKKTPRSSQRKRNPPPKPLTPRNGQKKQKTSRGSGSASAKGSASATPKRQPTRQRVKTPAPPPLETEDRNGGLELSFLDDETTRAEFDNYLNALDDMLTQPLPEEPYSHPVLYNYFAAESEMAEARMKLSSFLDMDFPSLICFKDLDEL

SEQ ID NO: 76498 - protein, 161 aa, Gossypium hirsutum
  Clone ID: GOSHI-09MAY01-C5787_1.pep
MALSESESVAYGGIKKTGSPTQAPESPHEESTPDRSNSSPNKQNSIFSLTLDEIQLKSGKTFGSMNMDEFLANLWNVEENQQVLSQPEPIDGDKGMGCQPSLARQGSFSVPTPLCKKTVDEVWFEIQKELPQPREANDVADHEPPQRQQTLGEITLEDFLI

SEQ ID NO: 76499 - protein, 70 aa, Gossypium hirsutum
  Clone ID: GOSHI-09MAY01-C5717_1.pep
SLQNHIVVQEIPILESNRLIENLETLANINYQESFVPTKKKPRIVRTQKRKKNKKNEPKICTIERDPPKK

SEQ ID NO: 76500 - protein, 168 aa, Gossypium hirsutum
  unsure (1)..(168): unsure at all Xaa locations
  Clone ID: GOSHI-09MAY01-C5707_3.pep
MCRPGKKVVDVAFKASKNIDWEGMAKLLISDEARKEFATFRRTFDEVNSTLQTKFSQEPEPIDWEYYRKGIGSRLVDMYKEAYESVEIPKXVDTVTPQYKPKFDALLVELKEAEEKSLKESERLEKEIAEVQELKQKISTMTADEYFEKHPELKKKFDDEIRNDYWGY

SEQ ID NO: 76501 - protein, 134 aa, Gossypium hirsutum
  unsure (1)..(134): unsure at all Xaa locations
  Clone ID: GOSHI-09MAY01-C5707_2.pep
WFWYGGDELELIVAESELGGGGGSDVGGGGGSXNNNNTRVKGPWSPDEDAVSSRLVANFGARNWSVIARRIPGRSGKSCRLRGCNQLDPCLERKPFTGVEIPELVDAVTPQYRPSMGCMACPIETGRREILDRL

SEQ ID NO: 76502 - protein, 168 aa, Gossypium hirsutum
  Clone ID: GOSHI-09MAY01-C5707_1.pep
MSGAGKKVVDVAFKAGKSIDWEGMAKLLVSDEARKEFATLRRTFDEVNSTLQTKFSQEPEPIDWEYYRKGIGSRLVDMYKEAYESVEIPKFVDTVTPQFKPKFDALLVELKEAEENSLKESERLEKEIADVQELKQKISTMTADEYFEKHPELKKKFDDEIRNDNWGY

SEQ ID NO: 76503 - protein, 50 aa, Gossypium hirsutum
  Clone ID: LIB3146-008-Q1-K1-D3.pep
HASGPTRPPTRPPTRPPTRPPTRPADEYFEKHPELKKKFDDEIRNDNWGY

SEQ ID NO: 76504 - protein, 107 aa, Gossypium hirsutum
  Clone ID: LIB3829-028-Q6-K6-B6.pep
KLWKKYYVWEARSARNERSRKEVVDVAFKAGKSIDWEGMAKLLVSDEARKEFATLRRTFDEVNSTLQTKFSQEPEPIDWEYYRKGIGSRLVDMYKEAYESKFFFCHG

SEQ ID NO: 76505 - protein, 124 aa, Gossypium hirsutum
  Clone ID: LIB3493-020-P1-M1-H4.pep
RVKGPWSPEKDAVLSRLVAKFGARNWSLIARGIPGRSGKSCRLRWCNQLDPCLKRKPFTGVEIPKFVDTVTPQYKPKFDALLVELKEAEEKSLKESERLEKEIAEVQELKQKISTMTADEYFEK

SEQ ID NO: 76506 - protein, 85 aa, Gossypium hirsutum
  Clone ID: GOSHI-09MAY01-C5197_1.pep
MLDIFIWLISFFIIIAIIVLLIYQLTCLADLEFDYINPYDSSSRINKVVLPEFFVQGFLCLFYLVTGHWFMSLLCTPYLYYNVKV

SEQ ID NO: 76507 - protein, 248 aa, Gossypium hirsutum
  Clone ID: GOSHI-09MAY01-C5087_1.pep
VKHEKKTLEMIGKKLKKNSVTLDIVNFGEDDEGKTEKLEALLAAVNNNDTSHIVHIPAGPNALSDVLLSTPIFTGDGEGGSGFAASAAAAAAGGISGFEFGVDPNLDPELALALRVSMEEERARQEAAAKKAAEESSKQEKGGEEQDATMTERASEGASEADNKKNEFLQALAMSMDEPASSHDLQDTEMSDAATEDPELALALQLSVQDSAKDSSSQADMSKLLADQSFVFFILVSLSGVDPNDSFI

SEQ ID NO: 76508 - protein, 306 aa, Gossypium hirsutum
  unsure (1)..(306): unsure at all Xaa locations
  Clone ID: GOSHI-09MAY01-C5017_1.pep
PTRPAFQISVGMAGTSNKTVKLPENFTLLGPGPGYTCGPAKVVPSTTFLTQDRRRKTQALNXTCLTHAPVTWNVTCTYSQFLARKNPSCCVSFSSFYNETITPCPTCACGCQNKNSCVKSGSKVLKRAGVNTPRKDNTPLLQCTHHMCPVRVHWHVKVNYKEYWRVKVSIINFNYRMNYTLWSLAVQHPNLNDVTQVFSFDYKPLVPYESINDTGMFYGMKFYNDLLMEAGPFGNVQSEVLLRKDKDTFTLKQGWAFPRKVYFNGDECMLPPPDTYPFLPNSAPHQQLFSGLTAIAAMVFLLVTVW

SEQ ID NO: 76509 - protein, 329 aa, Gossypium hirsutum
  unsure (1)..(329): unsure at all Xaa locations
  Clone ID: GOSHI-09MAY01-C5027_1.pep
PTRPPTRPGEPICESHENKLLERMAISVEYLNKKVKECFLDLGSFPEDKKIPLDVLINMWVEIHDIDEEEAFAILVELSDKNLLTLVKDPPVGDAYSSYYEICVTQHDVLRDLALHLSNQGDVNERKRLLMPRRDTELPREWERNTDRPFNAQIVSVHTGEMREMDWFRMEFPKAEVLILNFSSNEYFLPPFIYDMPKLRALIVINYGTNEAILENFSVLTNLANLRSLWLEKTWVPQLTNPTVHMKNLRKLSMVLXCKVNNSFNPSVIDLPLIFPRLLELIIDHCHDLIKLPSSICEVNSLQNLSITNCHRLCELPADLGMLKKLQVL

SEQ ID NO: 76510 - protein, 172 aa, Gossypium hirsutum
  unsure (1)..(172): unsure at all Xaa locations
  Clone ID: uC-gsronu33B018g08b1.pep
AGRRGIRGAPHARAFVLYLPFLTELSDKNLLTLVKDPRVGDXYSSYYEICVTQHDVLRDLALHLSNQGDVNERKRMLMPRRDTELPREWDGNTDQPFNAQIVSVHTGEMREMDWFRMEFPKAEVLILNFSSIEYFLSPFIDDMPKLRALIVINYGSNEAILENFQFYQSGNL

SEQ ID NO: 76511 - protein, 215 aa, Gossypium hirsutum
  Clone ID: GOSHI-09MAY01-C5397_1.pep
VAKAKNLLRSKDEAKVTPPKSGKLENGSNVTNNKMSHQRGSQTVVRAPNDRKKGVNKMKTAKITNERLEHNGDGIVSEGKKIDPISESDTVFERYSIETDIMVEECRDNSEDSVCDITLVTTDYQNNRKCIGPNETDHECFTRGAKLKALLLSCPAFLNHADYLFYLHVNLPTTSPKFDINEFTDANRRLFLDCANEIVRRISFPDFQPVQPSLF

SEQ ID NO: 76512 - protein, 213 aa, Gossypium hirsutum
  Clone ID: GOSHI-09MAY01-C5317_2.pep
MAAPIWVWAFYVALTLFPSVLGNSEGDALYTLRRSLSDPDNVLQSWDPTLVNPCTWFQITCNQDNRVTRVDLGNSNLSGHLVPELGKLEHLQYLELYKNNIRGTIPTELGNLKSLISLDLYNNNISGTIPPSLGKLKSLVFLRLNDNRLTGPIPRELVGISSLKVVDVSNNDLCGTIPTSGPFEHIPLSNFEENPRLEGPELLGLASYDTNCS

SEQ ID NO: 76513 - protein, 213 aa, Gossypium hirsutum
  Clone ID: GOSHI-09MAY01-C5317_1.pep
MAAPIWLWAFSVALTLVPSVFGNSEGDALYTLRKSLTDPDNILQSWDPNLVNPCTWFHITCNQNNRVTRVDLGNSNLSGHLVPELGKLEHLQYLELYKNNIQGTIPTELGNLKSLISLDLYNNNISGTIPPSLGKLKSLVFLRLNDNKLTGPIPRELVGISSLKVVDVSNNDLCGTIPTSGPFEHIPLNNFEKNPRLEGPELLGLASYDTNCS

SEQ ID NO: 76514 - protein, 84 aa, Gossypium hirsutum
  Clone ID: AI055005.1.pep
TNHSPRRPVLCITESQSISLVENGPRCCVNSPIIGFQFPSSWNGPGMQFGRFQICNVKFPVRVPISHKFDSLIISEVSIYWVQI

SEQ ID NO: 76515 - protein, 86 aa, Gossypium hirsutum
  Clone ID: LIB3829-034-Q1-N6-F12.pep
PIPPSLGKLKSLVFFRLNDHRLTGPLPRELVGISPLKVVDVSTNDLCGPIPPSGPFEPIPLNKFEEPPRLKGPELLGLPSSPPTCS

SEQ ID NO: 76516 - protein, 143 aa, Gossypium hirsutum
  unsure (1)..(143): unsure at all Xaa locations
  Clone ID: LIB3825-002-Q1-N6-C2.pep
RKLLYVYETEKIYTXFFCQDTLVYIYSLVPRKPTMHTRRKLVATVTFTNTSRLLFFRSRVIELQMLIQSSWYTDLHITSCGFISNSKLYSVNMPFTSSLCHSLQAPAAQDLPVGDFSQSQLDKHNDRVHQTVLPSKPVQEEMM

SEQ ID NO: 76517 - protein, 382 aa, Gossypium hirsutum
  Clone ID: GOSHI-09MAY01-C5337_1.pep
HFFALSTTLASADNNLSAAVVGSRTAPPQKDNQPNLPHISVGRENWGDSNMADGSPRTDTSTDDTEEKNQRFGRGQTNAIVASDSSDRSTDASAHASARALAQNREAARKSRLRKKAYVQQLESSRLKLTQLEQELQRARQQGIFISSTGDQSHSMSGNGALAFDVEYSRWLEEHNKHINELRAAVNSHAGDAELRTIVDSVTAHFDDIFRLKGIAAKADVFHILSGMWKTPAERCFLWIGGFRSSELLKLLASQLEPLTEQQFMGIQNLQQSSQQAEDALSQGMEALQQSLAETLANGSPAAPSGPSGNVANYMGQMAMAMGKLGTLEGFLRQADNLRQQTLQQMHRILTTRQSARALLAINDYFSRLRALSSLWLARPRE

SEQ ID NO: 76518 - protein, 104 aa, Gossypium hirsutum
  unsure (1)..(104): unsure at all Xaa locations
  Clone ID: uC-gsflnu33B133h09b1.pep
MPLFDLARTFMDCYTGALAFDVEYSRWLEEHNKHINELRAAVNSHAGDAELRTIVDSVTAHFDDIFRLKGIAAKADVFHILSXMWKTPAERCFLXIGGFRPSSF

SEQ ID NO: 76519 - protein, 301 aa, Gossypium hirsutum
  Clone ID: GOSHI-09MAY01-C5327_1.pep
MPSQKIETGHQDTVHDVAMDFYGKRIATASSDSTIKIVGVSNNTHQHLATLTGHQGPVWQVAWAHPKFGSLLASCCYDGRVIIWKEGNQNDWAQAHVFDDHKSSVNSIAWAPHELGLCLACGSSDGNISVFTARADGGWDVSRIDQAHPVGVTSVSWAPSTAPGALVGSGLLDPVQKLCSGGCDNTVKVWKLYNGIWKMDCFPALQMHTDWVRDVAWAPNLGLPKSTIASASQDGKVIIWTVAKEGDQWEGKVLHDFGTPVWRVSWSLTGNILAVADGNNNVTLWKEAVDGEWQQVTVVEP

SEQ ID NO: 76520 - protein, 99 aa, Gossypium hirsutum
  Clone ID: uC-gsronu33B048d02b1.pep
QMHTDWVRDVAWAPNLGLPKSTIASASQDGKVIIWTVAKEGDQWEGKVLHDFGTPVWRVSWSLTGNILAVADGNNNVTLWKEVVDGEWFQETVVRAIIF

SEQ ID NO: 76521 - protein, 111 aa, Gossypium hirsutum
  unsure (1)..(111): unsure at all Xaa locations
  Clone ID: LIB3149-020-Q1-K1-G7.pep
GHQGPVWQVAWAHPKFGSLLASCCYDGRVIIWKEGNQNDWAQAHVFDDHKSSVXNSNAWAPHELGLCLACGSFDGNILDFTARAYGGWDELGIVQAQLDVISFASLTPSTA

SEQ ID NO: 76522 - protein, 126 aa, Gossypium hirsutum
  Clone ID: GOSHI-09MAY01-C5277_4.pep
MEIRRLHLRLLLQGFMLFSVMGNCYARFVVEKNSLRLTSPEKIKGTYDSAIGNFGIPQYGGSMAGAVVYPKENQKGCKSFDDFGISFKSKPGALPTFVLVDRGDCFFALKVWNVQYACASSVLSCL

SEQ ID NO: 76523 - protein, 630 aa, Gossypium hirsutum
  unsure (1)..(630): unsure at all Xaa locations
  Clone ID: GOSHI-09MAY01-C5277_1.pep
MELRTFHHHLLQGFMLLSLISNCYARFVVEKNSLTVTSPEKIKGTHDSAIGNFGIPQYGGSMAGVVVYPKENQKACKSFDDFGISFKSKPGSLPTFVLVDRGDCFFALKVWNVQQAGASAVLVADDIEEALITMDNPEEDSSSAKYIENITIPSALIEKHFGETLKKAISGGDMVNVNLDWRESVPHPDDRVEYELWTNSNDECGVKCDMLMEFLKDFKGAAQILEKGGYTQFTPHYITWYCPQAFSLSRQCRSQCINYGRYCAPDPEQDFSSGYXGKDVVIENLRQLCVFKVANXTNKPWLWWDXYVTDFQIRMPHEGXKYNKECADVVIRALGLDGKKIEKCMGDPNADEDNPVLKEEQEAQVGKGSRGDVTILPTLVVNDRQYRGKLAKGAVLEAICAGFEETTEPAVCLSGDVETNECLDNNGGCWQDKATNLTACKDTFRGRVCECPLVDGVQFKGDGYSHCEASGPGRCNINNGGCWHDARDGHAYSACVDAGDGKCQCPPGFRGDGVNNCEDIDECKEKKACQCPECSCKNTWGSYECTCSGDLLYIQDHDTCISKSSTEVRSSWAAVWVILIGLAMASGGAYLIYKYRLRSYMDSEIRAIMAQYMPLDSQAEVPNHVSDSRA

SEQ ID NO: 76524 - protein, 88 aa, Gossypium hirsutum
  Clone ID: LIB3825-011-Q1-N6-G6.pep
YECTCNGDLLYIRDHDTCISKSGTEVRSAWAAMSVILIGLAMAGGGAYLVYKYRLRSYMDSEIRAIMAQYMPLDSQGEVPNYVSNDRA

SEQ ID NO: 76525 - protein, 78 aa, Gossypium hirsutum
  unsure (1)..(78): unsure at all Xaa locations
  Clone ID: LIB3543-012-Q1-K6-H3.pep
ITGTHDTCISKXGSEVKSAWAAVWVILIGLAMASGGAYLVYKYRLRSYMDSEIRAIMAQYMPLDSQSEVPNHVSEDRA

SEQ ID NO: 76526 - protein, 80 aa, Gossypium hirsutum
  Clone ID: LIB3148-050-Q1-K1-D8.pep
FFPKNMLKNKRAIYILYSFNAQYILHINKILAPNPIESMYNKKNHIYSLQILEFLVFMLDYRLHGSAPPLDYPMACKVPL

SEQ ID NO: 76527 - protein, 220 aa, Gossypium hirsutum
  Clone ID: GOSHI-09MAY01-C5267_1.pep
MAMGFLGFALFLFLSLDLDQGSPSSASAASSSSTSQNVEITYGTVLKLMHEKTKFRLHSHDVPYGSGSGQQSVTGFPNVDDSNSYWIVRPEPDTSAKQGDTIPSGTIIRLQHMRTRKWLHSHLHASPISGNLEVSCFGGESESDTGDYWRLIIEGSGKTWKQDQKIRLQHVDTGGYLHSHDKKYARIAGGQQEVCGVREKRADNVWLAAEGVYLPITESK

SEQ ID NO: 76528 - protein, 133 aa, Gossypium hirsutum
  Clone ID: AI055369.1.pep
MAMGFLGFALFLFISLDLDQGSTSSASAASSSSTSQNVEITYGTVLKLMHEKTKFRLHSHDVPYGSGSGQQSVTGFPNVDDSNSYWIVRPEPDTSAKQGDTIPSGTIIMLQHMRTRKWLHSHLHASPISGTIC

SEQ ID NO: 76529 - protein, 140 aa, Gossypium hirsutum
  Clone ID: LIB3828-018-Q1-K6-F9.pep
MAMGFFGLALFLFLTFDFDQGSPSSTSASASAASSSSSQNVQVTYGTVLKLMHEKTKFRLHSHEVPYGSGSGQQSVTGFPNVDDSNSYWIVRPPPDTSAKQGDTIPDGAIIRLQHMRTRKWLHSHLHASPISGNLEVSCF

SEQ ID NO: 76530 - protein, 110 aa, Gossypium hirsutum
  Clone ID: LIB3584-049-P1-K2-C2.pep
KDESPEKIQEKTGEVEEASNFKANTCEKALDNELLTEIEDAAIKENLAKARDGSRSEVNQCEKTNEGNEIPLNEVSVEQVTKNKKLTETTYSTSCSEDLITDGSRDEEEY

SEQ ID NO: 76531 - protein, 218 aa, Gossypium hirsutum
  Clone ID: GOSHI-09MAY01-C5207_3.pep
TEFASYFHYCCSLRFDDKPDDAYLKRIFRDLFIREGFQFDYVFDWTILKYQHSQLTNPPARALGLGAGTSSPLPPAIANADRHTAAEDTRAAGLSSMDSSRRRASGPLMSSGNYAKQKSPVANDHFIGQSGGSSSRQAGVSSSRDAFAGSDVDPQRSRTAYASPGALQKNSSRQRSPIDSADPKRSMSARNTSHVKNYEAALKGIEGLQFESDERIHY

SEQ ID NO: 76532 - protein, 263 aa, Gossypium hirsutum
  unsure (1)..(263): unsure at all Xaa locations
  Clone ID: GOSHI-09MAY01-C5207_2.pep
GRYASMNTHLGIEQSRRDDLESLGYVLMYFLRGSLPWQGLKAGTKKQKYEKISEKKVSTSIEALCRGYPTEFASYFHYCRSLRFDDKPDYSYLKRIFRDLFIREGFXFDYVFDWTILKYQQSQLTTPPARALGPGAGTSAAGPPAFANADRQAAGDNLRAAGLSSMNSSRRKTSGPLNSGSHAKQKGPVANDPAITKERLCYMGQSGGSSSRHIAGSREAFXVAKADPQRSRTTDASHGGGGGRSSRQSPVESSDPKRASSMR

SEQ ID NO: 76533 - protein, 317 aa, Gossypium hirsutum
  unsure (1)..(317): unsure at all Xaa locations
  Clone ID: GOSHI-09MAY01-C5207_1.pep
GIPNVRWFGVEGDYNVMVMDLLGPSLEDLFNFCSRKLSLKSVLMLADQMINRVEFVHSKSFLHRGGRTRPXDIKPDNFIMGLGRRANQVYMIDFGLAKKYRDSSTHQHIPYRENKNLTGTARYASMNTHLGIEQSRRDDLESLGYVLMYFLRGSLPWQGLKAGTKKQKYEKISEKKVSTSIEALCRGYPTEFASYFHYCRSLRFDDKPDYAYLKRIFRDLFIREGFQFDYVFDWTILKYQQSQLTNPPARALGLGAGTSSPLPPAIANADRHTAMEDTRAAGLSSMDSSRRRASGPLMSSGNYAKQKSPVANDHVST

SEQ ID NO: 76534 - protein, 298 aa, Gossypium hirsutum
  unsure (1)..(298): unsure at all Xaa locations
  Clone ID: GOSHI-09MAY01-C5237_3.pep
MTDNNSPPGSPKVNPDHNSEANPLPKDDSSLENIVRRFQDSMSLAKKHKFWETQPVGQFKDAGDTSLPEGPIEPPTPLSEVKQEPYNPPSPYEWTTCDMDSEETCNEVYNLLKNNYVEDDENMFRFNYSKEFLRWALRPPGYCKSWHIGVRAKTSKKLVAFITGVPARIRVRDEVVKMAEINFLCVHKKLRSKRLAPVMIKEVTRXVHLENIWQAAYTAGVVLPTPITTCQYWHRSLNPKKLIDVGFSRLGPRMTMSRTIKLYKLPDQPATPGFRKMELRDVPAVTRLLXNYLSQFVV

SEQ ID NO: 76535 - protein, 89 aa, Gossypium hirsutum
  Clone ID: GOSHI-09MAY01-C5237_2.pep
SARANGNMKEGVILTPVYESKRRLSFPLTQGIVGSFIWCKGSSLFSGVDSRSQRGLDKHQTLQSLGNLSVDSTGSMPATMGRKPFNRFV

SEQ ID NO: 76536 - protein, 273 aa, Gossypium hirsutum
  Clone ID: GOSHI-09MAY01-C5237_1.pep
PTRPPTRPLLKNNYVEDDENMFRFNYSKEFLSWALRPPGYYKSWHIGVRAKASKKLVAFITGVPARIRVRDEVVKMAEINFLCVHKKLRSKRLAPVMIKEVTRRVHLENIWQAAYTAGVVLPTPITTCQYWHRSLNPKKLIDVGFSRLGPRMTMSRTIKLYKLPDSPATPGFRKMELHDVPAVTRLLRNYLSQFVGSPDFDENDVEHWLLPTEGVVDSYLVESPKTHDITDFCSFYTLPSSILGNQNYSILKAAYSYYNVSTKTPLLQLMNDA

SEQ ID NO: 76537 - protein, 96 aa, Gossypium hirsutum
  unsure (1)..(96): unsure at all Xaa locations
  Clone ID: uC-gsflnu33B092d12b1.pep
DAVPTPMTTCRDWRMXLNPQKLIDVGFFRLGPMMTMSRTIKLYKLPDQPATPGFRKMELRDVPAVTRWLRNYLSHGGVSPDFDENDVEHWLLPTED

SEQ ID NO: 76538 - protein, 40 aa, Gossypium hirsutum
  Clone ID: uC-gsflnu33B092c10b1.pep
PCFRRGLDKHQTLQSLGNLSVDSTVSMPATMGRKPFNTFV

SEQ ID NO: 76539 - protein, 119 aa, Gossypium hirsutum
  Clone ID: GOSHI-09MAY01-C6967_1.pep
MEGVGSTRLGRASARYGGSTAVFNGPVRKWKKKWVHVSPSSTAKLSQSNGNGSAASSILLCRWTPLSFADSGSSAVDGEDEEQPPKRKYRYTPVAVLEEERRRAAAAKQVENEARTDEN

SEQ ID NO: 76540 - protein, 201 aa, Gossypium hirsutum
  Clone ID: GOSHI-09MAY01-C6587_1.pep
MSAALPPPASSLKLTATTSFPTSRALFLALRKPQISIIPRATPDSDADSSTEPDSSPSSETSADSDPFESRLSQVRLRYRIGAGKKAERRKSKKSGSVSTSSSSSIYLPPVPLKEAISNGLKVDFGFSPYSERINGRIAILGLTALVLVELATGKSAISYHTPAIIFIQIYFVAAVGALFVKYEKEKVSVWPPSQSSSPQN

SEQ ID NO: 76541 - protein, 108 aa, Gossypium hirsutum
  Clone ID: GOSHI-09MAY01-C6547_1.pep
MNLTMDEAKLKELKEFIDQCKANPSILSDPSLSFFRDYLQSLGANLPSSASGHEAGDSKSKSYVMEESDQVVADDGEKVNLQDVEEEIIESDIDLESDVVEPDNDPHR

SEQ ID NO: 76542 - protein, 138 aa, Gossypium hirsutum
  Clone ID: GOSHI-09MAY01-C6507_2.pep
LHATTVSLTLLFALLYSPNFLFLITQNLPYLIFSFLDSRPITCVSLVSCFDSKLCLLTCVSVHHIIYISLHCFSLLYFPKIISSFRFFLPIFFFSGDFFLGIPRSCLVPSFRLSSFSRGFKLWALEFVKQREIYWLKT

SEQ ID NO: 76543 - protein, 238 aa, Gossypium hirsutum
  Clone ID: GOSHI-09MAY01-C6507_1.pep
MKIQCDVCERAPATVICCADEAALCAKCDIEVHAANKLASKHQRLLLQCLSNKLPPCDICQEKAAFIFCVEDRALFCRDCDEPIHPAGSLAANHQRFLATGIRVALSSPPVRNTENNVLEPPNKSAPQTSMKRPAHQQHSSFSSPWAVDDLLELSDIQSLNKKEHSELGELEWLADIGLFGDQLPQEALAAAEVPQLPISQSSSTNLYRPTKYSMALKKPRIETPDEDDEFFTVPDLG

SEQ ID NO: 76544 - protein, 107 aa, Gossypium hirsutum
  Clone ID: LIB3165-005-P1-K1-A2.pep
TGTDRPGRRVRPRVRPRVRFITSSTFPSTGSLFYIFPRLFSLSFFSSLFFFSGKKDFFSGIPRSCLVPSFRLSSFSRGFKLWVSLEFVKQREKYWLKTSSSVLNQVL

SEQ ID NO: 76545 - protein, 230 aa, Gossypium hirsutum
  Clone ID: GOSHI-09MAY01-C6537_1.pep
TWMWVFSMPLLKIFTSKIVGFLGAQTLPLATLMVSTVLVSILVMIFSFIGNVFGGASFNPAASMTFHVAGLKKNDSILSMAVRFPAQAAGGVAGVKAALGLIPAEYSNTLTGPSLKVDLHTGAVAEGLFTFGRSLALLLIMFMGPKNGWVKQWLVSLATAILVLTGSRFTGAPMNPASAFGWAYVNNRHNSWELYYVYWIGALFGATLGAWVFRFMVSLPLPPPTKQKKA

SEQ ID NO: 76546 - protein, 104 aa, Gossypium hirsutum
  unsure (1)..(104): unsure at all Xaa locations
  Clone ID: GOSHI-09MAY01-C6487_2.pep
RAARKSAPTTXGVKKPHRYRPETVALREIRXYQKSTELLIRKLPFQRLVREIAQDFKAITSAGTKKGDLFLADVNSQLKSKNVITDIKAIKVDISSNVRTSSDM

SEQ ID NO: 76547 - protein, 136 aa, Gossypium hirsutum; identical to SEQ ID NO: 61413
  Clone ID: GOSHI-09MAY01-C6487_1.pep

SEQ ID NO: 76548 - protein, 44 aa, Gossypium hirsutum
  Clone ID: LIB3148-047-Q1-K1-G6.pep
VPRVRRHTLLVLFEDTNLCAMHANLVRVMPKDIQLARRIRGERA

SEQ ID NO: 76549 - protein, 111 aa, Gossypium hirsutum
  Clone ID: LIB3272-019-P1-K1-A9.pep
MARTKQTAGKYTPGGAATRKHVANDACTKAPTTGGVKKPHRYLPGTVALREIRKYQKSTELLIRKLPFQRLVREIAQDFKTDLRFQSHAVLALQEAAEAYLVGLFEDTNLC

SEQ ID NO: 76550 - protein, 76 aa, Gossypium hirsutum
  Clone ID: GOSHI-09MAY01-C6477_1.pep
FFLAKVRVWQGPVFWVKRSVCSVKSISGYRCFSALEATHRRNYRFPHSSPYRARETSRRLICSVATEPLPKRVEES

SEQ ID NO: 76551 - protein, 88 aa, Gossypium hirsutum
  Clone ID: GOSHI-09MAY01-C6407_1.pep
MAEEEPKKVETVTPSEQPPPEAPKDVAEEKSVIPPPTSEEKPAESAALQKAVEPTEEKSTESTVDRDAVLARVATEKRISLIKAWEES

SEQ ID NO: 76552 - protein, 93 aa, Gossypium hirsutum
  Clone ID: LIB3083-065-Q1-L1-A4.pep
ILSRNSSKDSISVYRTFRDLFLSRCNRSMECGELSRFLFRGRRWDYRFVLRKVFGGFGKWLLRGGYGFNVHGFFLCHALFVDKNPQLMDNKER

SEQ ID NO: 76553 - protein, 270 aa, Gossypium hirsutum
  unsure (1)..(270): unsure at all Xaa locations
  Clone ID: GOSHI-09MAY01-C6647_1.pep
HASGWAFSPFLIHQFXWPSVFYSVGSLGTVWFALWLNKAYSSPIEDPELLPQEKKLIVTNCISKQPVKTIPWKLILSKPPVWALIVSHACPHASAFILLTWMPTYYHQVLKFNLTDSGLICVLPWLTMAFSANLGGWIADTLVSKGLSVTTVRKVMQSIGFLGPAFFLTQLSHVNSPAMAVLCMACSQGTDAFSQSGLYSNHQDIAPRYSGVLLGLSNTAGVLAGVFGTAATGYILQHGSWDNVFEVSVGLYLVGTVVWNLFSTGEKILD

SEQ ID NO: 76554 - protein, 170 aa, Gossypium hirsutum
  Clone ID: GOSHI-09MAY01-C6607_1.pep
MNDTVDRLVIFLAKRDGIDKLVKTFQYVFKLVNWQVETTHPDLANRFKQWEVSSGLSRKAFRTGRFLTGFNGLRRNPGATPTFKFLAVLANAGEMVYFFFDHFLWLSRIGTLDAKLAKRMSFVSAFGESFGYIFFIVSDLIVMKQGVEAERKLMALQEEEENSNDAKEKI

SEQ ID NO: 76555 - protein, 291 aa, Gossypium hirsutum
  unsure (1)..(291): unsure at all Xaa locations
  Clone ID: GOSHI-09MAY01-C6187_1.pep
MRQNFSWTCHSVGSYKKKPMTAAAFSADGSVLAVAAETLITLWNPYKNVLLAVLGETLTPIVNLSFVGKSDNLVAASCGSNPQLSVWNMSKLSVSWSYKLHIEAVASAAXRAPFAALVLLPESSKKTTFKGMDGVILLFNATDPVPTVIWSVRKAKGGALCFVQVNPSSVEEISIDGKAPEVLLAYMNGDHEYVLFDPYCKDAREVSVSQKEGLAAHDHKGQAGQYGYASIYGELPEFDRKRPEAPWVPSFPSDRPWETIFSGSSHNLPPLTKLCSAFLESLLEKRTAAAE

SEQ ID NO: 76556 - protein, 252 aa, Gossypium hirsutum
  unsure (1)..(252): unsure at all Xaa locations
  Clone ID: GOSHI-09MAY01-C6147_1.pep
MALEALNSPATPFTNKYDDVDNNYVETWKKGKRSKRQRGDSPAAVELQXPTEEEYLALCLIMLARGSSGADRDVIRRSSPSSSPPPPPPALKLSYKCSVCDKAFPSYQALGGHKASHRKPLSAXAVTTTGAVNVDNPSTTSTGATITSSGRLHECSICHKSFPTGQALGGHKRCHYEGGNNNNKNNNNSGSVSVSVSGVTSSDGGALSHNHRAVDFDFDLNLPALPEFSQMYPDEEEVQSPLPTKKPRLLIA

SEQ ID NO: 76557 - protein, 74 aa, Gossypium hirsutum
  Clone ID: GOSHI-09MAY01-C6167_1.pep
VSFGSQDGRKRIVDPTVLTTCSQESLSIVVSITGKCICPEPSSRPSLEDVLWNLQYAAQVQAAADADQKSDSTS

SEQ ID NO: 76558 - protein, 371 aa, Gossypium hirsutum
  unsure (1)..(371): unsure at all Xaa locations
  Clone ID: GOSHI-09MAY01-C6117_1.pep
GRVDGRYPQYFAAYNELQAAGVEFPPXEENTVPLFTPPQTHPVSHHPASTYEDAAIEASLQSDASGLSLPEIQNASGLAEILMEMLSALDPTPPAAVKQEVIVDLVDQCRSYQKRVMLLVNSTTDEELLCQGLALNDSLQRVLCRHDDILKGNTVPTGAVAETPVVPFVNINHEDDESEDEFAQLSHRSSRDNSQGHGRRAPKSETGRVDPFLPPPPPSKSLVATNAGMVDYLSGDTYKSEKAPETRESAAHSVRTRTSSPPYPSGDSGSSPMLSGQPIYDKPASLSKSADSELLPPAPWDTAAGNLPPPPSKFNQRQQFFEQQHGYPGGSSNSSNGSGSSYDGLVGQTQNLSLNSTTPTKQEKPEDALFK

SEQ ID NO: 76559 - protein, 61 aa, Gossypium hirsutum
  Clone ID: LIB3272-034-P1-K1-F6.pep
QKRVMLLVNNTTDEELLCQGLALNDSLQRVLCRHDDILKGNTGPTGAIAKTSGGPFGKINH

SEQ ID NO: 76560 - protein, 125 aa, Gossypium hirsutum
  Clone ID: GOSHI-09MAY01-C6107_1.pep
EDEIEKMVKEAELHAQKDQQRKSLIDVKNNADTTIYSVEKSLNEYREKIPSEIAKEIEGAVADLRKATEGEDVDEIKAKIDAANKAVSKIGEHMSGGSGGAQGGSSGGAQGGDQAQEAEYEEVKK

SEQ ID NO: 76561 - protein, 182 aa, Gossypium hirsutum
  Clone ID: GOSHI-09MAY01-C6127_1.pep
MAKTPIGLEPVVGSLSSSKKKEYRVTNRLQEGKRPLYAVVFNFIDSRYFNVFATVGGNRVTVYQCLEGGVIAVLQSYVDEDKDESFYTVSWACNIDGTPFVVAGGINGIIRVIDASNEKIHESFVGHGDSINEIRTQPLKPSLIVSASKDESGRLWNGHTGICILIFAGAGGTRNEVLSVDL

SEQ ID NO: 76562 - protein, 104 aa, Gossypium hirsutum
  Clone ID: LIB3585-047-Q6-K1-G2.pep
MLVIVNLPFCLQVTVYQCLEGGVIAVLQSYVDEDKDESFYTVSWACNIDGTPFVVAGGINGIIRVIDASNEKIHKSFVGHGDSINEIRTQPLKPSLIVSASKNE

SEQ ID NO: 76563 - protein, 185 aa, Gossypium hirsutum
  Clone ID: LIB3585-047-Q6-K1-D12.pep
NSLTEAVKQVDVVICSIPSKQAVDQKLLLKVIKESGCIKKFIPSEFGVDPNKIQLYNLAHRFYAGKTEIRRLIEAEDIPYTCICCNLFMGYLLPSLAQPGLKAPPRDKVTIFGDGNAKAVFVKDVDVAACTINAIDDPRTLNKTLYLRPQGNVYSINELVTMWENKIGRELEKIHVPEEELLLKN

SEQ ID NO: 76564 - protein, 83 aa, Gossypium hirsutum
  Clone ID: LIB3585-047-Q6-K1-E4.pep
AEYIPYTSICCNLFMGYLLSSLAQPDLKAPPRDKVTIFRNGNANTVFCNDVDVTACTINAIYDPLTLNNTLYLKPQGNVYSIN

SEQ ID NO: 76565 - protein, 215 aa, Gossypium hirsutum
  Clone ID: GOSHI-09MAY01-C6047_1.pep
GSKAAEFVAGNLDKVAMAEVSKRCGDAIEEAIKEAYLTTDMDFLKEDVGGGTCCVTAMIHEGDLVVSNPGDCRAVLSRNGVAEALTSDHQVSRQDERARIEALGGYVDFCHGVWRIQGSLAVSRAIGNKHLKQWVIAEPETKSLKIRPECEFLILASGGLWNKVTNQEAVDLVRPFCVDIDKPEPFSACKKLAELSSWRGSFGDISVMIIQLERC

SEQ ID NO: 76566 - protein, 229 aa, Gossypium hirsutum
  Clone ID: GOSHI-09MAY01-C6077_1.pep
TKHLEFTLAAVSELSSSSSVSSSSTPVIARFSADDGVAALRFHQGSEFIDGFNVDLGTSQLFKLGPLQSLCVSESADTNKEKSYSRGVSIRFRNEEESRDFHSAFEQWQMESKGTHLPNGDISVSKSKFDNKIEPSSAKMYFHYYGQLLHQQNMLQDYVRTGTYYAAVIENRVDFTGCVVVDVGAGSGILSLFAAQAGAKHVYAVEASEMADYARKLITGNPTLGQRIT

SEQ ID NO: 76567 - protein, 182 aa, Gossypium hirsutum
  unsure (1)..(182): unsure at all Xaa locations
  Clone ID: uC-gsflmaxxa028c03b1.pep
FTLAAVSQLSSSSLSSSSSSSSSVIARFSADSGVAELRFHRDSEFIDGFNVDIGTSQLFKLGPVQSLCVSESSGASKEKSYSRAVTIQFRNEDESRDFHSAFEQWQKDVIQAGIHLPNGAIAASKSKFDYKIEPSSAKMYFHYYGQLLHQQNMLQDYVRTGTYYAAVIENRVDLXGRVVVDC

SEQ ID NO: 76568 - protein, 48 aa, Gossypium hirsutum
  Clone ID: GOSHI-09MAY01-C6017_1.pep
GVSGKQRCAVTISNSNFGHDPCPNVLKRLSVEAVCAPMTSTTAQPGGN

SEQ ID NO: 76569 - protein, 158 aa, Gossypium hirsutum
  Clone ID: GOSHI-09MAY01-C6037_1.pep
MSTYMSRLVPKSNFSMLLCSGQAIKAEVLRLREQTLLVDAGIGSPRICTQDETTLTRSEINRFEDKVGFFDKGVGGGESLVRKRFLERFFVDLVSGESIAKERAAVRFNDLLGSRSLDVVAGEPTLLNPRRFRQTLVWQELNKHWRNNSKVKGFFIDK

SEQ ID NO: 76570 - protein, 129 aa, Gossypium hirsutum
  Clone ID: GOSHI-09MAY01-C6397_1.pep
MDPNLSKFPILSYIFSQQDPYNYPSLPPQIRQDLLTRFPHLPDPSILASLSRSIPTSVTQTHSLLRSLGPRPDPSAVSAARSKITHIQETQSSLQEADIYKTVLRLEGLHEDYERQLTEVEENLGRLYC

SEQ ID NO: 76571 - protein, 281 aa, Gossypium hirsutum
  unsure (1)..(281): unsure at all Xaa locations
  Clone ID: GOSHI-09MAY01-C6387_2.pep
MLALQSSVNNGENDPNHDQHHDHDDQDGERIRDIHALTPPHPPAVNARRRWETGSSRASSSSEVAPSENFTTMSREFNALVLAGSSIENNDSDSVHTLNNNQLTRIGEDHELQEETNPLAIVPDNGPYDRESDQPRRVESGGLETAATAAVGSGGSSGGHGEVTVLRVKKEEVESKICAWQNAKIAKINNRFKXEDAIINGWEGEQVQKASSWMKKVERKLEEKRAKALEKMQNDVAKAHRKAEERRASAESKRGTKVAKILEIANLMRAVGRPPAKRSFF

SEQ ID NO: 76572 - protein, 81 aa, Gossypium hirsutum
  Clone ID: GOSHI-09MAY01-C6387_1.pep
FPLYMHTYLHIHIHIYVNACEYLHLFNCRVPLLRKRACKQELHQIKTILCVHACMYVWVHVGVFGSVMGLFVRFVLGGGFF

SEQ ID NO: 76573 - protein, 63 aa, Gossypium hirsutum
  unsure (1)..(63): unsure at all Xaa locations
  Clone ID: uC-gsronu33B139b05b1.pep
RKLEEKRAKALEKMHNDVAKAHRKAEERRASAESKRGTKVAKILEIANLMRAVGRPPAXRSFF

SEQ ID NO: 76574 - protein, 321 aa, Gossypium hirsutum
  Clone ID: GOSHI-09MAY01-C6377_1.pep
MAMAMALRRLSSSIDKPLRPFFNAPSLYYMSSLPNEAVYEKEKPGVTWPKQLNAPLETVDPEIADIIELEKARQWKGLELIPSENFTSVSVMQAVGSIMTNKYSEGYPGARYYGGNEYIDMAETLCQKRALEAFRLDPEKWGVNVQPLSGSPSNFQVYTALLKPHDRIMALDLPHGGHLSHGYQTDTKKISAVSIFFETMPYRLNENTGYIDYDQLEKSATLFRPKLIVAGASAYARLYDYARIRKVCDKQKAIMLADMAHISGLVAAGVIPSPFEYADVVTTTTHKSLRGPRGAMIFFRKGVKGINKQGKEVLYDYEDKI

SEQ ID NO: 76575 - protein, 139 aa, Gossypium hirsutum
  unsure (1)..(139): unsure at all Xaa locations
  Clone ID: LIB3165-016-P1-K1-C7.pep
HASAHASAHFFGQWKGLELGPSENFTSVSVMQAVGSIMTNKYSEGYPGARYYGGNEYIDMAEILCQKRALEAFRLDPEKWGVNVQPLSGSPSNFQVYXALLKPHDRIMALDLPHGGHLSHGYQTDTKKISAVSIFFETM

SEQ ID NO: 76576 - protein, 396 aa, Gossypium hirsutum
  Clone ID: GOSHI-09MAY01-C6307_1.pep
MASASLLKTSPVLDKSEWVKGHTLRQPSTSVVRCHPVAPSGLTVRASSYADELVKTAKAIASPGRGILAMDESNATCGKRLASIGLENTEANRQAYRTLLVSAPGLGQYISGAILFEETLYQTTIDGKKMVDVLVEQNIVPGIKVDKGLVPLAGSNNESWCQGLDGLAPRSAAYYQQGARFAKWRTVVSIPNGPTELAVKEAAWGLARYAAISQDNGLVPIVEPEILLDGDHGIDRTFEVAKKVWAEVFFYLAQNNVMFEGILLKPSMVTPGAECKDRATPQQVADYTLSLLRQRIPPAVPGIMFLSGGQSEVEATLNLNAMNQAPNPWYVSFSYARALQNTCLKKWGGRPENVKDAQEALLIRAKANSLAQLGKYTGEGESEEAKQGMFVKGYVY

SEQ ID NO: 76577 - protein, 101 aa, Gossypium hirsutum
  unsure (1)..(101): unsure at all Xaa locations
  Clone ID: LIB3165-046-Q1-K1-C5.pep
IPPAVPGIMFLSGGQSEAEATXNLNAMXQAPNPWHVSFSYARALQNTCLNKWGGRPDNVKDAQEALFILAKANSLAQLXKYTGKXESEEAKQGRFVKGYVY

SEQ ID NO: 76578 - protein, 118 aa, Gossypium hirsutum
  unsure (1)..(118): unsure at all Xaa locations
  Clone ID: LIB3165-042-Q1-K1-B8.pep
MASASLLKTSPVLDKSEWVKGHTLRQPSTSVVRCHPVAPSGLTVRASSYADELVKTAKAIASPGRGILAMDESNATCGXNTEANRQAYKTLLVSAPGLGQYISGAILFEETLYQTTID

SEQ ID NO: 76579 - protein, 55 aa, Gossypium hirsutum
  Clone ID: LIB3165-033-P1-K1-B2.pep
TISIPEPIINSSCIIYNLTCGKRLASIRLENTEANLQAYKTLLVSAPGLGQYISG

SEQ ID NO: 76580 - protein, 64 aa, Gossypium hirsutum
  Clone ID: LIB3165-041-Q1-K1-G1.pep
GSQEMAQMSARQSNSTLSCGSFVLALGKFPEVDHQAIPGRNIATSAAHGLAEPVVKVHRCPPAD

SEQ ID NO: 76581 - protein, 119 aa, Gossypium hirsutum
  Clone ID: GOSHI-09MAY01-C6337_1.pep
MGQMKKFGFVLLVLSASVVEQIEGKGYEKPLNCGHLECAPYTLIHSQPEFEIRSYSKATWVATTPISSPSYTFAVSIGFKILFAYIRGNNDAAVKMNMTAPVLVNIHPRTGHLQNSTYV

SEQ ID NO: 76582 - protein, 129 aa, Gossypium hirsutum
  Clone ID: GOSHI-09MAY01-C6327_1.pep
MATISATTTPAALVHKTLPRIASPVPIGSPTMGKRGKVMMMCSMEKKSENGSNMGMSASLLAAACAATMSSPAIALVDERMSTEGTGLPFGLSNNLLGWILFGVFGLIWALYFIYTASLEEDEESGLSL

SEQ ID NO: 76583 - protein, 100 aa, Gossypium hirsutum
  Clone ID: GOSHI-09MAY01-C6287_2.pep
RMPVFSSRAMFRNYDKHRKQKSDPKGKLSDVFRSYADSNGELNKEKLKDAFLHLDAAMPYRQAEEALRVVGKSYYINIKDETDLNTLVDYAYNKGYGYSI

SEQ ID NO: 76584 - protein, 102 aa, Gossypium hirsutum
  Clone ID: GOSHI-09MAY01-C6287_1.pep
RMPVFASRVGFRRHDYKNRSKERNDDRKDKLSEVFKSYAANGLLDKEGLKDAFLHLDAAMPYRQAEDALRVVGKTYNINVEEETELNALIDYAYNKGYGSSI

SEQ ID NO: 76585 - protein, 119 aa, Gossypium hirsutum
  unsure (1)..(119): unsure at all Xaa locations
  Clone ID: GOSHI-09MAY01-C6277_2.pep
MSTASVSGFCLSSNTTSPSNSLRQPTLRRPSIIANLNSSTSPPTLIRNQPVFAAPTPLLTPSNWKETMGDESYEEXAIEALKKLLNEKGELKSAATAKVEQVTAELKTAASSDESVDRL

SEQ ID NO: 76586 - protein, 174 aa, Gossypium hirsutum
  Clone ID: GOSHI-09MAY01-C6277_1.pep
LEGRARPTRPPTRPPTRSTALVSGFCLTSNSTSPSNSLRQPTLRRPSIVANLNSSTSPPTLIRNQPVFAAPTPLLTPSNWKENMGDQSYEEAIEALKKLLNEKGELKSAATAKVEQVTAELKTAASSDESVDRLKQGFIYFKTEKYEKNPALYGELAKGQSPTYMIVACSDSRV

SEQ ID NO: 76587 - protein, 238 aa, Gossypium hirsutum
  unsure (1)..(238): unsure at all Xaa locations
  Clone ID: GOSHI-09MAY01-C7967_1.pep
MMTLLTPLSHNSLSSPQLSTKRHGCPLHQPHVPLRITCSSSASKRVPKSEESPFKELRTVACGLLAVCTVATASPVIAANQRLPPLSTEPNRCERAFVGNTIGQAXNGVYDKPLDLRFCDYTNEKSNLKGKSLAAALMSDAKFDGADMSEAVMSKAYAVGASFKGTDFSNAVLDXVNFGKANLQGAIFKNTVLSGSTFDNAPLEDAVFEDTIIGYIDLQKLFTNTSIRAEGRVELGCR

SEQ ID NO: 76588 - protein, 161 aa, Gossypium hirsutum
  Clone ID: GOSHI-09MAY01-C7917_1.pep
MSTSTATSGTCLIICSNGKSSLETKTSTMITLKSSSFPSRLTAVSIKVRTRVVSCQAVSTASVDKDEKDASISGSEEDPEAAKVGAKVRVKVPLKVYHVPRVPEVDLNGMEGVIKQFVGVWKGKRISANLPFKVEFVTEIEERGPVKFLAHLKGDELEFLD

SEQ ID NO: 76589 - protein, 75 aa, Gossypium hirsutum
  unsure (1)..(75): unsure at all Xaa locations
  Clone ID: LIB3135-002-Q1-K1-G11.pep
MRQKIFFLKRFDSELLYVQGPILKXFQRFSLTLSVSTNNSKCLDSFRTGPGQIAMIRSTSFYTISETXGLNRMDM

SEQ ID NO: 76590 - protein, 91 aa, Gossypium hirsutum
  Clone ID: GOSHI-09MAY01-C7857_1.pep
MQVFDRMTIPIRRVWTGVATRFGVRKSAHMKLRKDISTCEYEDVRVMWEMLSRNEAETIRSPTTSKGRCRKRPMWNCFEWAKRAPFLCRSF

SEQ ID NO: 76591 - protein, 79 aa, Gossypium hirsutum
  Clone ID: LIB3083-102-Q1-L1-C2.pep
MQVFDRMTIPIRRVWSGVATRFGVRKSAHMKLRKDISSCEYEDVRVMWEMLSRNEAETIRSPTTSKRRCRKRPLWNCFE

SEQ ID NO: 76592 - protein, 98 aa, Gossypium hirsutum
  Clone ID: GOSHI-09MAY01-C7847_1.pep
MVPIVLTQMATGLGVLAGAVFVKSVMDQKPMAGPFQRCPTCNGTGRVSCICSRWSDGDVGCRTCSGSGRRACSSCGGSGTGRPIPVQLIVRQPTNRSF

SEQ ID NO: 76593 - protein, 124 aa, Gossypium hirsutum
  Clone ID: GOSHI-09MAY01-C7817_1.pep
MAASTSVSVAGFKGSLGKSSFNGGEDYAMLAAKSTPNVVRIGKPVRAQPMMKNVNEGKGVFAPLVVVTRQIVGKKRFNQLRGKAIALHSQVINEFCKALGADGKQRQGLIRLAKKNGEKLGFLA

SEQ ID NO: 76594 - protein, 209 aa, Gossypium hirsutum
  Clone ID: GOSHI-09MAY01-C7837_1.pep
HVSVVEFIFNVELFLQEILDSFVDTEFWYVDHGILAQEAAGSTPFRKALQRQEEKWWLPVPRVPTGGLDENSRKQLRHRRDCANQILKAAMAINNITLADMEVPESYFESLPKNGRASLGDLIYRYVSSDLFTPECLLDCLDLSSEHQAGRVANRVEASIYLWRRKTNTKPVNNTFRSSSKSSWDMVKDLMVDAEKREILANRAESLCF

SEQ ID NO: 76595 - protein, 116 aa, Gossypium hirsutum
  Clone ID: GOSHI-09MAY01-C7537_1.pep
MASIPCTFQIPFTSKPVNSLPSLPKLSSKFLGSQKTLSWSRPSRIGPSNGSRTQCWFKFGKNGVDAERAGIYGSQGRDDFDRDDVEQYFNYMGMLAVEGSYDKMEALLNHNIHPVD

SEQ ID NO: 76596 - protein, 181 aa, Gossypium hirsutum
  unsure (1)..(181): unsure at all Xaa locations
  Clone ID: AI730776.1.pep
RRLKIAVDAAKGLDYLHNGSDPRIIHRDVECSNLLLDCEMNAKVCDFGLSKQVTLADATHVTTVVKGTAGYLDPEYYSTQQLTEKSDVYSFGVVLLKLICGREPLTHSGTPDSFNLVLWAKPYLQAGALEIVDDNLKGTFDVESMRKTALVTVRCVERDASRRPTIAQVLGELKEXYSLQL

SEQ ID NO: 76597 - protein, 56 aa, Gossypium hirsutum
  Clone ID: LIB3829-007-Q6-N6-B6.pep
RLFCRKSSKSDVYSFGVVLLELICGREPLTHSGTPDSFNLVLWAKPYLQAGALEIV

SEQ ID NO: 76598 - protein, 97 aa, Gossypium hirsutum
  Clone ID: LIB3165-016-P1-K1-G12.pep
NSLRALFCGHPGSSRGTTAFGHTSFTRLTRHRLSHCARQLMAFKTLFFLQRIKRYRTLSTEQALIWLQLQPDLRPGITALMVDMIDGGLDLGAGRRP

SEQ ID NO: 76599 - protein, 122 aa, Gossypium hirsutum
  unsure (1)..(122): unsure at all Xaa locations
  Clone ID: GOSHI-09MAY01-C7447_1.pep
MASYKLCALFLLFTLLFHSTFTTACNSCKPKPPPCPPPXCPKDTLKLGVCADVLGLVNVIVGTPPSSKCCALLQGLADLEAALCLCTAIKANVLGINLNIPVSLSLILSACQKEVPPGFKCE

SEQ ID NO: 76600 - protein, 273 aa, Gossypium hirsutum
  unsure (1)..(273): unsure at all Xaa locations
  Clone ID: GOSHI-09MAY01-C7417_1.pep
QILFALDGVDSIGIVHRDIKPQNIIFSEGSRTFKIIDLGAAADLRVGINYIPKEFLLDPRYAAPEQYIMSTQTPSAPSAPVATAXAPASGQMNLPDRFDIYSAGLIFLQMAFPSLRTDSALIQFNRQLKRCDYDLVAWRNTVEPRASPDLRKGFELLDFDNGIGWELLTSMVRYKARQRISAKAALAHPYCDREGLLALSFVQNLKVQVFRATQQDYGEAAKWIIXLMAKSGTEKEGGFTEAQLQDLRDIEPKKKASPQRNALASALKLQRKI

SEQ ID NO: 76601 - protein, 110 aa, Gossypium hirsutum
  Clone ID: GOSHI-09MAY01-C7437_1.pep
MAITATAMTMTVTTGLQFAGSLNHKQTSFLGVPLRLSMSNPQPSLPSVFLNVQAKARTRTEDREARHSRIRKKIEGTPDRPRLCVFRSNKHLYVQVIDDSKMHTLAFALT

SEQ ID NO: 76602 - protein, 118 aa, Gossypium hirsutum
  Clone ID: GOSHI-09MAY01-C7427_3.pep
GGQQFGIPHLFDLPIRPTLSASGDSGTPEVVADPQGEVAQTFQNLGVCVVQQCAKIRQQVSTAVTYDKSIKAIRVKVPDSEEEFLLHPATVRRNDHSAQSVVSMFFLLVNGFYLNLSS

SEQ ID NO: 76603 - protein, 200 aa, Gossypium hirsutum
  unsure (1)..(200): unsure at all Xaa locations
  Clone ID: GOSHI-09MAY01-C7427_2.pep
VPCVAVVENMSHFDADGKRYYPFGRGSGSQVVQQFGIPHLFDLPIRPTLSASGDSGTPRVXVADPQGDVAQTFQNLGVCVVQQCAKIRQQVSTAVTYDKSIKAIRVKVPDSEEEFLLHPATVRRNDRSAQSVDEWTGEQKLQYGDIPEDIEPEEIRPMGNYAVSITWPDGFSQIAPYDQLQMIERLVDVSSTDSRPIIDD

SEQ ID NO: 76604 - protein, 76 aa, Gossypium hirsutum
  Clone ID: LIB3829-015-Q1-N6-F10.pep
LKDRGKLTLHKINYRFPKKLQYGDIPEDIEPEEIRPMGNHAMSIRWPDGFSQIAPYDQLQMIERLVDVPQPTAVQS

SEQ ID NO: 76605 - protein, 46 aa, Gossypium hirsutum
  Clone ID: GOSHI-09MAY01-C7797_2.pep
PTRPPSRPVGTSRDYLAKLLFWCMLLGHHLRGLENRLQLSCVVGLL

SEQ ID NO: 76606 - protein, 349 aa, Gossypium hirsutum
  Clone ID: GOSHI-09MAY01-C7797_1.pep
MASAATARAVILSRITALSVKPLSPSLSRFLPSPRNRPPSALTVSCCLKDGGAYDDYSVSTQKSNLDRGFIVISNMLKHIEPLDTSVISKGVSDSAKEAMKRTISTMLGILPSDQFSVLVSLSKPPLHRLLFSSIITGYTLWNAEYRVSLMRNLERAAPAEDLVKETEEGASHRHGEVVKNNIEEGEGGNGEYEELEKISPRVFEDLSPEALKYIEKLQAELSDMEEELSAQKKENVRMECGRENMNGLLEYLRSLDADMVTELSQPSSVQVEEMIHQLVQNILQRFFKDACMRDSGIVNTGNLQDAADETCGTSRDYLAKLLFWCMLLGHHLRGLENRLHLSCVVGLL

SEQ ID NO: 76607 - protein, 198 aa, Gossypium hirsutum
  Clone ID: LIB3828-007-Q1-K6-B8.pep
RKEELQKLSLFEASAATARAVILSRITALSVKPLSPSLSRFLPSPRNRPPSALTVSCCLKDGGAYDDYSVSTQKSNLDRGFIVISNMLKHIEPLDTSVISKGVSDSAKEAMKRTISTMLGILPSDQFSVLVSLSKPPLHRLLFSSIITGVSLMRNLERAAPAEDLVKETEEGASHRHGEVVKNNIEEGEGGNGEYEEL

SEQ ID NO: 76608 - protein, 279 aa, Gossypium hirsutum
  Clone ID: GOSHI-09MAY01-C7767_1.pep
MAEVLGKSNLFTACNYSQKKNQEGGVPLFSRRISVFCLRKNSFPSLRLEPQALRSGFNGQRVVVLEKRSLNERRFCRVPIKAQMQTGLIGKTQKWWEKGNQPNMKEVTSAQDLVDSLLNAGDKLVIVDFFSPGCGGCKALHPKICQLAEMNPDVQFLKLNYEEHKSMCYSLNVHVLPFFRFYRGAQGRLCSFSCTNATIKKFKDALAKHSPDRCSLGPTKGLEEKELLALAANKDLSFNYTPKPVHPAPEEMPVLEEVPPRAPPRPRESVEKTLVGVGR

SEQ ID NO: 76609 - protein, 76 aa, Gossypium hirsutum
  Clone ID: LIB3825-033-Q6-N6-F6.pep
DALAKHSPDRCSLGPTKGLEEKELLALAANKDLSFNYTPKPVHPAPEEIPVLKEVPSGSSFKLKESEEKTLIGVGR

SEQ ID NO: 76610 - protein, 153 aa, Gossypium hirsutum
  Clone ID: GOSHI-09MAY01-C7727_1.pep
MEALSSQPLALLSIFSPKPKDFPARIIRFPTHSKKDGNDSDIQYDPNNTSIVPLVGNQTFSQDAAMGLVLSAASVRGWTTGSGMEGPSVPARTDDDQSNTEQGSTFPWSLFTKSPRRRMRVAFTCNVCGQRTTRAINPHAFTDGTVFVQCCGC

SEQ ID NO: 76611 - protein, 83 aa, Gossypium hirsutum
  Clone ID: LIB3584-017-P1-K1-E4.pep
RMILSTFGMGGKADDSSREIFSFRREDGEKGEGLRAERFHRRGGELNCVVDGDPKKKKTASKNGSFTISFDLQHTNSGSADAW

SEQ ID NO: 76612 - protein, 369 aa, Gossypium hirsutum
  Clone ID: GOSHI-09MAY01-C7197_2.pep
METVTLTGLLHKAAAEFPTRRALSVSGKFDLTHAQLQHIIDHAASLLIASGIHPGDVVALTFPNTVELVIMFLAVIRCRATAAPLNSAYTAEEFEFYLSDSESKLLLIPAEGIKPAEAAASKLNIPLVSAALQDENSKITLSSNPESNIDSVKQLVNDPADVSLFLHTSGTTSRPKGVPLTQLNLGTSVLNIKSVYELTESDSTVIVLPLFHVHGLLAGLLSSLVSGAAVTLPAAGRFSASTFWTDMIKYKATWYTAVPTIHQIILDRHESNPERPRYPKLRFIRSCSASLAPSILERLEAAFDAPVLEAYAMTEASHLMTSNPLLNNGPHKAGSVGKPVGQEMAILNEQREIQPPYSNGEGCIMGLNV

SEQ ID NO: 76613 - protein, 87 aa, Gossypium hirsutum
  Clone ID: GOSHI-09MAY01-C7197_1.pep
METATLTGLLHKAAAEFPARRALSVSGKLHLTHAQLQHIIDHAASLLIASGIHPGDVVALTFPNTAELCLFIYVLVYFFAFQSIKPS

SEQ ID NO: 76614 - protein, 180 aa, Gossypium hirsutum
  unsure (1)..(180): unsure at all Xaa locations
  Clone ID: GOSHI-09MAY01-C7177_1.pep
MAVAAASCFGSTCFITGRPNSSISTTNFPLSFSYPIFNGCNGISVTRIGSSSKTYAKFEKFQGDPSEANGEDIIVSSLQTQEQTIEEEEEDDSCLPSDLEGAVRQSGEASALFVSSGGMRAIVELLIPQLQLLDDEGAQAELWELSRIFFDTLMQETGCQXIKAIFSDAGAAAXLKYRWK

SEQ ID NO: 76615 - protein, 195 aa, Gossypium hirsutum
  unsure (1)..(195): unsure at all Xaa locations
  Clone ID: GOSHI-09MAY01-C7087_1.pep
PRVRGSYVSLSTFGNLERTTEWLEVVFNIIVLTSGLLLVTMLIGNIKVFLHATTSKKQAMQLKMRNIEWWMRKRRLPSGFKQRVRNYERQRWAAMRGVDECQMIRNLPEGLRRDIKYHLCLDLVRQVPLPQHMDDLVLENICDRVKSLIFTKGETITREGDPVHRMLFVVRGHLPSSQVLRDGVKXSCCMLGAPK

SEQ ID NO: 76616 - protein, 115 aa, Gossypium hirsutum
  Clone ID: GOSHI-09MAY01-C7017_1.pep
MACSTTAFGSGVSTTALGLSSLKRSPTVGVATIIFPKPRRSSAMVVRAEGQTINPEIRKTEEKVVDSVVVTELSKPLTAYCRCWRSGTFPLCDGGHVKHNKATGDNVGPLLLKKQ

SEQ ID NO: 76617 - protein, 118 aa, Gossypium hirsutum
  Clone ID: GOSHI-09MAY01-C7007_1.pep
MLGVFSGAIVSPPDELVAAGCRTPSPKITADALVKRFIEANPSTVSLQIGDHVQFAYSHRNESALLPRSFAVKDEIFCMFEGALDNLGSLKQQYGLGKSATEVVLVIEAYKALRDRAP

SEQ ID NO: 76618 - protein, 139 aa, Gossypium hirsutum
  unsure (1)..(139): unsure at all Xaa locations
  Clone ID: GOSHI-09MAY01-C7207_1.pep
MSQCVPSWELDDNNPLTTRHHSFRFNSNSTAPEVPLLDYEVAEXTWENGQLAMHSLGPPRVVAKQLNATTWDKPRASGGGGGTLESIVNQATLRILSVLGGDELVWLDHHRVSAAASSSSATMAMDALVPCSEDKTTTV

SEQ ID NO: 76619 - protein, 145 aa, Gossypium hirsutum
  Clone ID: GOSHI-09MAY01-C1987_1.pep
IVINWCLNVQTLVLSSVGRRVGPVAILKSLPNLSCLKLDGNPLRQIPSDGFQAISMIQILDISGNATSLPENPAFSNLPHLKELYLRRMQLREVPSEIMSLRQLQILGLSQNSLQSIPDVKCSLTIAGIYCKSLIFGVNRLSNTL

SEQ ID NO: 76620 - protein, 340 aa, Gossypium hirsutum
  unsure (1)..(340): unsure at all Xaa locations
  Clone ID: GOSHI-09MAY01-C1957_2.pep
MAATATSNATFRLGNPLSSSSSSSVYSSNKLPVNFRKFALQTSPVKSFSVSCTLTRKPVPAAPVSMDSDPNGWRRPDSFGRFGKFRGKYVPETLLSALYELETAWHGLCKDDKFQEELAGILKDYVGRESPXYFAERLSEHYKCPDGGRSVIXTSEEDLNHTSAHKINNAVAXALLAKHLGKNRIIAEXGAGQHGVATATVCARFGLQCVIDMGAQDMXERQALNIFRMQLLGAEVNSWVRVLHSGTATLNDATSEAIQDWVTNVETTHYILGLIAGPHPYLMMVRESHALVGKEARKQALEKWGXGKPDVLVARNDGGSNAMGLFNEFVNDKDIRLIGV

SEQ ID NO: 76621 - protein, 475 aa, Gossypium hirsutum
  Clone ID: GOSHI-09MAY01-C1957_1.pep
MPSNMAATATSTATFRLGNPLSSSSSSSVYSSKKLPVNFRKFALQTSPVKSFSVSCTLTRKPVPAAPVSMDSDPNGWQRPDSFGRFGKFGGKYVPETLMSALSELDAAFHSLSKDEKFQEELAGILKDYVGRESPLYFAERLSEHYKRPNGEGPDIYLKREDLNHTGAHKINNAVAQALLAKRLGKKRIIAETGAGQHGVATATVCARFGLQCIIYMGAQDMERQALNVFRMRLLGAEVRAVHSGTATLKDATSEAIRDWVTNVETTHYILGSVAGPHPYPMMVREFHAVIGKETRKQALEKWGGKPDVLVACVGGGSNAMGLFHEFVNDKDVRLIGVEAAGFGVDSGKHAATLTKGEVGVLHGAMSYLLQDEDGQIIEPHSISAGLDYPGVGPEHSFLKDVRRAEYHSVTDEEALEAFKKLSRLEGIIPALETSHALAYLEQLCPTLPNDTKVVVNCSGRGDKDVQTVIKHLQV

SEQ ID NO: 76622 - protein, 241 aa, Gossypium hirsutum
  Clone ID: GOSHI-09MAY01-C1977_1.pep
MESGEPSKKSSFQLQNQPPPRPFSIKSIIFVASIAAGIQFGWALQLSLLTPYVQLLGIPHKWASLIWLCGPISGMLVQPIVGYHSDRCTSRFGRRRPFIAAGAVLAATAVVLIGFAADLGYLFGDNLATETKPRAIVVFVIGFWILDVANNMLQGPCRALLADISGNSQKKTRTANAFFSFFMAVGNVLGFAAGSYTHLHNIFPFTTTKACDVYCANLKSWFFFSILLLLTLTTNRSYKRA

SEQ ID NO: 76623 - protein, 138 aa, Gossypium hirsutum
  Clone ID: LIB3583-008-P1-K1-D7.pep
MESGEPSKKSSFQLQNQPPPPPPSSSSPPRPFSIKSIIFVASIAAGIQFGWALQLSLLTPYVQLLGIPHKWASLIWLCGPISGMLVQPIVGYHSDRCTSRFGRRRPFIAAGAVLVATAVVLIGFAADLGYLFGDNLAT

SEQ ID NO: 76624 - protein, 385 aa, Gossypium hirsutum
  Clone ID: GOSHI-09MAY01-C1917_3.pep
MAELMDDAEFWLPAKFLTDDDVLMKKGNLENEIRGKMGTELLVSSHGFPSEFPYEFDSFSPLSSPVESVVGSTETESSDEDEFLAGLTRRLAYSTSQKLTVPATFSMDKNEKNGALASSPRSTLSGLGGCWSSSSNGSPNGPSQVPSPPTTPFGPQNDTWDLIYAAAGQVARLKMSNEVPKYTNFNHGRTLSKPQNHSFMKNNPTPPPSRPDQTLPFNQFNGRQVKASNWQAQVQQQHQQQHQHQHQHQIQTRLRNNVVGGRPLGLPQSSWPPLQAQPQQQKHSQNGMRAMFLGGSSGVKRESTGTGVFIPRRYGNTTNTTTRAPGKKSGWSTVLLPAKGGQALNLNFDDTKNHVQPQFNPTFASNYDALVARRNALVTPARRNY

SEQ ID NO: 76625 - protein, 267 aa, Gossypium hirsutum
  Clone ID: GOSHI-09MAY01-C1917_1.pep
WTRWCWSSSSNGSPKVLLKSISTNNTFWSSKDTWDLIYAAAGQVARLKMSNEVPKYTNFNHGRTLSKPQNHSFMKNNTTTNSLYSDQTLPFNQFNGRQVKASNWHAQVQQQHQHQHQIQTRLRNNVVGGRPLGLPQSSWPPLQVQPQQQKQAQNGMRAMFLGGSSGVKRESTGTGVFIPRRYGNTTNTTTHEPRKKSGCSTVLLPAKVVQALNLNFDDTNNHVQPQFNPTFASNYDALVARRNALLTQARRNYRPDGSLNLPQEWTY

SEQ ID NO: 76626 - protein, 61 aa, Gossypium hirsutum
  Clone ID: LIB3583-017-P1-K1-C2.pep
NSIFKLTSYGVLFSLIFKEIWKICSFLGVINSIGTRIRGRELGFFLGGKKKVFFKNFYINF

SEQ ID NO: 76627 - protein, 46 aa, Gossypium hirsutum
  Clone ID: LIB3583-015-P1-K1-G7.pep
EKTWTKFSVSPFLRQVKATIWTIITSCLCQECFLSCYLGIYTKFEQ

SEQ ID NO: 76628 - protein, 89 aa, Gossypium hirsutum
  Clone ID: LIB3146-057-Q1-K1-F9.pep
PTRPPTRPPRSTLSGLGGCWSSSSNGSPNGPSQVPSPPTTPFGPQNDTWDLIYAAAGQVARLKMSNEVPKYTNFNHGRTLSKTLHKISI

SEQ ID NO: 76629 - protein, 294 aa, Gossypium hirsutum
  Clone ID: GOSHI-09MAY01-C1937_1.pep
VNQNQNQNKNVKAEDILCPLAEYEECDFSKLLEKPRLLNIDRQRSLDERSLSELSIGISPRHATRAIDLNSSRFFEQLDSICSPLGRRSGFSTPRSQIGFDPHPMVAEAWEALRRSLVYFRGQPVGTIAALDTTEENLNYDQVFVRDFVPSALAFLMNGEPEIVKNFILKTLRLQSWEKKIDRFQLGEGVMPASFKVLHDPVRNNETLIADFGESAIGRVAPVDSGFWWIILLRAYTKSTGDTSLAELPECQKGMRLILSLCLSEGFDTFPTLLCADGCCMIDRRMGVYGYPIE

SEQ ID NO: 76630 - protein, 144 aa, Gossypium hirsutum
  unsure (1)..(144): unsure at all Xaa locations
  Clone ID: GOSHI-09MAY01-C1927_1.pep
GKAPYSSVITHGFVLDEKGLEMSKSLGNVVHPHTIIEGGKNQKEAPGYGADIMRLWVSSVDYTGDVXLGPQILRQISAVYRKLRGTLRYLLGNLHDWKVENAVSYQELPMIDRHALFQLENVVKNIREGYENYQLFKIFHVYIF

SEQ ID NO: 76631 - protein, 128 aa, Gossypium hirsutum
  unsure (1)..(128): unsure at all Xaa locations
  Clone ID: LIB3493-006-P1-M1-C5.pep
LRGTLRYLLGNLHDWKVENAVSYQELPMIDRHALFQLENVVKNIREGYENYQFFKIFQIVQRFVNVDLSNFYFDIAKDRLYVGGTTSFTRRSCQTVLAAHLLSLSRVIAPILPHLAXDVWQNLPFQYT

SEQ ID NO: 76632 - protein, 272 aa, Gossypium hirsutum
  Clone ID: GOSHI-09MAY01-C1897_1.pep
NGLSHSSAAWPRPNVPTLHLPGSSFQSSRLRSSLSARDIPREGFDMWPDFDAHEQILNDLTCVSQSHNSPVSVSRSCRSKTLTPSNLEELFSAEISSSPRYTDQAAASAIFSPTHKSAVLNQFQQQQSKLSPINTSVFAPRNVEHPLLQASFGVGSPGRMSPRSTEPISPMAARLSAHVQLEKQRQQQLSCLSSRELGSPVNCPWSKWGSPNGKLNWSVSADELGQLLKSSYELRNSSEGPDLSWGQSLVKESPPEMIKEKLVASAPHGASS

SEQ ID NO: 76633 - protein, 174 aa, Gossypium hirsutum
  unsure (1)..(174): unsure at all Xaa locations
  Clone ID: GOSHI-09MAY01-C1847_2.pep
NKNKTRNKQPLIVELTRNQKQTRKEIMGSEQNEGTSFPPSAPKLCANGCGFFGTAANMNLCSKCYRDLRAGEEQAAKAKAAMEKSLSVNTKQEDVVDETVKPVLELPHVGSSSTVVEIQPAAIVSDDKPAESKAANRCFICXRKVGLTGFKCKCGSTFCGEHRYPEKHECSLDF

SEQ ID NO: 76634 - protein, 203 aa, Gossypium hirsutum
  Clone ID: GOSHI-09MAY01-C1847_1.pep
SFEPNTPPNQNPNFFFLLIFDCRNQKQTRKEIMGSEQNEGTSFPPSAPKLCANGCGFFGTAANMNLCSKCYRDLRAGEEQAAKAKAAMEKSLSVNTKQEDVVDETVKPVLELPHVGSSSTVVEIQPAAIVSDDKPAESKAANRCFICRKKVGLTGFKCKCGSTFCGEHRYPEKHECSFDFKGTGRDAIAKAYPVVKADKVERI

SEQ ID NO: 76635 - protein, 74 aa, Gossypium hirsutum
  Clone ID: LIB3585-003-P1-K1-A6.pep
YQRSIGIKSNGHHNNYESYNDNNMKMKFFLTFLQSVNMKPRKSKSKSKNKNLLRHTYLVNSTIRGCLFLVLFLF

SEQ ID NO: 76636 - protein, 68 aa, Gossypium hirsutum
  Clone ID: LIB3145-007-Q1-K1-C12.pep
LFFEFRFRFGFPICCILFSSPVVLHQERNQGSSAVSINHFSIPFLFFSQILDLEKKISSLSSDFLTFS

SEQ ID NO: 76637 - protein, 129 aa, Gossypium hirsutum
  Clone ID: GOSHI-09MAY01-C1877_1.pep
MDSSKAGTVKELPVGLDEATEDEYASQRKLLQEFTNISCIDKAWVFKAGSGIGSQVMFSISQPNLLANKRRKFMLSTSILKESNNNVNFQWAPFPVEMTGVSINIPSPSGSKLLVIRNPENESPTQFEI

SEQ ID NO: 76638 - protein, 172 aa, Gossypium hirsutum
  unsure (1)..(172): unsure at all Xaa locations
  Clone ID: GOSHI-09MAY01-C1837_1.pep
SECQVKGIDKKQDADGGVALERHSLFGHQPDGTGNKAPGNLPTKTAEKSDNGKPTAFMGSQHQGMFTSVHSQHIQFPVYPTPSTMGYYHQNPVSWPATPANGXLVPFPPNPYLYTGPLGYGLNGNSHLCMPYGTLQHLAAPPFNPDPVPVYQASFRSQWLVCRGANSDSKAW

SEQ ID NO: 76639 - protein, 216 aa, Gossypium hirsutum
  unsure (1)..(216): unsure at all Xaa locations
  Clone ID: GOSHI-09MAY01-C1597_7.pep
PTRPISIDGDTEIAFTENVDTRFEGLGWHVIWVKNGNTGYDEIRAAIKEAKAVKDKPTLIKVTTTIGYGSPNKANSYSVHGSALGAKEVDATRKNLGWPYEPFHVPEDVKAHWSRHTPQGAALEGEWNAKFAEYEQKYKEEAAELKAIITGELPAGWEKALXTYTPESPADATRNLSQQNLNALVKVLPGLLXGSADLASXNMTLLIMYGDFHKAP

SEQ ID NO: 76640 - protein, 103 aa, Gossypium hirsutum
  Clone ID: GOSHI-09MAY01-C1597_4.pep
LEIAAKPARPPTRPGKTVRVVSFVSWELFDEQSDAYKESVLPSAVSARVSIEAGSTFGWAKIVGSKGKAIGIDRFGASAPAGKIYKEFGLTPEAVVAAAKELC

SEQ ID NO: 76641 - protein, 67 aa, Gossypium hirsutum
  Clone ID: GOSHI-09MAY01-C1597_3.pep
KESVFPSAPPARPRVRAGSTFGWGKIVGSKGKAIGIDRFGASAPAGRIYKEFGLTPEAVIAAAKELC

SEQ ID NO: 76642 - protein, 742 aa, Gossypium hirsutum
  unsure (1)..(742): unsure at all Xaa locations
  Clone ID: GOSHI-09MAY01-C1597_2.pep
MASTSSVTLSQALLSRAISSHASAQSSDHRPSLSTISFPGFSGLKSSIPRASSSRRRLPSRSNHKRQVRAAAVETIGTAAETSLVEKSVNTIRFLSIDAVEKANSGHPGLPMGCAPMGHILYDEVMRYNPKNPYWFNRDRFILSAGHGCMLQYALLHLAGYDSVLEEDLKSCRQWGSRTPGHPENFETPGVEVTTGPLGQGIANAAGLALAEKHLAARFNKPDNEIVDHYTYVILGDGCQMEGISNEACSLAGHWGLGKLIAFYDDNHISIDGDTEIAFTENVDTRFEGLGWHGNGNTGYDEIRAAIKEAKAVKDKPTLIKVTTTIGYGSPNKANSYSVHGSALGAKEGDATRKNLAWPHEPFHVPXLPVKGHWSRRVPQGAALEAEWNAKFAAYEKKYKEEAAELKLIITGEPPAGWEKALPTYTPESPADATRNLSQQNLNALVKVLPGLLGGSADLASSNMTLLKMYGDFQKDTPEERNVRFGVREHGMGAICNGIALHSPGLIPYCATFFVFTDYMRAAIRISALSQARVIYVMTHDSIGLGEDGPTHQPIEHLASFRAMPNVLMLRPADGNETAGAYKVAVLNRKTPSILALSRQKLPQLPGTSIEGVEKGGYIISDNSSGNNPDVILIGTGSELEIAAKAADELRKEGKAVRVVSLVSWELFDEQSDAYKESVLPSAVSARVSIEAGSTFGWEKIVGSKGKAIGIDRFGASAPAGRLYKEFGLTPEAVVAAAKELC

SEQ ID NO: 76643 - protein, 294 aa, Gossypium hirsutum
  Clone ID: GOSHI-09MAY01-C1597_1.pep
MEGNSGGGGGADRGGGGGGERGGNDVELVCKTLQVEHKLFYFDLKENPRGRYLKISEKTSATRSTIIVPSSGISWFLDLFNYYVNSDDHDLFSKELQLDTKVFYFDIGENRRGRFLKVSEASVSRNRSTIIVPAGSTRDEGWAAFRNILAEINEASRLFLLPNQQSSELSERLVGLSDDVGAGFLPGRNQPSSTSELNVDRSIELPPQDETGNMGVSKVIRADQKRFFFDLGSNNRGHFLRISEVAGSDRSSIILPLSGLKQFHEIVGHFVEITKDRIEGMMGANLRTVDPPQR

SEQ ID NO: 76644 - protein, 117 aa, Gossypium hirsutum
  unsure (1)..(117): unsure at all Xaa locations
  Clone ID: LIB3828-007-Q1-K6-C5.pep
VPLVTVFVFNNKRNHPIFLKKKKKKKKKKKKKKKKKKKKKKKKKKKKKKKKKKKKKKKKKKKKKKKKKKKKKKKKKXXKKXKXKKXXXKPPXNPPXKKPQKPQPPPHKPKTPKKHHP

SEQ ID NO: 76645 - protein, 124 aa, Gossypium hirsutum
  Clone ID: LIB3165-008-P1-K1-G10.pep
PTRPGWHVIWVKNGNTGYDEIRAAIKEAKAVKDKPTLIKVTTTIGYGSPNKANSYSVHGSALGAKEVDATRKNLGWPYEPFHVPEDVKASNCRDAIVVSFKVWNNPIFVCLINREILEISCEGK

SEQ ID NO: 76646 - protein, 120 aa, Gossypium hirsutum
  unsure (1)..(120): unsure at all Xaa locations
  Clone ID: uC-gsflnu33B046d05b1.pep
LSELETADKAADELPKDGKAVRVVSLXSWELFDEQSIAYKESVFPSAXTPRVSIEAGSTIAWVKIVGXSKGKAIGIDLFVASAPAGRIYNEIVLTPYAIIAAVKEPSLSLVHKSLRKLLC

SEQ ID NO: 76647 - protein, 93 aa, Gossypium hirsutum
  unsure (1)..(93): unsure at all Xaa locations
  Clone ID: uC-gsronu33B057f02b1.pep
MKLSAKVSEASASRNRSTRDEGWAAFRNILAEINEASRLFLLPNQQQSXEPPERLVGLSDDVGAGFISGHNQSTSTSELHVDRTVXLPPHDET

SEQ ID NO: 76648 - protein, 116 aa, Gossypium hirsutum
  Clone ID: LIB3165-060-Q1-K1-B11.pep
MGHILYDEVMRYNPKNPYCATFFVFTDYMRAAIRISALCEAGVIYVMTHDSIGLGEDGPTHQPIEHLASFRAMPNVLMLRPADGNETAGAYKVAVLNRKRPSILASLGKAAQLLEL

SEQ ID NO: 76649 - protein, 179 aa, Gossypium hirsutum
  unsure (1)..(179): unsure at all Xaa locations
  Clone ID: LIB3583-047-P1-K1-G11.pep
XVEERFKGLGWHVIWVKNGNTGYDEIRAAIKEAKAVKDKPTLIKVTTTIGYGSPNKANSYSVHGSALGAKEVDATRKNLVWPHEPFHVPEDVKGHWSRLVQQGAALEAEWNAKFAEYEKKYKDEAAELKLIITGELPAGWEKALPTYTPESPADATRNLSQQNLNALVKVLPGFFGWKC

SEQ ID NO: 76650 - protein, 84 aa, Gossypium hirsutum
  unsure (1)..(84): unsure at all Xaa locations
  Clone ID: uC-gsflnu33B098b01b1.pep
LMTHDSIGLGEDGSTHQPIEHLASFRAMPNVLMLRPADGNETAGAYKVAVLKRMTPLIYCLXRQKLLLFAGSPLWVLFKVFSFF

SEQ ID NO: 76651 - protein, 69 aa, Gossypium hirsutum
  Clone ID: LIB3165-039-Q1-K1-D4.pep
PRVRPRVRLDRERRPFFFFLKSKIIQTHFNSGQSRNPDKSQEKLQIHKHKETLTSLLLTAVIAAAKELC

SEQ ID NO: 76652 - protein, 192 aa, Gossypium hirsutum
  unsure (1)..(192): unsure at all Xaa locations
  Clone ID: GOSHI-09MAY01-C1587_2.pep
MDFTATLLFFALFISSIQAVDPCGSRPQNKDLSVIPIYGRCSPFKPPKPESWVDTVINMASKDPARLKYLSSLVAQKTTAVPIASGQQVLSIGNYVVKVKLGTPGQVMFMVLDTSNNVAWVPCSGCTGCSATTFLPSASSSYGSLDCSLPQCNQVHGLSCPATAAAACXFNQSYGGDSSFSANLAQDSLTLA

SEQ ID NO: 76653 - protein, 447 aa, Gossypium hirsutum
  Clone ID: GOSHI-09MAY01-C1587_1.pep
ADSILRSRSFGSMDFIATILFLALVISSTKALDPCGPQPDDSDLLVIPIYGKCSPFNPPKPDSSFNTVMNMASKDPARVKYLSSLVAQKTTAVPIASGQQVLNIGNYIVRVKIGTPGQLMFMVLDTSNDVAWVPCSGCNGCSATTFSPNTSSTYGSLDCGLPQCAQVRGLSCPATGSAACSFNQSYGGDSSFSANLVRDSLGLANDIVPDFAFGCINVISGGSVPPQGLLGLGRGPMSLISQSGALYSGVFSYCLPSFKSYYFSGSLKLGPVGQPKNIRTTPLLKSPHRPSLYYVNLTGISVGRVQVPIAPEYLAFNPNTGAGTIIDSGTVVTRFVQPIYKAIRDEFVKHVKGPFTAIGVFDTCFDATAEAEAPLITLHFEALSMPLPMENSFLHTSAGSRACLAIAPVPNNVNAAMNVIANLQQQNHRILFDVINSRLGIAREACN

SEQ ID NO: 76654 - protein, 165 aa, Gossypium hirsutum
  Clone ID: GOSHI-09MAY01-C1557_1.pep
MLRFTLYYWVLIVILIPSASFVIVSSSKEQLSSKQCEDLGFTGLALCSDCNTFSEYVKDKELISDCLKCCTEDSDDSTSKITYSGAILEVCMRKLVFYPEIVGFIEEEKDKFPTVKVQYLFNSPPKLIMLDDEGQHKETIRIDNWKREHMLQFLQKKVQPYSASS

SEQ ID NO: 76655 - protein, 109 aa, Gossypium hirsutum
  Clone ID: LIB3493-050-P1-M1-D6.pep
VKDKELISDCLKCCTEDSDDSTSKITYSGAILEVCMRKLVFYPEIVGFIEEEKDKFPTVKVQYLFNSPPKLIMLDDEGQYKETIRIDNWKREHMLQFLQKKVQPYSASS

SEQ ID NO: 76656 - protein, 88 aa, Gossypium hirsutum
  Clone ID: GOSHI-09MAY01-C1547_3.pep
ISFSKNEKLIRVEVTWYNLILKTIFVIILIRPKYRFLQNIIALESSTKFYLKILPRGTSLYLNKRSHYHKEYRDYGFKHQEASPQSQK

SEQ ID NO: 76657 - protein, 77 aa, Gossypium hirsutum
  Clone ID: GOSHI-09MAY01-C1547_1.pep
FPLIPMVFYLYIFASALPNSVLVGECHMQVEACIFVCIAFCSSLGPCMGFFFRWIEGWDFTSTRYWKVYHVKHVGQC

SEQ ID NO: 76658 - protein, 59 aa, Gossypium hirsutum
  Clone ID: LIB3585-049-P1-K1-G12.pep
PRVRPRVRPRVRKFQALCPKAWLGVRGKGSKLWRAPSRDDHLKFTCSSRSIPGRLLISC

SEQ ID NO: 76659 - protein, 36 aa, Gossypium hirsutum
  unsure (1)..(36): unsure at all Xaa locations
  Clone ID: LIB3145-052-Q1-K1-B4.pep
PPIHCKIXMICHTFNFINYIILYFFFXXXTSYDQLQ

SEQ ID NO: 76660 - protein, 239 aa, Gossypium hirsutum
  Clone ID: GOSHI-09MAY01-C1567_1.pep
MACKISNSLFLCLGPSQRPIRSQTIAIHSSTASICHLNWDNLLVKGINHRKGIIPLRRNKVIQAVAVPVRPSSADSAEYRKQLAETYGFRQIGEPLPDNVTLKDVIDTLPRKVFEIDDVKAWTSVLISVTSYALGIFMISKAPWYLLPLAWAWTGTAITGFFVIGHDCAHKSFSKNKLLEDIVGTLAFLPLIYPYEPWRFKHDRHHAKTNMLSEDTAWHPVWEKEFETSPFLRIAIMFG

SEQ ID NO: 76661 - protein, 250 aa, Gossypium hirsutum
  Clone ID: GOSHI-09MAY01-C1517_1.pep
MTEVRLHIYDVTNSGSDKTNSTIVQINKIFKDGIGLGGIFHSAVQVYGEEEWSFGFCEQGSGVFSCPSGKNPMYTYRESMVLGRTNSSKLNVNQILQELSREWPGSSYDLLSKNCNHFCDEFCERLGVQKLPGWVNRFANAGDAAIEIAENTALRLRQAKTEIVSASKVAYRFLVGVTSSSSGGNDSPGNSNRGSPRFQAAWFKNIITTGAKPSSSSEIETQGGSGFQNHRLQNSAQTMQQNFQDPQRSP

SEQ ID NO: 76662 - protein, 82 aa, Gossypium hirsutum
  Clone ID: LIB3148-054-Q1-K1-C11.pep
NMHKKPNRTKKVTAIFQFLPSMLVNSHSQQQYSRHFRFRAIFNANLVQHAQKTRKQKADKCTAKIFTAKFTFRIRLQFTNKC

SEQ ID NO: 76663 - protein, 65 aa, Gossypium hirsutum
  Clone ID: LIB3543-020-Q1-K1-D1.pep
MTEVRLHIYDVTNSGSDKTNSTIVQINKIFKDGIGLGGIFHSAVQVSLFTFTFLLLSLLLCLNEI

SEQ ID NO: 76664 - protein, 98 aa, Gossypium hirsutum
  unsure (1)..(98): unsure at all Xaa locations
  Clone ID: LIB3148-055-Q1-K1-C11.pep
ALSIARFXAFRLGTLKTCIKNHPVQRRSPQYSSFCFLCLSIHILINNIVGIFRFRAIFNANLVQLCFFFFFFFFFSLFFFFIKPTFHNTIDLQTDSLV

SEQ ID NO: 76665 - protein, 81 aa, Gossypium hirsutum
  Clone ID: GOSHI-09MAY01-C1507_4.pep
VILGYFGVAGYVICCCSDVKEPSYAKCQGHAISFVTIYRSSLIPMSYLGVLYFFCFRLMSNLVGLVIFTSQFDMNLFSKHI

SEQ ID NO: 76666 - protein, 122 aa, Gossypium hirsutum
  Clone ID: GOSHI-09MAY01-C1507_3.pep
PTRPPTRPGITAEDVNAAFRKAAEGPLKGVLEVCDIPLVSVDFRCSDVSSTIDSSLTMVMGDDMVKVVAWYDNEWGYSQRVVDLAHLVASKWPGMPVAGSGDPLEDYCKANPADEECKVYEA

SEQ ID NO: 76667 - protein, 197 aa, Gossypium hirsutum
  unsure (1)..(197): unsure at all Xaa locations
  Clone ID: GOSHI-09MAY01-C1507_2.pep
HASAHTFATTHSYTGDQRLXGALHRDLRRARAAALNIVPTSTGAAKAVSLVLAQLKGKLNGIALRVPTPSAHASAHAADVEMKGITAEDVNAAFRKAAEGPLKGVLDVCDVPLVSVDFRCSDVSSTIDSSLTMVMGDDMVKVVAWYDNEWGYSQRVVDLAHLVASKWPGMPAGGSSDPLEDFCKTNPADEECKVYEA

SEQ ID NO: 76668 - protein, 485 aa, Gossypium hirsutum
  Clone ID: GOSHI-09MAY01-C1507_1.pep
MAISSTAAATAASSKLRYPHASPFPTHSSTTTSAFFSSIPSKLTPTHLSSSFLPPFLTTVATTSVFPRRRGSFTVKAARGKFERKKPHVNIGTIGHVDHGKTTLTAALTMALASMGNSAPKKYDEIDAAPDERARGITINTATVEYETENRHYAHVDCPGHADYVKNMITGAAQMDGAILVVSGADGPMPQTKEHILLAKQVGVPNVVVFLNKQDQVDDEELLQLVELEVRELLSSYEFPGDDVPIISGSALLALEALMAKPSIPRGENQWVDKIYELMDAVDSYIPVPQRQTDLPFLLAVEDVFSITGRGTVATGRIERGTVKVGETVDIVGLKDTRNVTVTGVEMFQKTLDDAMAGDNVGLLLRGVQKADIQRGMVLAKPGTITPHTKFSAIVYVLKKEEGGRHSPFFAGYRPQFYMRTTDVTGRVASIMNDKDEESKMVMPGDRVKMVVELIMPVACEQGMRFAIREGGKTVGAGVIQSIIE

SEQ ID NO: 76669 - protein, 91 aa, Gossypium hirsutum
  Clone ID: LIB3120-001-Q1-K1-H8.pep
KEMAISSTAAATAASSKLRYPHASPFPTHSSTTTSAFFSSIPSKLTPTRVVDLAHLVASKWPAWLELETVTPWRITGRQTQQMKNAKFTRR

SEQ ID NO: 76670 - protein, 100 aa, Gossypium hirsutum
  Clone ID: LIB3165-004-P1-K1-G8.pep
TAAVTADSSKLRYPHACPFPTHSSTTTCAFFSSIPSKLTPTHLSSCFLPPFLTTVATTSVFPRRRGSFTVKAARGKFERKKPHVNIGTIGHVDHGKTTLT

SEQ ID NO: 76671 - protein, 53 aa, Gossypium hirsutum
  Clone ID: LIB3165-014-P1-K1-C10.pep
ENKIISNCDMNITNPTRLDMSLKQKKYKTPKYDIGIREGGKTVGAGVIQSIIE

SEQ ID NO: 76672 - protein, 116 aa, Gossypium hirsutum
  Clone ID: GOSHI-09MAY01-C1497_2.pep
KDSKQLDAEVHRNYIYGGHVAAYMRILMEDEPEKYQSHFSEYIKRGIEADNIESLYKKVHAAIRADPSAKKSEKAPPKQHKRFNLKKLTYEERKAKLIDRLHTLNAAAGADSEDED

SEQ ID NO: 76673 - protein, 299 aa, Gossypium hirsutum
  Clone ID: GOSHI-09MAY01-C1497_1.pep
MAFVKAQKTKAYFKRFQVPYKRRREGKTDYRARIRLTNQDKNKYNTPKYRFVVRFSNKDITAQIISANITGDMVLASAYSHELPRYGLEVGLTNYAAAYCTGLLLGRRVLKMLEMDDEYQGNVEATGEDFSVEPTDTRRPFRALLDVGLIRTTTGNRVFGALKGALDAGLDIPHSDKRFAGFSKDNKQLDAEVHSKYIYGGHVAAYMRTLMEDEPEKYQSHFSEYIKRGIEADNIESLYKKVHAAIRADPTAKKTEKEPPKQHKRFNLKKLTYEERKAKLIERLHTLNAAAGADSEEED

SEQ ID NO: 76674 - protein, 62 aa, Gossypium hirsutum
  Clone ID: LIB3582-011-P1-K1-G5.pep
RRSRVRVRVRVRPRVRPRVRPRVRQHKRFNLRKLTYEERKAKLIDRLHTLNAAAGADSEDED

SEQ ID NO: 76675 - protein, 150 aa, Gossypium hirsutum
  Clone ID: LIB3145-024-Q1-K1-B11.pep
PTRPPTRPPTRPPTRPPTRPRTRPAYFKRFQVPYKRRREGKTDYRARIRLINQDKNKYNTPKYRFVVRFSNKDVTAQIVSANIAGDMVLASAYSHELPRYGLEVGLTNYAAAYCTGLLLGRRVLKMLEMDEEYQGNVEATGEDFSVEPTD

SEQ ID NO: 76676 - protein, 67 aa, Gossypium hirsutum
  Clone ID: uC-gsronu33B077c06b1.pep
LAKIAFHKQLNIQKSNNSITLELQKITKILNKIETKCEISSTPYKMQLSSGQNCSQQQLKGFMKVSK

SEQ ID NO: 76677 - protein, 179 aa, Gossypium hirsutum
  unsure (1)..(179): unsure at all Xaa locations
  Clone ID: GOSHI-09MAY01-C1457_1.pep
KLFADHEEREIQRLSANIINHQLKRLELKLKQFAEVETLLMKECEQVEKTRQRFAAERARIVSAQFGTTGVASQMSVPVISSPMVNNIGNNRQQVLXQPHLQRQAILDMLTTNQYTPHDATSLQRQPMFPMGPRMPLTAMQASTSAPPNVMFNSRGNAQPTLNHPLMRXSVSGTGSGLG

SEQ ID NO: 76678 - protein, 265 aa, Gossypium hirsutum
  unsure (1)..(265): unsure at all Xaa locations
  Clone ID: GOSHI-09MAY01-C1447_1.pep
KFVSMVFRSPLRKRNTNLSNKQKAQPLMKCFSFEEISTATNNFHPENIVGRGGYSEVYRGDLSDGRAVAVKRLAKDNRDENKEREFLTELGTIGHVRHPNTATLVGCCVENGLYLIFNFSEKGTLASALHGKINVVLDWPVRYKIALGVARGLHYLHKCCKHRIIHRDIKASNVLLGPNYEPQITDFGLAKWLPNKWTHHAVIPIEGTFGYLAPEYFMHGIVDEKTDVFAFGVLLLEIITGRRPVDSSKKNLLLWAXKPLMESGN

SEQ ID NO: 76679 - protein, 344 aa, Gossypium hirsutum
  Clone ID: GOSHI-09MAY01-C1467_1.pep
MATHILRRQVSQILSHASPNPNPASYFSLARHFSSATDTIRATLFPGDGIGPEIAESVKQVFRTAEVPIEWEEHYVGDQVDPRTQSFLTWESLESVRRNRVGLKGPMATPIGKGHRSLNLTLRKELNLYANVRPCYSLPGYKTRYDDVNLITIRENTEGEYSGLEHQVVRGVVESLKIITRQASLRVAEYAFHYAKTHGRERVSAIHKANIMQKTDGLFLKCCREVAEKYPEITYEEVVIDNCCMMLVKNPALFDVLVMPNLYGDIISDLCAGLIGGLGLTPSCNIGEGGIALAEAVHGSAPDISGKNMANPTALLLSSVSMLRHLNLHDTAVRIQEAILSTIS

SEQ ID NO: 76680 - protein, 160 aa, Gossypium hirsutum
  Clone ID: LIB3585-057-P1-K1-E2.pep
GRVGGRVGGRVGGRVGDTIRAALFPGDGIGPKIAESVKQVFRTAEVPIEWEEHYVGDQVDPRTQSFLTWESLESVRRNRVGLKGPMATPIGKGHRSLNLTLRKELNLYANVRPCYSLPGYKTRYDDVNLITIRENTEGEYSGLEHQVVRGVVESLKIITR

SEQ ID NO: 76681 - protein, 122 aa, Gossypium hirsutum
  Clone ID: uC-gsflmaxxa094b06b1.pep
RSRGRTRGINGAQYLRRHVCQTLSHVSPNSNPTSYFSLARPFSSATDTIRATLFPGDGIGPEIAESVKQVFRTAEVPIEWEEHYVGDQVDPRTQSFLTWESLESVRKNRVGLKGPMATPIGK

SEQ ID NO: 76682 - protein, 66 aa, Gossypium hirsutum
  unsure (1)..(66): unsure at all Xaa locations
  Clone ID: LIB3272-019-P1-K1-G10.pep
PTDTIRATLFPGDGIGPEIAESGKQVFRTAEVPIEWEEHYVVDQVDPRTXSFLTWESLGSRKKNRV

SEQ ID NO: 76683 - protein, 331 aa, Gossypium hirsutum
  unsure (1)..(331): unsure at all Xaa locations
  Clone ID: GOSHI-09MAY01-C1407_1.pep
METNSGVTVIGAEAPSAYQMAPRTENVSQIGVGSTTEDVSPRSVGLTGSIEKKKRGRPRKYGPDGTMARALSPMPISSSVPPSGGEFSSGGGKRGRGPGSRYQIKHQKGMDLENLGEWAATSVGSSFTPHVITVYAGEDVTMKVISFSQQGPRAICILSANGVISNVTLRQPDSSGGTLTYEGRFEILSLSGSFMPTETQGTRSRSGGMSVSLASADGRVVGGGVAGLLXAACPVQVVVGSFLPGNQHDQKPKKQKIESIPATVAPNPSIAAAPASNAEKEDGIDVVSPQQNSNALKPSLTGATFRRENWAATMQEPRNSATDINISLPAG

SEQ ID NO: 76684 - protein, 112 aa, Gossypium hirsutum
  unsure (1)..(112): unsure at all Xaa locations
  Clone ID: LIB3543-036-Q1-K1-A8.pep
MDLENLGEWAATSVRSSFTPRGXAVNAGEDVTMKVISFSQQGPRAICILSANGVISNVTLRQPDSSGGTLTYEGRFEILSLSGSFLPSETHGTRCRSGGMSVSLXCAVGRVV

SEQ ID NO: 76685 - protein, 63 aa, Gossypium hirsutum
  Clone ID: LIB3543-022-Q1-K1-C7.pep
SLSTSFLIFDFVVFKDVTMKVISFSQQGPRAICILSANGVISNVTLRQPDSSGGTLTYEVRQF

SEQ ID NO: 76686 - protein, 176 aa, Gossypium hirsutum
  unsure (1)..(176): unsure at all Xaa locations
  Clone ID: GOSHI-09MAY01-C1437_1.pep
MSESSFARPRLVTKKFLPKHQREGDGAVVRRCIGRSELKTLDPFLMMDDFTVSPPAGFPDHPHRGFETVTYMLQGGITHQDFAGHKGTIHTGDVQWMTAGRGIIHSEMPAGEGVHKGLQLWINLSSQDKMIEPRYQXLLSKDIPSAEEDGVEVRVIAGXSMGVQISVYTRTPAMYL

SEQ ID NO: 76687 - protein, 71 aa, Gossypium hirsutum
  Clone ID: LIB3585-017-P1-K1-H2.pep
KNLARIEPRYQELLSKGISSAQEEGVEVPVIAGESMGVQSSVYTRTPAMYLDFSLRPSTQVYQHIPKSWNA

SEQ ID NO: 76688 - protein, 95 aa, Gossypium hirsutum
  Clone ID: GOSHI-09MAY01-C1797_1.pep
KAKEIPRTKKSPLLFDCFFLSSVFVKKAFTIENKRLYSQIIKRKKQQFLFSYWLLLRCCFLIFFCRYGACAGTRREGGVQPVDVEARAALGLYGG

SEQ ID NO: 76689 - protein, 71 aa, Gossypium hirsutum
  Clone ID: uC-gsronu33B138h09b1.pep
GFSPLRCSLQPLYSPNAARATTSIDRTPPSRLVPAHAPYLVSSHGHEADGIWSLLVHCSPPNQMVNSRSLK

SEQ ID NO: 76690 - protein, 210 aa, Gossypium hirsutum
  unsure (1)..(210): unsure at all Xaa locations
  Clone ID: GOSHI-09MAY01-C1787_1.pep
KIRKLARSCKVPFEFHAAATPASAXRPENLGIQPGEAIAVNFAMMLHHMPDESVDTQNHRDRLLRLAKSLSPKVVTLVEHEANTNTAPFIPRFLETMGYFSSIFESIDVSLPREHKERINVEQHCLAREIVNIIACEGQERVERYELFGKWRSRFIMAGFTPSPLSPFVNATIKTLLQSYCDKYTLEERDGVLYLGWMDRAIIASCAWRC

SEQ ID NO: 76691 - protein, 86 aa, Gossypium hirsutum
  Clone ID: LIB3135-044-Q1-K1-B2.pep
HASAERFGMMARVNPPDSNRTGEESDDDWHFREVAYEHLIVDGFIRGIKNGFSMESVHLIESLQRLIQLILIVLTISLLEKMTWRC

SEQ ID NO: 76692 - protein, 137 aa, Gossypium hirsutum
  unsure (1)..(137): unsure at all Xaa locations
  Clone ID: LIB3166-018-P1-K1-B1.pep
GRSGGPPSIRIICIDDPTSACGRGGGLEIVXXKLRKLAESCKVPFEFHAAAISGTEVQLENLGIQPGEAIAVNFAMMLHHMPDESVDTQNHRDRLLRLAKSLSPKVVTLVEHESYTYTDFLFPXFLETMGYFLLIFE

SEQ ID NO: 76693 - protein, 409 aa, Gossypium hirsutum
  unsure (1)..(409): unsure at all Xaa locations
  Clone ID: GOSHI-09MAY01-C1767_1.pep
MAMEMQSGGKMMGFLVILLVLFIEMAAPTSASRNSFSTQILEVQNQLKLLNKPAVKSIKKSXTGDXVDCIKLSHQPAFDHPMLKNHKIQMTPNFHPEGVFGENKVASKMKPGSSRNVTQMWHLNGRCPEGTIPIRRTRKDDLLRASSIKAFGKKRHKTIPQPKSALGGLDFGALMXHAIAYVDEEKYYGAKATINVWEPKIQQPNEFSLSQIWILGGSFGEDLNSIEAGWQVSPDLYGDNHTRLFTYWTSDAYQATGCYNLLCSGFIQINNEIAMGASIYPVSSYHDSQYDISLLVWKDPKEGNWWLQFGNSYVLGYWPAFLFSYLSDSASMIEWGGEVVNSESDGQHTSTQMGSGHFPKEGFGKSSYFKNIQIGDGSNNLRVPKDIATFTEQSNCYDVQTGKGGNLGS

SEQ ID NO: 76694 - protein, 141 aa, Gossypium hirsutum
  Clone ID: LIB3583-018-P1-K1-F5.pep
QMTPNFHPEGVFGENKVASKMKPGSSRNVTQMWHLNGRCPEGTIPIRRTRKDDLLRASSIKAFGKKRHKTIPQPKSADPDLITQSGHQHAIAYVDEEKYYGAKATINVWEPKIQQPNEFSLSQIWILGGSFGENLNSIEAG

SEQ ID NO: 76695 - protein, 146 aa, Gossypium hirsutum
  Clone ID: GOSHI-09MAY01-C1737_5.pep
NLSALLPKPKCLLCFQAEKVRLHIQDPYTRVSLADDFEPPLIPAKTIPDPDDKKPEDWDERAKIPDPNAVKPDDWDEDAPMEIEDEEAVKPEGWLDDEPEEIDDPEATKPEDWDDEKDCKLEHLPPERLAHMHINSLIPTQLKCLH

SEQ ID NO: 76696 - protein, 170 aa, Gossypium hirsutum
  Clone ID: GOSHI-09MAY01-C1737_4.pep
MMIMRLYALLLLLAFASLQLLCFAADVDEVFYDSFEESFDGRWIVSDKDDYKGVWKHSKSEGHDDYGLLVSEMAKKYAIVKELDEAVNLKEGTTVLQFETRLQSGLECGGAYLKYLRPQDAGWKPNEFDNESPYSIMFGPDKCGATNKVHFILRHKNPKSGEYIEHHLKY

SEQ ID NO: 76697 - protein, 247 aa, Gossypium hirsutum
  Clone ID: GOSHI-09MAY01-C1737_3.pep
FPYLLPFALFFSSILCWGGGKSKKSRDLPLPPGTLGWPYIGETFQLYSQNPNVFFASKQKRYGSIFKTHILGCPCVMISSPEAAKFVLVTKSHLFKPTFPASKERMLGKQAIFFSQGQYHAKLRKLVLRAFVPEAVKSFVSNIESIAKDSLQSLEGRLITTFQEMKTYTFNVALLSIFGEDEVKYREDLKRCYYILEKGYNSMPINIPGTLFNKSMKARKELAHILAKIISTREETKQEYNDLVVFF

SEQ ID NO: 76698 - protein, 529 aa, Gossypium hirsutum
  Clone ID: GOSHI-09MAY01-C1737_2.pep
MGRFALLLLLAFASFQALCFAADDDTVFYDSFDEPFDGRWIVSDKDDYKGVWKHSKSEGHDDYGLLVSEKARKYAIVKELNEPVSLKDGSTVLQFETRFQNGLECGGAYLKYLRPQEAGWKAKEFDNESPYSIMFGPDKCGATNKVHFILKHKNPKSGEYVEHHLKYPPSVPSDKLTHVYTAILKPDNEVSILIDGEEKKKASFLSAEDFEPPLIPSKTIPDPDDKKPEDWDERAKIPDPDAVKPEDWDEDAPMEIEDEEAVKPEGWLDDEPEEIDDPEATKPEDWDDEEDGEWEAPKIDNPKCETAPGCGEWKRPMKRNPAYKGKWSPPLIDNPSYKGIWKPQEIPNPNYFELEKPDFDPIAAIGIEIWTMQDGILFDNILIAKNDKVAESYRETTWKPKFEVEKEKQKAEDEAADSARLAGFQRKVFDVLYKVADIPFLSKYKHQILDLIEHAETQPNLTIGVLVSIVVIILTIFFKLIFGGKKQPRVEKKPEVAETSNGEGSSGEKAEEAEKEEAAAAPRRRRRDN

SEQ ID NO: 76699 - protein, 361 aa, Gossypium hirsutum
  Clone ID: GOSHI-09MAY01-C1737_1.pep
DAWADAWADAWADAWADAWVLIDGEEKKKANLLSADDFEPPLIPAKTIPDPDDKKPEDWDERAKIPDPNAVKPDDWDEDAPMEIEDEEAVKPEGWLDDEPEEIDDPEATKPEDWDDEEDGEWEAPKIDNPKCETAPGCGEWKRPMKMNPAYKGKWSAPLIDNPNYKGIWKPQEIPNPDYVELDKPDFEPIAAVGIEIWTMQDGILFDNILIAKNDKVAESYRETTWKPKFEVEKEKQKAEDESTDSDGLSGVQKKVFDVLYKVADIPFLSEYKLQILDLIEKAEKQPNITIGVIVSILVIILTVLFRLLFGGKKQPKVEKKPEVAETSNNQSTSGEKAEEEEEEEEKEGTAAAPRRRRRDT

SEQ ID NO: 76700 - protein, 147 aa, Gossypium hirsutum
  Clone ID: AI054959.1.pep
MGRFALLLLLAFASFQALCFAADDDTVFYDSFDEPFDGRWIVSDKDDYKGVWKHSKSEGHDDYGLLVSEKARKYAIVKELNEPVSLNDGSLGLNLRTCFKKGLKCLGLFVKILFPLKVDWKVWVFSQYIAYFLLLDLKIGVPYGHFI

SEQ ID NO: 76701 - protein, 72 aa, Gossypium hirsutum
  unsure (1)..(72): unsure at all Xaa locations
  Clone ID: LIB3147-038-Q1-K2-E8.pep
PKLNLLVATSHLCFKICSIVTAPSARSGSSFFFLRLFSLLSXASFTLRCFFKSGLVXYYWLFLPPXNENEEN

SEQ ID NO: 76702 - protein, 84 aa, Gossypium hirsutum
  Clone ID: GOSHI-09MAY01-C1697_1.pep
HSPDSKTSAHTKAYITSSSSTFQLTSKRFLDCYYLNEITRSSNYSSRCFFFNLANFRLASRKVSRNRFMILQCLMSLCQLQIAF

SEQ ID NO: 76703 - protein, 319 aa, Gossypium hirsutum
  unsure (1)..(319): unsure at all Xaa locations
  Clone ID: GOSHI-09MAY01-C1687_1.pep
MTFTRISHFSLFFSSFFFLSSTLSSHLYPASATTPEKDGKTRSLYSEILRNEAAARLNDLGKVSDADGYLERTFMSPASVRAGFLIREWMEDAGLRTWVDSMGNLHGRVEGMNASAQALLIGSHLDTXVLTLGMFDGSLGIISAISALKVLKSIGKLGELKRPVEVIAFSDEEGVRFQSTFLGSAAVAGILPVTALKISDKSGVTVQDALKGNSIEITEDSLLGLKYDPASIWGYFELHIEQGPVLEWVGFPLAVVKGIAGQTRMKVTVRGSQGHAGTVPMSMRRDPMAAAAELIVLLESLCKYPRDFLSSGGSCNEQT

SEQ ID NO: 76704 - protein, 243 aa, Gossypium hirsutum
  Clone ID: GOSHI-09MAY01-C1667_1.pep
MRWSGGGLICCNIKSSSKGLISPQLMSPQQHRLHHSIQPSLAHLTALQSQLCSGGASSHKMMLGTADHREQRTKSSRNRQSMRFSQQSSDTSSQKNESGLVQFRSKHMTAEEIESILKMQHAATHSNDPYVDDYYHQACLAKRSSGSRAKHLFCPSHLKESHSRSRNSSGEQHLHVHVDALGKVPIPTIRKPRPLLEIDPPLVDGGSEQKTEKPLEQEPMLAARITIEDSLGLLFDVDDIDRL

SEQ ID NO: 76705 - protein, 181 aa, Gossypium hirsutum
  Clone ID: GOSHI-09MAY01-C1617_1.pep
MDREGGSHGGSCYYYVLGIRKDASFSDIRTAYRKLAMKWHPDRYARNPGIAGEAKRRFQQIQEAYSVLSDESKRSMYDAGLYDPLEEEDQDFCDFMQEMMSMMNNVKDEGDSFEDLQRMFAEMVDGISFDINTDPTVTKTARVTASKGNAARNSSRCGCCVVALPSKLNLCLINPMISNYN

SEQ ID NO: 76706 - protein, 130 aa, Gossypium hirsutum
  Clone ID: GOSHI-09MAY01-C1627_1.pep
MAMEDNKGNKRARVEFEEFESGGNLESVHNSKLARVDSENTGSNSPEVTYAEPDPDDEGIQSPDVKRIQEDLLDILDDSDPVIGLDPEIQGLDLVIKSFEEEISVPAQDPVQELDSGESRRELGFGLEAS

SEQ ID NO: 76707 - protein, 45 aa, Gossypium hirsutum
  Clone ID: GOSHI-09MAY01-C1197_3.pep
WHWCVLTFDANKYLIASTFRWHAIYLFCDQKKKKVRVKKKKKKKN

SEQ ID NO: 76708 - protein, 255 aa, Gossypium hirsutum
  Clone ID: GOSHI-09MAY01-C1197_2.pep
MLQRALIFSSSNPICSQLPTTAPPDNTVFPKRNGGWIIPFSSYQLPAFRLRNYRRTLLPPLCSASDSAANRPNMASQDEQDPRISNISSAIRVIPDFPKPGIIFQDITTLLLDTKAFRDTIDLFVERYRGKDISVVAGIEARGFIFGPPIALAIGAKFVPMRKPNKLPGEVLSEEYSLEYGKDTMEMHVDAVKAGERALIIDDLVATGGTLSAAIRLLECVGVHVVECACVIELPELKGRERLGGKPLFVLLSST

SEQ ID NO: 76709 - protein, 186 aa, Gossypium hirsutum
  Clone ID: GOSHI-09MAY01-C1197_1.pep
MASQDEQQQQQDPRIPKISSAIRVIPNFPKPGIMFQDITTLLLDTKAFSDTIDLFVERYKGQNISVVAGIEARGFIFGPPIALAIGAKFVPMRKPNKLPGEVISEEYSLEYGKDKMEMHVGAVQAGERALIIDDLVATGGTLSAAIRLLERVGVHIVECACVIELSGLKGRERLGDTPLFVLVNSA

SEQ ID NO: 76710 - protein, 337 aa, Gossypium hirsutum
  unsure (1)..(337): unsure at all Xaa locations
  Clone ID: GOSHI-09MAY01-C1187_3.pep
GRRVTKEKALKEKEAGNAPYNKNGGAAALKHDTISMELDHXNISYITNPSAVYLEMGKYDHXINDRHKAVERGRELRSDYKMIARALTRKGTALVKMAKCSKDYEPPIETFQKALTEHRNPDTLKKLNDAEKAKKDLEQHEYFDPKIADEDREKGNECFKQHKYPEAVKYYTESLRRFLKXQKLYISLAACYTKLGALPEGLKDAEKCIELDPTFSKGYTRKGAAQFFMKEYDKALETYQEGLKHDPNNQELLDGVRRCVARVNRASRGDFSPEELKERQAKAMQDPEIQNILSDPVMRQVLVDFQENPKAAQEHTKNPMVMNKIQKLVTAGIVQLR

SEQ ID NO: 76711 - protein, 189 aa, Gossypium hirsutum
  Clone ID: GOSHI-09MAY01-C1187_2.pep
MADEAKAKGNAAFSSGDFNTAVKHFTEAINLSPTNHVLYSNRSAAYASLHQYDAALSDAKKTVDLKPDWSKGYSRLGAAHLGLHQYEDAVSAYKKGIEIDPNNEALKSGLADAQSTATASASRARAAPPPNLFGDAFQGPEMWAKLTADPTTRVFLQQPDFVKAMQEIQRNPSKLNEHLQDQRVMQALG

SEQ ID NO: 76712 - protein, 583 aa, Gossypium hirsutum
  unsure (1)..(583): unsure at all Xaa locations
  Clone ID: GOSHI-09MAY01-C1187_1.pep
MADEAKAKGNAAFSSGDFNAAIKHFTDAINLSPTNHVLYSNRSAAYASLHQYEAALSDAKRTVELKPDWSKGYSRLGAAHLGLHQYQDAVSAYKKGLEIDPNNEALKSGLADAQSAATASASXRSRAAPPPNPFGDAFQGPEMWAKLTADPTTRVFLQQPDFVKAMQEIQRNPSKLNEYLQDQRVMQALGVLLNVKFKAHGGGDDMEIPEADSPPAPSPSRPAKEEVKKPEPEPEPEPMEITEEEKEKKEKKEKALKEKEAGNAAYKKKDFETAIKHYTTAMELDDGDISYITNRAAVYLEMGKYEDCIKDCDKAVERGRELRSDYKMIARALTRKGTALVKMAKCSKDYEPAIETFQKALTEHRNPDTLKKLNDAEKAKKELEQQEYFDPKIADEEREKGNECFKQQKYPEAVKHYTESLRRNPKDPKAYSNRAACYTKLGALPEGLKDAEKCIELDPTFSKGYTRKGAVQFFMKEYDKALETYQEGLKHDANNQELLDGVRRCVEQINKANRGDLSPEELKERQAKAMQDPEIQNILSDPVMRQVLIDFQENPKAAQEHMKNPMVMNKIQKLVSAGIVQMR

SEQ ID NO: 76713 - protein, 121 aa, Gossypium hirsutum
  unsure (1)..(121): unsure at all Xaa locations
  Clone ID: uC-gsflnu33B059g03b1.pep
GYSNRAACYTKWGALPEVLKDAEKCIELDPTFSKGYTRKGADQFFMKEYDKALXTYQEGLKHDANNQELLDGVRRCVEQINQANRGDLSPEELYERQAKAMQDPEIQNILLKSWYETGKSL

SEQ ID NO: 76714 - protein, 220 aa, Gossypium hirsutum
  Clone ID: GOSHI-09MAY01-C1157_1.pep
MSGKRPRPMMGKLSELLVSGKKPGFLDAVVTSPRSPLDLKTPSPRSSKRYDVGGVGLGIAVALDNKCSTHSCRHTICSSNVIVVKSGGKNLEMESLEDFTYVTTHGSGKSSTKVFYDGGEERRKSNCETPAPAPRFVEEVAYPTSDFLSCCHLCRKKLHGQDIYMYRGEKAFCSSECRSTQIMMDERKEQCRSEVSRSAKVSTSSYESGDIFFSTGILAI

SEQ ID NO: 76715 - protein, 52 aa, Gossypium hirsutum
  unsure (1)..(52): unsure at all Xaa locations
  Clone ID: LIB3828-010-Q1-K6-E10.pep
DPHPGIWISPIDIITYAGRAQMRTVEIPYTFMRIKNNFIKNNKKKKKGRRXA

SEQ ID NO: 76716 - protein, 117 aa, Gossypium hirsutum
  Clone ID: GOSHI-09MAY01-C1147_1.pep
ERATQLLSYPSGNCSMPNYAFWRASFDEFFTLLTKYCVNKYETIGQSIQNQSPTMEVIGSEAMRQEMPCELLRSSLPHTNEAQRKLLMDFSQRSVPMNGANSHAGSTSQINSESVRG

SEQ ID NO: 76717 - protein, 186 aa, Gossypium hirsutum
  Clone ID: GOSHI-09MAY01-C1177_1.pep
MKESKHEAFTLSFTLLLMLLGLASSDVNQDKAECTDQLVGLAPCLPYVGGQAKAPTLDCCGGLKQVLVKSKKCLCVLIKDRDDPSLGLNINASLAATLPHTCHDTVNITECISLLHLAPNSQEAKLFQGYQKLTEKHSTSPPASGNSTSSAAEKSDGGMGKKRVGVVKIAIGFSLWVFNIHQNSVV

SEQ ID NO: 76718 - protein, 227 aa, Gossypium hirsutum
  unsure (1)..(227): unsure at all Xaa locations
  Clone ID: GOSHI-09MAY01-C1137_3.pep
TWKNSLISFGDALKSWSSLDATPCRWFGIHCNSQGEVVEIRLKAIELQGSLPSNLQSLKSLKTLVLSSTNLTGTIPKELGDQYELSYVDLSGNSLTRCLDIGISALRSNVPAIDVXLNFVVRELETDPLFNSGRGSALTEKGTVEMEASIMDXHSYLTTPGAEEFAKKQGVEMVDNDYFITEDNVGMLKLAKEANSILFDYRIPTVGTCGAAVDSHLQMNGLPISVY

SEQ ID NO: 76719 - protein, 323 aa, Gossypium hirsutum
  Clone ID: GOSHI-09MAY01-C1137_2.pep
MGAWAIAVHGGAGVDPNLPKERQDEAKRLLTRCLDIGISALRSNVPAIDVVELVVRELETDPLFNSGRGSALTEKGTVEMEASIMDGPKRRCGAVSGLTTVKNPISLARLVMEKSPHSYLTTPGAEEFAKKQGVEMVDNDYFITEDNVGMLKLAKEANSILFDYRIPTVGTCGAAVDSHLQMNGLPISVYAPETVGCVVVDKEGRCAAGTSTGGLMNKMSGRIGDSPIIGAGTYACELCGVSCTGEGEAIIRSTLARDVAAVMEYKGLNLHEAVDYVIKNRLNEGKAGLIAVSKNGEVACGFNTTGMFRGCATEGGFMEVGVW

SEQ ID NO: 76720 - protein, 326 aa, Gossypium hirsutum
  Clone ID: GOSHI-09MAY01-C1137_1.pep
MGAWAIAVHGGAGVDPNLPKERQEEAKRLLTHCLDIGISALRSNLPAIDVVELVVRELETDPLFNSGRGSALTDNGTVEMEASIMDGPKRRCGAVSGLSTVKNPVSLARLVMDKSPHSYLAFSGAEDFAKKQGVELVDNEYFITEDNVGMLKLAKEANSILFDYRIPTIGTCGAGAAAMESPLQMNGLPISVYAPETVGCVVVDKEGRCAAATSTGGLMNKMTGRIGDSPLIGSGTYACDLCGVSCTGEGEAIIRSTLAREVGAVMEYKGLNLHEAVDFVINNRLDEGKAGLIAVSKNGEVACGFNTTGMFRGCATEDGFMEVGVW

SEQ ID NO: 76721 - protein, 150 aa, Gossypium hirsutum
  unsure (1)..(150): unsure at all Xaa locations
  Clone ID: LIB3543-043-Q6-K6-E2.pep
PASAHASAVAWADAWADALFNSGSGYGFTDKXSCKCRAXILDGPKRRCGAVSGLSTGKKGVSLARLVMDKSPHSYLAFSGAEDFAKKQGVELVDNEYFITEDNVGMLKLAKEANSILFDYRIPXIGTCGAGAAXMESPLQMNGLPINVYP

SEQ ID NO: 76722 - protein, 42 aa, Gossypium hirsutum
  Clone ID: LIB3148-027-Q1-K1-E4.pep
FILFREIFLQKIYIFDLFNFFVILLVCCSTEFIPYITMIRSD

SEQ ID NO: 76723 - protein, 77 aa, Gossypium hirsutum
  unsure (1)..(77): unsure at all Xaa locations
  Clone ID: LIB3829-030-Q6-N6-C2.pep
GEAIKXSTXAREEGAVRENKGKNXQEGGEKETXNRXEKGKAGXXPXSKNGEDACGXNTTGMFRGCATEDGFMEVGVW

SEQ ID NO: 76724 - protein, 164 aa, Gossypium hirsutum
  Clone ID: GOSHI-09MAY01-C1127_2.pep
MKAMKPGVSSLNPYAASYIPLAKREASDNVTAKDIKHGNENAWFKPSSHFAYNPHSSNAFLGSSAYGTEKHQVAEGSAVKSHPAHGSLMHNPGEMTDKQIVDEEFDMDLEYLRMTFPGLSNESLLDVYLANDGDFEATVDMLNQLEMHTVESSETLPDTLDIGD

SEQ ID NO: 76725 - protein, 152 aa, Gossypium hirsutum
  Clone ID: GOSHI-09MAY01-C1127_1.pep
MKPGVSSLNPYAASYIPLAKREASDNVTAKDIKHSNENAWFKPSSHFAYNPHSSNASLGSSAYGTEKHQVAEGSAVKSHPAHGSLMHNPGEMTDKQIVDEEFDMDLEYLRMSFPGLSNESLLDVYLANDGDFEATGDMLNQLEMHTVSHLET

SEQ ID NO: 76726 - protein, 127 aa, Gossypium hirsutum
  Clone ID: GOSHI-09MAY01-C1097_5.pep
MASSSDSWIKDYHEAGEMADDINAMISGRSSLPASGPETQRHASAIRRKITILGTRPDGLQSLLSRPTGKPLTGKEMNRRKDMVANLRSKVNQMASAFNMSNFANRDSLLGPESKPDAMSKTVGLDN

SEQ ID NO: 76727 - protein, 93 aa, Gossypium hirsutum
  unsure (1)..(93): unsure at all Xaa locations
  Clone ID: GOSHI-09MAY01-C1097_4.pep
PRVRVGLQRQIVKEQDEGLEKLEETVISTKHIALAVNEELDLHTRLIVLYCFFLLYTITHLLXILHYMCTPSMQDDLDQHVEVTDSRLRVKHL

SEQ ID NO: 76728 - protein, 231 aa, Gossypium hirsutum
  Clone ID: GOSHI-09MAY01-C1097_1.pep
MAASSDPWIKEYNEAVKIADDINGMISERISLPASGPETQRHASAIRRKITILGTRLDGLQSLMSRPTGKPLTEKEMNRRKDMVANLRSKANQMASAFNMSNFANRDSLLGPETKPDAMSRTVGLDNSGLVGLQRQIMKEQDEGLEKLEETVISTKHIALAVNEELDLHTRLIDDLDQHVDVSDSRLLRVQKNLAVLNRRTRDSCSCMCMLLAVIGIVILAVIIYLLIKYL

SEQ ID NO: 76729 - protein, 103 aa, Gossypium hirsutum
  Clone ID: AW186981.1.pep
LSSENIKKDTYHFRITCSWTIEIYSKAVTGSCLIRKKKGGYFAMHIKLLINNDYFTRRRESETSTCWSRSSISRVRRSSSSLTANAICFVLTIVSSNFSRSSS

SEQ ID NO: 76730 - protein, 114 aa, Gossypium hirsutum
  Clone ID: uC-gsronu33B136b02b1.pep
AYPQLYPTFTSSPSDLENIQRTGGKTEQNFQHIIKRIKVEKTNSNHKQNKKSKFVGFGVCWYYKYLMSRYMMTARITIPITAKSMHIQEQMKELIYREALAFSPDMCNRDDLHA

SEQ ID NO: 76731 - protein, 93 aa, Gossypium hirsutum
  Clone ID: LIB3585-050-P1-K1-E4.pep
MALSKVNFTRSMAASSDPWIKEYNEAVKIADDINGMISERISLPASGPETQRHASAIRRKITILGTRLDGLQSLMSRPTVKPLTEKEMNPSKD

SEQ ID NO: 76732 - protein, 156 aa, Gossypium hirsutum
  Clone ID: GOSHI-09MAY01-C1047_1.pep
PRVRKYTRQFQLKALFSFGCLSKTLSSMAYEGILLGMGNPLLDISAVVDEDFLKKYGIKLNDAILAEDKHLPMYEEMTKKYEVEYIAGGATQNSIRVAQWMLQIPGATSYMGCIGKDKFGEEMKKNSKLAGVNVHYYEDGTAPTGTCAVCVVGGER

SEQ ID NO: 76733 - protein, 215 aa, Gossypium hirsutum
  Clone ID: GOSHI-09MAY01-C1077_1.pep
MAAIKVHGSPMSTATQRVLACLHEKGTDFQFVPINMAAGEHKSENYLSLNPFGQVPAFEDGDLKLFESRAITHYIAHEYSDKGTQLLIPGSNKDMAVLELWKEVEAHQFDSPSSKIAWEAFYKPFFGMVTDSAAVEENEGKLAKVLDVYEARLTQSKYLASDCFTLADLHHIPNIQCLLATPAKKLIDSRPHVCAWVKEITARPAWSKVLAMQKQ

SEQ ID NO: 76734 - protein, 166 aa, Gossypium hirsutum
  Clone ID: AI054936.1.pep
MAAIKVHGSPLSTATQRVLACLYEKGTDFQFVPINMAAGEHKSENYLSLNPFGQVPAFEDGDLKLFESRAVTHYIAHEYSDKGTQLLIPGSNKDMAVLQLWKEVEAHQFDSPCSKIALEAFYKPLMGMVTDSAVVEENEGKLGQFLTCTSSMTRSKTGSDCFTWPT

SEQ ID NO: 76735 - protein, 353 aa, Gossypium hirsutum
  Clone ID: GOSHI-09MAY01-C1067_1.pep
MLLRIRSRDGLERVQVGGPHVSISQLKALIESQFQIPIHNQTLSTDRNLLLAKTPADLLRFTDMSDPSRPLSSLNLSHGSVVFLYYQGERTVRGGPPVCPAGSFGRKMTMDDLIAKQTRITRQESPHCDSVSFDRDSANAFQRYVNETLVFAVKRGGFMYGTVSEEGRVEVDFIYEPPQQGMEDDLILLRDPEEEKLVDAIAAGLGRKRVGFIFTQTIMQDKKDYNFSNKEVLQAAELHAESGLKEWVTVVVKLEANEDGDADVHFEAFQMSDMCVKLFKEGWFVTEFGEDDDPKLSKMKKEVVVGGKDVKEVDNDFFLVVVKIIDHQGPLSSTFPIENRNNLATMRTLKSKI

SEQ ID NO: 76736 - protein, 167 aa, Gossypium hirsutum
  Clone ID: GOSHI-09MAY01-C1017_3.pep
MFIENFKVESPNVKYTENEIQSVYNYETTELVHENKNGTYQWVVKPKTVKYEFKTDIHVPKLGVMLVGWGGNNGSTLTGGVIANKEGISWATKDKVQQANYFGSLTQASTIRIGSYNGEEIYAPFKSLLPMVNPNDIVFGGWDISDMNLADAMAKANVFDIDLQKQL

SEQ ID NO: 76737 - protein, 510 aa, Gossypium hirsutum
  Clone ID: GOSHI-09MAY01-C1017_1.pep
MFIESFKVESPNVKYTDNAIQSVYNYETTELVHENRDGTYQWVVKPKTVKYEFRTDIHVPKLGVMLVGWGGNNGSTLTGGVIANKEGISWATKDKVQQANYFGSLTQASTIRVGSYNGEEIYAPFKSLLPMVNPNDIVFGGWDISDMNLADAMARAKVFDIDLQKQLRPYMESMVPLPGIYDPDFIAANQGERANNVIKGTKKEQVQQVIKDIREFKEKNKVDKVVVLWTANTERYSNVIVGLNDTVESLMASLEKNESEISPSTLYAIACVLENVPFINGSPQNTFVPGLIDLAIQRNCLIGGDDFKSGQTKMKSVLVDFLVGAGIKPTSIVSYNHLGNNDGMNLSAPQTFRSKEISKSNVVDDMVSSNGILYEPGEHPDHVVVIKYVPYVGDSKRAMDEYTSEIFMGGKNTIVLHNTCEDSLLAAPIILDLVLLAELSTRIQFKADGEGKFHTFHPVATILSYLTKAPLVPPGTPVVNALSKQRAMLENILRASIGLAPENNMILEYK

SEQ ID NO: 76738 - protein, 216 aa, Gossypium hirsutum
  Clone ID: LIB3583-017-P1-K1-C4.pep
IASGRSRSRTGRVGGRVGGRVGGRVGGRVGSWATKDKVQQANYFGSLTQASTIRVGSYNGEEIYAPFKSLLPMVNPEDIVFGGWDISDMNLADAMARAKVFDIDLQKQLRPYMESMVPLPGIYDPDFIAANQGERANNVIKGTKKEQVQHIIKDIREFKEKNKVDKVVVLWTGNTERYSNVVVGLNDTMENLLAFFEKNESEISPFTLIRLSFVFF

SEQ ID NO: 76739 - protein, 84 aa, Gossypium hirsutum
  unsure (1)..(84): unsure at all Xaa locations
  Clone ID: uC-gsflnu33B083f03b1.pep
PTRPLDVDLLAELSTSIQFRADREGKLHSLHPEATILRYLTKAPLGPPGTPVVNALSKQRAMLENILRASIGXAPENNMILEYM

SEQ ID NO: 76740 - protein, 93 aa, Gossypium hirsutum
  unsure (1)..(93): unsure at all Xaa locations
  Clone ID: LIB3189-052-P1-K1-B6.pep
QPCALFCVLFTTNTFIYTNIIVXLNDGVXSLMGWLXNNESXISPSTLYAIACVLENVPFINGSPQNTFVPGLIDLAIQRNCLIGGDDFKSGQT

SEQ ID NO: 76741 - protein, 76 aa, Gossypium hirsutum
  Clone ID: LIB3493-028-P1-M1-D3.pep
YFGTTTVAGLCICVWIREFKEKNKVDKVVVLWTANTERYRNVVVLLNDTMENQLASFEKNESENLPFTFHRFTLSF

SEQ ID NO: 76742 - protein, 124 aa, Gossypium hirsutum
  unsure (1)..(124): unsure at all Xaa locations
  Clone ID: GOSHI-09MAY01-C1037_3.pep
MEADDKFLNMGILIVATLVVAKLISFLIMPRSKRRVPPVIKSWPVIGGLLRFMKGPIVMIREEYPKLGSVFTLNLFNKKITFLIGPEVSAHFFKASESDLSQQEVYQFNVPTFGPGVXFDVDYS

SEQ ID NO: 76743 - protein, 195 aa, Gossypium hirsutum
  unsure (1)..(195): unsure at all Xaa locations
  Clone ID: GOSHI-09MAY01-C1037_2.pep
MEVNDKLLNTGILIVATLVVAKLISFLIMPRSKKRVPPAVKAWPVIGGLLRFVKGPMVMLREEYPKLGSVFTLNLFNKKITFLIGPEVSSHFFKASESDLSQQEVYQFNVPTFGPGVGFDVDSPIRAEQFRFFTEALIVINFXGYVDLMLXEADDYFFKWGDSGSGPKFDWSMNLLTAICVLGQDSYKLLRVLPP

SEQ ID NO: 76744 - protein, 487 aa, Gossypium hirsutum
  unsure (1)..(487): unsure at all Xaa locations
  Clone ID: GOSHI-09MAY01-C1037_1.pep
MEVNDKLLNTGILIVATLVVAMLIPSRTPPSAKRRLPPAVKTWPVIGGLLRFMKGPIVMLREEXYPKLGSVFTLNLFNKKITFLIGPEVSAHFFKALESDLSQQEVYQFNVPTFGPGVVFDVDYSIRQEQFRFFTEALRVNKLKGYVDQMVTEAEDYFSKWGDSGEVDLKYELEHLIILTASRCLLGREVRDKLFDDVSALFHDLDNGMLPISVIFPYLPIPAHRRRDRARKKLAGIFANIIASRKSAGKSENDMLQCFIESKYKDGRPTTEAEVTGLLIAALFAGQHTSSITSTWTGAYLLRHKEFLSAVIEEQKQIMQKHGSKVDHDILSEMDTLYRCIKEALRLHPPLIMLLRSSHSDFSVKTRDGKEYDIPKGHIVATSPAFANRLPYIYKDPDTYDPDRFSVGREEDKAAGAFSYISFGGGRHGCLGEPFAYLQIKAIWSHLLRNFELELVSPFPEIDWNAMVVGVKGKVMVRYKRRQLSVN

SEQ ID NO: 76745 - protein, 125 aa, Gossypium hirsutum
  unsure (1)..(125): unsure at all Xaa locations
  Clone ID: GOSHI-09MAY01-C1397_1.pep
MGDFNLALVIVAIVVCVLVFLFNVYLLVNYQHPDDANQAYFPKFVVVFGLSIAAISILMLPADVANRQACRHAIYNGACNLTLPMKXAWLAVYIIDAVLVFFVIPFAMFYYEGDQDKSVGKRIKS

SEQ ID NO: 76746 - protein, 233 aa, Gossypium hirsutum
  Clone ID: GOSHI-09MAY01-C1387_1.pep
MQPENFELYRFLAENGVGSYGGFPSGSEFPAMQSFSSSSTYYPLEMSGVTTETTPHDKALAALKNHKEAEKRRRERINSHLNRLRALLPCNSKTDKASLLAKVVQRVKELKEQALETTELDNLPSETDEITVLSCDYSGDGRLIFKASLCCEDRSDLLPELIDILKSLHLKTLKAEMATLGGRIRNVFIVAADRVHSIESVHFLQNALKSLLERSNPSDRSKRRRVLDHKIIM

SEQ ID NO: 76747 - protein, 198 aa, Gossypium hirsutum
  unsure (1)..(198): unsure at all Xaa locations
  Clone ID: GOSHI-09MAY01-C1347_1.pep
QETGTFTNALEKVESWIFSRIVESGWWQALTPYMQIPLEGSPVSKTIRKLLGPALGDQQQGSFSINLWINAFQDAFQRLCPVRAGGHECGCLPVIARLVMEQCVARLDVXMFNAILRESAHEIPTDPISDPIVDSRVLPIPAGDLSFGSGAQLKMLYVLYQRTSAFVFFSILYLWYIQLWLVVALYFFTIGNYCSESE

SEQ ID NO: 76748 - protein, 178 aa, Gossypium hirsutum
  unsure (1)..(178): unsure at all Xaa locations
  Clone ID: LIB3585-029-P1-K1-C8.pep
QETGTFTNALEKVESWIFSRIVESVWWQALTPYMQIPLEGSPVSKTIGKLLGPALGDQQQGSFSINLWINAFQDAFQRLCPVRAGGHECGCLPVIARLVMEQCVARLDVAMFNAILRESAHEIPTDPISDPIVDSRVLPIPAGDLSFGSGAQLXNAVGNWCRWLTDMFGMDGDYNLNE

SEQ ID NO: 76749 - protein, 156 aa, Gossypium hirsutum
  Clone ID: GOSHI-09MAY01-C1377_1.pep
MSSSGRKITLKSSDGESFEVDEAVALESQTIKHMIEDDCADNGIPLPNVTSKILAKVIEYCKKHVEAPKTDDRSADDELKSWDADFVKVDQATLFDLILAANYLNIKGLLDLTCQTVADMIKGKTPEEIRKTFNIKNDFTPEEEEEVRRENQWAFE

SEQ ID NO: 76750 - protein, 141 aa, Gossypium hirsutum
  Clone ID: LIB3147-032-Q1-K1-F12.pep
HASAHASALAFAHASAHASEKVSSSGRKITLKSSDGESFEVDEAVALESQTIKHMIEDDCADNGIPLPNVTSKILAKVIEYCKKHVEAPKTDDRSADDELKSWDADFVKVDQATLFDLILAANYLNIKGLLDLTCQTGADM

SEQ ID NO: 76751 - protein, 102 aa, Gossypium hirsutum
  unsure (1)..(102): unsure at all Xaa locations
  Clone ID: LIB3146-026-Q1-K2-H5.pep
RIAHDIAADLLPNVTSKILAKVIEYCKKHVEAPKTDDRSADDXLKSWDADFVKVDQATLFDFILVLININFLLLMDSFVEDTDFQFFFAAGCTFLHVFMAVC

SEQ ID NO: 76752 - protein, 65 aa, Gossypium hirsutum
  unsure (1)..(65): unsure at all Xaa locations
  Clone ID: LIB3189-047-P1-K1-D8.pep
EICSEKCRRRGLISPLRAQAANHSRLMXRWRCSLILFTLFSFHGGAYYFFLFPLFPIKILSNVFP

SEQ ID NO: 76753 - protein, 242 aa, Gossypium hirsutum
  Clone ID: GOSHI-09MAY01-C1317_1.pep
MEKMMALRSVYRAACFRSSRFTPIAVTAAVNHNRHLVSRSFFSISSPIAPNPPRNTPSGGRSSFALRSGSMRYFSEDAAHLPDINDTEILNVFKDLMAASWDELPYSVVQDAKKALSKNTDDKAGQEALRNVFRAAEAVEEFGGILITMKMELDDSIGVSGENVKPLSSEFAAALKTVFQRYATYLDAFGPNETYLRKKVENELGSKMIYLKMRCSGLGSEWGKITVLGTSGLSGSYVEQRA

SEQ ID NO: 76754 - protein, 72 aa, Gossypium hirsutum
  Clone ID: LIB3197-044-Q1-M1-D4.pep
DREETPGNQVAIVVDGGRDGDGGKTGRFTTSCYSIRIIAPSSSPFDLGVKHGIGDSGIGRQPVQRKAESAEY

SEQ ID NO: 76755 - protein, 79 aa, Gossypium hirsutum
  Clone ID: GOSHI-09MAY01-C1307_1.pep
PFYHEIMSPTYHSMQREEEELEAQTNSVRIEEFKRSSTRIGSDEQHQDVKISACRNTGNGPNRTGKRKISWQDQVALRA

SEQ ID NO: 76756 - protein, 168 aa, Gossypium hirsutum
  Clone ID: GOSHI-09MAY01-C1297_1.pep
HSGCTFNHRYVKSNPQEVENATWMLTVFHCFGQYFCLHFEAFQLGVAPVYMAFLRFMGDEIEARNYSYSLEVGGNGRKLIWEGTPRSIRDSHRKVRDSHDGLIIQRNMALFFSGGDRKELKLRVTGRIWKEQQNPEGGACIPNLCSSKCHPHNIVGCIFPGILIATCH

SEQ ID NO: 76757 - protein, 97 aa, Gossypium hirsutum
  Clone ID: GOSHI-09MAY01-C1277_1.pep
MTETPFSKLPEDVVLNIFSKLEEDLASWASLACVCTRFSSLIRNTCLKLKCSKTIPAVSADLLSSSSAPPGGWASLHKLSVLLSSLLHAGVLLDNSD

SEQ ID NO: 76758 - protein, 157 aa, Gossypium hirsutum
  Clone ID: GOSHI-09MAY01-C1217_1.pep
MATSSGSSATQINSGSEEALMDERKRKRMISNRESARRSRMRKQKHLDDLMTQLTQLQKQNHEIITNINFTTQHLLNVESENSVLRAQLNELTHRLQSLNEIISFLNDDHGDDDDDDDKTSIDFTQPAVADTAFLNPFHLAFLNQPIMASADNTFQY

SEQ ID NO: 76759 - protein, 136 aa, Gossypium hirsutum
  Clone ID: LIB3584-050-P1-K2-G11.pep
MATSSGSSATQINSGSEEALMDERKRKRMISNRESARRSRMRKQKHLDDLMTQLTQLQKQNHEIITNINFTTQHLLNVESENSVLRAQLNELTHRLQSLNEIISFLNDDHGDDDDDDDKTSIDFTQPAVADTAFLN

SEQ ID NO: 76760 - protein, 116 aa, Gossypium hirsutum
  Clone ID: GOSHI-09MAY01-C1207_2.pep
LVIKQTILLLSTYNLQTANKTKSPAYSFLTLLLLLLLLLLLLFTNQNPALITHRVGAGAEKLSRPGFCPPSLPLAAHLTYFPQSFCLAQKLLVLHYFPALLHLYAIPHRNWRCHDH

SEQ ID NO: 76761 - protein, 713 aa, Gossypium hirsutum
  Clone ID: GOSHI-09MAY01-C1207_1.pep
RTRGRTRGGRGATTRRKKRNGGGSIKTGSEGNPAIPHNSRVKFRFKHGDGPRVRRMPAWIKYATVDPTRFGAPYDGVHWDPPPSERYEFKYPRPPKPKAPRIYEAHVGMSSSEPRINSYREFADDVLPRIQANNYNTVQLMAVMEHSYYASFGYHVTNFFSVSSRSGTSEDLKFLIDKAHSLGLRVLMDVVHSHASNNVTDGLNGFDVGQSSQESYFHTGESRFLLLGVSRLFNYGNWEVLRFLLSNLRWWLEEFKFDGFRFDGVTSMLYHHHGINMPFTGDFNEYFSEATDVDAVVYLMLANSLINSILPDATVIAEDVSGMPGLGRPVSEGGIGFDYRLAMAIPDKWMASLRFAPRPEWSMAGLSCSLTNRRCTEKCISYAESHDQSIVGDKTIAFFLMDKEMYSGMSCLTDASPTIDRGIALHKMIHFITMALGGEGYLNFMGNEFGHPEWIDFPREGNGWSYEKCRRQWTLVDTDHLRYKFMNAFDRAMNALDDKFSFLSLTKQIVSCTDEENKVIVFERGDLVFVFNFHSENTYDGYKVGCDLPGKYRVALDSDAWEFGGHGRVGHDVDHFTSPEGIPGVPETNFNNRPNSFKVLSPARTCVVYYKVDESVEETNGINVISVSETLEMDASKQKNAEESAILVDHGDKENPQETNDRDTASFDEELQKDGAKQESIEEPAASVLDKKIVGSKLDEPQVEEMEERTPDD

SEQ ID NO: 76762 - protein, 87 aa, Gossypium hirsutum
  Clone ID: GOSHI-09MAY01-C1227_4.pep
MYGFEAMTFNIHGGYLEAIVRGHRAGLLTAADYNNLCQCETLDDIKMHLSATEYGPYLQNEPSPLHTTTIVEKCTLKLVDEYKHMLC

SEQ ID NO: 76763 - protein, 170 aa, Gossypium hirsutum
  unsure (1)..(170): unsure at all Xaa locations
  Clone ID: GOSHI-09MAY01-C1227_3.pep
EIWNTLYKAYLEDFYKFCQKLXATAEIMSDLLXEADRRAVNITINSIGTELTRDDRVGVCGKFGLVYAYWHRELVVCEDIDQVRGAMEKYPPYQSIFSKLSYGDSQMLDKAFYEEEVKRLCLAFEQQFHYGVFFAYMRLREQEIRNLMWISECVAQNQKSRVHDSVVFIF

SEQ ID NO: 76764 - protein, 187 aa, Gossypium hirsutum
  Clone ID: GOSHI-09MAY01-C1227_2.pep
LSIPKLKCKRYGLEARTLNIHGGYLEAIVRGHRAGLLTAADYNYLCQCETLDDIKMHLSATEYGPYLQNEPSPLHTTTIVEKCTLKLVDEYKHMLCQATEPLSTFLEYITYGHMIDNVVLIVTGTLHERDVQELLEKCHPLGMFDSIATLAVAQNMRELYRLVLVDTPLAPYFSECITSEDLDDMNI

SEQ ID NO: 76765 - protein, 392 aa, Gossypium hirsutum
  Clone ID: GOSHI-09MAY01-C1227_1.pep
MIRTHNSNMRQFFICMSCALSYKTPTFRSQPLKSLKKQPSKMYGFEAMTFNIHGGYLEAIVRGHRAGLLTAADYNNLCQCETLDDIKMHLSATEYGPYLQNEPSPLHTTTIVEKCTLKLVDEYKHMLCQATEPLSTFLEYITYGHMIDNVVLIVTGTLHERDVQELLEKCHPLGMFDSIATLAVAQNMRELYRLVLVDTPLAPYFSECITSEDLDDMNIEIMRNTLYKAYLEDFYKFCQKLGGATAEIMSDLLAFEADRRAVNITINSIGTELTRDDRRKLYSNFGLLYPYGHEELAVCEDIDQVRAAMEKYPPYQSIFSRLSYGESQMLDKAFYEEEVKRLCLAFEQQFHYGVFFAYMRLREQEIRNLMWISECVAQNQKSRVHDSVVFIF

SEQ ID NO: 76766 - protein, 103 aa, Gossypium hirsutum
  Clone ID: LIB3120-048-P1-K1-B6.pep
MIQPSMGYVFEAMTFNIHCGYLEAIVRGHRSGLLTADDYNNLCQCETLDDIKMHLSATEYGPYLQNEPSPLHTTTIVEKCTLKLVDEYKHMLCQATEPCPPFR

SEQ ID NO: 76767 - protein, 166 aa, Gossypium hirsutum
  unsure (1)..(166): unsure at all Xaa locations
  Clone ID: GOSHI-09MAY01-C2997_3.pep
MNGDVKCLATSKRGSAGPCLAQECYLQKCNSSKSAAELPLLVENLEQAKDRPKSHCRISDTENPGRNGNVKLFGQILNSSSRDDKVSHFSKQNTEPSNSKPIGNNVDGNSKFDANNHVVENVPKRSYGFSDGKRIXTGLSSLPDSSILMAKYPSAFANYPPTSSSQ

SEQ ID NO: 76768 - protein, 130 aa, Gossypium hirsutum
  Clone ID: GOSHI-09MAY01-C2997_2.pep
ACHQHLITRRMKPNKPKNLSVKMSLVVYSGKTSVNVTEPRRILRGYPLQVSTLKEMNGDVKGLATSKTGSAGPCLAPECYLQKCNCSKSAAGLPLLVENLEQQGSSESHCRISDTENPGRMVMSSFLVRY

SEQ ID NO: 76769 - protein, 309 aa, Gossypium hirsutum
  Clone ID: GOSHI-09MAY01-C2997_1.pep
DERNPTSKIILPTDLNVPDENDRKLVDHRDSEAVQTVDSDAGRAELITECSVDMNIDSKAGSLQVQKSVVALGNLNAGRDVTEQGVSVAVSAFLGAAAYPCIPPSRPVAESKPATSLYEHDTKCSAETSSQSICRMDSNKATDESVGKNSCSSFSLSAKGLHQIPPDLDSAKKPSVSNNSSANGSALHDSDALRCEKICNLDRLSSTLDYEENETKQAQKSVREDESGRLSGKTSVNITEPRQILRGYPLQVSTLKEMNGDVKGLATSKTGSAGPCLAQECYLRKRNSSKSAAELPLLVGEFRTSQGIV

SEQ ID NO: 76770 - protein, 94 aa, Gossypium hirsutum
  Clone ID: GOSHI-09MAY01-C2947_4.pep
ENFLERRLQTLVFKTGMAKSIHHARVLIRQRHIRVGRQVVNIPSFMVRVDSQKHIDFSLTSPFGGGRPGRVKRKNQRAAAKKAAGRDGDEEEDE

SEQ ID NO: 76771 - protein, 197 aa, Gossypium hirsutum
  Clone ID: GOSHI-09MAY01-C2947_3.pep
MVHVSFYRNYGKTFKKPRRPYEKERLDAELRLGGEYGLRCKRELGGVQYALSRIRNAARDLLTLDEKNPRRIFEGEALLRRMNRYGLLDESQNKLDYVLALTVENFLERRLQTLVFKTGMAKSIHHARVLIRQRHIRVGRQVVNIPSFMVRVDSQKHIDFSLTSPFGGGRPGRVKRKNQRAAAKKAAGGDGDEDDEE

SEQ ID NO: 76772 - protein, 197 aa, Gossypium hirsutum
  Clone ID: GOSHI-09MAY01-C2947_2.pep
MVHVSFYRNYGKTFKKPRRPYEKERLDAELRLVGEYGLRCKRELWRVQYALSRIRNAARDLLTLDEKNPRRIFEGEALLRRMNRYGLLDESQNKLDYVLALTVENFLERRLQTLVFKTGMAKSIHHARVLIRQRHIRVGRQVVNIPSFMVRVDSQKHIDFSLISPFGGGRPGRVKRKNQRAAAKKAAGGDGDEEEDE

SEQ ID NO: 76773 - protein, 277 aa, Gossypium hirsutum
  Clone ID: GOSHI-09MAY01-C2947_1.pep
MVHVSFYRNYGKTFKKPRRPYEKERLDAELRLVGEYGLRCKRELWRVQYALSRIRNAARDLLTLDEKNPRRIFEGEALLRRMNRYGLLDESQNKLDYVLALTVENFLERRLQTLVFKTGMAKSIHHARVLIRQRHIRVGRQVVNIPSFMVRVDSQKHIDFSLTSPFGGGRPGRVKRKNQRAAANKAAGGDGDDEEDESPLRYFWPAPLGNPLKTLCLETLQYPSTGLNMGVGVFVFPQTLFVAGILENNGAGQFPMWPVFGSEIARFKLNCSCFSGN

SEQ ID NO: 76774 - protein, 91 aa, Gossypium hirsutum
  unsure (1)..(91): unsure at all Xaa locations
  Clone ID: LIB3147-007-Q1-K1-F5.pep
LERRLQTLVFXTGMAKSIHHACVLIRQRHIRVGRQVVNIPSFMVRVDSQKHIDFSLTSPFGGGRPGRVKRKNQRAAAKKAAGGDGDDEEDE

SEQ ID NO: 76775 - protein, 104 aa, Gossypium hirsutum
  unsure (1)..(104): unsure at all Xaa locations
  Clone ID: LIB3135-007-Q1-K1-B8.pep
NKLDYVGALGVVNFLERPLQTLVFKTGMAKSIHHARVLIRQLHIRVWRQVVNIPSFMVRVDSQKHIDFSLTSPFGGGRPXRVXRKNHIAAAKMAACRDGHEDDD

SEQ ID NO: 76776 - protein, 58 aa, Gossypium hirsutum
  Clone ID: LIB3146-051-Q1-K1-A6.pep
LQGNGLNVYSSSSSSPSPPAAFLAFFFFFLRNNCHHFLPRLCGRVGGRVGGRVGGRVG

SEQ ID NO: 76777 - protein, 69 aa, Gossypium hirsutum
  Clone ID: LIB3145-041-Q1-K1-G1.pep
MAHVSFYRNYGKTFKKPRRPSEKERSDAELRLVGEYGLRCQRELWRVQYALSRIRYAARDLLTLDEKNP

SEQ ID NO: 76778 - protein, 384 aa, Gossypium hirsutum
  Clone ID: GOSHI-09MAY01-C2967_1.pep
MVAEINSGIRDLVSMQGDNQDASGSQQPNNMVASGAGDSTVALPANLETEELKSQPEHAEGRTDNTESGESSQDISLGTVGCPPSSSGEPLVKLEDPSGSAPRSSEENAKPVPLGLGLGGLERKRRVKPTKSSIAGVNGTASSSLDRNLSARTAGQQILQSLASQSSSLSRVDSSSGNQGVLGSRLSGGQGSDDQLAAANAVSQVLQSPALNGLLAGVSQQTGAGSPDDFRNMLQQLTQSPQIMNTVSQLAQQVDSQDIGNMFSGFGGGQGGGIDLSRMVQQMMPIVSQALGCGPSATPSFPAVESKSQDDIQQIAQRIEQSNVPDDVFHAVAENAVQVYGNGRNAEELLNELCGNEGLAKDYTEMLKQDLRQRFQDKSEKDKF

SEQ ID NO: 76779 - protein, 46 aa, Gossypium hirsutum
  Clone ID: LIB3584-017-P1-K1-F10.pep
GYVAATDSKSQIMNTVSQLAQQVDSQGYGTCFRFEEPSGDDCTRSQ

SEQ ID NO: 76780 - protein, 217 aa, Gossypium hirsutum
  Clone ID: GOSHI-09MAY01-C2917_1.pep
MMIENNSNSNNNNNVQDQCESDGPPKSKLPQSQRPTPEMYHNTYQSDDRHHKTSNPTLQKGIGAITSSLNYIGNAVEEGLTIVENRTAGIIQETRKHIKKKSSGSVAQNEHAKQPQMQQQVRTPVQADQEIQLKASRDVAMAMAAKAKLLLRERKTVSADLAFAKERCAQLEEENRVLREIVTEVQTTRNDELIRLQLETLLAEKARLAHENSIYAR

SEQ ID NO: 76781 - protein, 93 aa, Gossypium hirsutum
  Clone ID: GOSHI-09MAY01-C2907_2.pep
IFFVSGSRKWVNGVVISANGWDWDLCSSHCVGNICCGHVCCVRDHGTGYCSFSCNGYRSRLCFAGFRCLLMLFHVGLFNCSLGALNSKLFKTI

SEQ ID NO: 76782 - protein, 110 aa, Gossypium hirsutum
  Clone ID: GOSHI-09MAY01-C2907_1.pep
SSFFFFFFYPTRPLNFPISLVSGSRKLVNSVVISANGSDWDLCSSHCVGNICCGHVCCVRDHGTGYCSFSCNGYRSRLCFAGFRCLLMLFHVGLFNCSLGALNSKLFKTL

SEQ ID NO: 76783 - protein, 94 aa, Gossypium hirsutum
  unsure (1)..(94): unsure at all Xaa locations
  Clone ID: LIB3189-041-P1-K1-H5.pep
PISLVSGSRRLVNSVVIRRNVSYWDLSXSHCVGNICCGHVCCVRDHGTGYCSFSCNGYRSRLCFAGFRCLLMLFHVGLFNCSLGALNSKLFKTL

SEQ ID NO: 76784 - protein, 94 aa, Gossypium hirsutum
  Clone ID: uC-gsronu33B158h01b2.pep
CNMIYIEIFKLLEKLKIDNTQILSRRRLEATPLITSESEIKGSQCHKVLKSFEFNAPREQLKRPTWKSIRRHRTFIRKPTRPPTRPPTRPPKRP

SEQ ID NO: 76785 - protein, 70 aa, Gossypium hirsutum
  unsure (1)..(70): unsure at all Xaa locations
  Clone ID: uC-gsronu33B032c04b1.pep
FLFQYPINTVVIKTPGGKLVYHTTKKXACGPNCSVTGXRTHGIPYLRPAEFKXSRLPMNRRTVNCAYGGV

SEQ ID NO: 76786 - protein, 282 aa, Gossypium hirsutum
  unsure (1)..(282): unsure at all Xaa locations
  Clone ID: GOSHI-09MAY01-C2937_4.pep
HFNYKYSFLLPFSFPPVRPRVREQTAKLKSLSLIFFSHLFLVGXSAAVFPVLDDLRLAGSSFPSVQAKKLIRELNLFPKEEVNLVDRGRVSLPQDSKLVEKRFKFPGLEALGGVSVDDLGHHAGYYKLPNSYDARMFYFFFESRSNKEDPVVIWLTGGPGCSSELALFYENGPFSIADNMSLVWNEFGWDKASNLLYVDQPIGTGFSYSSDRRDIRHNEDEVSNDLYDFLQAFFAEHPEFAKNEFFITGESYAGHYIPAFAARVHRGNKAKEGIHINLKACY

SEQ ID NO: 76787 - protein, 193 aa, Gossypium hirsutum
  unsure (1)..(193): unsure at all Xaa locations
  Clone ID: GOSHI-09MAY01-C2937_2.pep
LAGGGGRNIFNGXMALAGDTXYYDVRKKXEGSLCYDFSNMESFLNKKSVRDALGGGDIHFVSCSPTVYQAMLVDWMRNLEVGIPVLLEDGIKLLVYAGEYDLICNWLGNSRWVHAMEWSGQKEFVASPEVPFIVDGAEAGVLKTHGALGFLKVHDAGHMVPMDQPKAALEMLKRWTKGTLSDASDSEKLVAEM

SEQ ID NO: 76788 - protein, 507 aa, Gossypium hirsutum
  Clone ID: GOSHI-09MAY01-C2937_1.pep
MAKPQLLFLFSFSLLCLISFSAADSSITADLRLAGSSFPSVHAKKLIRELNLFPKGEVNVVDEHRVSLPEGPKLVEKRFKFPTLEVPGGVSFEDLGHHAGYYKLPNSHDARMFYFFFESRNSKKDPVVIWLTGGPGCSSELALFYENGPFTIADNMSLVWNEYGWDKASNLLYVDQPIGTGFSYSSDRRDIRHNEDEVSNDLYDFLQAFFAEHPEFAKNDFFITGESYAGHYIPAFAARVHRGNKAKEGIHINLKGFAIGNGLTDPAIQYKAYTDYALDMGVIKKSDYDRINKLVPVCEMAIKLCGTDGTISCMASYFVCNNIFNGIMALAGDTNYYDVRKKCEGSLCYDFSNMESFLNKKSVRDALGVGNIDFVSCSPTVYQAMLVDWMRNLEVGIPVLLEDGIKLLVYAGEYDLICNWLGNSRWVHAMQWSGRKEFVASPEVPFVVDGSEAGVLKTHGPLGFLKVHDAGHMVPMDQPKAALEMLKRWTKGSLAEGGKAEKLFAEM

SEQ ID NO: 76789 - protein, 64 aa, Gossypium hirsutum
  Clone ID: LIB3583-024-P1-K1-F1.pep
NLRCTNLFHLQYYDVRKKCERSLCYDFSNMESFLNKKSVRDALGVGNIDFVYCSPTVYHAMLVD

SEQ ID NO: 76790 - protein, 155 aa, Gossypium hirsutum
  unsure (1)..(155): unsure at all Xaa locations
  Clone ID: uC-gsflmaxxa042c07b1.pep
MAKPQLVFLFCFSLLCLICFCAADPCIMDDLRLAGSSFPPVHAKRLIRELNVLPKGEVNVVDEHRVSLPEGPKLVEKRIKFPTLEVPGGASVEDLGHYAGYYKLPNSHDARMFYFFFESRNIKQDPVVIWSTGGPGXSSELALFYENGPFTIADN

SEQ ID NO: 76791 - protein, 88 aa, Gossypium hirsutum
  unsure (1)..(88): unsure at all Xaa locations
  Clone ID: LIB3272-050-P1-K1-G6.pep
SSSPSVHAKKLIREWNLFPKEEVNLVDRGRVSLPQDSKLVEKRFKFPGLEALGGVSVYDXSHHAGYYKLPNSYDARMFYFLFELLIIN

SEQ ID NO: 76792 - protein, 83 aa, Gossypium hirsutum
  unsure (1)..(83): unsure at all Xaa locations
  Clone ID: LIB3197-057-Q1-M1-E5.pep
KTKYKSKPQLLFLXCFYLLCFISFSVDDSSIIDDLRLSGYSFPSVHANKLIRELNLFAKGEFIVIYDHWLLLAVGFITDCVMI

SEQ ID NO: 76793 - protein, 83 aa, Gossypium hirsutum
  unsure (1)..(83): unsure at all Xaa locations
  Clone ID: LIB3146-038-P1-K1-H7.pep
YALDMQVIKTTDYDRLNQAWAGWXRAIKLCGTDGTISCMASYFVCNYIFNGMTALAGDTNYYDVRKRCEGSLCYDFSHMESFL

SEQ ID NO: 76794 - protein, 212 aa, Gossypium hirsutum
  unsure (1)..(212): unsure at all Xaa locations
  Clone ID: GOSHI-09MAY01-C2887_2.pep
MILRSVLVLVLLVGVLFRASQSLRFDLQSGQTKCIAEDIKSNSMTVGKYHVVKPNEDHPLPDSHKLTVRVTSSYGNNFHSAEKVENGQFAFTATEQGDYMACFWAPEHSPPITVTVDFDWRTGVHTKDWTNVAKKGQVDAMELELKNLYDTIQSIHEEMFYLREREEEMQELNKATTSKMFWLSFLSLFLCLSAAGXQFWHWKTFFEKKKLI

SEQ ID NO: 76795 - protein, 96 aa, Gossypium hirsutum
  unsure (1)..(96): unsure at all Xaa locations
  Clone ID: AI055730.1.pep
MILRSVLVLVLLVGVLFPASQSLRFDLQSGQTKCIAEDIXKSNSMTVGKYHVVKPNEDHSLPDTHKLTPMVTSSYVNIFYFLCKCGIMGTFHLQSS

SEQ ID NO: 76796 - protein, 195 aa, Gossypium hirsutum
  Clone ID: GOSHI-09MAY01-C2857_2.pep
GYTDPAKPDLPRLHEWQFRSGLDRYIWIIGMIYAYYHPSGEKWMEKLEECEPKRKFSIKASVISVSLFVGYLWYEYIYKLDKVTYNKFHPYTSWIPITVYICLRNSTQQLRNYSLTLFAWLGKITLETYISQFHIWLRSDIPNGQPKWLLSFIPEYPLLNFMLTTAIYVLVSHRLFQLTNTLKSAFIPTKENRRL

SEQ ID NO: 76797 - protein, 221 aa, Gossypium hirsutum
  Clone ID: GOSHI-09MAY01-C2857_1.pep
FSLARFAQMMWRLNFFVAFCCIVLNNDYMLYYICPMHTLFTLMVYGALGIFNKYNEKPSVMAVKFLACFLVVIFIWEIPGVFEIFWSPLAFLLGYTDPAKPDLPRLHEWQFRSGLDRYIWIIGMIYAYYHPHVEKWMEKLEECEPKRKFSIKASVCAVALFVGYLWYECIYKLDKVTYNKFHPFTSWIPITVYIVAIVSALRIQLTFAGCRYLETHYNSIV

SEQ ID NO: 76798 - protein, 145 aa, Gossypium hirsutum
  unsure (1)..(145): unsure at all Xaa locations
  Clone ID: GOSHI-09MAY01-C2877_1.pep
MDKKRSNPMEWLNQMVGEPYYFFHFLAFFSYFIVRSSASNVLSPQITQLLFYREIQAVLAFFMLIAYKMAREETWEAFIADTLFLGKIFLXIALTLIMDYHLTLWYLVXFSVIYVLTQQPPYEELGSASKLTPLQLEALLTEGNT

SEQ ID NO: 76799 - protein, 239 aa, Gossypium hirsutum
  Clone ID: GOSHI-09MAY01-C2807_1.pep
MVPFIYVVLFLAMSGHSSANYCLCKDGVNEQTLQKTLDYACGAGADCTPINQNGPCYNPNTVKDHCNYAVNSYFQKKGQAQGSCDFSGTATVSVNPPSNIPSTCSFPSSGTSTTPSTGTPTTPTTGTPTTPTTGTPTTPTTGTPTTTPTTGTPTTPTTGTPTTGTSTGIPSTTPTTGTTTGTTTGSPTVFGGGTTSLSPSGTTTGINDPSHAVPLFTSTSNNILFSLAVTLWILAYYWA

SEQ ID NO: 76800 - protein, 383 aa, Gossypium hirsutum
  Clone ID: GOSHI-09MAY01-C2837_2.pep
METVFSAASRSISKLISFTALLLFLFSCSTFTSTEAYDALDPTGNITIKWDVISWTPDGYVAVVTMYNFQQYRHIQAPGWTLGWTWAKKEVIWSMMGGQTTEQGDCSKYKGNVPHCCKKDPTVVDLLPGTPYNQQIAYCCKGGVLNSWVQDPANAASSFQVSVGAAGTTNKTVRVPRNFTLKAPGPGYTCGPAKIVKPTKFITADKRRITQAMMTWNVTCTYSQFLAQKTPTCCVSLSSFYNNTIVNCPTCACGCQNNSTESGSCVSERSSHLASAVPGKSTNAPPLLQCTSHMCPVRIHWHVKLNYKEYWRVKITITNFNYALNYSQWNLVVQHPNFDNLTQLFSFNYKPLTPYAGLNDTAMLWGLKFYNDFLNEAGPLGNV

SEQ ID NO: 76801 - protein, 209 aa, Gossypium hirsutum
  Clone ID: GOSHI-09MAY01-C2837_1.pep
NCPTCACGCQNNSPDPAGGAGEASAHLASAVPGKSTNAPPLLQCTSHMCPVRIHWHVKLNYKEYWRVKITITNFNYALNYSQWNLVVQHPNFDNLTQLFSFNYKPLTPYAGLNDTAMLWGLKFYNDFLNEAGPLGNVQSELLFRKDASTFTFEKGWAFPRRIYFNGDNCVMPPPDAYPWLPNTGLKPVISLFQPVMTILASCVFLWANM

SEQ ID NO: 76802 - protein, 191 aa, Gossypium hirsutum
  unsure (1)..(191): unsure at all Xaa locations
  Clone ID: uC-gsronu33B090g05b1.pep
LRVRPRVRPRVRALVRVNCPTCACGCQNNSTESGSCVSERSSHLASAVPGKSTNAPPLLQCTSHMCPVRIHWHVKLNYKEYWRVKITITNFNYALNYSEWNLVVQHPNFDNLTQLFSFNYKPLTPYAGLNDTAXLWGLKXYNDFLNEAGPLGNVQSELLFRKDASTFTFEKGWAFPRRIYLNGDNCVMPPS

SEQ ID NO: 76803 - protein, 65 aa, Gossypium hirsutum
  Clone ID: uC-gsflmaxxa107g02b1.pep
FGAAMEHAKEWIKVHNFWSGLHGVYYLYVGVCKLHSFLLELSPLTHFFNSPSIPCTPFICIFLLI

SEQ ID NO: 76804 - protein, 372 aa, Gossypium hirsutum
  Clone ID: GOSHI-09MAY01-C2827_1.pep
RLFYLALPPSVYPSVCRMITHASAHASALAAGTRIVVEKPFGKDLDSAEQLSSQIGELFDEPQIYRIDHYLGKELVQNLLVLRFANRFFLPLWNRDNIDNVQIVFREDFGTEGRGGYFDEYGIIRDIIQNHLLQVLCLVAMEKPVSLKPEHIRDEKVKVLQSVLPIKDEEVVLGQYEGYRDDPTVPNHSNTPTFATVILRIHNERWEGVPFILKAGKALNSRKAEIRVQFKDVPGDIFKCQKQGRNEFVIRLQPSEAMYMKLTVKQPGLEMSTVQSELDLSYRQRYQGVTIPEAYERLILDTIRGDQQHFVRRDELKAAWEIFTPLLHRIDNGEMKPIPYRTGSRGPAEADELSAKAGYVQTHGYIWIPPTL

SEQ ID NO: 76805 - protein, 108 aa, Gossypium hirsutum
  Clone ID: AI055328.1.pep
LIGLFPGVPFILKAGKALNSRKAEIRVQFKDVPGDIFKCKKQGRNEFVIRLQPSEAMYMKLMVNTSSPMHVKQPELEMSTVQSELDLSYRQRYQVYDPRGYERLILTL

SEQ ID NO: 76806 - protein, 150 aa, Gossypium hirsutum
  Clone ID: LIB3584-044-P1-K1-H5.pep
PTRPLPIKDEEVVLGQYEGYRDDPTVPDHSNTPTFATVILRIHNERWEGVPFILKAGKALNSRKAEIRVQFKDVPGDIFKCKKQGRNEFVIRLQPSEAMYMKLMVKQPGLEMSTVQSELDLSYRQRYQGVTIPEAYERLILDTYDPCPFL

SEQ ID NO: 76807 - protein, 129 aa, Gossypium hirsutum
  Clone ID: LIB3272-002-P1-K1-D12.pep
LYCQGFLPPDEVHIFGYARTKISDDDLRNRIRGYLVNDRSASPSEDVSKFLQLIQYVSGSYDGAQGFQLLDKEITKHEISKSSQEGSSRRLFYLALPPSVYPSVCRMIRKYCMNKSDLGGWTRIVVEKP

SEQ ID NO: 76808 - protein, 127 aa, Gossypium hirsutum
  Clone ID: GOSHI-09MAY01-C2597_1.pep
VRSPRSIEKPELFVMKPQREGGGSSIYGDDVKETLLRLQKEGSEQDAAYILMQRIFPAVSPTFLIRDGICHKDHAISELAVYSAYLRNKESVIMNDQCGYLMRTKVSSSNEGGVAAGFAVLDSIYLT

SEQ ID NO: 76809 - protein, 180 aa, Gossypium hirsutum
  Clone ID: GOSHI-09MAY01-C2587_1.pep
PRVPPASAHPSESIQLVAEHAAAKNGVFMMNLSAPFICEFFTDVHEKALPFMDYVFGNETEARTFSKVHGWETDNVEEVALKISQWPKASGTHKRITVITQGADPVVVAEDGKVKKFPVILLPKEKLVDTNGARDAFVGGFLSQLVQEKPIEECVRAGCYAANVIIQRSGCTYPEKPSFN

SEQ ID NO: 76810 - protein, 108 aa, Gossypium hirsutum
  unsure (1)..(108): unsure at all Xaa locations
  Clone ID: LIB3828-026-Q6-K6-F8.pep
RGGTPGFSPPPRWKNPAPGKKKRGPKKKKKTRQPRGEKKGPPKRAPPFFFFFFLHQTKLLTINKFISFDNFLFFYNFKFFFFFFFFFFPLXXXFVNNITYIPPPPQST

SEQ ID NO: 76811 - protein, 261 aa, Gossypium hirsutum
  Clone ID: GOSHI-09MAY01-C2547_1.pep
PRPRGKKGYLQQFIFFILVALPFMFISPTHSSLANGNVNILPPTNTSDKVTLALYYETLCPYCADFITNDLVKVFLSDLYTIVNLKLVPWGNADILGDEPHCQHGEDECYLNTIHSCVIYYWPDVKKHFDFIRCTEQQSSKKRLVKNRAAMWKQCSEKLGMSAHRINKCYTSGYGLKLLLQYANETAKLKPPHEYVPWVVVDNQPLKDDFENFVKYVCEAYKGADKPEACKTQATSVSSTHDKMANRIHPGCYASEIANLG

SEQ ID NO: 76812 - protein, 209 aa, Gossypium hirsutum
  Clone ID: LIB3543-045-Q1-K6-A6.pep
YASGRSRSRTRVNILPPTNTSDKVTLALYYETLCPYCADFITNDLVKVFLSDLCTIVNLKLVPWGNADILGDEPHCQHGEDECYLNTIHSCVIYHWPDVKKHFDFIRCTEQQSSKKPLVKNRAAMWKQCSEKLGMSAHRINKCYTSGYGLKLLLQYANETAKLKPPHEYVPWVVVDNQPLKDDFENFVKYVCEAYKGDNKPEACKTQVA

SEQ ID NO: 76813 - protein, 200 aa, Gossypium hirsutum
  Clone ID: LIB3543-038-Q1-K1-A2.pep
STQRFSRVRLKKGCLQQFIFFILVALPFMFISPTHSSLANGNVNILPPTNTSDKVTLALYYETLCPYCADFITNDLVKVFLSDLYTIVNLKLVPWGNADILGDEPHCQKKHFDFIRCTEQQSSKKRLVKNRAAMWKQCSEKLGMSAHRINKCYTSGYGLKLLLQYANETAKLKPPHEYVPWVVVDNQPLKDDFENFVKYV

SEQ ID NO: 76814 - protein, 67 aa, Gossypium hirsutum
  Clone ID: LIB3189-015-P1-K1-A12.pep
FCEPHCQHGEDECYLNTIHSCVIYHWPDVKKHFDFIRCTEQQSSKKPLVKNRAAMWKQCSEKLGMSA

SEQ ID NO: 76815 - protein, 55 aa, Gossypium hirsutum
  Clone ID: LIB3189-018-P1-K1-F9.pep
QHGEDECYLNTIHSCVIYYWPDVKKHLDFNRCTEQHSSKKRLGKNRALMWKQCIE

SEQ ID NO: 76816 - protein, 433 aa, Gossypium hirsutum
  unsure (1)..(433): unsure at all Xaa locations
  Clone ID: GOSHI-09MAY01-C2517_1.pep
KFYCIFAGVMNGRPEFTDHLTHKLLHHPGQIEAAAIMEHILEGSSYVXKAAKKLHEMDPLQKPKQDRYALRTSPQWLGPQIEVIRFATKSIEREINSVNDNPLIDVSRNKALHGGNFQGTPIGVSMDNARLAIAAIGKLMFAQFSELVNDFYNNGLPSNLSGGRNPSLDYGLKGAEIAMASYCSELQYLANPVTSHVQSAEQHNQDVNSLGLISSRKTAEAVDILKLMSSTYLVALCQAIDLRHLEENLRSTVKNTVSQIAKKVLTTGANGELHPSRFCEKDLLKAVDREYVFAYIDDPCSATYPLMQKLRQVLVENALTNGENEKNASTSIFQKIAAFEEELKAVLPKEVESARASVENGNAAIPNKIKECRSFPLYKFVREELGTGLLTGENVMSPGEEFDKVFTAMCQGKIIDPMLECLEEWNGAPLPIC

SEQ ID NO: 76817 - protein, 53 aa, Gossypium hirsutum
  Clone ID: uC-gsronu33B046c04b1.pep
EFHYLANPVTNHVQSAEQHNQDVNSLGLISSRKTAEAVDILKLMSSTFLVALC

SEQ ID NO: 76818 - protein, 59 aa, Gossypium hirsutum
  Clone ID: GOSHI-09MAY01-C2527_1.pep
EIMRTPDNSDLRSCVLFFRGSFCAFFFYSRNVMTDSVFGWFIISVCIAVWAIPKYPLNM

SEQ ID NO: 76819 - protein, 287 aa, Gossypium hirsutum
  unsure (1)..(287): unsure at all Xaa locations
  Clone ID: GOSHI-09MAY01-C2497_1.pep
MAGGRVVSCNNTNSVGGSSNLSVLLQSQRVPSSSEPMDPLFIPRPGSSPYSFFVSGTRSMVSFEDVHGGNRSFFRSFDEEENGDEDLDEYFHQPEKKRRLTVDQVQFLEKSFEVENKLEPERKTQLAKELGLQPRQVAIWFQNRRARWKTKQLEKDYDTLQASFNTLKDDYGNLLIEKDKLKQEVLQLTDMPVMKEKNNSELSDVNTVCQEPPQKPVDSDSPHSSYPFEPDQSDTSQDEEDNLSKXLFQPSSYIFPKLEDNDYSDPPASSCSYGFHVEDHAFWSSAY

SEQ ID NO: 76820 - protein, 89 aa, Gossypium hirsutum
  Clone ID: AI055726.1.pep
EEFSQGNGSHKIFKMGGKKGVFSGDRNLRILTLFFSNYKKIVFQGVSKGPWFGLEQKKIRGKACFGKKKGPKGSKKKDPLSFKGTTEIL

SEQ ID NO: 76821 - protein, 204 aa, Gossypium hirsutum
  Clone ID: GOSHI-09MAY01-C2457_1.pep
NQLDIADANIQRLNTLSLRNRPCGGSSSDESDTCNPLGQLIFEYLEHDQPFSREPLADKISVLASQFPALRTYRSCDLSPSSWISVAWYPIYRIPMGPTLQNLDACFLTYHSLSTPLPCNGTDGLPFRGFNVREFHDADMSLKLPLPTFGLAFYKFKVSVWNPDGVNESQKANSLLQAADNWLRLLQVNHPDFRFFVSHNTYWR

SEQ ID NO: 76822 - protein, 117 aa, Gossypium hirsutum
  Clone ID: GOSHI-09MAY01-C2477_5.pep
DASKQAYMRGRRILEINPRHPIIKELRERVVKDPEDEGVKQTAQLIYQTALMESGFILSDPKDFASRIYSSVKSSLNISPDATIEEEDDVEETETEPETKAGKDGADAESSGLKDEL

SEQ ID NO: 76823 - protein, 135 aa, Gossypium hirsutum
  Clone ID: GOSHI-09MAY01-C2477_2.pep
TPCVVVTSKYGWSANMERIMQSQTLSDSSKQAYMRGKRILEINPRHPIIKELRERVAKDSEDEGVKQTAQLIYQTALMESGFNLPDPKDFASRIYSSVKSSLNISPDATIEDDDDDVEETETESDTKDSAVKDEL

SEQ ID NO: 76824 - protein, 490 aa, Gossypium hirsutum
  Clone ID: GOSHI-09MAY01-C2477_1.pep
PTRPEADKSEDEDTEKKKTVKETTYEWERLNDVKAIWLRSPKLVASGDSAKFYHSLAKDFSDVKPLAWSHFTAEGDVEFKAVLFVPPKAPQDLYQSYYNSNKANLKLYVRRVFISDEFDELLPKYLSFLKGLVDSDTLPLNVSREMLQAHSSLKTIKKKLIRKALDMIRKIAEEDPDESSGKDEKEVETSGDDDEKKGQYTKFWNEFGKSIKLGIIEDATNRNRLAKLLRFESTKSDGKLTSLDQYISRMKSGQKDIFYITGTSKEQLEKSPFLERLKKKNYEVIFFTDPVDEYLMQYLMDYEGKQFQNVSKEGLKIGKEKNKELKESFKELTKWWKNALASDNVDEVKISNRLDNTPCVVVTSKYGWSANMERIMQSQTLSDSSKQAYMRGKRILEINPRHPIIKELRERVAKDSEDEGVKQTALLIYQTAVMESGFNLPDPKDFASRIYSSVKSSLNISPDATIEDDDDVEETEIESETKESAGKDEL

SEQ ID NO: 76825 - protein, 152 aa, Gossypium hirsutum
  unsure (1)..(152): unsure at all Xaa locations
  Clone ID: AI055408.1.pep
TNRNRLAKLLRFESTKSDGKLTSLDQYISRMKSIQKDIFYITGTIXEQLEKSPFLERLKKKNYEVIFFTDPVDEYLMQYLMDYEGKQFLNVSYEGLNIGKYXNYELQESFKELTKWCINALACDNVDYIMIIFLFGHHFLCVCTIKFGGFLF

SEQ ID NO: 76826 - protein, 182 aa, Gossypium hirsutum
  unsure (1)..(182): unsure at all Xaa locations
  Clone ID: LIB3585-028-P1-K1-C3.pep
DESSDEEETSDSFSSKEGKNEYADKXEDHDAQKKSNSYNARVTTYXFXLLNYXKAGGVRIPINVTDQXYTKFYHSLAKDFSDLKPLACNHFTAEGDIEFKTVFFVPPKAPHDLYESYYNTNKTNFKFYVRPVFISXEFDXLLPKYLIFFKGLYXSYTLPFNISLKILHTHNNFKTIQKKTYY

SEQ ID NO: 76827 - protein, 81 aa, Gossypium hirsutum
  Clone ID: LIB3583-040-P1-K1-A1.pep
ERVAKDSEDEGVKQTAQLIYQTALMESGFNLPDPKDFASRIYSSVKSSLNIRPDATIEDDDDVEETETESETKDSAVKDEL

SEQ ID NO: 76828 - protein, 90 aa, Gossypium hirsutum
  Clone ID: LIB3146-024-Q1-K1-H3.pep
FHSRLRFTYILLSNVCNVSLYPSFRLENACYSSFGLSSEGKTNSKGMSPRFQAIYNSSLTALSFVSDSVSVSSTSSSSSSIVASGLIFRL

SEQ ID NO: 76829 - protein, 58 aa, Gossypium hirsutum
  Clone ID: LIB3135-013-Q1-K1-D2.pep
RPPFFVLIFPDFQALLGYILELLSLITEQIMSQVLFFRASKRSSYTDIMNAPYRQHIS

SEQ ID NO: 76830 - protein, 35 aa, Gossypium hirsutum
  Clone ID: LIB3149-062-Q1-K1-E2.pep
FHSRLRFTYILLSNVWNVSLYPSFRLENACYSSFG

SEQ ID NO: 76831 - protein, 94 aa, Gossypium hirsutum
  unsure (1)..(94): unsure at all Xaa locations
  Clone ID: GOSHI-09MAY01-C2467_4.pep
FVKWGEGLLSRSFSFIDXSVVRAPGLTKSVFREPVFFGSVVMVCLFVMAVIVLCFEDIKLPIHHIPGPEGVRGRYSDNTLIXKLNLGWAPTMRL

SEQ ID NO: 76832 - protein, 271 aa, Gossypium hirsutum
  Clone ID: GOSHI-09MAY01-C2467_3.pep
MGSTDGTSYGAYTYDALEREPYWPSQKLRISITGAGGFIASHIARRLKSEGHYIIASDWKKNEHMTEDMFCNEFHLVDLRVMENCLKVSKGVDHVFNLAADMGGMGFIQSNHSVIMYNNTMISFNMLEAARISGVKRFFYASSACIYPEFKQLDTNVSLKESDAWPAEPQDAYGLEKLATEELCKHYTKDFGIECRIGRFHNIYGPFGTWKGGREKAPAAFCRKAITSIDKFEMWGDGLQTRSFTFIDECVESVLRLTKSDFREPVNIGSD

SEQ ID NO: 76833 - protein, 163 aa, Gossypium hirsutum
  unsure (1)..(163): unsure at all Xaa locations
  Clone ID: GOSHI-09MAY01-C2467_2.pep
HAIAHASAHASAGLFTTRSVLWGDGLXTRSFTFIDECVEGVLRLTLAAARAPVNIGSDEMVSMNEMAEIVLSFEDKKLPIHHIPGPEGVRGRNSDNTLIKEKLGWAPTMRLKDGLRITYFWIKEQIEKEKAQGIDLSVYGSSKVVGTQAPVQLGSLRAADGKE

SEQ ID NO: 76834 - protein, 376 aa, Gossypium hirsutum
  Clone ID: GOSHI-09MAY01-C2467_1.pep
MGSTDGTSYGAYTYDALEREPYWPSEKLRISITGAGGFIASHIARRLKSEGHYIIASDWKKNEHMTEDMFCHEFHLVDLRVMENCLKVTNGVDHVFNLAADMGGMGFIQSNHSVIMYNNTMISFNMLEAARISGVKRFFYASSACIYPEFKQLDTNVSLKESDAWPAEPQDAYGLEKLATEELCKHYTKDFGIECRIGRFHNIYGPFGTWKGGREKAPAAFCRKAITSIDKFEMWGDGLQTRSFTFIDECVEGVLRLTKSDFREPVNIGSDEMVSMNEMAEIVLSFEDKKLPIHHIPGPEGVRGRNSDNTLIKEKLGWAPTMRLKDGLRITYFWIKEQIEKEKAQGIDLSVYGSSKVVGTQAPVQLGSLRAADGKE

SEQ ID NO: 76835 - protein, 64 aa, Gossypium hirsutum
  Clone ID: LIB3146-025-Q1-K2-E8.pep
PCFFFLHQTCYFYYYSSRNRFFIIYYIKRNTNGIYLSLAYHGKLTWNTIPFNQQYTLYNASFKY

SEQ ID NO: 76836 - protein, 63 aa, Gossypium hirsutum
  Clone ID: LIB3148-041-Q1-K1-H2.pep
RKKFLLYKGYESLSISTYNSKLFWIEWKHKSFPLDKDHSAQTKYDKINNLKLILVDTFWIQCH

SEQ ID NO: 76837 - protein, 46 aa, Gossypium hirsutum
  Clone ID: LIB3146-052-Q1-K1-H8.pep
PRVRPRVRECVEGVLRLTKSDFLKAKNNFCHLIHADHVITSNVRHD

SEQ ID NO: 76838 - protein, 232 aa, Gossypium hirsutum
  Clone ID: GOSHI-09MAY01-C2407_1.pep
GRAGVNLGGNDIVQGNKKLIVAFLWQLMRFNMLQLLKSLRSRSRGKEITDADIMNWANRKVKSTGRSTQIESFKDKSLSTGLFFLELLSAVEPRVVNWNLVTKGESDEEKRLNATYIISVARKLGCSIFLLPEDIMEVNQKMILTLTASIMYWCLQHAAEEGEVALSPANGNGSTYTSDTSPAPSISGEDERSSLCGEISSLTMDDAASDITVSSSQCENEDTEIATAESHA

SEQ ID NO: 76839 - protein, 64 aa, Gossypium hirsutum
  Clone ID: GOSHI-09MAY01-C2427_2.pep
YFWCPLKKFFPFNAREIKFGSFKRPPPFFFFFFFFFFFFFFFFFFFFFFFFFFFFFFFFFFDES

SEQ ID NO: 76840 - protein, 130 aa, Gossypium hirsutum
  Clone ID: GOSHI-09MAY01-C2427_1.pep
DTDRKSIEMSYERGPQDHYPPPGYSSPYPPPGYPSAPPPPSYEGYPPPPTGYPAYPPQPPRQPYDGYQGYFAEGYPPPPPPQPHPQYQHYHHYDPYHYQNQSDSGCFSFLQGCLAALCCCCVLEDCCFFL

SEQ ID NO: 76841 - protein, 41 aa, Gossypium hirsutum
  Clone ID: LIB3083-031-Q1-L1-D9.pep
HQYQHYHHYDLYHYQKQSDSGCLSFLQGCLAAICCCCVLKD

SEQ ID NO: 76842 - protein, 105 aa, Gossypium hirsutum
  Clone ID: GOSHI-09MAY01-C2767_5.pep
LRVRIHHDPHFWGDDVHHFKPERFAEGIAKATNYTAAAFLPFGLGPRSCVGVTFATLETKIVLSMILQRYTITLSPAYIHSPISILSIRPQHEIQVILEPLHHNA

SEQ ID NO: 76843 - protein, 141 aa, Gossypium hirsutum
  unsure (1)..(141): unsure at all Xaa locations
  Clone ID: GOSHI-09MAY01-C2767_3.pep
ETLRLYGPSIAMMRRAEREVQLGKLVLPANLDLLVLHSATXHHDPHLWGDEVHLFKPERFAEGIAKATNYNAAAFCPFGLGPRSCVGMSFAITETKVALSMILQRYTISLSPAYVHSPMPFLAIRPQHGIQVILESLHNNA

SEQ ID NO: 76844 - protein, 378 aa, Gossypium hirsutum
  Clone ID: GOSHI-09MAY01-C2767_1.pep
PTRPPARPPAPPAKHRKLTNHVFHGESLKNMTPAVIASVETMLEKWKGKEGKEIEVYQEFRLLTSEVISRTAFGSNYLEGEKIFAMLNKLSIIMSRNIFKTTIPFINKLWKPADMLESEKLAKEIQDCVMKIVKKREDKVVNGEADSFGNDFLGLLVNAYHDLDDKNRLSLEDLVGECKTFYFAGQETVNSLLAWIVLHLAIHGDWQEKARREVIDIFGNQNPHLEGIAKLKIMTMIINETLRLYGPSNGLPRTVAREVQLGKFVLPANIDILSLNIGPHRDPHLWGDDVHLFKPERFAEGIAKATNYTAAAFFPFGLGPRSCVGMTLATIETKIALSMILQRYTITISPTYVHSPIAIITIQPQHGIQIILEPLHSC

SEQ ID NO: 76845 - protein, 170 aa, Gossypium hirsutum
  Clone ID: uC-gsflnu33B084e12b1.pep
SCNGLVTVEGEKWVKQRTLGNYAFHGESLKNMTPAVIASVETMLEMWRGYVGKEIELFQEFRLLTSEVISRTAFGSSYLEGQKIFDMLSKLAIILHRNLFKTRITWISKLWKPADIVESEELAYEIQGCVMKMIKKREDRVVNGEADSFGNDFLGLLVNAYHDLDDKNMF

SEQ ID NO: 76846 - protein, 135 aa, Gossypium hirsutum
  Clone ID: uC-gsronu33B021b04b1.pep
MVYKNGLIREVVREVQIGNLVLPANIDLYIANVVPQHDPQLWGDDVHLFKPERFAEGIAKATNYNAAAFCPFGIGPRSCVGMSFATMETKIALSMILQRYTISLSPAYVHSPISVLGIQPEHGIQVILKSLDSNV

SEQ ID NO: 76847 - protein, 106 aa, Gossypium hirsutum
  Clone ID: LIB3145-007-Q1-K1-B7.pep
LYILRSHHDPQLWGDEVHLFKPERFAEGIAKATNYNAGAFCPFGLGPRNCVGMNFAIIETKIALSMILQRYTISLSPAYVHSPIPYITIQPQHGIQVILESLHNDA

SEQ ID NO: 76848 - protein, 150 aa, Gossypium hirsutum
  unsure (1)..(150): unsure at all Xaa locations
  Clone ID: GOSHI-09MAY01-C2717_6.pep
PTFSNMFLGGINTGALIVIWAVAELARKPXFMKKAQDEVQGXVGKKGRVTETDLDQLQYLKMVXKETLRLHPPAPMLIAREAISHFNINGYHIYPNPPTTTSTCCSALSHADMRCLCSYKNSKLLPSLGIDPNLAMKLPSLCKLPHPADC

SEQ ID NO: 76849 - protein, 105 aa, Gossypium hirsutum
  Clone ID: GOSHI-09MAY01-C2717_4.pep
LASAHASGLQRLILAKVGVIAIATTDAQSICNMPASRLMACKPAMTHASANPPPPTSTCCSALSHADMRCLCSYKNSKLLPSLGIDPNLAMKLPSLCKLPHPANC

SEQ ID NO: 76850 - protein, 515 aa, Gossypium hirsutum
  Clone ID: GOSHI-09MAY01-C2717_3.pep
MMPLISSLVWVPFLLLPLLLLLLLSKQKTHQVKKEHNYKLPPSPPRLPIIGNLHQLGELPHSSLSQLSRKYGPVMLLHLGRIPVLIVSSAEAAKEVLKVNDLACCSRPRLAAVGKLSYNYLDVAFAPYSEYWRELRKICVLELFSVKRVKSFRFIREAEVGSIMESISSSSTHPVNVTEKVFALTGSIIFRIAFGKSFQGSEYDRAKFYELVHDAETVAGAFSSEECFPRFGWIIDRLNGHNGRVEKVFRQLDALFQQVIDEHLKPGRTQDHEDIIDVMLKIEKEQIDEHGHAWLTKNHIKAVLLNMFLGGVDTSALIVIWAMAELARKPTFMKKAQDEVRGVVGKKGRVTETDLDQLQYLKMVLKETLRLHPPAPMLIAREAISHFNINGYHIYPNTLIQINVWAIARDPKYWENPQEFSPERFIDNAVDFKGQHFELLPFGGGRRGCPGLYMGTVTTELLLANLLYCFDWVLPDGMNEADINMEEWAGKCLTLSKKTPLLLVPIKYLHAQPSV

SEQ ID NO: 76851 - protein, 110 aa, Gossypium hirsutum
  Clone ID: GOSHI-09MAY01-C2717_2.pep
LSIHIIKKVKEKMKGLQALILAMVTVMAIATTDAQSICSMPASGLMACKPAVTPPNPPPPTSTCCSALSHADMRCLCSYKNSKLLPSLGIDPNLAMKLPSLCKLPHPANC

SEQ ID NO: 76852 - protein, 105 aa, Gossypium hirsutum
  Clone ID: GOSHI-09MAY01-C2717_1.pep
SSRVRPKMKGLQALILAMVMVMAIATTDAQSICNMPASGLMACKPAVTPPNPPPPTSTCCSALSHADMRCLCSYKNSKLLPSLGIDPNLAMKLPSLCKLPHPANC

SEQ ID NO: 76853 - protein, 67 aa, Gossypium hirsutum
  Clone ID: LIB3148-053-Q1-K1-D10.pep
AISWQGLEAKQKVTNSLSATCSIFFFIMFYNFVTNCSWYSQDIYETPPYDSIVFKKKKKKKGGPDAW

SEQ ID NO: 76854 - protein, 95 aa, Gossypium hirsutum
  unsure (1)..(95): unsure at all Xaa locations
  Clone ID: uC-gsronu33B155d08b2.pep
IVQNALYCKLLVPGSPYLILYVRENHAYYKPLLHIIVLPXGFYLSFISFYVLCFDWYLIVGSLFTHYSLFLHFSSLSFFFYIYKKKKKIPLGPSF

SEQ ID NO: 76855 - protein, 230 aa, Gossypium hirsutum
  unsure (1)..(230): unsure at all Xaa locations
  Clone ID: GOSHI-09MAY01-C2707_1.pep
MKFTDSPVIQLQVRDSQLSIQQDNGSFHVGTSVWPCSLVLAKFVERWAPSSPTTTTSDNPYYDLLDFHTRRRRAIELGTGCGAAGMTFRLLGLQDIILTDISPVMPALKHNLKRNKPVLGKNMKTSILYWNNKDQIRGVNPPFDVVIAADVVYIEESVGHLVGAMEAFVSVDGVFLFGYQLRSPEADKLFWEMCEKVFVIKKVPHQXLHPDYAYEETDVYVFRKKMNNNN

SEQ ID NO: 76856 - protein, 261 aa, Gossypium hirsutum
  unsure (1)..(261): unsure at all Xaa locations
  Clone ID: GOSHI-09MAY01-C2737_1.pep
LSCGSCAFGAKGMNAVLDNCLALEELSVKRLRGITDGAAAEPIGPGVAAAALKTICLKELYNGQCFGPLIIGSKNLKSLKLFRCSGDWDKLFPLIVERVAGMVEIHMERIQVSDVGLAAISNCSNLEILHLVKTPECTNAGLGAVAEKCNLLRKLHIDGWKANRIGDQGLIAVAKSCPNLQELVLIGVNPTKLSLEMLASNCPNLERLALCGSDTVGDAEISFIAVXCIALEKLCFMNCPVFGSXGLDALASGCPNLVKVK

SEQ ID NO: 76857 - protein, 273 aa, Gossypium hirsutum
  Clone ID: GOSHI-09MAY01-C2727_1.pep
RPRVRFLTWCALRCLAHTSGAPIARPLFFSFPAYKECYGLSTPRVRGSSLMVSPVLEQGRASGKALFPPGSWYNLFDMTQTIVSKGQYFMLDAPLHVVNVHLYQNTILPMQQGGMISKEARMTPFTLIVTFPAGASEAEAKGNLYLDNDELPEMKLGNGYSTYVDLYATLKQGSVKIWSEVQEGKFALDKGWKIEKITVLGLSGSVDTSGLEINGSPVANGASNIELSSMKQMHLQDVEDGVGKKKSLMVELSGLNLYVGKNFDMSMKMGVQG

SEQ ID NO: 76858 - protein, 94 aa, Gossypium hirsutum
  unsure (1)..(94): unsure at all Xaa locations
  Clone ID: LIB3493-043-P1-M1-B3.pep
SEVQEVKFALDKGWKIEKXTVLGLSGSVDTSGLEINGSPDTGASIIELTSVEQMHLQDVEDGVGKKKSLIVSLSGLNLYVGKKFDMSMKMGVQG

SEQ ID NO: 76859 - protein, 105 aa, Gossypium hirsutum
  Clone ID: LIB3493-047-P1-M1-C7.pep
EKITVLGLSGSVDTSGLERNGSPVANGASNIELTSVEQMHLQDVEHGVGKKNSLTVSLLCLNLYVAHEVLHVHENGGTRLMIIAMLDSLYANTLSLPLLMILSWS

SEQ ID NO: 76860 - protein, 383 aa, Gossypium hirsutum
  Clone ID: GOSHI-09MAY01-C2657_1.pep
PTRRERPESLESEKGEPNPDVNVKGLNQHTYEAGKECKTQIASENQSSHLADGKSVAMEEEEVILLKPLTRHNSAPPYGKIHSEKDPASPNEMEETVPPAAGLRRATSLLIAQNQANSDASDFQSDISNFRRSKPVKQHEPFVKDTAAFLFSEAPISAGPPSLSSWVLNQGSLSSTEKTRGDVSRPSLSPIADPASASLSDLSIHQTEDSVNSSRSEALTNYFYSPPPYSAPIPSAPLLPDDAAWFNGNQSSFSGANGSEFINKPENFYNASRISGYPNWSPDGERINGSGIPGFIDKYPPFSGMTSSEWLRRYRESRNPDHANSHVQPLNYYAPGNPIPTHDGSRVGLFNQYGVPSVPNPTIYTESSVLHQGFPRVYGMEEP

SEQ ID NO: 76861 - protein, 80 aa, Gossypium hirsutum
  Clone ID: LIB3048-022-Q1-L1-B6.pep
RINGSVIPSFIDKYPPFNYMTSSEWLQRYIKSHNPDHSNIHFQPLNYYSPFNPIPTHDGSPVCLFNQYLVPSFSNPTIYT

SEQ ID NO: 76862 - protein, 153 aa, Gossypium hirsutum
  Clone ID: GOSHI-09MAY01-C2647_7.pep
MVVKVYGPAFASPKRVIACLIEKEIEFETVPVDLLKGEHKDPEFLKLQPFGTVPVTQDGDYVLYESRAIIRYYAEKYKSQGTDLLGKTVEERGQVENWLEVEAHNFNPSIYALTLHVMFASKMGFPPDENLIKESEEKLGKVLDIYEERLSKN

SEQ ID NO: 76863 - protein, 72 aa, Gossypium hirsutum
  Clone ID: GOSHI-09MAY01-C2647_4.pep
MPPKQASKADLAKKQKIIEDKTFGLKNKNKSKNVQKYVQNLKQSVQPKPDPSKTSQKKKKEEEKAKEKELND

SEQ ID NO: 76864 - protein, 162 aa, Gossypium hirsutum
  unsure (1)..(162): unsure at all Xaa locations
  Clone ID: GOSHI-09MAY01-C2647_2.pep
PLLHRRLISESRAIIRYYAEKYKSQGTDLLGKTVKERGQVXENWLKVEAHNFNPPIYALTLHLMFASKMGFPPDENLIKESEEXKLGKVLDIYEERLSKNKYLAGDFFSLADLSHLPFTQYFVGQMGKXYMITSREHVSAWWDDISSRPSWQKVLQLYAPPF

SEQ ID NO: 76865 - protein, 215 aa, Gossypium hirsutum
  Clone ID: GOSHI-09MAY01-C2647_1.pep
MVVKVYGPAFASPKRVIACLIEKEIEFETVPVDLLKGEHKDPEFLKLQPFGTVPVTQDGDYVLYESRAIIRYYAEKYKSQGTDLLGKTVEERGQVENWLEVEAHNFNPSIYALTLHVMFASKMGFPPDENLIKESEEKLGKVLDIYEERLSKNKYLAGDFFSLADLSHLPFTQYLVGQMGKEYMITSRKHVSAWWDDISSRPSWQKVLQLYAPPF

SEQ ID NO: 76866 - protein, 142 aa, Gossypium hirsutum
  unsure (1)..(142): unsure at all Xaa locations
  Clone ID: LIB3543-064-Q6-K6-H10.pep
YAENTKGARWGTEKKVXERGXVENWLEVEAHNFNPPIYALTLHLMFASKMGFPPDERGGGGSXXXLXKVLDIYEERLSKNKYLAGDFFSLADLSHLPFTQYLVGQMGREYMITSRKHVSAWWDDISSRPSWQKVLQLYAPPF

SEQ ID NO: 76867 - protein, 121 aa, Gossypium hirsutum
  unsure (1)..(121): unsure at all Xaa locations
  Clone ID: LIB3828-031-Q6-K6-G6.pep
MMIFPVGVFVESRAIIRYYAEKXKSQGTNLLGKTVEERGQVENWLEVEAHNFNPPIYALTLHLMFASKMGFPPDENLIKESEEKLGKVLDIYEERLPKNKYLAGDFFSLADLSHLPFTQYL

SEQ ID NO: 76868 - protein, 166 aa, Gossypium hirsutum
  unsure (1)..(166): unsure at all Xaa locations
  Clone ID: LIB3543-055-Q1-K6-C1.pep
MVVKVYGPAFASPKRVIACLIEKEIEFETVPVDLLKGEHKDPEFLKLQPFGTVPVTQDGDYVLYESRAIIRYYAEKYKSQGTDLLGKTVEERGQVENWLEVEAHNFNPPIYALTLHLMFASKMGFPPDENLIKESEEKLGKVLDIYEERLSKXKYLARDFFSLADL

SEQ ID NO: 76869 - protein, 151 aa, Gossypium hirsutum
  Clone ID: LIB3135-003-Q1-K1-C1.pep
PRVRPRVRPRVRETVPVDLLKGEHKDPEFLKLQPFGTVPVTQDGDYVLYESRAIIRYYAEKYKSQGTDLLGKTVEERGQVENWLEVEAHNFNPPIYALTLHLMFASKMGFPPDENLIKESEEKLGKVLDIYEERLSKNKYLAGDFFSLADL

SEQ ID NO: 76870 - protein, 144 aa, Gossypium hirsutum
  Clone ID: LIB3585-064-P1-K2-H4.pep
PERKVRVRASGHARVTQDGDNVLYESRAIIRCYAEKYKSQGTDLLGKTVEERGQVENWLEVEAHNFNPPIYALTLHLMFASKMGFPPDENLIKESEEKLGKVLDIYEERLSKNKYLAGDFFKLADLSHLPFTQYLVGQMGRGYM

SEQ ID NO: 76871 - protein, 64 aa, Gossypium hirsutum
  Clone ID: LIB3146-010-Q1-K1-E2.pep
KDPIPRLHHFQFLEMRSIELENLLLGRSAANIIPPSTHMLPAGCHVLWITSRTLFSPSNICKLT

SEQ ID NO: 76872 - protein, 86 aa, Gossypium hirsutum
  Clone ID: GOSHI-09MAY01-C2667_2.pep
TTIKMASSLSFPCPKISSFLKTNQQTQTHKGSLSLPPTSNFNSKSCLSFGSSIRVPASSAPQWPNDGKQTTVFASHTQLNEVAAEK

SEQ ID NO: 76873 - protein, 174 aa, Gossypium hirsutum
  Clone ID: GOSHI-09MAY01-C2667_1.pep
MASSLSFPCPKISSFLKTNQQTQAHKGSLSLPPTSNFNSKSCLSFGSSIRVPASSAPQWPNDGKQTTVFASHTQLNEVAAEKSSNSVAVVDMKPKVALPEEDDKKSAEKAIPDAAAISEFMAQVSDLVKLVDSRDITELQLKQSDCELVLRKKESFAAAGISISNCLAAVHAST

SEQ ID NO: 76874 - protein, 129 aa, Gossypium hirsutum
  Clone ID: GOSHI-09MAY01-C2607_3.pep
MDADPWTLCLSSTARRYQSALQSRSDMFMGFEEMDGEDDVREEFPCPFCSEYFDIVGLCCHIDDEHPVEANNGVCPVCATRAGADMVAHITQQHGHIFKRQRRSRRSGSDSTLSLLRKELRDGNLQSLF

SEQ ID NO: 76875 - protein, 124 aa, Gossypium hirsutum
  unsure (1)..(124): unsure at all Xaa locations
  Clone ID: GOSHI-09MAY01-C2607_2.pep
MDADTWSVRLSSASKRYQSSLESRSNMLMGFEEIDEEDDIREEFPCPFCSEYFDIVGLCCHIDHEHPVEAKNGVCPVCALRVGVDMVAHXTLQHGNIFKMQRKRKSRKGGSHSTLSLLKKELRE

SEQ ID NO: 76876 - protein, 219 aa, Gossypium hirsutum
  Clone ID: GOSHI-09MAY01-C2607_1.pep
MDADSWSARLSSASKRYQSALQLRSDMLMGFEEIDGEDEIREEFRCPFCSEYFDIVGLCCHIDDEHPVEAKNGVCPVCAMRVGVDMVAHITLQHGNIFKMQRKRKSRKGGSHSTLSLLRKELREGNLQSFFGGSSCTVSSNSAPDPLLSSFILPMVDDFVSVQPNFSRETRTTKKSSDVNKSERNVKSSPLSVKDQEEKAKRCEFVQGLLLSTMPDEIL

SEQ ID NO: 76877 - protein, 83 aa, Gossypium hirsutum
  Clone ID: LIB3146-058-Q1-K1-H10.pep
GGKEVLSLPFLKATNRKLKEASLSRAADSTMPDEIHKTAYSGSNRLLQWNREPQSHGEILLTINNPPASKLTNLQIITGVWSE

SEQ ID NO: 76878 - protein, 297 aa, Gossypium hirsutum
  Clone ID: GOSHI-09MAY01-C2197_1.pep
FYITSGCPLFSKFEPHLVVGAGGYVSFPVCLAALLKGIKVVIQEQNSVPGIANRFLSLFADLVFVAFNSTVQSFPRKEKCVVCGNPVRLSLKNSVSKALSRLHFFPWLEKMEGSSEEIKVILVLGGSLGANAVNIALLNVYSQLLLEHENWFIIWQTGVESFNEMESLVRSHPRLLLAPFLHSMNMAYAAADLVVSRAGAMTCSEILATGKPSILVPSPNVAEGHQHKNAFLMADVAGSRVITEDELDSTTLGLAICEILGDERLLAEMSQRALNAAKPDASAEIAKHILSLVKEDS

SEQ ID NO: 76879 - protein, 132 aa, Gossypium hirsutum
  Clone ID: AW187932.1.pep
ALLNVYSQLLLEHENWFIIWQTGVESFNEMESLVRSHPRLLLAPFLHSMNMAYAAADLVVSRAGAMTCSEILATGKPSILVPSPNVAEGHQHKNAFLMADVAGSRVITEDELDSTTLGLAICEILGTNLPIF

SEQ ID NO: 76880 - protein, 264 aa, Gossypium hirsutum
  Clone ID: GOSHI-09MAY01-C2187_1.pep
KIIENQTACSPAREAYRKQLAETLNMNRTRILAFKNKPPAPVELFPSEHSTASAHPTKSSKPRRHIPQSSERTLDAPDLVDDFYLNLLDWGSSNVLAIALGNTVYLWDASDSSTSELVTVDDENGPVTSVGWAPDGRHIAIGLNNSEVQLWDSASNRQLRTLRGCHRSRVGSMAWNNHILTTGGMDGQIVNNDVRIRSHVVETYRGHQQEVCGLKWSASGQQLASGGNDNVVHIWDRSMASSNSPTQWLHRLEEHTSAVKALCL

SEQ ID NO: 76881 - protein, 195 aa, Gossypium hirsutum
  Clone ID: GOSHI-09MAY01-C2157_1.pep
LEAEETEKMPWACSFCSLLVPHMHAHKFILQSRCKYLQALFLSGMQESHSQSIKVPVSWEALIKLVRLIYSRKLPDPPFGCLWDNMDTKERLYELKPYVEVYWLAEFWILEDVQEACFTTIISCLDSDRQLALEVMKLAAGFSLWKLAEVAADYMAPIYHKLRDSGVLEQLDELLIELVRDASVRLSQGSGGFSG

SEQ ID NO: 76882 - protein, 116 aa, Gossypium hirsutum
  unsure (1)..(116): unsure at all Xaa locations
  Clone ID: GOSHI-09MAY01-C2167_1.pep
SLNVLDGCVYDQVIHPIHDQSFYLTAEHKRRRVFSSFSSCKXVEPWTFEQNLGEAVFIPAGCPHQVRNLKSCTKVALDFVSPENIQECLRLTEEFRQLPKNHRAREDKLEVGTSFR

SEQ ID NO: 76883 - protein, 75 aa, Gossypium hirsutum
  unsure (1)..(75): unsure at all Xaa locations
  Clone ID: LIB3582-014-P1-K1-F2.pep
MFMVSHSYVFQSCTXVALDFVSPENIQECLRLTEEFRQLPKNHRAREDKLEIRKMIIYAVERAVKELSELISTPN

SEQ ID NO: 76884 - protein, 198 aa, Gossypium hirsutum
  Clone ID: GOSHI-09MAY01-C2087_1.pep
SPVTFQMMEDMRNQFIDLLSDIGFVDKSPGASAYNQYSHDLEMVCAVLCAGLYPNVVQCKRRGKRTAFYTKEVGKVDIHPASVNAGVHLFPLPYMVYSEKVKTTSIFVRDSTNISDYALLLFGGNLIPSKTGEGIEMLGGYLHFSASKSVLDLIRKLRGELDKLLNRKVEEPGFDISVEGKGVVSAVVELLHSQNVRY

SEQ ID NO: 76885 - protein, 281 aa, Gossypium hirsutum
  unsure (1)..(281): unsure at all Xaa locations
  Clone ID: GOSHI-09MAY01-C2047_1.pep
SGRKQQEPSSQFQDACPGIRHVLKDVNCKAKPWEILAIVGPSGAGKSSWLEIXLAGKFTPQSGSIFVNQSPIDKAQFRKISGYVTQTDNLFPLLTVEETLMFSAKLRLRLPQAQLSSRVKSLIQELGLEHVAMARVGDDRVRGISGGERRRVSIGVDVIHDPKVLILDEPTSGLDSTSALQIIDMLKVMAETRGRTIILSIHQPGFRXVRLSSSMLLMADGSILHHGTVDQLGANLRGMGLQLPLHVNIVEFAIESIETIQQQRKGQLQVQRTRDFSPHHN

SEQ ID NO: 76886 - protein, 490 aa, Gossypium hirsutum
  Clone ID: GOSHI-09MAY01-C2077_1.pep
MAESKSDTDFLKEFYIPAYIFNDETKFSDVRDAPKFPVLVFINSKSGGQLGGDLLNTYRSVLNEHQIFDVGEEAPDKVLRKVYTRLEKLKQEKDEFATNIHERLRIIVAGGDGTAGWLLGVVCDLKLPHPPPIATVPLGTGNNLPFSFGWGKKNPGTDRNSVLSFLEQVMKAKEMKIDNWHILMRMRAPKEGPCDPIPPLELPHSLHAFGRVSSTDELNMEGYHTFRGGFWNYFSMGMDAQVSYAFHSERKLHPEKFKNQLVNQSTYAKLGCTQGWFAASVFHPSSKNVAQLAKVKIMKKHGQWQDLHIPQSIRSIICLNLPSFSGGLNPWGTPSGRKKNERDLTAPYVDDGLLEVAGSRDAWHGLALLAPKGHGTRLAQAHRIRFEFHKGAADHTYMRIDGEPWKQPLPKDDDAVVVEISHLGQVNMLATQNCRSKSVSDVSSSTSHHNGEEDDDFSDEDDSRAEPEFRKFGAADTFRIPDEIDISQLS

SEQ ID NO: 76887 - protein, 88 aa, Gossypium hirsutum
  Clone ID: LIB3166-049-P1-K1-H6.pep
MAESESDSDFLKEFYIPAYIFNDETKFSDLRDVPEFPVLVFINSKSGGQLGGDLLNTYRSVLNEHQIFDVGEEAPDKVLRRVYTRLEK

SEQ ID NO: 76888 - protein, 218 aa, Gossypium hirsutum
  Clone ID: GOSHI-09MAY01-C2007_1.pep
MAILYAVVARGTVVLAEFSAVTGNTGAVARRILEKLPQEADSRLCLSQDRYIFHILRSDGLTFVCMANDTFGRRVPPPVREDIHMRFMKNYGRVARYAPAYAMNDEFSRVSHQQMEFFSSSPSADTLNRVRGEVGEIRSIMVENIEKILERGDRIELLVDKTATMQDGAFHFKKQSKRLRQALWMKNAKLLAMLTCLIVLILYLIIAACCGGITLPSC

SEQ ID NO: 76889 - protein, 181 aa, Gossypium hirsutum
  Clone ID: GOSHI-09MAY01-C2027_1.pep
MAIQAQLYSDNIGFPLCSSYDYNGGNGSDGFNSFHFGPQWKPQLQFQEQLQNHEIDEFIKSQDERLRLLLQEQRNQQVSTMVKKLESKASFLEEEITKAKNRTMELQILMNKLEMENQTWQRVAQENEAMVVSLNNMLQQLQQQLDNGVDDAGSCCEETEENRGFGVVERTMMVCRCCDSR

SEQ ID NO: 76890 - protein, 138 aa, Gossypium hirsutum
  Clone ID: GOSHI-09MAY01-C2397_1.pep
MAQIQVQGQNGSVNNGAGGGNNQFVPTSLYVGDLDSSVTEAQLYDYFAHVGPVLTVRVCKDLSTRRSLGYGYVNYGNPQDAARAWDLLNFTLLNGRPIRIMYSNRDPSLRKSGAGNIFIKNLDKGIDHKPLHDTFSAF

SEQ ID NO: 76891 - protein, 122 aa, Gossypium hirsutum
  unsure (1)..(122): unsure at all Xaa locations
  Clone ID: LIB3585-001-P2-N1-E9.pep
MHIDAVDLRCSSTRXGFMLGNLDSSVTEAQLYDYFAHVGPVLTARDCKDMSTRRTLGYGHVDYRNSQDAARALDLLNLTLIDGKPIXIMFSNRDPNLKKSGAGNIYIKNFYLGTDHNGLHYT

SEQ ID NO: 76892 - protein, 127 aa, Gossypium hirsutum
  Clone ID: GOSHI-09MAY01-C2367_1.pep
NLELLLKEIELLYGLANFLQKKSCLLAYLLSCHPQMASSCIFFTRLCYSPSSLAGGDQSNYHVMPCTTDYRGQLKSVMPCLQFLNSCCLNGETCFAIMSSDPENLDLTLICHHLDLVHHATLLHSYV

SEQ ID NO: 76893 - protein, 258 aa, Gossypium hirsutum
  Clone ID: GOSHI-09MAY01-C2247_2.pep
MHSICFQATGVPGSNYIFDSCSPALAISKPINLRFCGLRKEAFGFSGLTHSSSGRVHFSSRGHSKKVSASAESNGSPPKSFDYDLIIIGAGVGGHGAALHAVEKGLKTAIIEGDVVGGTCVNRGCVPSKALLAVSGKMRELQSEHHMKALGLQVSAAGYDRQGVADHANNLASKIRSNLTNSMKALGVDILTGVGTIVGPQKVKYGKVGFPDNIVTAKNIIIATGSVPFVPKGIEVDGKTVITSDHALKLESVPDWIA

SEQ ID NO: 76894 - protein, 388 aa, Gossypium hirsutum
  unsure (1)..(388): unsure at all Xaa locations
  Clone ID: GOSHI-09MAY01-C2247_1.pep
PTRPILTGFGTIVGPQKVKYGKVGFTDNVVTXRPQDILAAAGSVPFVPKGIEVDGKTVITSDHALKLESVPDWIAIVGSGYIGLEFSDVYTALGSEVTFIEALDQLMPGFDPEIGKLAQRVLINPRKIDYHTGVFATKITPAKDGKPVIIELIDAKTKEPKDTLEVDAALIATGRAPFTNGLGLENVNVVTQRGFVPVDERMRVIDTNGNLVPHLYCIGDANGKMMLAHAASAQGISVVEQVTGRDHVLNHLSIPAACFTHPEISMVGLTEPQAREKAQKEGFEVGVAKTSFKANTKALAENEGEGLAKLIYRPDNGEILGVHIFGLHAADLIHEASNAIALGTRIQDIKXAVHAHPTLSEVLDELFKSATVKAAASSHGPVSEPVAV

SEQ ID NO: 76895 - protein, 144 aa, Gossypium hirsutum
  Clone ID: LIB3120-011-Q1-K1-B4.pep
SRTRGRTRGTNSMKALGVDILTGFGTIVGPQKVKYGKVGFTDNVVTAKDIIIATGSVPFVPKGIEVDGKTVITSDHALKLEFVPDWIAIVGSGYIGLEFSDVYTALGSEVTFIEALDQLMPGFDPEISKLAQRVLINPRKIDYH

SEQ ID NO: 76896 - protein, 210 aa, Gossypium hirsutum
  Clone ID: GOSHI-09MAY01-C2217_1.pep
METKLHPFDSVEDNELPAGGLKDGPRGIMHTRSDLELRPQWRKSLRSAVKVNTNKNLLAMPVGIKQKEHVDDVVKKFRTENFTIVLFHYDGKVDGWWDLDWCDRAVHIVAHYQTQWCLAVRCLHPHIVSTYDYIFLWDEDLGVEHFNPGRYLEIVKSEGLEISQPALDPNSTEIHHRITIRSRMKKFHRRVYELRGKTRCSNISEGPPCS

SEQ ID NO: 76897 - protein, 300 aa, Gossypium hirsutum
  unsure (1)..(300): unsure at all Xaa locations
  Clone ID: GOSHI-09MAY01-C2207_1.pep
YDDLESIHMAPYLDCISQGVSTIMASYSSWNGRQLHADHFLLTEILKDKLGFKGFVISDWEALDRLTEPRGSNYRYCISTAVNAGIDMVXIYKQFMDDLTFLVESGEVLMSRIDDAVERILRVKFVAGLFEYPFSDRSLLDIVGGKLHRELAREAVRKSLVLLKNGKNPENPFLPLDRTAKRILVAGSHADNLGYQCGGWTSTWFGGSGRITIGTTILDAIRESAGDKTEVIYDECPSTNTFSRXRYSFAIVVVGEPPYAETLGDNKELVIPFNGSDIISSVADKIPTLAILISGRPLVL

SEQ ID NO: 76898 - protein, 226 aa, Gossypium hirsutum
  unsure (1)..(226): unsure at all Xaa locations
  Clone ID: GOSHI-09MAY01-C3977_1.pep
SYVNMLIRALPGSMDEEADFGGTGNKIVRIAETEGQQIALLANASLLADELLPRAAMKLSPSQASYKDDHRRRTSDRQNRHPEQREWKRRLVGSVERLKNTFCQQHALDLIFTEEGDSHLTAEMYINMDGTAEEVEWFPSPIFQELFAKLNSIASLAADMFVGRERFATXLWMRLTETVIIWLSEDQSFWDDIEEGPRPLGPLGLQQLYLDIKFVICFASQGRYLS

SEQ ID NO: 76899 - protein, 367 aa, Gossypium hirsutum
  Clone ID: GOSHI-09MAY01-C3967_1.pep
AQFQIPFPRAFFAHYLSRSLSLSLHFHSLLFSTNPKKPKMQYKNLGRSGLKVSQLSYGAWVSFGNQLDVKEAKSLLQCCKDNGVNFFDNAEVYANGRAEEIMGQAIRELGWKRSDIVVSTKIFWGGPGPNDKGLSRKHIVEGTKASLKRLDMDYVDVLYCHRPDTQTPIEETVRAMNYVIDKGWAFYWGTSEWSAQQITEAWGVAERLDLVGPIVEQPEYNLLTRHKVESEYLPLYTNYGLGLTTWSPLASGVLTGKYNKGNIPSDSRFALENFKNLANRSLIDDVLRKVNGLKPIADELGVPLAQLAIAWCAANPNISSVITGATKESQIQENMKALDVIALLTPAVMEKIETVFQSKPKRPDSYR

SEQ ID NO: 76900 - protein, 238 aa, Gossypium hirsutum
  Clone ID: GOSHI-09MAY01-C3927_1.pep
MADRFFPNVLPDFVPETTQNEQQEIGDTLIKLLSMPYSSLSQHFKRTALDLKETVTLETWGITLQKVSDFTLYCGSLGTAFLLFKSYQLTNNTNDLSLCLAIVDACNSASLSSRDATFLCGRAGVCALGAVAAKYSGNQESLNHYLTPFREIKLSRDLPDELLYGRAGFLWACFFLNKHLGEGTIPSTTTRAVVDEIIKNGRALGKKGGGSPLMFEWYGEKYWSAAHGLAGIIYVVMD

SEQ ID NO: 76901 - protein, 161 aa, Gossypium hirsutum
  unsure (1)..(161): unsure at all Xaa locations
  Clone ID: GOSHI-09MAY01-C3857_2.pep
PRVRLCLCSNEIGQADGQDHDLFKYKNFSIYDNEDSNISSIFEEVCDFIDHVGHTGGRVLVHCFEGKSRSATVVIAYLMLRKNLTLLEAWNSLKRAHRRAQPNDGFARILLDLDRKLHGKVSMEWHQRKPMMKVCPICGKNAGLSSSSLXLYLQKAHIKLS

SEQ ID NO: 76902 - protein, 191 aa, Gossypium hirsutum
  Clone ID: GOSHI-09MAY01-C3857_1.pep
RFRFDHAYARDGWHGKFYKGNGEPHRSLRLTGKLRDFNKFAKVDAESSKELEQWNEMLKNDAVKLCQDNNFNTGFFEGSDNNSVVDAYELKVRLEHILDRIALISEAANTEKPSLITSCLFIGGALAARSAYTLQHFGITHILCLCSNEIGQADSQYHDLFEYKNFSAHLHVDPNLGSICGRYNHSGNGKW

SEQ ID NO: 76903 - protein, 192 aa, Gossypium hirsutum
  unsure (1)..(192): unsure at all Xaa locations
  Clone ID: GOSHI-09MAY01-C3847_1.pep
GIKLGMDFDAVRQGSSIVHVFPFNSEKKRGGVAIRLPDSKVHIHWKGAAEIVLAACTRYLDTNGEAVAMDEEKMAFFEKAIETMAAGSLRCVAIAXASYDSDKVPTNEEELAKWALPEDDLVLLAVDGIKDPRRPSVKKSVQLCQKAGVKVRMVTGDNLKTARAIALECGILSSDALESILIEGKVFRSLSD

SEQ ID NO: 76904 - protein, 268 aa, Gossypium hirsutum
  Clone ID: GOSHI-09MAY01-C3867_1.pep
RDGDRYGRDYEDRYGRDGDRDDDYRGRSRSVDDYQYGTRSRSSDRDRAFDEDGASSRGSGDRADDHSQDGRRHERKQSEQNIGAPPSYEEAVTETQSPVRGERVGQTSVAAAPGASPPPPTNNPNQAASDLSNSASPPNQQAEAFDEFDPRGSFSVAPTPAPVPAPAAVPTATAVPATAVPTASTNAEINLLDALSDSFAIVPVTPEIPATEADAPANSGAMPTFAANQSASNFGNQGFDDPFGDNPFKAVASTDSAPAVQQISTSMP

SEQ ID NO: 76905 - protein, 75 aa, Gossypium hirsutum
  Clone ID: GOSHI-09MAY01-C3817_2.pep
IFGFEEIESPDFGEFKVIWLNLPGSFPMHLIERNPLTKLPEGPYSSTAAVADPSNLPRGHHICFTVSNFDSFVQS

SEQ ID NO: 76906 - protein, 142 aa, Gossypium hirsutum
  Clone ID: GOSHI-09MAY01-C3817_1.pep
MAVAKAACLNHISRESSDIRRLANFYKEIFGFEEIESPDFGEFKVIWLNLPGSFPMHLIERNPLTKLPEGPYSSTAAVADPSNLPRGHHICLTVSNFDSFVQSLKDKGIQTFQRSLPNGKVRQIFFFDPDGNGLEVASWEAP

SEQ ID NO: 76907 - protein, 153 aa, Gossypium hirsutum
  Clone ID: GOSHI-09MAY01-C3807_1.pep
MALQCRLSGATFQSLKLATIPISSSSSRFIFRTLPKTLNLALFSRHSAPKAPPFSVLIRTLSAPAVAAAPAAETSDIKVVKPQWNAAIDFKWITDNKEAVAANIMNRNSNADLELVLQLYDKMLNLQKEVERLRGERDNVANKMKGKLEPAER

SEQ ID NO: 76908 - protein, 108 aa, Gossypium hirsutum
  unsure (1)..(108): unsure at all Xaa locations
  Clone ID: GOSHI-09MAY01-C3827_1.pep
MIDNCLGAQRSRKIQRALRHCKVTILCLVLTLVVLRGTIGAGKFGTPGQDLAEIRDHLYSRKRGEPHRVLEEVQTXRPSDNHDGADTNAGTNNYNEFDINKILIDEGP

SEQ ID NO: 76909 - protein, 196 aa, Gossypium hirsutum
  unsure (1)..(196): unsure at all Xaa locations
  Clone ID: LIB3543-038-Q1-K1-D1.pep
RPPTPSAHAVRHSSCLVPQPSSSYVCTIRSRLNSGTPPTSSIRTILYSRTRANRDLRPHKKLQTSVVQITTTADTNAGTNNYNEFDINKILIDEEPDISKRDPNAPYSLGPKISDWDEQRSRWLQDNPNYPNFIGPNKPRVLLVTGSSPKPCENPVGDHYLLKSIKNKIDYCRLHGIEIFYNMXALLDAEMAGFWA

SEQ ID NO: 76910 - protein, 247 aa, Gossypium hirsutum
  Clone ID: GOSHI-09MAY01-C3577_1.pep
MALLCASTSVIFSSSSSSERPSFASLKRTSPSNQSSFLGFFPVVALSKPSSARTTTLSFSKRDFRVCCRDLSLVPENQRWMFEESEADGPDIWNNTWYPKAKDHINTEKTWYIVDAADKILGRLASTIAVHIRGKNLPTYTPSVDMGAFVIVVNAEKVAVSGKKRTQKLYRRHSGRPGGMKVETFNQLQQRIPERIIEHAGRGMLPKGRLGRALFNHLKVYKGADHPHEAQKPIELPIRDKRVQKQR

SEQ ID NO: 76911 - protein, 175 aa, Gossypium hirsutum
  unsure (1)..(175): unsure at all Xaa locations
  Clone ID: LIB3825-010-Q1-K6-G12.pep
KNTRSSLPLPLPPSFLDIWNNTWYPKAKYNKNTEKKTWYIVDATDKILGRLASTIAVHIRGKNLATYTPSVDLGAFVIVVNAEKXVVASGKKRXKKLYRRHSGRLGGMKXETFNQLQWIIPERIIKHAVHGMLPKXRLGRALFNHLKVFKGPDHPHDAQKPIELPIRDKRVQKQR

SEQ ID NO: 76912 - protein, 85 aa, Gossypium hirsutum
  Clone ID: LIB3145-040-Q1-K1-B6.pep
KKRTQKLYRWLSGRPGGMKVETFNQLQQRIPERIIEHAVRGMLPKGRLGRALFNHLKVYKGPDHPHDAQKPIELPIRDKRVQKQR

SEQ ID NO: 76913 - protein, 112 aa, Gossypium hirsutum
  Clone ID: LIB3120-054-P1-K1-F4.pep
MAILCASTSTIFSSSERTSFGSLKKTIPSNQSSFLGFFPVAALSKPGSVLPTTLSFSKRDFRVCCQDLSLVLENQRWMFEESEADGPDIWNNTWFPKAKDHIIPEKTWFVVD

SEQ ID NO: 76914 - protein, 198 aa, Gossypium hirsutum
  unsure (1)..(198): unsure at all Xaa locations
  Clone ID: GOSHI-09MAY01-C3527_2.pep
GNEEASKRFADINNAYEVLSDSEKRGIYDRYGEEGLXQHAASGSRGGMGVNIQDIFSSFFGGGSVEEEERMVKGDDVSVELDATLEDLYMGGTLKVWREKNILKPAPGKRRCNCRNEVYHKQIGPGMFQQMTEQVCEQCQNVKYEREGYFVTVDIEKGMQDGQEVVFYEDGEPIIDGEPGDLKFRFHSAPHDRFRREG

SEQ ID NO: 76915 - protein, 230 aa, Gossypium hirsutum
  unsure (1)..(230): unsure at all Xaa locations
  Clone ID: GOSHI-09MAY01-C3527_1.pep
MALPRSKLLFLLFALSFAIVAIAGYASISPVSLSLKKCVHICSWWCFCCRKSYYDILQVPKGASDEQIKRAYRKLALKYHPDKNPGNEEANKRFADINNAYEVLSDSEKRGIYDRYGEEGLKQHATSGGRGGMGVNIQDIFSSFFDGGSVEEEERIVKGDDVIXVELGATLEHLFMGGTLKVWREKNILKPAPGKRRCNCRNEVYHKQIGPGMFQQMTEQVLWLVFFLFD

SEQ ID NO: 76916 - protein, 118 aa, Gossypium hirsutum
  unsure (1)..(118): unsure at all Xaa locations
  Clone ID: LIB3189-014-P1-K1-H4.pep
NIQDIFSSFFXLRGHSDEEERRAQNLQAWVSLIPTLXDPYIGGTLKVWREKNILKPAPGKRRCNCRNEVYHKQIGPGMFQQMTEQVCEQCQNVKYEREGYFVTVDIEKGMQDGQEVVF

SEQ ID NO: 76917 - protein, 204 aa, Gossypium hirsutum
  Clone ID: GOSHI-09MAY01-C3497_4.pep
FNIICTFVYLLKSTLSNICTHFLFSFFFFFFFYFFFFFFFFFFFFFFFFFFFFDSSNRECTLDLVDNSFQEDIARKILQIPPAEIEHEDFQVWKGELSGGFSVRSAYKLLQIANSDPSYYLLQTEIKEFYKKLWNLQMPSKISFTIWRISWDFLPNFVNLRIRRVVSNDRCPRCSLAAKGSLHVFRECPGSSPTSPDPRVRGRV

SEQ ID NO: 76918 - protein, 129 aa, Gossypium hirsutum
  Clone ID: GOSHI-09MAY01-C3497_3.pep
KNFTRNCGTYRCHQKLHLQSGGSLGIFLPNFVNLRIKRVVSNDRCPRCSSEVEGSLHVFRECPGSSRGATTANVYYSVTRYGGYGSRVRIHFDAAYTSKTFSSASGLVGRDYHQNLLKPGHGFGCWLNT

SEQ ID NO: 76919 - protein, 283 aa, Gossypium hirsutum
  Clone ID: GOSHI-09MAY01-C3497_2.pep
MCWRVDRGDRTPIWDNSFQEDIARKILQIPLAEIEHEDFQVWKGELSGEFSVRSAYKLLQIANSDPSYYLLQTEIKEFYKKLWNLQMPSKIAFTIWRISWDFLPNFVNLRIRRVVSNDRCPRCSLAAKGSLHVFRECPGSSRGATRANVYYSVTRYGGYGSRVRIHFDAAYDSKTFSSASGLVGRDLRGNVKVLKTVIHRNVPSSFAAEAYACLDGAKLGVLLRIQSVILMGDSKTVIKNARRIPQINQSSEPLLEIFRTRKPIFKNSFFSIPIDRRTWMLTD

SEQ ID NO: 76920 - protein, 93 aa, Gossypium hirsutum
  Clone ID: GOSHI-09MAY01-C3497_1.pep
QIYGIPSVGYRSKIWGRKCIFSSFFIAWIWRVLKGLPWTFNNHLLILSKLKRGEDPLKIPLVYVSVWVQIHDVPIGLFSENLVKLGGTLLELS

SEQ ID NO: 76921 - protein, 103 aa, Gossypium hirsutum
  Clone ID: GOSHI-09MAY01-C3457_7.pep
PVDPAFAPRPPRVRPASAPRPDQLKWSFSGAFEARQSLIVRGLVPMLADPRHPAESTSASNESVLKVALDHGKAAGVIKSHDRVVVCQKVGDASVVKIIELED

SEQ ID NO: 76922 - protein, 133 aa, Gossypium hirsutum
  unsure (1)..(133): unsure at all Xaa locations
  Clone ID: GOSHI-09MAY01-C3457_6.pep
MHSSHLLLEEPIRMASILEPSKATFFPAMTKIVGTLGPRSRSGEVLSGCLTAGMSVARFDFSWHDPEYHQETLENLKAAVKLTKKLCAVMADTVGPELQVVNKCEKATSLEAHAXVFSTPDEGQEASSNLLPI

SEQ ID NO: 76923 - protein, 66 aa, Gossypium hirsutum
  Clone ID: GOSHI-09MAY01-C3457_5.pep
GTLSTISNPPKPGANTPQVLYIVIHRFHRSDSNDNPKAKSSISSLIFDLDIMTTRASRTFWQTANR

SEQ ID NO: 76924 - protein, 75 aa, Gossypium hirsutum
  Clone ID: GOSHI-09MAY01-C3457_4.pep
MHSTHLLLEEPIRMASILEPSKASFFPAMTKIVGTLSPKSRSIEVISGCLKAGMSVARFDFSWHDPAYHQETLEN

SEQ ID NO: 76925 - protein, 254 aa, Gossypium hirsutum
  Clone ID: GOSHI-09MAY01-C3457_2.pep
MGRKFFVGGNWKCNGTTEEVNKIVSTLNAGEVPSQDVVEVVVSPPFVFLPLVKTSLRPDFHVAAQNCWVKKGGAFTGEVSAEMLVNLSIPWVIIGHSERRLILKESNEFVADKVAYALAQGLKVIACIGETLEQREAGSTVAVVAEQTKAIAAKISNWTDVVLAYEPVWAIGTGKVATPAQAQEVHFELRKWLQANVSPEVAASTRIIYGGSVTAANCKELAAQPDVDGFLVGGASLKPEFIDIIKSAEVKKNA

SEQ ID NO: 76926 - protein, 527 aa, Gossypium hirsutum
  Clone ID: GOSHI-09MAY01-C3457_1.pep
MHSTHLLLEEPIRMASILEPSKASFFPAMTKIVGTLGPKSRSVEVISGCLKAGMSVARFDFSWHDPEYHQETLENLKAAVKLTKKLCAVMLDTVGAEMQVVNKSEKAISLEADATVVLTPDAGQEASSELLPINFDGLSKAVKKGDTIFIGQYLFTGSETTSVWLEVSEVKGDDVVCVIKNSATLAGSLFTLHGSQIRIGLPTLTDKDKEVISTWGVQNKIDFLSLSYTRHAEDVRQAREFLSKLGDLYQTQIFAKIENIEGLNHFDEILQEADGIILSRGNLGIDLPPEKVFLFQKAALYKCNMAGKPAVVTRVVDSMTDNLRPTRAEATDVANAVLDGSDAILLGAETLRGLYPVETISTVGKICAEAEKVFNQDMYFKKTVKYVGEPMTHLESIASSAVRAAIKVKASVIICFTSSGRAARLIAKYRPTMPVLSVVIPRLKTNQLKWSFSGAFEARQSLIVRGLFPMLADPRHPAESTSASNESVLKVALDHGKAAGVIKSHDRVVVCQNVGDASVVKIIELED

SEQ ID NO: 76927 - protein, 107 aa, Gossypium hirsutum
  unsure (1)..(107): unsure at all Xaa locations
  Clone ID: uC-gsflmaxxa096c06b1.pep
MLLEEPIRMATILEPSKASXFPPLTKIVGTLSPKSRSIEVISGCLKAGMSVARIDSSWHDPEYHQETXENLKAAVKLTKKLCADMLDTAGAEMHEDLYIEKAISLEA

SEQ ID NO: 76928 - protein, 119 aa, Gossypium hirsutum
  Clone ID: uC-gsflmaxxa003d03b1.pep
FSRPALYKCNMAGKPAVVTRVVDSMTDNLRPTRAEATDVANAVLDGSDAILLGAETLRGLYPVETISTVGKICAEAEKVFNQDMYFKKTVKYVGEPMTHLESIASSAVRAAIKVKYILS

SEQ ID NO: 76929 - protein, 85 aa, Gossypium hirsutum
  Clone ID: LIB3149-031-Q1-K1-F12.pep
KNYTKNKSIFFGFTAFRFYGSQRIKKKSLRPLNAKARLNDFQSKKGKSIFFFCCNRRKRCIRLICYSKSQSGFWRRLRNCFQSKN

SEQ ID NO: 76930 - protein, 101 aa, Gossypium hirsutum
  unsure (1)..(101): unsure at all Xaa locations
  Clone ID: LIB3147-035-Q1-K1-C5.pep
HSFSYACTDSCYEPVSSIGAGKGDTPPQTIEVHFELRKWLQANVSPEVAESTPIIYGGSVTAANCEELSSHPDTHXIIGCWSXLKPEFIDIIKSAEVKKNA

SEQ ID NO: 76931 - protein, 83 aa, Gossypium hirsutum
  Clone ID: LIB3166-022-P1-K1-E1.pep
IGESLNAGEGPSPDVVESVVSPPFLFLPLVKTSLRPEFQVAAQNCWVKKGGAFTGEVSAEMLVNLSIPWVIIGHSERRLILME

SEQ ID NO: 76932 - protein, 51 aa, Gossypium hirsutum
  unsure (1)..(51): unsure at all Xaa locations
  Clone ID: LIB3145-009-Q1-K1-E10.pep
LTXIIYLTSFFSANYNEPRPYFDVDALFINVTTLNPKFIDIIKSPEMNKNA

SEQ ID NO: 76933 - protein, 45 aa, Gossypium hirsutum
  Clone ID: uC-gsronu33B018a04b1.pep
KLVFNFLYKTLIMEQILNLPFPSISYCKYSQSFQPKTLGILLHLS

SEQ ID NO: 76934 - protein, 59 aa, Gossypium hirsutum
  Clone ID: LIB3120-053-P1-K1-F8.pep
MGRKFFVGGNWKCNGTTEEVNKIVSTLNAGEVPSQDVVEVVVSPAFAFLPLVKTLLIPD

SEQ ID NO: 76935 - protein, 242 aa, Gossypium hirsutum
  unsure (1)..(242): unsure at all Xaa locations
  Clone ID: GOSHI-09MAY01-C3417_1.pep
PTRPAILSPTFKVREFQVNEIVPFPISLSWKGSVPDAQMGEAEQEQLVFPKGNPIPSVKAXTFHKTSTFSVDVQYSDVSDLQAPAKISTYTIGPFPTLRSEKPKLKVKVRLNLHGIVSVDSATLLEEEEVEVPVSKEPAKEDAKMETDEKPNDTSAPGANETDVNMQDAKGTAEAAGVENGVPQSGDKPVQMETDTKVEAPKKKVKKTNVPVAELVYGAMVSGDLQKXVEKEFEWLSRSVME

SEQ ID NO: 76936 - protein, 182 aa, Gossypium hirsutum
  Clone ID: GOSHI-09MAY01-C3437_1.pep
MGFSMQPYGIQSMLKEGHKHLSGLDEAVLKNIDACKQLSTITRTSLGPEGMNKMVINHLDKLFVTNDAATIVNELEVQHPAAKILVLAGKAQQEEIGDGANLTISFAGELLQNAEELIRMGLHPSEIISGYTKSISKAIEVLGELVEKGSETMDVRNKEQVVTRMKAAVAGNTWTGDILCPL

SEQ ID NO: 76937 - protein, 243 aa, Gossypium hirsutum
  unsure (1)..(243): unsure at all Xaa locations
  Clone ID: GOSHI-09MAY01-C3427_1.pep
KAQTEVAVSELTSSVNSLSLSTPWAGVVSSLEPKVSRVSKKEQXISESAIVKPESSLISVSKKSPLHDLLAEEVLAKSRERDADVPGTISTSSAHVTTTNVEPTDNDNFIEAKETKRSRKKSAKAKGAGAKVSGPPSTADAVLVSASTVEKGKSSRPAQAEMELLPSIPSGPSLGDFVPWKEEQVNPSPAPAWSADSKKLPKPTSLRDIQKEQKRNSSVQPTNPIMTPHKSQSSQSTPAGVSS

SEQ ID NO: 76938 - protein, 153 aa, Gossypium hirsutum
  Clone ID: GOSHI-09MAY01-C3767_1.pep
MGRQPCCDKLGVKKGPWTAEEDKKLINFILTNGQCCWRAVPKLAGLRRCGKSCRLRWTNYLRPDLKRGLLSETEEQLVIDLHARLGNRWSKIAARLPGRTDNEIKNHWNTHIKKKLIKMGIDPVTHEPLNKEARTQESSSHAHHSADNHTTEN

SEQ ID NO: 76939 - protein, 245 aa, Gossypium hirsutum
  unsure (1)..(245): unsure at all Xaa locations
  Clone ID: GOSHI-09MAY01-C3627_1.pep
MKPKLSVPLIACRKRSSIAAKSSTSSSGQEKKGSCXASLMNEKPALGWKQHDKSIEESPVAKKRTRESSASGLRKASKNAKARSNTNTNKNSGTNANAAISSKGGSSNDNSESKGGEKEKSNSKTASSKKPSAANFLNRMRSSLSGNEPLTETLKGVISSDKGKGGGDAGEHKKNSTSSKGDQQKDRTPTPRTRSGGKRTSPAXRSTGRPPKRVPATQSAPPGKRGREAVENHSGGGQAKKRSRK

SEQ ID NO: 76940 - protein, 261 aa, Gossypium hirsutum
  unsure (1)..(261): unsure at all Xaa locations
  Clone ID: GOSHI-09MAY01-C3187_1.pep
PGSFFLCENHPFPPPSNNNSGSGGANGSEDNNQHEKQPLQDSTNNKRGGESDHEMHIWTERERRKKMRNMFSNLHALLPHLSPKADKSTIVDEAVKHIQTLEKTLQKLQKQKLDRLQEGLNPIDLGHQDTTREAFMADQVLSGNDAAAKDLIIKSNSVMVAQPRLQFQTWTSSNVVLNICGKEHXISVCSPKKLGLCTTVCCILEKHHLEVISAHVSSQSNRSIFMIQAHVGSSGAYNHQVSEVDEIFKQAAAEIMFCLTS

SEQ ID NO: 76941 - protein, 134 aa, Gossypium hirsutum
  Clone ID: LIB3582-059-P1-K1-F2.pep
MVEGREEKKKISIWDLPDVPMGQLPPHLELQRSRVSCNKDAPIHILNKRAIEASDKERPTPDLRTGDIVEIKLEVPENRRRLSVYKGIVISKQNTGIHTTIRIRRIIAGIGVEIVFPVFLQWQLKKFSLQTTHQ

SEQ ID NO: 76942 - protein, 111 aa, Gossypium hirsutum
  Clone ID: LIB3583-016-P1-K1-B11.pep
MAEGVGEEKKKFSIWDLPDVPMGQLPPYLELQRSRVSCNKDAPIHIESIQYSGAYASMGIDNSSQLDRFSNNFRVEVVRLNEDDMEFDMIGIDAAIANSFRRILIAELPTM

SEQ ID NO: 76943 - protein, 116 aa, Gossypium hirsutum
  Clone ID: LIB3272-029-P1-K1-E8.pep
MCLTESIQYSGAYASMGIDNSSRLDRFSNNFRVEVVRLNEDDMEFDMIVIDAAIANSFRRILIADLPTMAIEKVLIANKTSIIQDEVLAHRLGLVPIRVDPRLFDYLSENDQPNEK

SEQ ID NO: 76944 - protein, 294 aa, Gossypium hirsutum
  unsure (1)..(294): unsure at all Xaa locations
  Clone ID: GOSHI-09MAY01-C3107_1.pep
GKRCFVVSSNGTTGSRQRNRFILDYFPLGLPTGAKNKDGLGSTXTYWILEWIFHEVDQTYYVNEMGWWNGYSLYDWTAEFRFYWVNSKLEESGACNAPSHYHKFRVSAVPVYNCDSSGLYSAYTGVVPYAKDGLLFYNKHALYQTGNTPLALVWKDENCSQYVIDTDGKGEIPSQQQVVLELQDDRKLVTSDDPPVLFGCLDGDMVEKSGLHTGNLLRLAIGDGGLSFADGKLEKADLIYLGKSNRARAFADSYSKVLFQFMVRHSPLKIDDLLASINSANDQEKTPSDIEMVG

SEQ ID NO: 76945 - protein, 70 aa, Gossypium hirsutum
  Clone ID: GOSHI-09MAY01-C3097_1.pep
TDQHQHHHHQQHHHHQIPENIHHHTALSGVGFTTPGVFSGFRVPARIQGEEDEHDSIANKLSSASSDSHH

SEQ ID NO: 76946 - protein, 508 aa, Gossypium hirsutum
  unsure (1)..(508): unsure at all Xaa locations
  Clone ID: GOSHI-09MAY01-C3007_1.pep
PRVRLFPHPEEMQRKLAAKGRHMVTIVDPHIKRDESFHLHKDASQRGYYVKDATGKDYDGWCWPGSSSYPDVXIPRLGAWWAEKFSYDNYVGSTPSLYIWNDMNEPSVFNGPEVTMPRDALHLGGVEHRELHNAYGYYFHMATAEGLLKRGDGKDRPFVLSRAFFAGSQRYGAVWTGDNSADWDHLRVSVPMVLTLGLTGMTFSGADVGGFFGNPEPELLVRWYQLGAYYPFFRGHAHHDTKRREPWLFGERNTALMRDAIRIRYTLLPYFYTLFREANVSGVPVVRPLWMEFPSDEAAFSNDEAFMGGNSLLVQGIYTARAKHASVYLPGKESWFDLRTGTAYKGGKVHKLEVSEESIPAFQRAGTIVPRKDRFRRSSTQMVHDPYTLVIALNSSQAAEGELYVDDGKSYNFKHGAYIHRRFVFSNGHLTSSPVGNSRFSSDCIIERVILLGYTPGAKTALVEPGNQKAEIELGPLRFGGQHAAVAVTIPKPAVRVAEDCKKKILYD

SEQ ID NO: 76947 - protein, 76 aa, Gossypium hirsutum
  Clone ID: LIB3048-028-Q1-L1-A4.pep
HMVHSQCVLVSTSNVFPELVGPINSTLLFSSSTKSLATCLSLSPNSDASFFLKEWYILYSGCKLPQLTPSLPFVGR

SEQ ID NO: 76948 - protein, 93 aa, Gossypium hirsutum
  unsure (1)..(93): unsure at all Xaa locations
  Clone ID: LIB3272-043-P1-K1-C12.pep
RIYHSFKKNEASELGDNDKHVANDFVELEKSNVLLIGPTSSGKTLLXTLARIVNVPFVIADATSLTQMTMPRDALHLGGVEHRELYNAYGYYF

SEQ ID NO: 76949 - protein, 36 aa, Gossypium hirsutum
  Clone ID: LIB3189-053-P1-K1-D5.pep
MTMPRDALHLGGVEHRELYNAYGYYFHMATAGGLLK

SEQ ID NO: 76950 - protein, 88 aa, Gossypium hirsutum
  unsure (1)..(88): unsure at all Xaa locations
  Clone ID: uC-gsflmaxxa045b09b1.pep
RSTRTIIFSLGSLSKKLAKFAIGQQKAKKALAVAXYNHYXRIYHSFKKNEASESGDNDKHVANDFAELEKSNVLLIGPTSSGTVLYAE

SEQ ID NO: 76951 - protein, 65 aa, Gossypium hirsutum
  Clone ID: LIB3493-037-P1-M1-G6.pep
VPLVQMTMPRDALHLGGVEHRELYNAYGYYFHMATAEGLLKHRDGKVGPFVWSRAFFAGSQRGGA

SEQ ID NO: 76952 - protein, 179 aa, Gossypium hirsutum
  Clone ID: GOSHI-09MAY01-C3397_1.pep
MSKVTQMESLTRNDGFYFSDSLLGFALQAMVVESAIIATKSVAWLLMMMGSLPDGIDSHIKEPEAYTGFPLAQLHAVRKPSPENKDACDTEDDEDEDEKDEAGDDQDEDADEEDASGEDEGDPEDEPEANGDGASGDEDDEDEDDDDDDDDDGEEEEEEEEEEDEDEEEELQPPANMRK

SEQ ID NO: 76953 - protein, 102 aa, Gossypium hirsutum
  Clone ID: LIB3146-046-Q1-K1-C2.pep
LVLLYVDWENWSICFFRFPLAQLHAVRKPSPKNKDACDTEDDEDEEDEAGDDQDEDADEEDASGEDEGDPEDEPEANGDGASGDEDDEDEDDDDDDDDDGEE

SEQ ID NO: 76954 - protein, 103 aa, Gossypium hirsutum
  Clone ID: GOSHI-09MAY01-C3357_2.pep
MALQNIGASNSDDAFYRYKMPKMITKIEGRGNGIKTNVVNMVEIAKALARPASYPVKYFGCELGAQSKFDEKTGTSLVNGAHETAKLAGLLENFIKKYVQCYG

SEQ ID NO: 76955 - protein, 447 aa, Gossypium hirsutum
  unsure (1)..(447): unsure at all Xaa locations
  Clone ID: GOSHI-09MAY01-C3357_1.pep
MALQNIGASNSDDAFYRYKMPKMITKIEGRGNGIKTNVVNMVEIAKALARPASYTTKYFGCELGAQSKFDEKTGTSHVNGAHDTAKLAGLLENFIKKYVQCYGCGNPETEIIITKTQMITLKCAACGFVSDVDMRDKLTTFILKNPPEAKKSTKDKKAMRRAEKERLKEGEAADEELKKIKKEAKKKGSSTTSKVVASKGAVTKKKSKHSDEDHSPSQSQVDENEQVASDDDDDVQWQTDTSLAAAQQRIQEQLSAVTADMVMLSTNEEKKKSVKKTPEPDVKVHEKCFNTHEKLVNEIKEHLTKGSSPTQLKSFLGSLSGTSQEIMDALFTALFEDVGKGFAKEVTKKKNYLAAGAAAAAAANEEGCQMMLLHSMELFCGKASPEAAKEVALVIXVLYDDDILEEEFIMEWYQKGIGGSNKSSQIWKNVKPFIEWLQNAESETEEE

SEQ ID NO: 76956 - protein, 82 aa, Gossypium hirsutum
  Clone ID: uC-gsflnu33B072e11b1.pep
GRAHCTLFKKQDQERNIFVPRSSHATIPRARESLLLGLRLSILEPLDEGLDVLPYLRALITTTYTFRTRGRTRGRTRGRTRE

SEQ ID NO: 76957 - protein, 279 aa, Gossypium hirsutum
  Clone ID: GOSHI-09MAY01-C3327_1.pep
NDGFIVQAGKYNDILNSGTDFMELVGAHKKALSALDTVEASSVSERTTSEGECDIGTTNGKVQKEENQGNESGKVDDVGPKGQLVQEEEREKGQVGFSVYWKYITTAYGGALVPLILLAQILFQIFQIGSNYWMAWGSPMSADIKPPVGSFTLIMVYLALAIASAVCVFARSMLLRTAGYKTATLLFKKMHLCIFRAPMSFFDSTPSGRILNRASTDQSAVDMDIPYQVAAFAFSVIQLLGIIAVMSQAAWQIFVIFIPVVATCIWYQQYYISSARELS

SEQ ID NO: 76958 - protein, 123 aa, Gossypium hirsutum
  Clone ID: GOSHI-09MAY01-C3287_1.pep
IFAHRSVFVEISVSERILSDFDSLKGLVVYCTFSQMVFRDSLKQPKMKVEGVEHESPVMAGLQSHVSLQLPLPSNQNLRISPDDWHLLAYLLLAHKTNTKGVGQGLLDKEVRALTFGYMGLNG

SEQ ID NO: 76959 - protein, 212 aa, Gossypium hirsutum
  Clone ID: GOSHI-09MAY01-C3257_1.pep
KSIWATKGVLAEGLCWRVGKGTNISISRDNWIPVLPRVILPVMNSNLNDSKVAELIDSNSRTWKKELIEHTFPEDVTEMILSISLAEKPHEDFQVWSVEASGEFTVRSSYKLLQNIAYDPRAYALQIDYKDFYRKLWLLDIPSKIKITVWKISWNFLATRANMLLRRLTSTSVCPRCGFGSESMEHLFRECPGSFLSVQHPTVEFSVLQYGP

SEQ ID NO: 76960 - protein, 176 aa, Gossypium hirsutum
  Clone ID: GOSHI-09MAY01-C3247_2.pep
RNLGVHISKVRSLTLDVKVWDPSVISLFQSLGNTFANSVWEELLHSRNAFHVDLTPSFSKSDKPQLLLMGKPCHSDSISVKEKFIHAKYAEKLFVRKPKDEQHPQSVAQQIWEGVRANDKKAVYRYIVNCEVDLNAVYEQSSGSSLTLAKVMLLQEHTNVCNNSSSYITGDSSDRS

SEQ ID NO: 76961 - protein, 240 aa, Gossypium hirsutum
  Clone ID: GOSHI-09MAY01-C3247_1.pep
IRSSGLRVRARVRKPELLLMGKPCHSDSISVKEKFIHAKYAEKLFVCKLKDEQHPQSVAQQIWEGVRANDKKAVYRYIVSCEADLNAVYEQSPGPSLTLAKALLLQEHANVCNNSSSYITGDSSDRSSASSFNLVGTSEGQTTDDLDGCTLLHLACETGDIGMIELLLQYGANINVMDSRGQTPLHRCILKGKAAVAKLLLTRGADPQVLNRENKTPVELAVESDFDDSEVLALLSDSNG

SEQ ID NO: 76962 - protein, 180 aa, Gossypium hirsutum
  Clone ID: GOSHI-09MAY01-C3277_1.pep
MGWVWKDEPNDAVESTARDGDHCSTRKVIQSKCKTEEVEPGKFVRKCEKTEEVLRECFGRPVEVLQSTKEYTEDDVTEQMLKGSFSSGSHVEGSFDFPGLRSDMEAIERQFFGGINRFFDAAEEMKNNFFDIFGDAYGRGSSSAPSTRRGIPIEDHKQKEDSPKPTESGHIDLSGLAKDI

SEQ ID NO: 76963 - protein, 119 aa, Gossypium hirsutum
  unsure (1)..(119): unsure at all Xaa locations
  Clone ID: GOSHI-09MAY01-C3217_4.pep
HEKGCVSRXNSDAQQFNKKLNAAATNLQKQHPDLKIVVFDIYKALLDVVNTPSNYGFVEATRGCCGTGTVETTEFLCNPHTLGTCPNASQYVFWDSVHPSQAANQVLADTLIVQGIPLL

SEQ ID NO: 76964 - protein, 193 aa, Gossypium hirsutum
  unsure (1)..(193): unsure at all Xaa locations
  Clone ID: GOSHI-09MAY01-C3217_2.pep
MEVYSRRLMVLVFAFALVSIGYAQESNSTTLVPAILTFGDSVVDVGNNDYLPTIFRANYPPYGRDFANQKPTGRFCNGKLATDITAETLGFTTYPPAYLSPEASGSNLLIGANFASAGSGYDDRAASLNHAITLSQQVEYFKELQAKLAKVAGSXKSAAIIQDALYVLSAXGAGDFLQNYYVHPLVTHPYTPN

SEQ ID NO: 76965 - protein, 356 aa, Gossypium hirsutum
  Clone ID: GOSHI-09MAY01-C3217_1.pep
MDGYCSRRVIMFLVFAFAAISRGYGQESTTLVPAIITFGDSVVDVGNNDYLPTIFKANYPPYGRDFANKKPTGRFCNGKLATDITAETLGFTTYPPAYLSPEASGKNLLLGANFASAGSGYDDKAAMVNHAITLTQQLEYFKEYQAKLAKVAGSTKSASITKDALYVLSAGSGDFLQNYYVNPLLNHAYTPDQYGSFLIDTFTNFVKNLYGLGARKIGVTSLPPLGCVPLARTLFGYHEKGCISRFNTDAQQFNKKLNAAAANLQKQHPGLKIVVFDIFKALYDIVKSPSNYGFVEATKGCCGTGTVETTAFLCNPKAPGTCSNASQYVFWDSVHPSQAANQVLADALIVQGIALI

SEQ ID NO: 76966 - protein, 78 aa, Gossypium hirsutum
  Clone ID: LIB3197-005-P1-M1-G4.pep
MEVYSRRLMVLVFAWALVSIGYAQESNSTTLVPAILTFGDSVVDVGNNDYLPTIFRANYPPYGRDFANQKPTGRANYG

SEQ ID NO: 76967 - protein, 182 aa, Gossypium hirsutum
  unsure (1)..(182): unsure at all Xaa locations
  Clone ID: AI727391.1.pep
MEVYSRRLMFLVFAFALVSIGYAQESNSTTLVPAILTFGDSVVDVGNNDYLPTIFRANYPPYGRDFANQKPTGRFCNGKLATDITAETLGFTTYPPXYLSPEASGNNLLIGANFASAGSGYDDRAASLNHAITLSQQVEYFKEYQAKLAKVAGSXKSVSIIKDALYVLSAGSGDFLQNYYVN

SEQ ID NO: 76968 - protein, 98 aa, Gossypium hirsutum
  unsure (1)..(98): unsure at all Xaa locations
  Clone ID: LIB3146-008-Q1-K1-A4.pep
HASEDSWVDLFVRGRVGLEVDKALLDGANTPSNYGFVESTIGCXRTGTVKTTEFLCNAHTLXTCANAFHDVCWDSVHASQAANKVLDYTFFFQGIPLL

SEQ ID NO: 76969 - protein, 88 aa, Gossypium hirsutum
  Clone ID: LIB3189-008-P1-K1-G6.pep
CHSYSLSANTEELWLDQRCNREITAPIINILTFQTPTPTPTLTSNNDYLPTIFNANYPPYGRDFANKKPTGRFCNGKLATDITAETLG

SEQ ID NO: 76970 - protein, 122 aa, Gossypium hirsutum
  unsure (1)..(122): unsure at all Xaa locations
  Clone ID: GOSHI-09MAY01-C47_1.pep
MASSMSLKLTCVVVFCMVVGAPLAQGAISCGQITSALAPCIAYLKGNGAGFAPPAFCNGIRSLNSXAAITTPDRQTACRCIKSVASGIFGIRYSFAAGLPGKXCGINIPSKISPSSACKSIK

SEQ ID NO: 76971 - protein, 161 aa, Gossypium hirsutum
  unsure (1)..(161): unsure at all Xaa locations
  Clone ID: GOSHI-09MAY01-C47_2.pep
MVMKLPYLGSCLFLVFFSLVSIVASGSGKGLPILSFDEGYNQLFGDDNLVIHRDGKAVHLSLNERTGSGFVSQDLYLHGYFSASIKLPADYTAGVVVAFYMSNGDMFEKNHDEIDFEFLGNIRGKNWRIQTNIYGNGSTSAGREERXNLWFDPADDFHHYT

SEQ ID NO: 76972 - protein, 76 aa, Gossypium hirsutum
  Clone ID: GOSHI-09MAY01-C47_3.pep
MASSMSLKLACLLVLCMVVGAPLAQGDVTRADGVVILPRCLPLLIGNGNGADADVDAPACCDIVRGLLSSLLCGGV

SEQ ID NO: 76973 - protein, 330 aa, Gossypium hirsutum
  Clone ID: GOSHI-09MAY01-C47_4.pep
MTKLPSLFLVLTLVSVFVCGFGKRIPILSFDEGYSQLFGDDNLVLHRNGKAVHLSLNERTGSGFVSQDLYLHGYFSASIKLPADYTAGVVVAFYMSNGDMFEKNHDEIDFEFLGNIRGKDWRIQTNIYGNGSTSVGREERYNLWFDPADDFHQYTILWTDSQIIFYIDNIPIREFKRTAAMGGDFPSKPMSLYATIWDGSDWATNGGKYRVNYKYAPYVAEFSDLILHGCAVDPIEFSSKKCDTTSQSLELSATITPSQRSKMDSFRRKHMTYSYCYDQTRYKVPPVECVINPREAERLKRFDPVTFGGRRHHGKRHHRSRASRSEADTI

SEQ ID NO: 76974 - protein, 71 aa, Gossypium hirsutum
  Clone ID: GOSHI-09MAY01-C47_5.pep
MASSMSLKLACLLVLCMVMGAPLAQGAITRADGLVGLPRCLPFLSGNGDGADATGCCAIVMNALGSLCGDT

SEQ ID NO: 76975 - protein, 37 aa, Gossypium hirsutum
  Clone ID: GOSHI-09MAY01-C47_6.pep
AAGIPGINFGLASGLPGKCGVNIPYKISPSTDCSSVK

SEQ ID NO: 76976 - protein, 95 aa, Gossypium hirsutum
  Clone ID: GOSHI-09MAY01-C47_7.pep
MASSMSLKLACVVVLCMVVGAPLAQGTVTCGQVTGSLAPCINYLRGNGAGAVPQGCCSGIKSLNSAAQTTPDRQAACKCIKNSGANRGELQFPPK

SEQ ID NO: 76977 - protein, 275 aa, Gossypium hirsutum
  unsure (1)..(275): unsure at all Xaa locations
  Clone ID: GOSHI-09MAY01-C47_8.pep
SERTGSGFVSQDLYLHGYFSASIKLPADYTAGVVVAFYMSNGDMFEKNHDEIDFEFLGNIRGKNWRIQTNIYGNGSTSAGREERYNLWFDPADDFHHYTILWTASHIIFYVDNIPIREFKRTAEMGGDFPSKPMSLYATIWDGSDWATNGGXYKVHYQYAPYVAEFSDLVLHGCAVDPIEFSSKRCDGTQSWEQLTTSITPSQRSKMDSFRRKHMTYSYCYDQTRYKVAPPECVINPREAERLKKFDPVTFGGGRRHHGKRHHHMRASRSEADSI

SEQ ID NO: 76978 - protein, 120 aa, Gossypium hirsutum
  Clone ID: GOSHI-09MAY01-C47_9.pep
MASSMSLKLACVVVLCMVVGAPLAQGAVTCGQVTNSLAPCINYLRGSGAGAVPPGCCSGIKSLNSAAQTTPDRQAACRCIKSAAAGITGINFGLASGLPGKCGVNIPYKISPSTDCNSVK

SEQ ID NO: 76979 - protein, 207 aa, Gossypium hirsutum
  Clone ID: GOSHI-09MAY01-C97_1.pep
MASRRRMLLKVIILGDSGVGKTSLMNQYVNRKFSNQYKATIGADFLTKEVQFDDRLFTLQIWDTAGQERFQSLGVAFYRGADCCVLVHDVNVMKSFDNLNNWREEFLIQASPSDPENFPFVVLGNKVDVDGGNSRVVSEKKAKAWCASKGNIPYFETSAKEGFNVDAAFECIARNALKNEPEEEIYLPETIDVASGGRPQRSTGCEC

SEQ ID NO: 76980 - protein, 105 aa, Gossypium hirsutum
  Clone ID: GOSHI-09MAY01-C57_5.pep
MGNVPKTRKTYCKSKECRKHTLHKVTQYKKGKDSLAAQGKRRYDRKQSGYGGQTKPVFHKKAKTTKKIVLRLQCQGCKHVSQHPIKRCKHFEIGGDKKGKGTSLF

SEQ ID NO: 76981 - protein, 105 aa, Gossypium hirsutum; identical to SEQ ID NO: 74571
  Clone ID: GOSHI-09MAY01-C57_4.pep

SEQ ID NO: 76982 - protein, 105 aa, Gossypium hirsutum; identical to SEQ ID NO: 74571
  Clone ID: GOSHI-09MAY01-C57_2.pep

SEQ ID NO: 76983 - protein, 205 aa, Gossypium hirsutum
  Clone ID: GOSHI-09MAY01-C57_1.pep
MSRHPEVKWAQRTDKVFITVLLPDSKNAKVNLEPEGVFNFSATAGTDNNTYELKLDLFDKVNVEESKINIGVRSIFCILEKAEKVWWKKLLRGDGKAPHYVKVDWDKWVDEDEDKGLGDLDLGGMDFSNFGGMGGMGDMMGGMGGMGGMGDMMGGMGGMGGMDEFEDSDDEGQEVTKPDDKAEGDAKPEEHGIGSSEKKEAEPST

SEQ ID NO: 76984 - protein, 65 aa, Gossypium hirsutum
  Clone ID: LIB3584-026-P1-K1-A8.pep
MRGLISSTKRLISSATMASLSPSVHRKYSLIPMVIEHSSRGERAYDIFSRLLKERIVCINGSIND

SEQ ID NO: 76985 - protein, 47 aa, Gossypium hirsutum
  Clone ID: LIB3146-041-Q1-K1-B6.pep
LGYSHLQPQPWYFPPPPRVNVPKTKKTYCKSKECRKHTLHKVTQYKK

SEQ ID NO: 76986 - protein, 50 aa, Gossypium hirsutum
  Clone ID: LIB3147-024-Q1-K1-A4.pep
ARSAVCCLEKAEKVWWKKLLRGDGKAPHYVKVDWDKWVDEDEDKGLGDLD

SEQ ID NO: 76987 - protein, 56 aa, Gossypium hirsutum
  Clone ID: LIB3148-054-Q1-K1-E11.pep
MFISNTYIISFMFFLIFFFFLLFHFFFFATRMKSHIISFLNDHHQTNLKVQVHHPS

SEQ ID NO: 76988 - protein, 193 aa, Gossypium hirsutum
  Clone ID: AF034131.pep
MEQNLSLKRFDVNKGAWTAEEDRKLAEVITVHGAKRWKTIPSIAGLNRCGKSCRLRWMNYLRPNIKRGNISDQEEDLILRLHKLLGNRWSLIAGRLPGRTDNEIKNYWNSHLSKKVNQKEKHRGASARQGCKFAQQRLVENAKEQVREENTSTGFGESNISFDVDDFFDFSNVDTRNFEWVNRFLEVDDGFKF

SEQ ID NO: 76989 - protein, 109 aa, Gossypium hirsutum
  Clone ID: uC-gsflnu33B009c11b1.pep
IDFFFLCFNLVFAGLKRCGKSCRLRWMNYLRPNIKRGNISEQEEDLILRLHKLLGNRWSLIAGRLPGRTDNEIKNYWNSHLSKKIKQKEKQGCKDEKRSVENGKEELRQ

SEQ ID NO: 76990 - protein, 74 aa, Gossypium hirsutum
  unsure (1)..(74): unsure at all Xaa locations
  Clone ID: GOSHI-09MAY01-C17_14.pep
TSGRILFFFALLSFSAVSAFAQDEEDQGLVMXNFCKDSCPQAEDIIKEQVKLLYKRHKNTAFSWLRNIFHDCSF

SEQ ID NO: 76991 - protein, 76 aa, Gossypium hirsutum
  Clone ID: GOSHI-09MAY01-C17_10.pep
INNYYRNILDNKGLLIVDHQLAYDKRTRPYVKKMAKSQDYFFKEFSRAITLLSENNPLTGSKGEIRKQCNLANKPL

SEQ ID NO: 76992 - protein, 141 aa, Gossypium hirsutum
  Clone ID: GOSHI-09MAY01-C17_7.pep
PGEMIMTNLTTGDKVVLYFQPCGWFGAGRYEVDGYVYNAAEEPKILMTGKWNESMSYQPCDMEGEPLQGTELKEVWHVADTPKNDKFQFTYFAHKPFLGDFEVINISTDGQLRTLSNTSYDCYNTPWNRLFYYFLLSEFSI

SEQ ID NO: 76993 - protein, 181 aa, Gossypium hirsutum
  Clone ID: GOSHI-09MAY01-C17_5.pep
MRKIMGAKVLFFFALLSFSAVSAFAQDEEDQGLVMNFYKDSCPQAEDIIKEQVKLLYKRHKNTAFSWLRNIFHDCAVQSCDASLLLDSTRRSLSEKETDRSFGLRNFRYIETIKEAVERECPGVVSCADILVLSAREGIVSLGGPYIPLKTGRRDGRRSRADVVEEYLPDHNETISGVLDR

SEQ ID NO: 76994 - protein, 188 aa, Gossypium hirsutum
  unsure (1)..(188): unsure at all Xaa locations
  Clone ID: GOSHI-09MAY01-C17_3.pep
ATVQPTCFGTLMDDGGKGRQMPVHYGSSKHNFVTVSSPIATQLPQAAGMAYSLKMDKKDACVVAFIGDGGTSEGDFHAGLNFAAVMEAPVIFVCRNNGWAISTPTSDQXFRSDGVVVKGQAYGIPSIRVDGTDALAVYSAIRAARSMAINEQRPVLVESLAYRVGHHSTSDDSTKYRLSMKSSTWKRI

SEQ ID NO: 76995 - protein, 494 aa, Gossypium hirsutum
  unsure (1)..(494): unsure at all Xaa locations
  Clone ID: GOSHI-09MAY01-C17_2.pep
MALVRSFQLAFSLRSISLDQEGELLRGILEQIYPRVRNMGSPNKDQNKGFFSAMTSGXSLFGNAMHRSVNGLLGYEGXEVINPEGGKEDAEEEAHRGRWKQEERESYWKMMHKYIGSDVTSMVTLPVLIFEPMTMLQKMAELMEYSYLLDRADECEDPYLRLVYASSWAISVYYAYQRTWKPFNPIIGETYELVNHEGITFISEQVSHHPPMSAGHAENEHFTYDVTSKLKTKFLGNSLDVYPVGRTRVTLKRDGVVLDLVPPPTKVNNLIFGRTWVDSPGEMIMTNLTTGDKVVLYFQPCGWFGAGRYEADGYVYNAAQEPKISLPGKWNESMSYQPCDMEGEPLQGTELKEVWHVADTPKNDKFQFTYFAHKINSFDTAPKKLLASDSRLRPDRFALEKGDLSKAGSEKSRLEERQRAEKRTREAKGHQFTPRWFDLTDEISATPWGDLEIYRFNGKYTEHRATVDSSDGIDEVDLASIEFNPWQYGNLSTE

SEQ ID NO: 76996 - protein, 332 aa, Gossypium hirsutum
  Clone ID: GOSHI-09MAY01-C17_1.pep
MRKIMGAKVLFFFALLSFSAVSAFAQDEEDQGLVMNFYKDSCPQAEDIIKEQVKLLYKRHKNTAFSWLRNIFHDCAVQSCDASLLLDSTRRSLSEKETDRSFGLRNFRYIETIKEAVERECPGVVSCADILVLSAREGIVSLGGPYIPLKTGRRDGRRSRADVVEEYLPDHNETISGVLDRFAAMGIDTPGVVALLGAHSVGRTHCVKLVHRLYPEVDPALNPDHVPHILHKCPDQIPDPKAVQYVRNDRGTPMVLDNNYYRNILDNKGLLIVDHQLAYDKRTRPYVKKMAKSQDYFFKEFSRAITLLSENNPLTGSKGEIRKQCNLANKLH

SEQ ID NO: 76997 - protein, 72 aa, Gossypium hirsutum
  Clone ID: uC-gsflmaxxa048c08b1.pep
MGSPNKDQNKGFFSAMTSGLSLFGNAMHRSVNGLLGYEGVEVINPEGGKEDAEEEAHRGRWKQEVCIFNCVI

SEQ ID NO: 76998 - protein, 69 aa, Gossypium hirsutum
  Clone ID: LIB3829-032-Q6-N6-E11.pep
ILANKGLLIVDHHLAYAQRTRPYVKKMAKSQDYFFKEFSRAITLLYENNPLSGSKGEIRKQCNLANKLR

SEQ ID NO: 76999 - protein, 55 aa, Gossypium hirsutum
  Clone ID: LIB3828-007-Q1-N6-H1.pep
GYFFKEFSRAILFLSENNPLTGSKGEIRKQCNLANKLHSNASPKRKPSAAECNVC

SEQ ID NO: 77000 - protein, 129 aa, Gossypium hirsutum
  Clone ID: LIB3585-030-P1-K1-G12.pep
MRKIMGAKVLFFFALLSFSAVSAFAQDEEDQGLVMNFYKDSCPQAEDIIKEQVKLLYKRHINTALSWLRNIFHDCAVQSCDASLLLDSTRRSLSEKETDRSFGLRNFRYIETIKEAVERECPGVVSCAD

SEQ ID NO: 77001 - protein, 70 aa, Gossypium hirsutum
  Clone ID: uC-gsflmaxxa009e09b1.pep
RVLCQRKTLVDITRRSLSEKETDRSFGLRNFRYIETIKEAVEREWPGVVSCADILVLSAREGIAPVGGPY

SEQ ID NO: 77002 - protein, 100 aa, Gossypium hirsutum
  Clone ID: uC-gsronu33B038g08b1.pep
RNSLGSIILSFKTMWKRRNNYRFITFYEMIFQSKLFHCFLPSLFLKKIYKLQFINPQRFMISILHFILLHSPLLKESLLLSFPPLSNMFKFSPRVRGRMG

SEQ ID NO: 77003 - protein, 137 aa, Gossypium hirsutum
  unsure (1)..(137): unsure at all Xaa locations
  Clone ID: LIB3583-023-P1-K1-B9.pep
XEDQGLVMNLLQXDSCPXAEDIIKEQVKLLYKRHKNTAFSWLRNIFHDCAVQSCDASLLLDSTRRSLSEKETDRSFGLRNFRYIETIKEAVERECPGVVSCADILVLSAREGIVSLGGPYIPLKTGRRDGRRSRADV

SEQ ID NO: 77004 - protein, 151 aa, Gossypium hirsutum
  unsure (1)..(151): unsure at all Xaa locations
  Clone ID: uC-gsflmaxxa038h12b1.pep
MRKIMGAKVLFFFALLSFSAVSAFAQDEEDQGLVMNFYKDSCPQAEDIIKEQVKLLYKRHKNTAFXLSEKETDRSFGLRNFRYIETIKEAVERECPGVVSCADILVLSAREGIVSLGGPYIPLKTGRRDGRRSRADVVEEYLPDHNETISG

SEQ ID NO: 77005 - protein, 83 aa, Gossypium hirsutum
  unsure (1)..(83): unsure at all Xaa locations
  Clone ID: uC-gsronu33B002b06b1.pep
FGLPMVXDHIYNRDILISTFQALTNGSLSXETRTKPYAKKKDNCQNSIYKELXRAITLLSENNPLTGSKGEIRKQCNLANKLH

SEQ ID NO: 77006 - protein, 123 aa, Gossypium hirsutum
  unsure (1)..(123): unsure at all Xaa locations
  Clone ID: LIB3272-013-P1-K1-C4.pep
MRKIMGAKVLFLFALLSFSAVSAFAQDEEDQGLVMNFYKDSCPQAEDIIKEQVRLLYKRHKNTVFSWLRNIVHDCAVQSCDASLLLDSTXRILSEKETDRSSGLRNFRYIETIIEAVQRECPG

SEQ ID NO: 77007 - protein, 116 aa, Gossypium hirsutum
  Clone ID: LIB3582-022-P1-K1-A11.pep
MRKIMGAKVLFFFALLSFSAVSAFAQDEEDQGLVMNFYKDSCPQAEDIIKEQVKLLYKRHKNTAFSWLRNIFHDCAVQSCDASLLLDSTRRSLSEKETDRSFGLKNFRYIETIKEL

SEQ ID NO: 77008 - protein, 89 aa, Gossypium hirsutum
  Clone ID: LIB3189-012-P1-K1-G6.pep
DGLVYLVQSNRMPQVSCSRAVRESRVRSGSNAILQTSFTKMPRQRESRVWPNKMFVYSVSFPRDEFVNVQVSNGAMVLVCNDRSIAFFF

SEQ ID NO: 77009 - protein, 385 aa, Gossypium hirsutum
  Clone ID: GOSHI-09MAY01-C37_1.pep
MGAGGRMLVDGKKEEKRGSVNRVPIEKPPFTLGQIKQAIPPHCFRRSLLRSFSYVVHDLCLASLFYYIATSYFHFLPQPFSYIAWPVYWVLQGCILTGVWVIAHECGHHAFSDYQWVDDTVGLILHSALLVPYFSWKISHRRHHSNTGSMERDEVFVPKPKSKLSCFAKYFNNPPGRVLSLVVTLTLGWPMYLAFNVSGRYYDRLASHYNPYGPIYSDRERLQVYISDTGIFAVIYVLYKIAATKGLAWLLCTYGVPLLIVNAFLVLITYLQHTHSALPHYDSSEWDWLRGALSTMDRDFGVLNKVFHNITDTHVAHHLFSTMPHYHAMEATKAIKPILGKYYPFDGTPIYKAMWREAKECLYVEPDVGGGGGGSKGVFWYRNKF

SEQ ID NO: 77010 - protein, 83 aa, Gossypium hirsutum
  Clone ID: LIB3196-025-P1-M1-B3.pep
MGAGGRMPIDGIKEENRGSVNRVPIEKPPFTLGQIKQAIPPHCFRRSLLRSFSYVDHDLCLASLFYYIATSYFHFLPQPFFYI

SEQ ID NO: 77011 - protein, 57 aa, Gossypium hirsutum
  Clone ID: GOSHI-09MAY01-C27_23.pep
ALAPSSMKIKVVAPPERKYRVWIGGPILASLSTFQQMWISKGEYDESGPSIVHRKCF

SEQ ID NO: 77012 - protein, 142 aa, Gossypium hirsutum
  unsure (1)..(142): unsure at all Xaa locations
  Clone ID: GOSHI-09MAY01-C27_20.pep
MADEDIQPLVCDNGTGMVKAGFAGDDAPRAVFPSIVGRPRHTGVMVGMGQKDAYVGDEAQSKRGILTLKYPIEHGIVSNWDDMEKIWRHTFYKXLRVAPEEHPVLLTEAPLNPKANREKMSQIIFETFNSSAMYVAFRQFFH

SEQ ID NO: 77013 - protein, 200 aa, Gossypium hirsutum
  Clone ID: GOSHI-09MAY01-C27_19.pep
DNIVGKMHNSDEESSLNGIDDLRSVRPDTNMTRESGTENLSSENPPRPAVWDIFRREDVPKLMECLQKHHIEFYHISNLPVNFVIHPIHVLTLHLTERHKRQLKEEFNVEPWTFEQHVGEACFIPAGCPHQVRNRQSCIKVALDFVSPENVQECIRLTEEFRLLPKSHRAKEDKLEVKKMAVYAATLAVSEAKDLSTKLK

SEQ ID NO: 77014 - protein, 105 aa, Gossypium hirsutum
  Clone ID: GOSHI-09MAY01-C27_18.pep
MADGEDIQPLVCDNGTGMVKAGFAGDDAPRAVFPSIVGRPRHTGVMVGMGQKDAYVGDEAQSKRGILTLKYPIEHGIGSNWDDMEKIWHHTFYNELRVAPEEHPV

SEQ ID NO: 77015 - protein, 94 aa, Gossypium hirsutum
  Clone ID: GOSHI-09MAY01-C27_12.pep
FNILTNSRWKKNDNDSDYNRRPTTSIEHLTNHAIHLPILRNAAINAFNKKDSQYDFIAPNFPRRRTAQTGTNVFLKKSRAIIAININVLKTLEY

SEQ ID NO: 77016 - protein, 85 aa, Gossypium hirsutum
  Clone ID: GOSHI-09MAY01-C27_10.pep
MAANNMPAGIDKEQAFGMAETEMEYRVELFNRLAQTCFNKCVDKRYKESELNMGENSCIDRCVSKYWQVNSMIGQMLSAGGRPPM

SEQ ID NO: 77017 - protein, 377 aa, Gossypium hirsutum
  unsure (1)..(377): unsure at all Xaa locations
  Clone ID: GOSHI-09MAY01-C27_8.pep
MADEDIQPLVCDNGTGMVKAGFAGDDAPRAVFPSIVGRPRHTGVXMVGMGQKDAYVGDEAQSKRGILSLESPIELGFVGNGDAMERLGHLTFYTGLRVAPEEHPVLLTEAPLNPKANREKMTQIMFETFDVPAMYVAIQAVLSLYASGRTTGIVLDSGDGVSHTVPIYEGYALPHAILRLDLAGRDLTDSLMKILTERGYSVTTTAEREIVRDMKEKLAYVALDYEQELETAKSSSAIEKSYELPDGQVITIGAERFRCPEVLFQPSLIGMEAAGIHETTYNSIMKCDVDIRKDLYGNIVLSGGSTMFPGIADRMSKEITALAPSSMKIKVVAPPERKYSVWIGGSILASLSTFQQMWISKAEYDESGPAIVHRKCF

SEQ ID NO: 77018 - protein, 231 aa, Gossypium hirsutum
  Clone ID: GOSHI-09MAY01-C27_7.pep
MAQAMASMAGLRGSSQAVLDGSLQLSGQTRFNIPSNNRVPTRPSGFTVRAHQTPAEPETGRRAMLGLVAAGLATGSFVQAVLADARSIKVGPPPPPSGGLPGTLNSDEPRDLVLPYKDRFFLQPVTPAQAAQRAKESAKDILGVKNLIDKKAWPYVMNDLRLKAEYLRYDLNTVIAAKSKDEKKTLKDLTKKLFSTIDDLDHAAKIKSTPEAEKSYAQTISSLNDVLAKLC

SEQ ID NO: 77019 - protein, 378 aa, Gossypium hirsutum
  unsure (1)..(378): unsure at all Xaa locations
  Clone ID: GOSHI-09MAY01-C27_6.pep
MADTEEIQPLVCDNGTGMVKAGFAGDDAPRAVFPSIVGRPRHTGVMVGMGQKDAYVGDEAQSKRGILTLKYPIEHGIVSNWDDMEKIWHHTFYNELRVAPEEHPVLLTEAPLNPKANREKMTQIMFETFNVPAMYVAIQAVLSLYASGRTTGIVLDSGDGVSHTVPIYEGYALPHAILRLDLAGRDLTDSLMKILTERGYMFTTTAEREIVRDMKEKLAYVALDYEQELETAKSSSSVEKNYELPDGQVITIGAERFRCPEVLFQPSLIGMEAAGIQETTYNSIMKCDVDIRKDLYGNIVLSGGSTMFPGIADRMSKEITALAPSSMKIKVVAPPXERKYSVWIGGSILASLSTFQQMWISKGEYDESGPSIVHRKCF

SEQ ID NO: 77020 - protein, 376 aa, Gossypium hirsutum
  Clone ID: GOSHI-09MAY01-C27_5.pep
MADEDIQPLVCDNGTGMVKAGFAGDDAPRAVFPSIVGRPRHTGVMVGMGQKDAYVGDEAQSKRGILTLKYPIEHGIVSNWDDMEKIWHHTFYNELRVAPEEHPVLLTEAPLNPKANREKMTQIMFETFNSPAMYVAIQAVLSLYASGRTTGIVLDSGDGVSHTVPIYEGYALPHAILRLDLAGRDLTDSLMKILTERGYSFTTTAEREIVRDMKEKLAYVALDFEQELETAKSSSAIEKSYELPDGQVITIGAERFRCPEVLFQPSLIGMEAAGIHETTYNSIMKCDVDIRKDLYGNIVLSGGSTMFPGIADRMSKEITALAPSSMKIKVVAPPERKYSVWIGGSILASLSTFQQMWISKGEYDESGPAIVHRKCF

SEQ ID NO: 77021 - protein, 377 aa, Gossypium hirsutum
  Clone ID: GOSHI-09MAY01-C27_4.pep
MAENEDIQPLVCDNGTGMVKAGFAGDDAPRAVFPSIVGRPRHTGVMVGMGQKDAYVGDEAQSKRGILTLKYPIEHGIVSNWDDMEKIWHHTFYNELRVAPEEHPVLLTEAPLNPKANREKMTQIMFETFNAPAMYVAIQAVLSLYASGRTTGIVLDSGDGVSHTVPIYEGYALPHAILRLDLAGRDLTDALMKILTERGYSFTTTAEREIVRDMKEKLAYIALDYEQELETAKTSSAVEKSYELPDGQVITIGAERFRCPEVLFQPSMIGMEAAGIHETTYNSIMKCDVDIRKDLYGNIVLSGGTTMFPGIADRMSKEIKALAPSSMKIKVVAPPERKYSVWIGGSILASLSTFQQMWISKAEYDESGPSIVHRKCF

SEQ ID NO: 77022 - protein, 85 aa, Gossypium hirsutum
  Clone ID: GOSHI-09MAY01-C27_3.pep
MAANTTPAGIDKEQAFGMAETEMEYRVKLFNRLGQTCFNKCVDKRYKESELNMGENSCIDRCVSKYWQVNSMIGQMLSAGGRPPM

SEQ ID NO: 77023 - protein, 377 aa, Gossypium hirsutum
  Clone ID: GOSHI-09MAY01-C27_2.pep
MADAEDIQPLVCDNGTGMVKAGFAGDDAPRAVFPSIVGRPRHTGVMVGMGQKDAYVGDEAQSKRGILTLKYPIEHGIVSNWDDMEKIWHHTFYNELRVAPEEHPVLLTEAPLNPKANREKMTQIMFETFNVPAMYVAIQAVLSLYASGRTTGIVLDSGDGVSHTVPIYEGYALPHAILRLDLAGRDLTDSLMKILTERGYMFTTTAEREIVRDMKEKLAYVALDYEQELETAKSSSSVEKNYELPDGQVITIGAERFRCPEVLFQPSLIGMEAAGIHETTYNSIMKCDVDIRKDLYGNIVLSGGSTMFPGIADRMSKEITALAPSSMKIKVVAPPERKYSVWIGGSILASLSTFQQMWISKGEYDESGPSIVHRKCF

SEQ ID NO: 77024 - protein, 377 aa, Gossypium hirsutum
  Clone ID: GOSHI-09MAY01-C27_1.pep
MADGEDIQPLVCDNGTGMVKAGFAGDDAPRAVFPSIVGRPRHTGVMVGMGQKDAYVGDEAQSKRGILTLKYPIEHGIVSNWDDMEKIWHHTFYNELRVAPEEHPVLLTEAPLNPKANREKMTQIMFETFNVPAMYVAIQAVLSLYASGRTTGIVLDSGDGVSHTVPIYEGYALPHAILRLDLAGRDLTDALMKILTERGYMFTTTAEREIVRDMKEKLAYVALDYEQELETAKSSSSVEKNYELPDGQVITIGAERFRCPEVLFQPSFIGMEAAGIHETTYNSIMKCDVDIRKDLYGNIVLSGGSTMFPGIADRMSKEITALAPSSMKIKVVAPPERKYSVWIGGSILASLSTFQQMWISKGEYDESGPSIVHRKCF

SEQ ID NO: 77025 - protein, 162 aa, Gossypium hirsutum
  Clone ID: AI725724.1.pep
PDGQVITIGAERFRCPQVLFHPSLIGMEAAGIHETTYNSIMKCDVDITKDLYGNIVLSGGSTMSPGIADRMSKEITALAPSTMKIKVVAPPQTKYSVWIGGSISAPLITFQQMWTSQGEYDESGPSIVHTICSQIYDSLYGELPFLSTRAFPVLCHFTHWSG

SEQ ID NO: 77026 - protein, 89 aa, Gossypium hirsutum
  Clone ID: LIB3135-004-Q1-K1-G8.pep
EIFLAQQIISSIQGVLHGETKVTCISHSNYDISCLTLNIFIKIWAILPYLLKSSTLYSISVSAMPKACSLSIPAGMLLAAITALTKNFL

SEQ ID NO: 77027 - protein, 89 aa, Gossypium hirsutum
  Clone ID: uC-gsflmaxxa061a08b1.pep
FPLNFIISSTIAIDINVFGARGGALNLEKYRINKQLNLSGYNVLSNMDERCMQSMEISTHLSADRQLQRPIISIPVTPAGITNHSRMKG

SEQ ID NO: 77028 - protein, 86 aa, Gossypium hirsutum
  unsure (1)..(86): unsure at all Xaa locations
  Clone ID: LIB3147-004-Q1-K1-B12.pep
MAANNMPAGIDKEQAFGMAETEMEYRVELFNRLAQTCFNKCVDKRYKESDLNMGENSCIDRXCVSKYWQVNSMIGQMLSAGGRPPM

SEQ ID NO: 77029 - protein, 95 aa, Gossypium hirsutum
  Clone ID: uC-gsflmaxxa061a07b1.pep
IISSICRAHMYRSLWVMICISSMKISYHMSRTEQLMSPIICIPVTPAGIANHSRMQGKYSSKVYVQATVNNTFGPSTRPLVHLTRVAREPTKQKM

SEQ ID NO: 77030 - protein, 137 aa, Gossypium hirsutum
  unsure (1)..(137): unsure at all Xaa locations
  Clone ID: LIB3585-052-P1-K1-C7.pep
YELPDGQVITIGAKKFRCPESPLXKPSFIGMEAAGIHETTYNSIMKCDVDIRKDLYGNIVLSGGSTMFPGIADRMSKEITALAPSSMKIKVVAPPERKYSVWIGGSILASLSTFQQMWISKGEYDESGPSIVHRKCF

SEQ ID NO: 77031 - protein, 104 aa, Gossypium hirsutum
  Clone ID: LIB3147-005-Q1-K1-F8.pep
TRFPSLFKISCTIANCVHVYQQGVEAFHVKKNSIIKRLNLSSYILLSNMVERCMERMEISTHLSADHQLQRPIISITVTPAGITNHNIMKGVYIPSRSKSTLLQ

SEQ ID NO: 77032 - protein, 174 aa, Gossypium hirsutum
  unsure (1)..(174): unsure at all Xaa locations
  Clone ID: AI730536.1.pep
MADTEEIQPLVCDNGTGMVKAGFAGDDAPRAVFPSIVGRPRHTGVMVGMGXKDAYVGDEAQSKRGILTLKYPIEHGIVSNWDDMEKIWHHTFYNELRVAPEEHPVLLTEAPLNPKANKEKMTQIMFETFNVPAMYVAIQAVLSLYASGRTTGIVLDSGDGVSHTVPIYERYALP

SEQ ID NO: 77033 - protein, 158 aa, Gossypium hirsutum
  Clone ID: uC-gsflnu33B133b07b1.pep
SRPAIQAVLSLYASGRTTGIVLDSGDGVSHTVPIYEGYALTHAILRLDLAGRDLTDALMKILTERGYSFTTTAEREIVMAQKGGAILKRNRRWLLQQTRLDFMRTSVKPVTGLSHHSKLPTTNSDAPVMLDRILRFLVSYKLLNGFLRTLPWGQVERL

SEQ ID NO: 77034 - protein, 70 aa, Gossypium hirsutum
  unsure (1)..(70): unsure at all Xaa locations
  Clone ID: uC-gsflnu33B004b08b1.pep
LNEVADRMSREITVLPNISMQIREEQHPERIYMVXLGGSILASLSTFQPMWISKGEYDESGPAIDHRKCL

SEQ ID NO: 77035 - protein, 142 aa, Gossypium hirsutum
  Clone ID: uC-gsronu33B167f11b1.pep
PFRPPTRPPTRPPTRPRTRGRFRCPEVLFQPSLIGMEAAGIHETTYNSIMKCDVDIRKDLYGNIVLSGGSTMFPGIADRMSKEITALAPSSMKIKVVAPPERKYSVWIGGSILASLSTFQQMWISKGEYDESGPSIVHRKCF

SEQ ID NO: 77036 - protein, 90 aa, Gossypium hirsutum
  Clone ID: LIB3149-055-Q1-K1-F4.pep
RPRVRPASEGITALALSSMKIKVVALPERKYSVWIGGSILASLSTFQQMWISKGEYDESGPAIVHRSALIECIEATFSALLVVSVTLACL

SEQ ID NO: 77037 - protein, 122 aa, Gossypium hirsutum
  unsure (1)..(122): unsure at all Xaa locations
  Clone ID: LIB3189-017-P1-K1-E10.pep
ELPDGQVITIXSERFRCPEVLFQPSLIGMEAAGIHETTYNSIMKCDVDIRKDLYGNIVLSGGSTMFPGIADRMSMEITALAPSSMKIKVVAPPERXTVAWIGGSILVYFISLLLFVGFPSGE

SEQ ID NO: 77038 - protein, 145 aa, Gossypium hirsutum
  Clone ID: LIB3165-011-P1-K1-B2.pep
KHFGGGDSNNRVAVGRSGFTGSFVQAVLADARSIKVGPPPPSSGGLPGTLNSDEPRDLVLPYKDRFFLQPLTPAQAAQRAKESAKDILGVKNLIDKKAWPYVMNDLRLKAEYLRYDLNTVIAAKPKDEKKTLKDLTKKLFSTIDD

SEQ ID NO: 77039 - protein, 89 aa, Gossypium hirsutum
  Clone ID: LIB3145-004-P1-K1-F9.pep
VDIRKDLYCNIVLSGGTTMFPGIADRMSKEITALAPSSMKIKVVAPPERKYSVWIGGSILASLSTFQQMWIAKAEYDESGPSIVHRKCF

SEQ ID NO: 77040 - protein, 115 aa, Gossypium hirsutum
  Clone ID: LIB3585-044-P1-K1-B4.pep
MADEDIQPLVCDNGTGMVKAGFAGDDAPRAVFPSIVGRPRHTGVMVGMGQKDAYVGDEAQSKRGILTLKYPIEHGIVSNWDDMEKIWHHTFYNGLRVAPEEHSDLFYRKHQLNSK

SEQ ID NO: 77041 - protein, 102 aa, Gossypium hirsutum
  Clone ID: LIB3149-016-Q1-K1-F8.pep
MWILGRISTETLSSVVAPLTPAQAAQRAKESAKDILGVKNLIDKKAWPYVMNDLRLKAEYLRYDLNTVIAAKPKDEKKTLKDLTKKLFSTIDDLDHAAKIKS

SEQ ID NO: 77042 - protein, 73 aa, Gossypium hirsutum
  Clone ID: uC-gsronu33B148f11b1.pep
GVSMFPGIADRMSKVITALAPSSMKIKVVAPPERKYSVWIGGSILASLSTFQQMWISKGEYDDYSSCMVHRKC

SEQ ID NO: 77043 - protein, 108 aa, Gossypium hirsutum
  Clone ID: LIB3149-039-Q1-K1-B11.pep
MIRECVAENLSSENELGGAVWDIFRREDVPKLIEYLQKHHKEFYHISNLPVNFVIHPIHDQTLYLTERHKKQHEDQGCCTPPPQTLMSIAIVREILKFDGNYILYLVL

SEQ ID NO: 77044 - protein, 50 aa, Gossypium hirsutum
  unsure (1)..(50): unsure at all Xaa locations
  Clone ID: LIB3083-118-Q1-L1-F6.pep
MADTEEIQPLVCDNGTGMVKAGFAGDDAPRAVFPSIVGRPXHTGVMVGMG

SEQ ID NO: 77045 - protein, 66 aa, Gossypium hirsutum
  Clone ID: LIB3196-042-P1-M1-G5.pep
CSCSGLSGSTNSSDHASDPMERGIGSNWDVLQKIWHHTFYNELRVAPEEHLELPTEALLNPKANRE

SEQ ID NO: 77046 - protein, 72 aa, Gossypium hirsutum
  Clone ID: GOSHI-09MAY01-C957_1.pep
MNGISNALNGLYDISGVEVGQHFYWQIAGFQVHAQVLITSWVVIAILLGSAVIAVRNPQTIPTAGQNFFEYV

SEQ ID NO: 77047 - protein, 177 aa, Gossypium hirsutum
  Clone ID: LIB3583-055-P1-K1-A8.pep
LSQVLVIHQSWKQKKFQDRPIIITEKFIAVISYNYRPILSQVLVIHQSWKQKKFQEMILVNEVLKIIKAVDLNLETWVKAYGNATLSCVFAMNCHWHLYKHLKGTKLGELMGDSWLKEHEQYKEYYSAIFLRESWGKLPSHLSREGLILFSGSRATARDLVKKRLKTFNEAFDEMFR

SEQ ID NO: 77048 - protein, 157 aa, Gossypium hirsutum
  unsure (1)..(157): unsure at all Xaa locations
  Clone ID: LIB3583-036-P1-K1-G6.pep
QRQSPPPQDGSXPRLVSFITDYCNELLGDNYRPILSQVLVIHQSWKQKKFQEMILVNEVLKIIKAVDLNLETWVKAYGNATLSCVFAMNCHWHLYKHLKGTKLGELMGDSWLKEHEQYKEYYSAIFLRESWGKLPSHLSREGLILFSGSRATARDLV

SEQ ID NO: 77049 - protein, 151 aa, Gossypium hirsutum
  Clone ID: GOSHI-09MAY01-C977_1.pep
MAAEEDSGEFYLRYYVGHKGKFGHEFLEFEFRPDGKLRYANNSNYKNDTMIRKEVFLTPSVLKECRRIIADSEIMKEDDNNWPEPDRVGRQELEIVMGNEHISFTTSKIGSLVDVQSSKDPEGLRIFYYLVQDLKCFVFSLISLHFKIKPI

SEQ ID NO: 77050 - protein, 105 aa, Gossypium hirsutum
  unsure (1)..(105): unsure at all Xaa locations
  Clone ID: uC-gsronu33B072b01b1.pep
MAAEEDSGEFYLRYYVGHKGKFGHEFLEFEFRPDGKLRYANNSNYKNDTMIRXEVFLTSFPLKECRLIIFFSFIIISFFFNFFYLILYLFFLFFFIFLLFLLFFF

SEQ ID NO: 77051 - protein, 148 aa, Gossypium hirsutum
  Clone ID: GOSHI-09MAY01-C837_2.pep
PQSFCIRMEISRYLRQHARTIAGKSQLFINSYAKALEVVAQLPWDNAGFDATDVLNKLRQKHALPSGEGASYGVDINTGGIADSFTNFVWEPSVVKSNAINAATEAACLILSVDETVKNPKSESAQGEAAASAMAGRGRGRGRGMRRR

SEQ ID NO: 77052 - protein, 329 aa, Gossypium hirsutum
  unsure (1)..(329): unsure at all Xaa locations
  Clone ID: GOSHI-09MAY01-C837_1.pep
KKFLNPKILLLNIELELKSEKENADTLSDPSQYQSIVDAXWNIIYDKLDKCVKSGAKVVLSRLAIGDLATQYFADRDIFCAGRVAEEDLNRVAAATGGTIQTSVNNIIDEVLGTCEVFEEKQVGNERFNIFSGCPSGRTATIVLRGGADQFIEEAERSLHDAIMIVRRALKNSTVVAGGGAIDMEISRYLRQHARTIAGKSQLFINSYAKALEVIPRQLCDNAGFDATDVLNKLRHKHALPSGEGAPYGVDINTGGIADSFANFVWEPSVVKINAINAATEAACLILSVDETVKNPKSESAQGEAAASAMGGRGRGGGFPGRGRGMRRR

SEQ ID NO: 77053 - protein, 178 aa, Gossypium hirsutum
  unsure (1)..(178): unsure at all Xaa locations
  Clone ID: uC-gsflnu33B062e08b1.pep
WCPCPDWPGRPGRTQTCDGFEERRAGNEGCNVFSGCPSGRTATIVLRGGADQFIEEAERSLHDAIMIVRRALKNSTVVAGGGAIDMEISRYLRQHARTIAGKSQLFINSYAKALEVIPRQLCDNAGFDATDVLNKLRHKHALPSGEGAPYGVDINTGXIADSFANFVWEPSVVKINAI

SEQ ID NO: 77054 - protein, 72 aa, Gossypium hirsutum
  Clone ID: uC-gsronu33B036e09b1.pep
KTVFHFPSLTKIPLKNKFKEQVYFSQQTKAPATVHKKSNIQSQILVIRMPHLNRHLHILALKTVVHLRHKRK

SEQ ID NO: 77055 - protein, 85 aa, Gossypium hirsutum
  Clone ID: GOSHI-09MAY01-C827_7.pep
STINASVRKPHRLVTVEEAFPQHGVGAEICASIVEESFAYLDAPVERIAGADVPMPYAANLERMAVPQVEDIVRAAKRTCYRSVS

SEQ ID NO: 77056 - protein, 102 aa, Gossypium hirsutum
  Clone ID: GOSHI-09MAY01-C827_6.pep
VINLRSIRPLDRSTINASVRKTNRLITVEKGFPQHGVGAEICASVVEESFAYLDAPVERIAGADVPMPYAANLERMAVPQVEDIVRAAKRACYRAVPLAAAA

SEQ ID NO: 77057 - protein, 106 aa, Gossypium hirsutum
  Clone ID: GOSHI-09MAY01-C827_5.pep
VDPAFYNLRSIRPLGRSPINTSVRKTNRLITVEEGFPQHGVGAEICASVVEESFSYLDAPVERIAGADVPMPYAANLERMAVPQVEDIVRAAKRACYRSVPLAATA

SEQ ID NO: 77058 - protein, 191 aa, Gossypium hirsutum
  unsure (1)..(191): unsure at all Xaa locations
  Clone ID: GOSHI-09MAY01-C827_2.pep
MLGIVRQKMLGQSLLKIRPAISVLRSYSSAAKQMTVREALNSALDEEMSADPKVFLMGEEVGEYQGAYKISKGLLEKYGPERVLDTPITEAGFAGIGVGAAYYGLKPVVEFMTFNFSMQAIDHIINSAAKSNYMSAGQMSVPIVFRGPNGAAAGVGAQHSQCYASWYASCPGLKVLSPYXSSEDARGLLKA

SEQ ID NO: 77059 - protein, 359 aa, Gossypium hirsutum
  Clone ID: GOSHI-09MAY01-C827_1.pep
MLEQSLKKIPPAVSVLRSYSSAAKQMTVREALNSALDEEMSADSKVFLMGEEVGEYQGAYKITKGLLDKYGPERVLDTPITEAGFTGIAVGAAYYGVKPVVEFMTFNFSMQAIDHIINSAAKTNYMSSGRISVPIVFRGPNGAAAGVGAQHSQCYAAWYASCPGLKVLAPYSSEDARGLLKAAIRDPDPVVFLENELLYGESFPVSDEVLDSSFCLPIGKAKIERKGKDVTITAFSKMVGYALKAAEMLEKEGIDAEVINLRSIRPLDRSTINASVRKTNRLITVEEGFPQHGVGAEICASVVEESFAYLDAPVERIAGADVPMPYAANLERMAVPQVEDIVRAAKRACYRAVPLAAAP

SEQ ID NO: 77060 - protein, 174 aa, Gossypium hirsutum
  Clone ID: LIB3585-007-P1-K1-C5.pep
FLDLRFRLCSLFHLRWAFTCKNTFLSKVIKNTLHLLQIFNLLEVFFGQMKKQIFLPFSAKNCFWADLLLFLATQHTTTFFIAGSLFLPFLCSSSSLKKYLVLCSSSPPPHSRCVSSPPPPASLQFQYWSSPCRLISFQKTLIPHSLFLFFLHYIKSRYVFLIFLIRFDFPSITV

SEQ ID NO: 77061 - protein, 125 aa, Gossypium hirsutum
  unsure (1)..(125): unsure at all Xaa locations
  Clone ID: uC-gsflmaxxa096e04b1.pep
MLAIARQRMLGQSFKKILPAVSVLRSYSSAAKQITVREALNSALDEEMSADPKVFLMGEEVGEYQGAYKITKGLLEKYGPERVLDTPITEAGFTGMXAGAAYYGLKPVVEFMTFNFSMXAIDHII

SEQ ID NO: 77062 - protein, 71 aa, Gossypium hirsutum
  Clone ID: LIB3145-026-Q1-K1-G2.pep
EVTHLLQNRYRMLSRPYAFNCILRLRTSTEFKPGHSYGHFFPDPQYENVQHIICCDFFATYAYDFDFANNV

SEQ ID NO: 77063 - protein, 289 aa, Gossypium hirsutum
  Clone ID: GOSHI-09MAY01-C587_1.pep
LRSPTTSAESKKNLVYFLREFCSLSKSLHMVQQLQLFRDLINEGIFDIISDALQSPDKKLVLTGTDILILFLNQDPTLLRSHVVRQEGIPLLGLLVKGMITDFGEDMHCQFLEILRSLLDSFSLTGAQRDTIIDIFYDKHLGQLIDVIILSCPSDEAGQSTSNLASSAGRVESQNSAKPEILSSICELLCFCVVHHPYRIKCNFLLNNVIDKVLLLTRRREKYLVVAAVRFVRTILSRRDEHLVNHFVKKNLLKPVIDAFVANGNRYNVLNSAVLELFEYIRRENVKVL

SEQ ID NO: 77064 - protein, 81 aa, Gossypium hirsutum
  unsure (1)..(81): unsure at all Xaa locations
  Clone ID: GOSHI-09MAY01-C577_9.pep
KATKGEILQNLAEFQFSCVMFNAGLENACSEQGARMSALDSSSRNAGDMLDXLTLTYNRTRQASITTELIEIISGASALEG

SEQ ID NO: 77065 - protein, 160 aa, Gossypium hirsutum
  unsure (1)..(160): unsure at all Xaa locations
  Clone ID: GOSHI-09MAY01-C577_7.pep
MAMAALKPQGRRFAPMISPRPITALRSSPLAPSLQDECPLGVRYISTPVVRNPMRSVXSIHKITKAMKMVAASKLRPIQTKAENSRGLWQPFTALLGDLPSANVXKKILVVTISSEQXLCGEINSTSVQXNKGLHQLKSGXPEKKNKIFYFLGKEGTGST

SEQ ID NO: 77066 - protein, 73 aa, Gossypium hirsutum
  Clone ID: GOSHI-09MAY01-C577_6.pep
NTSLLELVAITSKRPKFWKKKTLSSTTARISRVSSESVSDGDGCSQTRREAFRPSDLSSSDNRCQILSSLSYS

SEQ ID NO: 77067 - protein, 172 aa, Gossypium hirsutum
  unsure (1)..(172): unsure at all Xaa locations
  Clone ID: GOSHI-09MAY01-C577_3.pep
MAMAALRREGRRFAPLISPRPITAVRSSPLYPTLEDEGPLGLRHISTQVVRNRMKSVKNIQKITKAMKMVAASKLRAIQTKTENSRGLWQPFTALLGDLPSADVKKNVVVTISSDKGLCGGINSTSVKISKGLHKLNSATGPEKETKYVILGEKAKXAQLGRDSKKDIELII

SEQ ID NO: 77068 - protein, 259 aa, Gossypium hirsutum
  Clone ID: GOSHI-09MAY01-C577_2.pep
MMSNQRLAYLSIDSGRKQHRSPIVCKTYAIHAGLEESSSLQSEDPFTEDEHTSEDSPEQLLAKPLSSEEQLKSLLADSERAKLTKKLSEANQQNRFLKRQLHMKEEALVNFKSELAVMELEIQALFLLAEEISKAGIPQGSKKINGRYIQSHLHTRLEAVLEKLKEQLKDVDAVQSKEIPLFWCGMAESVQVMGSFDGWSQGEHLSPEYTGSFATFSTTLLLRPGRYEIKFLVDGEWHLSPEYPTIGEGLMQNNLLVVD

SEQ ID NO: 77069 - protein, 326 aa, Gossypium hirsutum
  unsure (1)..(326): unsure at all Xaa locations
  Clone ID: GOSHI-09MAY01-C577_1.pep
MAMAALRREGRRFAPLISPRPITAVRSSPIVPTHEDEGPIGVRYISTQVVRNRMKSVKNIQKITKAMKMVAASKLRAVQTKAENSRGLWQPFTALLGDLPSVDVKKNVVVTISSDKGLCGGINSTSVKISKGIYKLNSGPEKETKYVILGEKAKAQLVRDSKKDIELIITELQKNPLSYTQVSVLADEILKNVEYDALRIVFNKFHSVVSFVPTVSTVLSPEIVERESESGGKLGELDSYEVEGGETKGEILXQNLAEFQFSCVMFNAVLENACSEQGARMSAMDSSSRNAGDMLDRLTLTYNRTRQASITTELIEIISGASALEG

SEQ ID NO: 77070 - protein, 74 aa, Gossypium hirsutum
  Clone ID: LIB3582-045-P1-K1-E11.pep
AYILAKTLLKLKLLLLDLHIVFHLQALVLLAEEISKAGIPQGSRKINGRYIQSHLHTRLEAVLEKLEEQLKDVD

SEQ ID NO: 77071 - protein, 94 aa, Gossypium hirsutum
  Clone ID: LIB3828-018-Q1-K6-E8.pep
INLDDRYEGPIGVRYTSTQVVRNRMKSVKNIQKITKAMKMVAASKLRAVQTKAENSRGLWQPFTALTGDLPSVDVKKNVVVTISSDKSLCGGIN

SEQ ID NO: 77072 - protein, 119 aa, Gossypium hirsutum
  Clone ID: LIB3585-048-Q6-K1-B6.pep
ERISRVFSRISKRWQWLALKPEGRRFAPLISPRPISAVRSSPIVPTHEYDGPIGVRYISTQVVRNRMKSVKNIQKITKAMKMVAASKLRAFHTKAYNSLCLWQACHSSWCLNLAWVIPC

SEQ ID NO: 77073 - protein, 115 aa, Gossypium hirsutum
  unsure (1)..(115): unsure at all Xaa locations
  Clone ID: LIB3829-017-Q6-K6-H9.pep
ATASAPPPAIKVSILADEILKNVEYDALRIVFNKFHSVVSFVPTVSTVLSPEIVERESESGGKLGELDPYEVEGGETKGEILQNLAEFQFSCVMFKCXFENACSEQGAXMSAMDS

SEQ ID NO: 77074 - protein, 324 aa, Gossypium hirsutum
  Clone ID: GOSHI-09MAY01-C517_1.pep
MTLLQSYTYFLCLLLLFLSYNLTFFLPFAPYFWPSLGHCVFFQQQSTYITILYTYIHKVFPSKEAMTGKEILHKMKEKVQEKVGLNPSSNAESGKGKSKMSKNITHGYHLVKGKANHPMEDYVFAEFKQVNGSELGLFAIFDGHLSHVIPDYLKANLFNNILNEPDFWTEPENAIRKAYRLTDTNILEQAIDLGKGGSTAVTAILINCQKLVIANVGDSRAVISKNGVAKQLSVDHEPASERESIENRGGFVSNFPGDVARVDGQLAVARAFGDKSLKKHLTSEPDVSIETIDDDTDLIILASDGLWKVMSNQEAVDAIKGIKD

SEQ ID NO: 77075 - protein, 129 aa, Gossypium hirsutum
  Clone ID: LIB3584-015-P1-K1-B6.pep
PTRPVAKQLSVDHEPASERESIENRGGFVSNFPGDVARVDGQLAVARAFGDKSLKKHLTSEPDVSIETIDDDTDLIILASDGLWKVMSNQEAVDAIKGIKDARSAAKHLTEEAVKRNSKDDISIIVVKF

SEQ ID NO: 77076 - protein, 533 aa, Gossypium hirsutum
  Clone ID: GOSHI-09MAY01-C507_1.pep
SITTSRSCIRCRQLPVMKLRAQLSLVLQSTPAAADMQKILEDIKHAAQDARDTLDERSVNGVSEVNGFDGTCNEHAFSGDGNLTGEKTIAMPPGDKVKSATAQIISPELAAAISHIHNFVLSLRKEARAVDDISFDGNGLSHKIDEFFVTRNKVLSSNASLDDLIFDLSTVLAKAGELRFSVLGYKGNEVEINSPHCIDKVALPENKVTQDDSSGAIYQNGSAIISNPASNPEVPDDGNLVSEYESKQTSKFSSEEFKELKLENENMARDLSQCTENLEMTKSQLHETEQLLAEAKSQLAYAQRSNSLAETQLKCMTESYRSLETRAEELETEVNRLQVKIEALENELQDEKRSHQDAFARCKELEEQLQRNETCSVCSSAAKNDLKNKQEKELAEKLAECQETIFLLGKQLKAFRPQTDIMGSPFNERSHKGDDGPTTSGINLQDLYQAKMDSIAAAAASGIGSRGGAESALESVNTPSSPYDSEANSLRTPIKSKHRSTTSMSSSSSSTPTPDKHSRGFSRFFSSKGKNDN

SEQ ID NO: 77077 - protein, 165 aa, Gossypium hirsutum
  unsure (1)..(165): unsure at all Xaa locations
  Clone ID: LIB3584-005-P1-K1-F7.pep
RGRVGGRVGGRVGEVPDDGNLVSEYESKQTSKFSSEEFKELKLENENMARDLSQCTENLEVTKSQLHETEQLLAEAKSQLAYAQRSNSLAETQLKCMTESYRSLETRAEELETEVNRLQVKIEALENDLHDEKRSHQDAFAXCXELEEQLXRIETCSVCSSAALD

SEQ ID NO: 77078 - protein, 147 aa, Gossypium hirsutum
  Clone ID: GOSHI-09MAY01-C537_4.pep
KAGKLLNIFLIPTCLKHRMYWHKYSFILLTLDIKRLLGTFVRERICISSNINLQLLLLHYPISCSCADAWADAWDLSDFSLKFACSSAFLGVNQTHETLGQWCVVFMSFGVKEMDLGEDVDAVDGGLLHGPRAITSFHSSRVCFILK

SEQ ID NO: 77079 - protein, 86 aa, Gossypium hirsutum
  Clone ID: GOSHI-09MAY01-C537_3.pep
SFILLTLDIKRLLGTFVREGICISSNINLQLLLLHSPISCSCGIYAGHKYNLSDFSLEFACSSIFLGVNQTHDKYLGVLEFENCRD

SEQ ID NO: 77080 - protein, 125 aa, Gossypium hirsutum
  Clone ID: GOSHI-09MAY01-C537_1.pep
AKFQVLQFGFIYGISIVTQVDAVVYLVDAYDKERFAESKKELDALLSDESLADVPFLILGNKIDLPYAASEDELRFHMGLTNFTTGKGKVNLEGTNVRPLEVFMCSIVRKMGYGDGFRWLSQYIK

SEQ ID NO: 77081 - protein, 175 aa, Gossypium hirsutum
  unsure (1)..(175): unsure at all Xaa locations
  Clone ID: LIB3583-031-Q6-K7-D1.pep
MFLVDWFYGILASLGLYQKEAKILFLGLDNAGKTTLLHMLKDERLVQHQPTQYPTSEELSIGKIKFKAFDLGGHQIARRVWKDYYAKVDAVVYLVDAYDKERFAESKXELDALLSDESLADVPFLILGNKIDLPYAXXEDELRXHMGLTXXTXVEGKVNLEGXNVXSLXVFMFFF

SEQ ID NO: 77082 - protein, 723 aa, Gossypium hirsutum
  Clone ID: GOSHI-09MAY01-C527_1.pep
LEDPSQIAAESSDEDDKGEDADDDDADGAWEKKLSKKEKLMDREFKKDPSEITWDTVNKKLKEVVAARGRKGTGKFEQVEQLTFLTKGAKTPAQKLEILFSVISAQFDVNPGLSGHMPINVWKKCVQNMLVILDILVHYPNIVADDRLEPDENETQKGADYDGTIRVWGNLVAFLERIDNEFFKSLQCIDPHTREYVERLRDEPLFLVLAQNVQEYLERIGDLKSAAKVALRRVELVYYKPQEVYDAMRKLAELSEDGETDGDETKVEETRGTSAFVVTPELVSRKPTFPENSRALMDILVTLIYKSGDERTKARAMLCDIYHHALFDEFSIARDLLLMSHLQDNIQHMDVSTQILFNRAMAQVGLCAFRVGLIAEGHGCLSELYSGGRVKELLAQGVSQSRHHEKTPEQERLERRRQMPYHMHINLELLEAVHLICAMLLEVPNMAANSLDAKRKVISKTFRRLLEVSERQPFTGPPENVRDHVMAATRALCKGDFQKAFDVINSLDVWKLLRNRESVLEMLKAKIKEEALRTYLFTYCSSYDTLGLDQLTRMFDLSDAQIHSIVSKMLVNEELHASWDQPTRCIIFHDVEYSRLQALAFQLTEKLSILAESNERAVEARTGGGGLDLPLRRRDNQEYAPGTAGGGGGRWPDLSYGQGRQGSSGRAAYTGGGRPLALGQASRDRSSQSRGTGGYSGRAGSGMRGYQMDASARMVSLSRGVRG

SEQ ID NO: 77083 - protein, 158 aa, Gossypium hirsutum
  Clone ID: uC-gsronu33B137f04b1.pep
YAWADAWADAWADAWVHSIVSKMLVNEELHASWDQPTRCIIFHDVEYSRLQALAFQLTEKLSILAESNERAVEARFGGGGLDLPLRRRDNQEYAAGTAGGGGGRWPDLSYNQGRQGSSGRAAYTGGGRPLALGQASRDRSSQSRGTGGYSGRAGSGMR

SEQ ID NO: 77084 - protein, 198 aa, Gossypium hirsutum
  Clone ID: GOSHI-09MAY01-C497_1.pep
MATAPSAKLTPLLKDELDIVIPTIRNLDFLEMWRPFFEQYHLIIVQDGDPSKKIRVPDGFDYQLYNRNDVNRILGSKASCISFKDSACRCFGYLVSKKKYIFTIDDDCFVAKDPSGKEINALEQHIKNLLTPSTTHFFNTLYDPYREGADFVRGYPFSLREGVPTAVSHGLWLNIPDYDAPTQLVSPLERNTKVCGSQ

SEQ ID NO: 77085 - protein, 152 aa, Gossypium hirsutum
  Clone ID: LIB3582-043-P1-K1-E2.pep
MATAPSAKLTPLLKDELDIVIPTIRNLDFLEMWRPFFEQYHLIIVQDGDPSKKIRVPDGFDYQLYNRNDVNRILGSKASCISFKDSACRCFGYLVSKKKYIFTIDDDCFVAKDPSGKEINALEQHIKNLLTPSTTHFFNTLYDPYREGADFV

SEQ ID NO: 77086 - protein, 275 aa, Gossypium hirsutum
  unsure (1)..(275): unsure at all Xaa locations
  Clone ID: GOSHI-09MAY01-C457_1.pep
MASSIITSCKVYPGASPSLEPSLFLRSTFLPFPSSITLPSFPSKSCPKSLLISSSLNPNPPCSQRRPPYIPNHIPDPNYVRVFDTTLRDGEQSPGATLTSKEKLDIARQLAKLGVDIIEAGFPAASKDDFEAVKTIAKEVGNAVDGNGYVPVICGLSRCNEKDIKTAWEAXKYAKRPRIHTFIATSAIHWEYKLXRSKRRVVDIARNMXVRFTWSLGCNDARFSPEDAAGSDRRXLYENLGEXIKAGATTLNIPDTVGXTMPSSWGMIVIKPIPP

SEQ ID NO: 77087 - protein, 238 aa, Gossypium hirsutum
  unsure (1)..(238): unsure at all Xaa locations
  Clone ID: GOSHI-09MAY01-C407_1.pep
RGTAGVWRIKAXLEESGGWLXGTTVEDMDIAVRAHLNGWKFIFLNDVEVLCEVPESYEAYRKQQHRWHSGPMHLFRLCLPAIITSKIAIWKKANLILLFFLLRKLILPFYSFTLFCIILPLTMFVPEAELPVWVICYVPVFMSFLNILPSPKSFPFIVPYLLFENTMSVTKFNAMVSGLFQLGSSYEWVVTKKAGRSSESDLLASAEMESKIMNQLQIQRGASESELTELNRLKEQKE

SEQ ID NO: 77088 - protein, 153 aa, Gossypium hirsutum
  unsure (1)..(153): unsure at all Xaa locations
  Clone ID: LIB3582-049-P1-K1-D4.pep
GHQTEKDLQKQKDGMIIGDEIEEIVLDSNLEQQITNAIDSRFLLQLTNVLLGGISAACDPHNEGPDDKEVAAVTAACAFLHVTFNTLPLERIMTVLAYRTELVPVLWNFIKRCHHNQKWSPLPEXFSYLLGNAPGWLLPLAGFXPVYKHMLMI

SEQ ID NO: 77089 - protein, 182 aa, Gossypium hirsutum
  Clone ID: LIB3582-049-P1-K1-D10.pep
FEQAMDLAAVTTFLLDALPPIKSSSRESPTVAEDGMIIGDEIEEIVLDSNLEQQITNAIDSRFLLQLTNVLFGGISAACDPHNEGPDDKEVAAVTAACAFLHVTFNTLPLERIMTVLAYRTELVPVLWNFIKRCHHNQKWSPLPERFSYLLGDAPGWLLPLAVFCPVYKHMLMIVDNEEFYE

SEQ ID NO: 77090 - protein, 259 aa, Gossypium hirsutum
  Clone ID: GOSHI-09MAY01-C747_1.pep
MAATSGAVLNGLGSSFLCGGKRSQALLGASIGAKGSPSPTAGTRKLIVVAAAAPKKSWIPAVRGGGNFIDPEWLDGSLPGDYGFDPLGLGKDPAFLKWYREAELIHGRWAMAAVVGIFVGQAWSGIPWFEAGADPGAIAPFSFGSLLGTQLILMGWVESKRWVDFFNPQSQSVEWATPWSKTAENFANATGEQGYPGGKFFDPLGLAGTIQNGVYVPDIDKLERLKLAEIKHARIAMLAMLIFYFEAGQGKTPLGALGL

SEQ ID NO: 77091 - protein, 102 aa, Gossypium hirsutum
  Clone ID: LIB3120-004-Q1-K1-B1.pep
MLAPKRAESAEHTGILRLRGLPFSAGKDDIMEFFKDFVLSEDAVHIVLNSEGRPSGEAFVEFTNAEDSKAAMSKDRMTLGSRYIELFPSFSEEMEEAISRGR

SEQ ID NO: 77092 - protein, 112 aa, Gossypium hirsutum
  Clone ID: GOSHI-09MAY01-C767_4.pep
MADDKEMSTPVVDRNDPVTGHIISTTIGGKNGEPKQTISYMAERVVGTGSFGIVFQAKCLETGETVAIKKVLQDRIYKNRELQLMRVLDHPNVISLKHCFFSTTTNNELFLN

SEQ ID NO: 77093 - protein, 73 aa, Gossypium hirsutum
  Clone ID: GOSHI-09MAY01-C767_3.pep
PSLRCTALEACAHPVFDELREPNARLPNGRPLPPLFNFKQELSGASPELINKLIPDHVKRQIGLQHFMHPPGT

SEQ ID NO: 77094 - protein, 132 aa, Gossypium hirsutum
  Clone ID: GOSHI-09MAY01-C767_2.pep
MAENKEMSAPVVDVNDPVTGHIISTTIGGKNGEPKQTISYMAERVVGTGSFGIVFQAKCLETGETVAIKKVLQDRRYKNRELQLMRVLDHPNVISLKHCFFSTTTKNELFLNLVMEYVPESMYRVLKHYSSA

SEQ ID NO: 77095 - protein, 381 aa, Gossypium hirsutum
  Clone ID: GOSHI-09MAY01-C767_1.pep
MADDKEMSTPVVDRNDPVTGHIISTTIGGKNGEPKQTISYMAERVVGTGSFGIVFQAKCLETGETVAIKKVLQDRRYKNRELQLMRVLDHPNVISLKHCFFSTTTKNELFLNLVMEYVPESMYRVLKHYSSANQRMPLIYVKLYTYQIFRGLAYLHSVVGVCHRDLKPQNLLVDPLTHQAKICDFGSAKVLVKGEANISYICSRFYRAPELIFGATEYTTSIDIWSAGCVLAELLLGQPLFPGENAVGQLVEIIKVLGTPTREEIRCMNPNYTDFRFPQMKAHPWHKVFHKRMPPEAIDLTSRLLQYSPSLRCTALEACAHPFFDELREPNARLPNGRPLPPLFNFKQELSGASPELINKLIPDHVKRQIGLQHFMHPART

SEQ ID NO: 77096 - protein, 99 aa, Gossypium hirsutum
  unsure (1)..(99): unsure at all Xaa locations
  Clone ID: LIB3272-044-P1-K1-D6.pep
EIWDHVGDVNDTNSGHVVATTIGGKNGEAKQTIKYLARARXAAPGSFGIALQAKCLETGETVAIKKVLHDTLYKNRELHMMRVLDHANVIASKHCFFHT

SEQ ID NO: 77097 - protein, 113 aa, Gossypium hirsutum
  Clone ID: GOSHI-09MAY01-C717_3.pep
KAESGTNVPPPAKSRETSTVHLSDEYLSFCYTCKKKLEKDEEVYMHRGEKAFCSFDCRTEEIFADEEMEKTCNNSSSNSSPEQSNDEDVFLMAIDDRSIRSINHNSWIAQHRV

SEQ ID NO: 77098 - protein, 245 aa, Gossypium hirsutum
  Clone ID: GOSHI-09MAY01-C717_1.pep
MDGSVMADPDPDSSTLGLRHISSSLFNIPGFLVGFSTKGSSDSDAVRSPTSPLDLRGFANFSNPFTVRSPRSSSQSGCQKKWDCSKIGLGIVNLLADEIKPDGGDLDSPKRMNIVFGPQVKTKFPYSSRYSREYLGNSMKSNSLPRNYIISQLFQARKSSTKSADSSLDFGNEEVPVEPKTDLGLSPSFISSSENLNMSSESCCSENATFSTNSSPLPIGRPLQVDNSLVSKPSSLPILLSHSMV

SEQ ID NO: 77099 - protein, 120 aa, Gossypium hirsutum
  Clone ID: LIB3543-029-Q1-K6-F3.pep
MDGSVMADPDPDSSTLGLRHISSSLFNIPGFLVGFSTKGSSDSDAVRSPTSPLDLRVFANFSNPFTVRSPRSSSQSGCQKKWDCSKIGLGIVNLLADDIKPDGGDLDSPKRMNIVFGPQV

SEQ ID NO: 77100 - protein, 200 aa, Gossypium hirsutum
  unsure (1)..(200): unsure at all Xaa locations
  Clone ID: LIB3582-047-P1-K1-B4.pep
SFIATSHISAETSSASIHLYNWWSSTALDNFLVPEPVAPLSATLDGLYLFAGGLSGSVHALSVPSGEILASYSAHXSLFPDKSSTSLMLQRFVAHDGSVTAIDSIMAQCNSTIISSSLDCTIKIWGLLDGTKLRTVTFPCAIMGIALDQIRKEFFAASSDGFIYKGSINAGSKKHVNQTQEFIRWAQKHESGIVSLVMVS

SEQ ID NO: 77101 - protein, 174 aa, Gossypium hirsutum
  Clone ID: LIB3543-033-Q1-K1-D3.pep
GPSSASFHLYNWWSSTALHNFLVPEPVAPLSATLDGLYLFAGGLSGSIHALSVPSGEILASYSAHNKPVSCLKISEDGSLLISGGDDGTISFVPIFQIIEASPDKSSTSLMLQRFVAHDGSVTAIDSIMAQCNSTIISSSLDCTIKIWGLLDGTKLRTVTFPCAIMGIALDQIR

SEQ ID NO: 77102 - protein, 178 aa, Gossypium hirsutum
  unsure (1)..(178): unsure at all Xaa locations
  Clone ID: GOSHI-09MAY01-C727_2.pep
PASGEDDIEDIQNEISVLSQCRCQYITEYYGSYLHQTKLWLIMEYMAGGSVADLLQSGPPLDEMSIASISXGKIHRDIKGSASILLTENGDVKVADFGVSAQLTRTISQRKTFVGTPFWMAPEVIQNSDGYNEKVLLKLCVQPNLCPGPTSRDPRIKPTQTSPLQQGPTKVSIGFQLF

SEQ ID NO: 77103 - protein, 139 aa, Gossypium hirsutum
  unsure (1)..(139): unsure at all Xaa locations
  Clone ID: LIB3582-047-P1-K1-D3.pep
MADIEGLQPAAGSRFSQVELIGRGAFGDVYKVFDKELKKEVAIKVRMTLRTSRMYCLTLLGASILSFQRVGYXGFSYVLFLFQEISVLSQCRCQYITEYYGSYLHQTKLWLIMEYMAGGSVADLVGHFYFLLHCCMMLG

SEQ ID NO: 77104 - protein, 115 aa, Gossypium hirsutum
  Clone ID: GOSHI-09MAY01-C697_2.pep
IFSSHFKSKMEKMGRGVSSGGGQSSLGYLFGSGEAPKPVTNKSEAAPIEAQDVSKPAPAPQQVAKQIPAGINSTRADGQNTGNFITDRPSTKIHAAPGGGSSLDYLFGGGPGGSK

SEQ ID NO: 77105 - protein, 87 aa, Gossypium hirsutum
  Clone ID: GOSHI-09MAY01-C697_1.pep
KITQAGGKKQHKVRIYKYSQKSNNPKGIGARGGGMNIKLWMNCRKKGRKTSISPELPSQSLMKTIVSNVIPILQIPSPRLFHFSNAM

SEQ ID NO: 77106 - protein, 72 aa, Gossypium hirsutum
  Clone ID: LIB3582-047-P1-K1-A5.pep
YEHKFMASLHKISNVIQHIARTSITILNQDYSNQRYSDTSNRLAPHLPCCECNVTQMNTSARQALDSPLCRT

SEQ ID NO: 77107 - protein, 117 aa, Gossypium hirsutum
  Clone ID: LIB3147-059-Q1-K1-C11.pep
NDRPTDASTHFGLCFDVWADALTEGWCDSWSRGVSSGSGHSSLGYLFGSGEAPKPVTNKSEAAPIEAQDVSKPAPAPQQVAKQIPAGINSSRADGQNTGYFITDRPSTKIHASPGSG

SEQ ID NO: 77108 - protein, 128 aa, Gossypium hirsutum
  Clone ID: GOSHI-09MAY01-C607_2.pep
DIDINFLATGQTMERLRSHETGIFKKKPADLMQIFKDVQSKVSDVVLGKEKPVEESNPEYEKLKHYVFELENHLAEAQKHAYRLVKRHRELGQSLSDFGKAAKLLGACEGQVLGKAFSDLGAKSEVLS

SEQ ID NO: 77109 - protein, 300 aa, Gossypium hirsutum
  unsure (1)..(300): unsure at all Xaa locations
  Clone ID: GOSHI-09MAY01-C607_1.pep
HASERSLSGSSQSPRSPSSQPYLSVSVTDPVKLGNGVQAYISYRVITKTNFPEYQGPEKIVIRRYSDFIWLRDRLFERYKGIFIPPLPEKSAVEKFRFSAEFIETRRQALDVFVNRIASHNVLQQSEDLRTFLQADEETMERLRSHETGIFKKKPADLMQMFKDVQSKVSDVVLGKEKPVEESNPEYEKLKHYVFELENHLAEAQKHAYRLVKRHRELGQSLSGFGKAAKLLGACEGQALGKAFADLGAKSEALSAKLQKEAHQLLMSFEEPLKDYVRAVQSIKATIGERANAFXQQCEL

SEQ ID NO: 77110 - protein, 227 aa, Gossypium hirsutum
  unsure (1)..(227): unsure at all Xaa locations
  Clone ID: GOSHI-09MAY01-C637_10.pep
SLVRPRVRAFTCKYKWEVLNAADRHHVTLLGLDYRSSPPAPLIDSXELTKWSFYRAVIAEFIATLLFLYVTVLTVIGYKVQTDPAXNTVDPYCGGVGILGIAWAFRGMIFILVYCTAGISGGHINPAVTFGLVVGRKGSLVPTPVDLGASCLGAIRGCWLVKAFQKTYYHSYXSGANELQDGFNKGTGLGAEIIGTFVLVYTVFSATDPKRSARDSHVPVLAPLSIG

SEQ ID NO: 77111 - protein, 288 aa, Gossypium hirsutum
  unsure (1)..(288): unsure at all Xaa locations
  Clone ID: GOSHI-09MAY01-C637_6.pep
MGKDIESSVEQGSGKDYHDPPPAPLIDAEELTKWSFYRAVIAEFIATLLFLYVTVLTVIGYKVQTDPLKNTVDPDCGGVGILGIAWAFGGMIFILVYCTAGISGGHINPAVTFGLFLGRKVSLIRAIMYMVAQCXGAICGCGLVKAFQKTYYTXYGGGANELQGGFNKGTGLGAEIIGTFVLVYTVFSATDPKRSARDSHVPVLAPLPIGFAVFMVHLATIPITGTGINPARSFGAAVIYNQEKAWDDQWIFWVGPFIGAFVAAFYHQYILRAAAKAPMKAFQKTYYN

SEQ ID NO: 77112 - protein, 188 aa, Gossypium hirsutum
  Clone ID: GOSHI-09MAY01-C637_5.pep
MTKDIETTAEQGGGAEFSAKDYQDPPPAPLIDLEELTKWSLYRAAIAEFIATLLFLYVTVLTVIGYKVQTDPVKNTIDPDCGGVGILGIAWAFGGMIFILVYCTAGISGGHINPAVTFGLFVGRKVSLIRALLYMVAQCLGAICGCGLVKAFQKTYHFPLDLPCSWFTLPLSLSLALASIQQGALELL

SEQ ID NO: 77113 - protein, 121 aa, Gossypium hirsutum
  Clone ID: GOSHI-09MAY01-C637_3.pep
MALSRFVYLIMLALLFCSVIAQSPTPSPVSSPKKSPSSTPTPISSPPTISAPSPSEVPSATTPSPATVESPPSPSALSPNASPTSISEPPAGAPGPAENSAVRFGAAGSVAVGVLMVAMVL

SEQ ID NO: 77114 - protein, 289 aa, Gossypium hirsutum
  Clone ID: GOSHI-09MAY01-C637_2.pep
MTKDIETAEQHGGEFSAKDYHDPPPAPLIDAEELTKWSFYRAVIAEFIATLLFLYVTVLTVIGYKVQTDPAKNTVDPDCGGVGILGIAWAFGGMIFILVYCTAGISGGHINPAVTFGLFVGRKVSLIRALMYMVAQCLGAICGCGLVKAFQKTYYNNYGGGANELQPGFNKGTGLGAEIIGTFVLVYTVFAATDPKRNARDSHVPVLAPLPIGFAVFMVHLATIPVTGTGINPARSFGAAVIYNKEKAWDDQWIFWVGPFIGAAAAAFYHQYILRAAAIKALGSFRSNA

SEQ ID NO: 77115 - protein, 214 aa, Gossypium hirsutum
  unsure (1)..(214): unsure at all Xaa locations
  Clone ID: GOSHI-09MAY01-C637_1.pep
MGAKARKAWKKAIKRASSQFPNSDSKTASADFLPLEGGPREIPEXQTPSKNATVLYVGRIPHGFYEKEMEAYFQQFGAIKRLRIARNKKTGRSKHFGFIEFENPQVAEVVADCMHNYLLFEHLLQVHLIPPEHVHPKLWRGFNYKFKPVDYVQIERKQHNKVRTLEEHKKLVEKIIKRDTKRRKRIEAAGIDYECPEIVGSGQSAPKKIKFDED

SEQ ID NO: 77116 - protein, 65 aa, Gossypium hirsutum
  Clone ID: LIB3583-005-P1-K1-E5.pep
VDSEFYLICSIFVIQVRTLEEHKKLVEKIIKRDTKRRKRIEAAGIDYECPEIVRIQPSTCFNLYL

SEQ ID NO: 77117 - protein, 104 aa, Gossypium hirsutum
  Clone ID: uC-gsflnu33B092f05b1.pep
MALSRFVYLIMLALLFCSVIAQSPTPSPVSSPKKSPSSTPTPISSPPTISAPSPSEVPSATTPSPATVESPPSPSALSPNASPTSICEPPAWAPAPVDIPAIQF

SEQ ID NO: 77118 - protein, 85 aa, Gossypium hirsutum
  Clone ID: uC-gsflnu33B092f11b1.pep
KVLAPLPIGFAVFMVHLATIPVTGTGINPARSFGAAVIYNKEKAWDDQWIFWVGPFIGAAAAAFYHQYILRAAAIKALGSFRSNA

SEQ ID NO: 77119 - protein, 121 aa, Gossypium hirsutum
  Clone ID: LIB3272-020-P1-K1-A10.pep
VSNGGSIPGVQHSGTWTWVTDDQIGTFCSCLHLSSPPLDPKRNARDSHVPVLAPLPIGFAVFMVHLATIPVTGTGINPARSFGAAVIYNKEKAWDDQWIFWVGPFIGAAAAAFYHQYILRA

SEQ ID NO: 77120 - protein, 323 aa, Gossypium hirsutum
  unsure (1)..(323): unsure at all Xaa locations
  Clone ID: GOSHI-09MAY01-C197_1.pep
ESRSPTRPASLANTTAGAVAGARKISNGKPIPIISSKSLSFPSFRPSISSLKPLIPTKFSSLSPLQCSPNPSPSTSPPSLKSRLRNGETLYGIFLLSFSPTLAEIVAFSGYDFVVIDMEHGPGGIHESLQMLRAVATTNTPAIIRLPESSAVWAKKALDLGPQGIMFPMIDSPKDARKAVSYCRFPPNGIRGSAHTVVRASNYGINEGYLSNYKEDLLIMCQVETVDGVKKVEEIAAVEGVDCIQMGPLDLSASLGYLWDPGHKNVREMLTTADKEVLNSXPEDGGAFLAGFAMPHDPPEALGKPGXHMVSGAHDFGLFPNAA

SEQ ID NO: 77121 - protein, 266 aa, Gossypium hirsutum
  Clone ID: GOSHI-09MAY01-C187_1.pep
KDRLDYFYNQGRDEFFKSKIQKYNSTVFRTNMPPGPFISQDPKVVALLDGKSFPVLFDVTKVEKKDLFTGTYMPSTDLTGGYRILSYLDPSEPKHARLKQLLFFLLKSRRDHVIPEFQASYSELFETLEKEVAEKGKSSFQTANDQAGFNFLCRAFFGSNPPDTKLGTDGPSLISKWVLFQLGPVLKLGLPKYVEELLIHTFPLPPALVKKDYQRLYDFFYESSGSIQDEAEKLGISREEACHNLLFATCFNSFGGMKIFFPTCLN

SEQ ID NO: 77122 - protein, 63 aa, Gossypium hirsutum
  Clone ID: GOSHI-09MAY01-C147_8.pep
CTTIDIKTQTSKNGVHLMGDQASVLTNYIQTDVYSKSQRRLLPHYPSYSLLAYSFPRVRPRVR

SEQ ID NO: 77123 - protein, 226 aa, Gossypium hirsutum
  unsure (1)..(226): unsure at all Xaa locations
  Clone ID: GOSHI-09MAY01-C147_5.pep
ARKNFMGGAGECVQVRTPVVSFSVKLVLRRSCRTVYVASLPTKHNAVWGMEARPXEEGLAEAIDEGRIGPRDDPKVRSKILAEEYGWDKDLAKKIWCFGPETTGPNMVVDMCKGVQYLNEIKDSVVAGFQWASKEGAMAEENMRGICFEVCDVVLHADAIHRGGGQIIPTATRVFYASQVTGKTKVLEPGYLGENLDPLHGPLGVLQVFNANRALFLRNLGAGTPF

SEQ ID NO: 77124 - protein, 146 aa, Gossypium hirsutum
  unsure (1)..(146): unsure at all Xaa locations
  Clone ID: GOSHI-09MAY01-C147_4.pep
TWPTWSTEGLRHSQVEVLSLTTAKPRLLEPVYLVQISTPEQALGGIYSVLNQKRGHVFEEMQRXPGTPLYNIKAYLPVIESFGFSSTLRAATSGQAFPQCVFDHWDMMPSDPLEPNSQAAIHVAEIRKRKGLKEQMTPLSEYEDKL

SEQ ID NO: 77125 - protein, 142 aa, Gossypium hirsutum
  Clone ID: GOSHI-09MAY01-C147_3.pep
FSTRPIPTARRVLYAYQLTAKPRLLEPVYLVEIQAPEQALGGIYSVLNQKRGHVFEEMQRPGTPLYNIKAYLPVIESFGFSSTLRAATSGQAFPQCVFDHWDMMSSDPLEPGSQAANHVAEIRKRKGLKEQMTPLSDYEDKL

SEQ ID NO: 77126 - protein, 142 aa, Gossypium hirsutum
  Clone ID: GOSHI-09MAY01-C147_2.pep
SSTRPIPTARRVFYASQLTAKPRLLEPVYLVEIQAPEQALGGIYSVLNQKRGHVFEEMQRPGTPLYNIKAYLPVIESFGFSSTLRAATSGQAFPQCVFDHWDMMSSDPLEPGSQAAAHVAEIRKRKGLKEQMTPLSEYEDKL

SEQ ID NO: 77127 - protein, 538 aa, Gossypium hirsutum
  Clone ID: GOSHI-09MAY01-C147_1.pep
PTRPKDLMGKSLMKRVMQTWLPASNALLEMMIFHLPSPSKAQKYRVENLYEGPLDDIYANAIRNCDPEGPLMLYVSKMIPASDKGRFFAFGRVFSGKVSTGLKVRIMGPNYVPGEKKDLYVKSVQRTVIWMGKKQETVEDVPCGNTVAMVGLDQFITKNATLTNEKEVDAHPIRAMKFSVSPVVRVAVQCKVASDLPKLVEGLKRLAKSDPMVVCTIEESGEHIVAGAGELHLEICLKDLQEDFMGGAEIIKSDPVVSFRETVLERSCRTVMSKSPNKHNRLYMEARPLEEGLAEAIDEGRIGPRDDPKVRSKILAEEYGWDKDLAKKIWCFGPETTGPNMVVDMCKGVQYLNEIKDSVVAGFQWASKEGAMAEENMRGICFEVCDVVLHADAIHRGGGQIIPTARRVFYASQLTAKPRLLEPVYLVEIQAPEQALGGIYSVLNQKRGHVFEEMQRPGTPLYNIKAYLPVIESFGFSSTLRAATSGQAFPQCVFDHWDMMSSDPLEPGSQAAAHVAEIRKRKGLKEQMTPLSEYEDKL

SEQ ID NO: 77128 - protein, 42 aa, Gossypium hirsutum
  Clone ID: LIB3147-002-Q1-K1-G11.pep
PRVRSSDPLEPGSQAAAHVAEIRKRKGLKEQMTPLSEYEDKL

SEQ ID NO: 77129 - protein, 121 aa, Gossypium hirsutum
  unsure (1)..(121): unsure at all Xaa locations
  Clone ID: LIB3189-013-P1-K1-F4.pep
GSDQPFRICFEVCDLVLHFYAIHRGGGRVILTGRRCVYASXLTAKPRLLEPVYLVEIQAPEQALVGXFSVLNQKRGHVFXKCIVPGSPLYNIKFFLSFIVLYFLFSTLMAVTCVTCFPTIC

SEQ ID NO: 77130 - protein, 117 aa, Gossypium hirsutum
  Clone ID: uC-gsronu33B108g12b1.pep
LSSGFFAFCTVGSSLKATGGKDKIMGPNYVPGEKKDLYLKSVQRTAIWMVKNHVTVEDVPCGNTSAMVGLYHVITKNATLTNEKEGDAHPIHAMKFSVYPDVRVADHCKVVSNLPKL

SEQ ID NO: 77131 - protein, 142 aa, Gossypium hirsutum
  unsure (1)..(142): unsure at all Xaa locations
  Clone ID: GOSHI-09MAY01-C177_1.pep
IEKRGIGNKHARANWLKMGDKNTALFHKYTSXEGMLTRFEXLQRSDGSLAMDSREVEPVAKGYFFDHFMSRGIGNMYHILFRVHSCISESMNRILLATYAGGEIIEVLKGMGPTKASGIDGFPAIFYQKYWHIIGKDTCDFC

SEQ ID NO: 77132 - protein, 58 aa, Gossypium hirsutum
  Clone ID: GOSHI-09MAY01-C107_4.pep
VSTFVHACEGDAVTKLTNEKIPYFNANIYLQNKTQIGKVDEIFGPINESYFSIKMLEG

SEQ ID NO: 77133 - protein, 92 aa, Gossypium hirsutum
  Clone ID: GOSHI-09MAY01-C107_3.pep
MTKRTRKAGIVGKYGTRYGARVRKQIKKMEVSQHSKYFCEFCGKYAVKRKAVGIWGCKDCGKIKAGGAYTLNTASAVTVRSTIRRLREQTES

SEQ ID NO: 77134 - protein, 92 aa, Gossypium hirsutum
  Clone ID: GOSHI-09MAY01-C107_2.pep
MTKRTKKAGIVGKYGTRYGASLRKQIKKMEVSQHSKYFCEFCGKYAVERKAVGIWGCKDCGKVKAGGAYTLNTASAVTVRSTIRRLREQTES

SEQ ID NO: 77135 - protein, 92 aa, Gossypium hirsutum
  Clone ID: GOSHI-09MAY01-C107_1.pep
MTKRTKKAGIVGKYGTRYGASLRKQIKKMEVSQHSKYFCEFCGKYAVKRKAVGIWGCKDCGKVKAGGAYTLNTASAVTVRSTIRRLREQTES

SEQ ID NO: 77136 - protein, 126 aa, Gossypium hirsutum
  Clone ID: LIB3149-039-Q1-K1-F10.pep
MRPPMVGGGFRGGRDGGRGRGGGRGGFGRGGGRGGGGFRDEGPPAEVVEVSTFVHACEGDAVTKLTNEKIPYFNANIYLQNKTQIGKVDEIFGPINESYFSIKMLEGIVATSYAPGDKFYIDPSKL

SEQ ID NO: 77137 - protein, 75 aa, Gossypium hirsutum
  Clone ID: LIB3272-054-P1-K1-G11.pep
PTSSHNTFVFYNEYFPQLSQKCRLLTRLHVLNIHPQSGTKVCNIFALNSGLLRSLCHGRWVDRICACLVRKVRSG

SEQ ID NO: 77138 - protein, 182 aa, Gossypium hirsutum
  Clone ID: GOSHI-09MAY01-C137_3.pep
MLLCTLKGKQMVAATEKFHERYIFDGAYDKVENQSGVGIVARDSNGTILFSYSEIHCGIPSAFAAEAIACRKGVQMGIRRGWRHLILEGDSLTIVKKCKSKSQDRSMVGVYIFDIQQEIYGLENIRFQYIPRSANGLAHIIATESLRRGEEFYLDRGVPDYANGSSRAGGGGRRRSLQRTRG

SEQ ID NO: 77139 - protein, 100 aa, Gossypium hirsutum
  Clone ID: GOSHI-09MAY01-C137_2.pep
DAARILRIPLAQTPHDDFLIWGGERSGEFTVRSAYQLLQKLTDNPRAYALQTIYGNFYKKLWCLNLPAKIKVTIWKLSRNYLPTKVNLQHRKLVVNPSCP

SEQ ID NO: 77140 - protein, 105 aa, Gossypium hirsutum
  Clone ID: GOSHI-09MAY01-C137_1.pep
ASFMKINFDGAFDRGKNQSGVGIVARDSDGNILFSCSEIHFNISSAFAAEAIACRKAVQMGIRRGLQHLILEGDSHTIVWIGEFQIMPWTKLGDFFWHILDMKSS

SEQ ID NO: 77141 - protein, 140 aa, Gossypium hirsutum
  Clone ID: LIB3583-037-P1-K1-B3.pep
GVGIVARDSDGNILFSCSEIHFNISSAFAAEAIACRKAVQMGIRRGLQHLILEGDSLTIVKKCKSKSQDRSMVGVYIYDIQQEIFGLDNIRFQHTPRSANGLAHIIATESLRRGEEFYLDRGVPDYAMDQARLDGRCEED

SEQ ID NO: 77142 - protein, 100 aa, Gossypium hirsutum
  Clone ID: LIB3135-046-Q1-K1-H4.pep
FMKINFDGAYDKVKNQSGVGIVARDSNGTILFSYSEIHFGIPSAFAAEAIACRKGVQMGIRRGWRHLILEGDWIGEFQIMQMDQARLDGGSEEEVSREEK

SEQ ID NO: 77143 - protein, 1071 aa, Gossypium hirsutum
  unsure (1)..(1071): unsure at all Xaa locations
  Clone ID: GOSHI-09MAY01-C127_1.pep
MESEGDIGGKPMKNLGGQTCQICGDNVGKNTDGDPFIACNICAFPVCRPCYEYERKDGNQSCPQCKTRYKWQKGSPAILGDRETGGDADDGASDFIYSENQEQKQKLAERMQGWNAKYGRGEDVGAPTYDKEISHNHIPLLTSGQEVSGELSAASPERLSMASPGVAGGKSSIRVVDPVREFGSSGLGNVAWKERVDGWKMKQEKNTVPMSTCQATSERGLGDIDASTDVLVDDSQLNDEARQPLSRKVSVSSSKINPYRMVIILRLVILCIFLHYRITNPVPNAYALWLISVICEIWFAISWILDQFPKWLPVNRETYLDRLALRYDREGEPSELAAVDIFVSTVDPLKEPPLVTANTVLSILAVDYPVDKVSCYVSDDGAAMLTFEALSETSEFARKWVPFCKKYNIEPRAPEWYFAQKIDYLKDKVQTSFVKDRRAMKREYPTRPEESNVRINGLVAXAHKVPEEGWIMQDGTPWPGDNTRDHPGMIQGFLGQSGGLDAEGNELPRLVYVSREKRPGFQHHKKAGAMNALVRVSAVLTNGPFLLNLDCDHYINNSKALREAMCFLMDPNLGKQVCYVQFPQRFDGIDRNDRYANRNTVFFDINLRGLDGIQGPVYVGTGCVFNRTALYGYEPPLKPKHRKTGILSSLCGGSRKKSSKSSKKGSDKKKSGKHVDSTVPVFNLEDIEEGVEGAGFDDEKSLLMSQMSLEKRFGQSAVFVASTLMENGGVPQSATPETLLKEAIHVISCGYEDKTDWGSEIGWIYGSVTEDILTGFKMHARGWRSIYCMPKRPAFKGSAPINLSDRLNQVLRWALGSVEILFSRHCPIWYGYSGRLKWLERFAYVNTTIYPVTAIPLLMYCTLPAVCLLTNKFIIPQISNLASIWFISLFLSIFATGILEMRWSGVGIDEWWRNEQFWVIGGVSAHLFAVFQGLLKVLAGIDTNFTVTSKASDEDGDFAELYMFKWTTLLIPPTTLLIINLVGVVAGISYAINSGYQSWGPLFGKLFFAFWVIIHLYPFLKGLMGRQNRTPTIVVVWSILLASIFSLLWVRIDPFTTRVTGPDVEQCGINC

SEQ ID NO: 77144 - protein, 137 aa, Gossypium hirsutum
  Clone ID: LIB3585-052-P1-K1-H6.pep
VKVLAGIDTNFTVTSKASDEDGDFAELYMFKWTTLLIPPTTLLIINLVGVVAGISYAINSGYQSWGPLFGKLFFAFWVIIHLYPFLKGLMGRQNRTPTIVVVWSILLASIFSLLWVRIDPFTTRVTGPDVELCGINC

SEQ ID NO: 77145 - protein, 129 aa, Gossypium hirsutum
  Clone ID: LIB3828-018-Q1-K6-G6.pep
AAWVHGHFKTQRRGDFAELYMFKWTTLLIPPTTLLIINLVGVVAGISYAINSGYQSWGPLFGKLFFAFWVIIHLYPFLKGLMGRQNRTPTIVVVWSILLASIFSLLWVRIDPFTTRVTGPDVEQCGINC

SEQ ID NO: 77146 - protein, 91 aa, Gossypium hirsutum
  unsure (1)..(91): unsure at all Xaa locations
  Clone ID: LIB3135-056-Q1-K1-F5.pep
GRVGDYPVDKVSRYVSDDGAAMLTFEELYETSEFARKWVPFCKKXNVKLWAPEWYFTWKIDXPKDKVQPSFLKDHRALKVRVSLVVLYHYI

SEQ ID NO: 77147 - protein, 162 aa, Gossypium hirsutum
  Clone ID: uC-gsronu33B111a04b1.pep
VFVHLFAVFQGGLGVLDGVGANFTVTSKASDEDGDFAELYMFKWTTLLIPPTTLLIINLVGVVAGISYAINSGYQSWGPLFGKLFFAFWVIIHLYPFLKGLMGRQNRTPTIVVVWSILLASIFSLLWVRIDPFTTRVTGPDVELCGINCLVHRKGGNERNMM

SEQ ID NO: 77148 - protein, 51 aa, Gossypium hirsutum
  Clone ID: LIB3146-020-Q1-K1-E4.pep
HASVGRQNRTPTIVVVWSILLASIFSLLWVRIDPFTTRVTGPDVEQCGINC

SEQ ID NO: 77149 - protein, 191 aa, Gossypium hirsutum
  Clone ID: GOSHI-09MAY01-C367_1.pep
RPRTPPNSPPNRMVGERKEQRTRAHHNRLARELRGEKSHRDLVEPRPSLQTQLTPPSGPLPSKGLGTGVAGSFECGQGLGKAKAPCGRRLGMHKASLNVTGAKRQAKLEPIAMHKPPQEIFARIGNLVLESLATFLWAGLTGRKIVTPTTTAGDRLTPVVSRCGTTRPPGGARRTPPRLGGGGTPGGSGSP

SEQ ID NO: 77150 - protein, 590 aa, Gossypium hirsutum
  unsure (1)..(590): unsure at all Xaa locations
  Clone ID: GOSHI-09MAY01-C297_1.pep
SSPAALGASAVRGAPIAGLGPCLPARPVPKKTSTSPPRGSAVSPNNKLDKHQMNVAHETGSKNKNQLPKLVLKPSSGSSKATDNPNKDGLREKSFSTSMRGQVPEVAIQWRPLKLVYDHDIRLSQMPVNCSFKVLREIVSKRFPSSKSVLIKYKDNDGDLVTITCTTELRLAESSVDALVPIEPEADKTSGFRTLRLHIVEVSPEQEPPLPEEEEEKPLESQGAKSDESVSHSSLGDSVSEGVDVEIEKTEKEASKRKIGATEDSECKEVEMDDWLFEFAQLFRTHVGIDPDAHIDLHELGMEHCSEALEETVTTEDAQILFDKAAAKFQEVAALAFFNRGNVHMCAARKRIPLDESAGKEVVSEKLQTAYDWVREKYSLAREKYAEALSIKPDFYEGLLALGQQHFEMAKLNWSFALAKKIDLSTWDPAETLQLFNSAEEMMKDATEMWEKLEQQRVNELKDPNSSKKEELLKRKKKLGSGAENEFPGTGNQCELSAEEVAEQAAVMRSQIXLFWGNMLFERSQVECKLGMDGWKKNLDTAVERFKLAGASEADISTVLKNHCSNGDAVEGYFNKVVGDVNKISAVKTK

SEQ ID NO: 77151 - protein, 98 aa, Gossypium hirsutum
  Clone ID: GOSHI-09MAY01-C257_1.pep
MFPAVLTQVATGLSVLAGAVLVKSVMDQKPMAGPFQRCPTCNGTGRITCICTRWSDGDIGCRTCAGSGRMACSSCGGSGTGRPIPVQISVRQPTNRNS

SEQ ID NO: 77152 - protein, 124 aa, Gossypium hirsutum
  Clone ID: GOSHI-09MAY01-C38994_1.pep
GSWYALVLISMYNVWDLIGRYIPLIKPLKLESRKALTTVIISRVLLVPAFYFMSKYGDQGWMIMLTSILGLSNGRLTVCVLTSAPKGYKGPEQNALGNLLVLFLLGGIFAGVTLDWLWLIGKGW

SEQ ID NO: 77153 - protein, 148 aa, Gossypium hirsutum
  Clone ID: GOSHI-09MAY01-C38954_1.pep
MPQGKLQVVLVSAKGLENTDFLCNMDPYVLLTCRTQEQKSSVASGKGSEPEWNEDFIFNISEGASELALKIMDSDAGSQDDFVGEVAIPLEPVFIERNIPLTPYTVVKDGEYRGEIKFGLTFTPEERESRDFEVEESFGGWKQSSYTD

SEQ ID NO: 77154 - protein, 89 aa, Gossypium hirsutum
  Clone ID: LIB3147-007-Q1-K1-F6.pep
HASAQGKLQVVLVSAKGLENTDFLCNMDPYVLLTCRTQEQKSSVASGKGSEPEWNEDFIFNISEGASELALKIMDSDAGSQDDFVGEVA

SEQ ID NO: 77155 - protein, 77 aa, Gossypium hirsutum
  Clone ID: LIB3146-015-Q1-K1-F8.pep
GCNHYSGRHVFIPLEPEFIGGNIPLTAYTVVKDGEYRGEIKLGLTFTPEERECRDFEVEEYFRGWKQSLYTDYAGHL

SEQ ID NO: 77156 - protein, 199 aa, Gossypium hirsutum
  unsure (1)..(199): unsure at all Xaa locations
  Clone ID: GOSHI-09MAY01-C38854_1.pep
MFQATDAGPGTWGYINITNLKGGKAGFGAEDNVGQLGATGVKYIKEIPYNICIEQISHALNSDEAEAPTAAPSQLNLTEIMSXQGCKALADSLTASGADDKCNENMDAGLTVFCPTDGAVKSVMPKYKNLASPKKVSLLLYHGIPGFMSLHMLKTNNGVMNTLATDGANSYDFSVSNEDEVVSLDTTVVTSKVLGFLKE

SEQ ID NO: 77157 - protein, 87 aa, Gossypium hirsutum
  unsure (1)..(87): unsure at all Xaa locations
  Clone ID: LIB3825-027-Q6-K6-F2.pep
VRXREGLFRHXIQCKXSASGGCVLCKXMWYLLQLHARACKESECHVPRCRDLKEHLRRLQQQSDSRRRAAVMEMMRQRAAEVAGNSA

SEQ ID NO: 77158 - protein, 61 aa, Gossypium hirsutum
  Clone ID: LIB3147-001-Q1-K2-G10.pep
KMWYLLQLHARACKESQCHVPRCRDLKEHLRRLQQQSDSRRMAAVMEMMRQRAAEVAGSSG

SEQ ID NO: 77159 - protein, 164 aa, Gossypium hirsutum
  unsure (1)..(164): unsure at all Xaa locations
  Clone ID: GOSHI-09MAY01-C38594_1.pep
LEALKSRSTAAEARLAAANEQAESAQEEAEEWKMKYDCADREANAALEKAASVQERSSKETQLREDTLREEFSHTLADKEEEIKEKSAXIEHAEQSLTTLKSESKAAEAKIKSYDTEASSLKVEIRELIDKVENTNAKALSFEREAKILEQEKTHLEQKYSSEF

SEQ ID NO: 77160 - protein, 103 aa, Gossypium hirsutum
  Clone ID: uC-gsflmaxxa090c09b1.pep
RGSRPKSRKYKRRPQYLLVVRYTSRRMAYDNRNRRLARSQRIQGFSTMEQACRPRALDVLTPCEEWRCTKYMRLGFLVGSISFRYMGRSGLRLGTVDYGLRLD

SEQ ID NO: 77161 - protein, 100 aa, Gossypium hirsutum
  Clone ID: LIB3145-056-Q1-K1-A2.pep
FSLNQTQRPNLSRHFWATHGYHRRSRLHLCRGSRPKSRKNKRRPLYPLLVRYPSRRMASDNRNRRLARSQRIQGFSTLVQACSPRALDVLTPCEEWRCTK

SEQ ID NO: 77162 - protein, 125 aa, Gossypium hirsutum
  Clone ID: GOSHI-09MAY01-C38524_1.pep
VTQTDIIMPDLSQISEMVPESIVDIPTEMGNDGLIDPDTLAVNGLLSIELDDIGSDPDIDALLVNSPFFHDLFPSPVCEEIESTSMEGKSKENEGQAMDDGWDKSQHMDKLTEQMGLLRSENKGI

SEQ ID NO: 77163 - protein, 87 aa, Gossypium hirsutum
  unsure (1)..(87): unsure at all Xaa locations
  Clone ID: GOSHI-09MAY01-C38484_1.pep
PRVRADRGSSWMSSQPDNXTLTQLQGPSALVPSQMGSGNQPPRPASLTPEMEKALLQQVMSLTPEQINLLPPEQRNQVLQLQQILRQ

SEQ ID NO: 77164 - protein, 196 aa, Gossypium hirsutum
  Clone ID: GOSHI-09MAY01-C38404_1.pep
MAMHNLVQALVFVAVFFNTLAPTVANVEGDALYALRRSVKDPKNVLKSWDPTLVDPCTWFHVTCDADNRVTRLDLGNAKLKGRLVPQLGKLERLQYLELYMNNLEGSIPEEIGGLKSLVSLDLYNNNLTGSIPASLSKLSNLNFLRLNGNRLTGRIPRQLTKLPNLKIFDVSNNDLCGTIPTTGSFSKFSEEGLKI

SEQ ID NO: 77165 - protein, 73 aa, Gossypium hirsutum
  Clone ID: GOSHI-09MAY01-C38794_1.pep
KPKHKLHVNILLILKPTILSLKKIQEMQIKKTQLVKITSHSKNSQRTRRELFICSIEHAIESDKEKPNGNHIS

SEQ ID NO: 77166 - protein, 155 aa, Gossypium hirsutum
  unsure (1)..(155): unsure at all Xaa locations
  Clone ID: GOSHI-09MAY01-C38784_1.pep
MTEAVIRKKPGMASVKDMPLLQDGPPPGGFAPVRYARRIPNKGPSAMAIFLAAFGAFSYGMYQVGQGNKIRRALKEEKFAARRAILPVLQAEEDERFVKEWKKYLEYEAEVMKDVPGWKVGENVYNSGRWMPPATGELRXLKFGDTFFYQLFVHS

SEQ ID NO: 77167 - protein, 84 aa, Gossypium hirsutum
  Clone ID: GOSHI-09MAY01-C38764_1.pep
MPENVFSMDVKHRPKSPNNLAIKIKLLTLYCMFQSSVFHSQPKSIIGAPAYIAPEVLSRKQYDGKIILIPCFCTFWSIRHTIPS

SEQ ID NO: 77168 - protein, 106 aa, Gossypium hirsutum
  Clone ID: LIB3828-014-Q1-N6-H9.pep
ARNMGLGKKNEARLENGPGLGHYFSAGRARAYIFFSRPGLGKILGPYFGPGPGLGSELKFFMGPARPMSTSSQALRRGAGGASEEERRTWELGFLLLLKLFNHLSL

SEQ ID NO: 77169 - protein, 64 aa, Gossypium hirsutum
  Clone ID: LIB3145-051-Q1-K1-H10.pep
KWAGPAGPGLMIFFFQAGLGQNFTPMSTSSQALRRGAGGAFEEERRTWELGFLLLLKLFNHLSL

SEQ ID NO: 77170 - protein, 132 aa, Gossypium hirsutum
  Clone ID: GOSHI-09MAY01-C38044_1.pep
VRIKTWQRGHGYARHIRFERISFSNVIRPIIIDQYSCPPHQHCKNYSTAVEVSNILYNDLRGTTSGEIAVELSCSESVPCKNIRMKDIQLDYGINGKIYDGHPKSHCLSVVQSWDEGNVYPNVPCLTKKLSY

SEQ ID NO: 77171 - protein, 67 aa, Gossypium hirsutum
  Clone ID: LIB3828-011-Q1-K6-C6.pep
LGYILVGTKEMIITCKNIRMKDIQLDYGINGKIYDGHPKSHCLSVVQSWDEGNVYPNVACLTKKLSY

SEQ ID NO: 77172 - protein, 104 aa, Gossypium hirsutum
  Clone ID: LIB3145-049-Q1-K1-H2.pep
PIIIDQYTCPLHQHCKNYTTAVEISNILYNDLRGTTNGEIAVELSCSKSVPCKNIRMKDIQLDYGINGKMYDGHPKSHCLNVVQSWDERYVYPNVPCLTKKLSY

SEQ ID NO: 77173 - protein, 315 aa, Gossypium hirsutum
  Clone ID: GOSHI-09MAY01-C38334_1.pep
RFDRQISIDKPDIKGREQIFLVYLRKIKLGHEPSYYSQRLAALTPGFAGADIANVCNEAALIAARSERAQITMDHFEAAIDRIIGGLEKKNRVISKLERKTVAYHESGHAVSGWFLEHAEPLLKVTIVPRGTAALGFAQYVPNENLLMTKEQLFDMTCMTLGGRAAEQVLLGKISTGAQNDLEKVTKMTYAQVAVYGFSDKVGLLSFPLREDGFEMSKPYSNKTGAIIDGEVREWVAKAYEKTVQLIEEHKEQVAQIAELLLEKEVLHQEDLVRVLGERPFKSSELTNYDRFKQGFEDEETKSMQTPEGGIADDD

SEQ ID NO: 77174 - protein, 116 aa, Gossypium hirsutum
  Clone ID: GOSHI-09MAY01-C38224_1.pep
MSERQELQPDPQIQSPQGSSRDDMISWVVALETALLPCLPARELQAIDRSPHPSHQIDVERHARDFMEAAKKLQLYFLGLQREDHPTKAGMLRKEIATMEEELKTKTEMMKNQERL

SEQ ID NO: 77175 - protein, 138 aa, Gossypium hirsutum
  unsure (1)..(138): unsure at all Xaa locations
  Clone ID: LIB3147-019-Q1-K1-C10.pep
FLLFLFYTFLETSLVTLALWGHFIAFFSDVXIPGTPGTLATTFLSFVLNLAFALSVLGFLIMHISLVAANTTTIEAYEKKTTPKWRYDLGRKKNFEQVFGTDKRYWFIPAYSDEDLRRMPALLGLEYPSKPDFDSQEF

SEQ ID NO: 77176 - protein, 143 aa, Gossypium hirsutum
  unsure (1)..(143): unsure at all Xaa locations
  Clone ID: uC-gsronu33B155a09b2.pep
FKPPRCHHCSVCGRCVLKMDHHCVWVVNCVGALNYKYFLLFLFYTFLETSLVTLALLPHFIAFFSDVEIPGTPGTLATTFLSFGMDFLVCSSDLFYFSDYAVCTNVXLCSAVAVLNLAFALSVLCFLIMHISLVAVNTTSIEA

SEQ ID NO: 77177 - protein, 167 aa, Gossypium hirsutum
  Clone ID: GOSHI-09MAY01-C39924_1.pep
GCYNLLCSGFVQTNNKVAIGAAISPRSSYNGRQFDIGLMVWKDPKHGHWWLEFGPGLLVGYWPAFLFSHLRSHANMVQFGGEIVNTRSSGFHTSTQMGSGHFAEEGFRKAAYFRNLLTVDWDNNLVPLTNIHLKADRANCYDIRQGRNRVWGTYFYYGGPGRNVRCP

SEQ ID NO: 77178 - protein, 91 aa, Gossypium hirsutum
  Clone ID: GOSHI-09MAY01-C39584_1.pep
EMLKFPPSLLAAAAIFTAQCTIGGFKHWSKTCEWYTNYKEEQLMDCSRMMVTFHQKAGAGNLTGVQRKYCTSKYGYAAKTEPATFLLEAKS

SEQ ID NO: 77179 - protein, 141 aa, Gossypium hirsutum
  Clone ID: GOSHI-09MAY01-C39464_1.pep
LGKDGSCMQVPFLAEWVRDKGHRIKSQVKAAKGAVSLIQIQDELRRLNQGADREENILKALEEKKDAMLQSLWQINVVDIESTLSNVCLEVLRDASVSEEVLVLRAKGLKKLGAIFQGAKSAYSRENSLRRVNVETETAGS

SEQ ID NO: 77180 - protein, 120 aa, Gossypium hirsutum
  Clone ID: GOSHI-09MAY01-C39754_1.pep
RSAARMFVLGGLSEKHHGLSNFWGADRINEIDSEALQIVNICYERAKEILQQNRKLMDAVVDELVEKKSLTKQEFFGLVELHGSLQPMPPSIVDIRVAKRTQFQEMMMNPNVKVTGSSSS

SEQ ID NO: 77181 - protein, 110 aa, Gossypium hirsutum
  Clone ID: GOSHI-09MAY01-C39724_1.pep
WNLWFPRKKLCRCLIRSCFHLQMDALISHSSRSYYACVGESTRAYQSPSKDLTAINNHLNGGRKIRGALNFDDVDVGLVSDSMVANSLYLQNGSCASSSGAPLKSEQPES

SEQ ID NO: 77182 - protein, 69 aa, Gossypium hirsutum
  Clone ID: LIB3825-034-Q6-N6-C10.pep
TRAYQSPSKDLTAINNHLNGGRKIRGALNFDDVDVGLVSDSMVANSLYLQNGSCASSSGAPLKSEQPES

SEQ ID NO: 77183 - protein, 58 aa, Gossypium hirsutum
  Clone ID: GOSHI-09MAY01-C39174_1.pep
HAFAHASAVNESHESRKGQPTQRLVIPDRPKEEDYFYANPEECLQPSYSRLDLSVGGL

SEQ ID NO: 77184 - protein, 57 aa, Gossypium hirsutum
  Clone ID: GOSHI-09MAY01-C39384_1.pep
PTRPPLEPYMMPPRKVREMRPRIRRALIRAQKKAEEQEQGGSQRKGRKREAKTEVAA

SEQ ID NO: 77185 - protein, 112 aa, Gossypium hirsutum
  Clone ID: LIB3147-022-Q1-K1-A5.pep
PTRDETVPTVVTYPYCHSQVILHPDQDRVLTVRECARLQGFPDYYRFCGTIKDRYCQIGNAVAIPVGRALGYTMGMAFQKGSGNEPLMILPPKFSLSTNIQLAKSLSQSTDD

SEQ ID NO: 77186 - protein, 50 aa, Gossypium hirsutum
  Clone ID: LIB3147-008-Q1-K1-B12.pep
MVQCKHAYKVKKSVLVQSSVLWDNDFANWILVERENLGGRIISGSFPLPL

SEQ ID NO: 77187 - protein, 127 aa, Gossypium hirsutum
  unsure (1)..(127): unsure at all Xaa locations
  Clone ID: GOSHI-09MAY01-C39204_1.pep
MAKADLMVISLLLLVTLCFTAVDGYGRMVGGRTEITDVKTNEEVQELGRFAVEEYNRSHGLGRWRGFVSSSNGRRAELVFSRVLEAQKQVVSGIKYYLKIEAMENXLSKTFESVVVVKPWLHSKELL

SEQ ID NO: 77188 - protein, 143 aa, Gossypium hirsutum
  unsure (1)..(143): unsure at all Xaa locations
  Clone ID: GOSHI-09MAY01-C39224_1.pep
HAYERGATCCQEXRTQGNLIWPXLLDNVRPDMRIAWDEPFGPGLPDIRSTSVEEGIHHCNASNFGLQGCVCTRDISEAILISDATETGTVQINSAPARGPDHFPFQGLKDSGIGSQGITDSINMMTKIKTTVINLPTPSYTMG

SEQ ID NO: 77189 - protein, 129 aa, Gossypium hirsutum
  Clone ID: LIB3585-063-P1-K2-E11.pep
SLTILHLSRCLNVNSVEWLEYLGKLETLEDLSIKNCRAIGEGDLIKLGPSWRKLKRLQFEVDANYRYMKVYDRLAVDRWQRQWIPCENMQELSLVNCIISPGRGLACVLGKCRNLEKIHLDMCVGVRDS

SEQ ID NO: 77190 - protein, 96 aa, Gossypium hirsutum
  unsure (1)..(96): unsure at all Xaa locations
  Clone ID: LIB3145-008-Q1-K1-G8.pep
DGRVRPRLRFEISSSEQAKKRGRSDVDANYHYMKVYDRLAVDRWQRQRIPCENMQELSLVNCIISPGRGLACVLGKCMNLXKIHLDMFVGVRDSDI

SEQ ID NO: 77191 - protein, 172 aa, Gossypium hirsutum
  Clone ID: GOSHI-09MAY01-C34964_1.pep
MIEIMSESPSPFAFDGTILESIEDVLSILPGGVDPALQEICGNTDHPVECIKATMPFLDEKAPIEPLSVLKAGVEAMDNQTKNALAEVTKLSMNPTTLKNVVPILQTCIDVYNNILNSDQKSLEAISNRNLVQLSTELGANVENVLGCDNAFKQAKLESPMKKMDAMLGKDH

SEQ ID NO: 77192 - protein, 143 aa, Gossypium hirsutum
  unsure (1)..(143): unsure at all Xaa locations
  Clone ID: LIB3145-008-Q1-K1-E9.pep
DPRVRFIPLLSSNTIIIERAMGINQFILTLISSPYLLSFSTSTNAPPSLSDASSPTSSELYDMIEVMSESPSPFAFDGITLESIDNLLSILPSGVNPALQQICGNTDHPVECIIATMPFLDEKTPIEPXSVLKAGIEAMDNQT

SEQ ID NO: 77193 - protein, 105 aa, Gossypium hirsutum
  Clone ID: GOSHI-09MAY01-C34914_1.pep
HTKGGKGNPHSKDMKMVQSSGLLHWGKSSRRNVICREAELGPSAAFEKNRQSKGDANKPGVFRVVTTKNKEVHFMCEGGSEMAKLWVRGIKLITREAIFGSQKEK

SEQ ID NO: 77194 - protein, 140 aa, Gossypium hirsutum
  Clone ID: GOSHI-09MAY01-C34834_2.pep
YDNWVSRRSNSCQCLLFCYALWWIWFSRNQSRVRILFDAVYDNKTFRSASDLVGWNLRGNLTVLKTVIHSNVPSPFAAEAYACLDGTKLGISLRTHSVKLMGDSRTVIRKCQETTTDKSAIGAIIRDIQSKKSDFQELIL

SEQ ID NO: 77195 - protein, 171 aa, Gossypium hirsutum
  unsure (1)..(171): unsure at all Xaa locations
  Clone ID: GOSHI-09MAY01-C34834_1.pep
MCWRVGRGDNISIWEDSFQEDIARKILQIPLAEIEHEDFQVWKGELSGEFSVRRAYKLLEDANLDPRNYLLQTETKEFYKKLWSLXMPSKIAFTIWWISWDFIPNFANFRIRRVVTNDRCPQCRSEVEGSLHVFRDCPMTTGFSRGVTHAVKVFFSVNALWWKWFESQDPF

SEQ ID NO: 77196 - protein, 109 aa, Gossypium hirsutum
  Clone ID: LIB3145-013-Q1-K1-D9.pep
YGTKEGFRVGWISSSILPEMLADFGSRRHILLLLLLLGKVCGLQRVFSKKGCVGEWAEGIKSRYGKIAFKRTLLRKFFRFPSQRLSTRLSRFGKENYLVSFRSAELINS

SEQ ID NO: 77197 - protein, 124 aa, Gossypium hirsutum
  unsure (1)..(124): unsure at all Xaa locations
  Clone ID: LIB3583-031-Q6-K7-A11.pep
TXHNIXIXXXTFQQXIAXKILHIPLVEIEHEDFQVWKGEFXMPSKIAFTIWRISWDFIPNFANLRIRRVATNDRCPRCRSEAQASLHVFRDCLMTTGFSRGATAANVYFLLCVMVVMVSRSGTF

SEQ ID NO: 77198 - protein, 92 aa, Gossypium hirsutum
  unsure (1)..(92): unsure at all Xaa locations
  Clone ID: GOSHI-09MAY01-C34514_1.pep
TRDPINTFLFLIYNEGLSRLMRMALREGSIKGAKEXKGAPSVSHLLFADVSTLFGEASDRGAQVLKSILREYERCSGQYLNYDSSNTSEESR

SEQ ID NO: 77199 - protein, 270 aa, Gossypium hirsutum
  unsure (1)..(270): unsure at all Xaa locations
  Clone ID: GOSHI-09MAY01-C34504_1.pep
MAAPRTVLRDKESAAAALLNNSIKEDDDSPSGKRLKSEKFHVSRXELADFSGVFLIFSTGLFCIYLSMPASEYGKLRIPRSISDLRLLKDNIATYASDYPTQFILGYCSTYIFMQTFMIPGTIFMSLLAGALFGVNGVFLVVFNATAGACSCFFLSKLIGRPLLTWLWPDKLRFFQADIAKRRDKLLNYMLFLRITPTLPNLFINLASPIVDIPLHVFFLATFGGLIPASYITVKAGLALGDLKSVKDLYNFKTLSVLXLIGMVSIFPTL

SEQ ID NO: 77200 - protein, 75 aa, Gossypium hirsutum
  Clone ID: GOSHI-09MAY01-C34534_1.pep
MSKLCSLGGAALLFNFMLSYAARPEPTLSLTQHEGVEAEKVDADENCEGIGKEECLMRRTLAAHVDYIYTQNHKP

SEQ ID NO: 77201 - protein, 83 aa, Gossypium hirsutum
  Clone ID: GOSHI-09MAY01-C34524_1.pep
MASGWGINGNKGRCYDFWVDFSECMSRCREPKDCGLLREDYLECLHHSKEFQRRNRIYKEEQRKLRAAARKDKEGENGVHHHA

SEQ ID NO: 77202 - protein, 116 aa, Gossypium hirsutum
  Clone ID: GOSHI-09MAY01-C34454_1.pep
PKITRHRGPKVKAISETLGFLGAPQPTPYVRPPCAQSLAPSPPALRQSRPTSSATNHRANGPPNLQRNRQTIAATIANTKANKEKLYFFYFEHSAIKPGGIDCIFFTHICIENRRA

SEQ ID NO: 77203 - protein, 86 aa, Gossypium hirsutum
  Clone ID: LIB3148-053-Q1-K1-D5.pep
PKITRHRGPKVKTISETLGFLGAPQPTPYVRPPCAQSLAPYPPALHQSRPTSSATYHRANGPPYLVNRPLILFCFVQIEVKKGFSG

SEQ ID NO: 77204 - protein, 233 aa, Gossypium hirsutum
  unsure (1)..(233): unsure at all Xaa locations
  Clone ID: GOSHI-09MAY01-C34714_1.pep
MVPPENPSYWSHFDYSTLIDDIPVPDGPYTGFSWSTQPTNAPSTAVNVEVDNSLGDLDGLTESGSKKRGXRSESCNPSSSNACREKLRRDRLNDKFMELGAILEPGRPPKTDKSAILVDAARMVTQLRDEAQKMKDSNSSLQERIKELKAEKNELREEKQRLKAEKEKLEQQLKTMNAQPSFMPPAPAIPAAFAAAAQGQAPGNKLVPFFGYPGVAMWQFMPPAAVDTSQDHV

SEQ ID NO: 77205 - protein, 70 aa, Gossypium hirsutum
  Clone ID: LIB3145-016-Q1-K1-G9.pep
LKRGRFESRDLFIMKSCGGVLRKDRLNDKCMELGAILEPERPAKTDKSAILVDACRMVTQLRDVAHNMKD

SEQ ID NO: 77206 - protein, 84 aa, Gossypium hirsutum
  Clone ID: LIB3145-005-Q1-K1-A9.pep
VSAEWFPLKTPITGLTSITQPRSTISLFPTDLTPVFLGPRNQPTLLPLSIWKFTTHLTIWIAIQNLFQRTQVHLNHATLLSQKH

SEQ ID NO: 77207 - protein, 193 aa, Gossypium hirsutum
  unsure (1)..(193): unsure at all Xaa locations
  Clone ID: GOSHI-09MAY01-C34704_1.pep
GNRSSRSDQEKLCQSRXATRQNSLKEALPTEMEVSFNEYANTGISQDSGDVTREDDQPKMAKGGESFFADIIKKSFRDFSRFNQTEERGKSNISVNGHPIPERVVKKAEKIAGPVLPGQYWYDFRAGFWGVLGGPCLGIIPPFIEEFNHPMPENCAGGTTGVFVNGRELHQKDLDLLANRGLPPDRDRSYIIE

SEQ ID NO: 77208 - protein, 98 aa, Gossypium hirsutum
  Clone ID: LIB3148-045-Q1-K1-F3.pep
MSGVTNQEEDKKPADQTAHINLKVKGQDGNEVFFRIKRSTQLKKLMNAYCDRQSVDFNSIAFLFDGRRLRVEETPDELEMEEGDEIDAMLHQTGGAMA

SEQ ID NO: 77209 - protein, 94 aa, Gossypium hirsutum
  Clone ID: LIB3145-005-Q1-K1-D2.pep
HAFHAFRNPLIKPVKFIFGVKGQDGNEVFFRIKRSTQLKKLMNAYCDRQSVDFNSIAFLFDGRRLRVEETPDELEMEEGDEIDAMLHQTGGAMA

SEQ ID NO: 77210 - protein, 111 aa, Gossypium hirsutum
  Clone ID: LIB3585-040-P1-K1-C2.pep
ADLFPRTSDLARSNSLYGPTTPAYSGHNSAAANPSYRINMSAMQRYAPRLDELNYTRMAGARPEPPLMANTNAFYDPRPPFMIDPRAPRPPYTLSFSPGPYHPYSHHNSAG

SEQ ID NO: 77211 - protein, 47 aa, Gossypium hirsutum
  Clone ID: LIB3145-005-Q1-K1-C10.pep
FFIVIHQLEDLIFRNLVVRTLLTDSLLWVLLHNVETYLLNILLLFLN

SEQ ID NO: 77212 - protein, 45 aa, Gossypium hirsutum
  Clone ID: LIB3145-002-P1-K1-C8.pep
SRFNLLAYHPYGVLSPYNQDDPDQLVIFNIPIVSYVDSIRTFIST

SEQ ID NO: 77213 - protein, 40 aa, Gossypium hirsutum
  Clone ID: LIB3145-002-P1-K1-C7.pep
RPSIHTDALSARYTTNRFILTNTASGDSQHLLPYNSKLTS

SEQ ID NO: 77214 - protein, 279 aa, Gossypium hirsutum
  unsure (1)..(279): unsure at all Xaa locations
  Clone ID: GOSHI-09MAY01-C34674_1.pep
DRSYEEDLKEGEGYERPNEGAVVKVXIGVGKLQDGTVFLKXGQDEGQELFEFRTDEEQVIDGLDKAVMTMKKGEVALLTIAPEYAFGSSESKQELASVPPNSTVYYEVEMVSFIKDKESWDMNTPEKIEAAGKKKEEGNVLFKSGKYARASKRYEKAVKYIDYDSSFSEEEKKQAKALKVACNLNNAACKLKLKDFKQAEKLCTKVLEIESSNVKALYRRAQAYIHLADLDLAEFDVKKALEIDPDNREIKMEYKLLKEKMKEYNKKEAKFYGNMFAAG

SEQ ID NO: 77215 - protein, 193 aa, Gossypium hirsutum
  unsure (1)..(193): unsure at all Xaa locations
  Clone ID: GOSHI-09MAY01-C34384_1.pep
ADLSVSSPLSTDKPLWEVHLXTAHKHVVFRIHHSLGDGISLMSMLMASCRKVSDPDALPMMVPEKTTEKKRDSPWSFGSMWGFLKMAWLTFVFVLEFLLRSLFVSDRKTAVSGGDGVELWPSKLATAKFLLDDMKEVKKAIPDTTINDVLFGIVSCGLSRYLDHRTPNALHEGLRMTGVAMVNLRAKPGLQEI

SEQ ID NO: 77216 - protein, 114 aa, Gossypium hirsutum
  Clone ID: GOSHI-09MAY01-C34354_3.pep
LGRSYSILSRWWNCTTMCDFTMIPTPKAPNGANGQPSPDDNLVNSSSLMLTGPKKRNLEAEGEGIKKQSRPRLTVESSNLVEENTEERIQRYNEGTPKNKVWYMFIYDICLYFC

SEQ ID NO: 77217 - protein, 303 aa, Gossypium hirsutum
  Clone ID: GOSHI-09MAY01-C34354_2.pep
GNKMHISFPLFFQVSMSEVIRRLALVYTFDHLFITLKFQELSTEALKNQLLSVMPTMEEIAASLPSLEALPPPSSDCDNDKGLHGMPLGNTINNGMLQEGGSEVFGAQNILNAPPLSQSDNWMNLVRSASNKRDGELVFRNLSEAEGKDTEINDVVIPIDQHRESLLTWEKLQYPFKMVELHNNCDFTMIPTPKAPNGANGQPSPDDNLVNSSSLMLTGPKKRNLEAEGEGIKKQSRPRLTVESSNLVEENTEERIQRYNEGTPKNKDKTALSEARVQGIAINDVIPIDQDNGSLLARKMMRR

SEQ ID NO: 77218 - protein, 214 aa, Gossypium hirsutum
  Clone ID: GOSHI-09MAY01-C34354_1.pep
FEITFSDPFKMVELHNNCDFTMIPTPKAPNGANGQPSPDDNLVNSSSLMLTGPKKRNLEAEGEGIKKQSRPRLTVESSNLVDVRPHARSQRYNEGTPKNEDRAALSEARVQGIAINDVIPIDQDNGSLLARKMMRREYSSWNFQHFNEDNDSFPALEQAPQVTEFLRQNIEVLVSGTIKEMQEWRTPKDSGWDQLKKWKAALNLGKTIGVEVKA

SEQ ID NO: 77219 - protein, 177 aa, Gossypium hirsutum
  Clone ID: uC-gsronu33B051h04b1.pep
GASLLRNRAHRQFKAVRNLIIDLQEANGLPQQLIHLKSWEPKFKRIKQVIANIPSLPQSQARLKLLEVEWSLEQCLKLRSEVRRELAKARRVQSQVHKLGEVLLNNGELSTEALENQLLSVMPTMEEIAASLPSLEALPPPSSDCDNDKGLHGMPLGNTIKHGMLQRVEVRCLEHKT

SEQ ID NO: 77220 - protein, 152 aa, Gossypium hirsutum
  Clone ID: GOSHI-09MAY01-C34344_1.pep
MADVDADVAAPGVPKKRTFKKFSFRGVDLDALLDMSTDELVKLFPARARRRFQRGLKRKPMALIKKLRKAKREAPPGEKPEPVRTHLRNMIIVPEMIGSIIGVYNGKTFNQVEIKPEMISHYLAEFSISYKPVKHGRPGIGATHSSRFIPLK

SEQ ID NO: 77221 - protein, 69 aa, Gossypium hirsutum
  Clone ID: GOSHI-09MAY01-C34324_1.pep
IILFIIFFFLFFRFFYEVFFFFGPIRVEKKIHASFLLKKVETNLERKKEKWKTQEKLLLLDNRITEEAL

SEQ ID NO: 77222 - protein, 85 aa, Gossypium hirsutum
  Clone ID: GOSHI-09MAY01-C34204_1.pep
LLTHTLLPTIILCRVGVTLNIACKICETGRVVGAALIMAGLYLVILGKSEESKYLSENEPIYSVSENNDMESTFIRPLLGNKLQS

SEQ ID NO: 77223 - protein, 65 aa, Gossypium hirsutum
  unsure (1)..(65): unsure at all Xaa locations
  Clone ID: LIB3145-037-Q1-K1-E5.pep
RFSFDLESXLMWCEGRRXLQRMGVCAIXKYMCGNKRKAPLCCLQCXLRSAKHLLAAFNKLVLHSG

SEQ ID NO: 77224 - protein, 52 aa, Gossypium hirsutum
  unsure (1)..(52): unsure at all Xaa locations
  Clone ID: LIB3135-018-Q1-K1-A1.pep
IFSQNDDPNQQGQINIYKCNSXFLFPISIVGNSIIYVCCLSISIATSCFKWH

SEQ ID NO: 77225 - protein, 142 aa, Gossypium hirsutum
  Clone ID: GOSHI-09MAY01-C35984_2.pep
FKEFLREVAIMKRLRHPNIVLFMGAVTQPPNLSIVTEYLSRGSLFRLLHKPGVREVLDERRRLSMAYDVAKGMNYLHRHNPPIVHRDLKSPNLLVDKKYTGKVCDFGLSRLKANTFLSSKSAAGTPEWMAPEGLRDEPSYEK

SEQ ID NO: 77226 - protein, 167 aa, Gossypium hirsutum
  unsure (1)..(167): unsure at all Xaa locations
  Clone ID: LIB3825-015-Q1-K6-H7.pep
MEQDLHGERYKEFXSEVAIMKRLRHPNIVLFMGAVTHPPNLSIVTEYLSRGSLYRLLRKPGVREVLDERRRLSMAYDVAKGMNYLHRRNPPIVHRDLKSPNLLVDKKYTVKVCDFGLSRLKANTFLSSKSAAGTPEWMAPEVLRDEPSNEKSDVYSFGVILWGACNI

SEQ ID NO: 77227 - protein, 134 aa, Gossypium hirsutum
  Clone ID: GOSHI-09MAY01-C35944_1.pep
MVKSQRPPSGRTNLASCIVATIFLIFLVIIVLIVYFTVFKPKDPKIYVNSIQLPSFSVGNNSVSFTFSQYVTVNNPNRAAFSHYDSTIQLLYSGSQVGFMFIPAGKIESGQTQYMAATFAVQSFPLAQPNQSAA

SEQ ID NO: 77228 - protein, 453 aa, Gossypium hirsutum
  unsure (1)..(453): unsure at all Xaa locations
  Clone ID: GOSHI-09MAY01-C35974_1.pep
EVLGANIVKSGSKTFAVYSISVTDVNNNNSWSIKRRFRHFEELHQRLKQFPEYKLHLPPKHFLSTGLDVHVIRERCKLLDGYLKNLLQLPTISGSIEVWDFLSVDSQTYVFSNSFSIIETLSVDLDSNPSEKSNKASSVLVPLVGPLSSKGEQLDTESKESARQMKPNLAMDGLRNAKNMSYPPKVLTKEQGNSIEDSGSNSDTGMSKISFVRHTEKNVKGKANDGMEDASELVLDAVSHPTFPTEWVPPNLSVPILDLVDVIFQLQDGGWIRXKAFWVAKQILQLGMGDAFDDWLIEKIQMLRKGSVVASGIERLEKILWPDGIFITKHPRQQRPPSSSGPSKASPCSPLPPETCSSRLGDEQQQLEAERRAKFVYELMIDNAPAAIVGLVGRKEYEQSAKDLYFFIQSSVCLKLLAYDLLELLLLSAFPEMDYVFKQFHVEKHKFGEFKSN

SEQ ID NO: 77229 - protein, 90 aa, Gossypium hirsutum
  Clone ID: LIB3145-046-Q1-K1-C9.pep
QQQLEAERRAKFVYELMIDNAPAAIVGLVGRKEYEQSAKDLYFFIQSSVCLKLLAYDLLELLLLSAFPEMEYVFKQFHVEKHKFGEFKAN

SEQ ID NO: 77230 - protein, 84 aa, Gossypium hirsutum
  unsure (1)..(84): unsure at all Xaa locations
  Clone ID: LIB3583-042-Q6-K7-B4.pep
SLVVASFFKLTXEVLGANIVKSGSKTFAVYSIFVTDVNNNNSWSIKRRFRHFEELHQRLKQFAEYKLXLPPKYFXXRGLXVXVI

SEQ ID NO: 77231 - protein, 118 aa, Gossypium hirsutum
  unsure (1)..(118): unsure at all Xaa locations
  Clone ID: GOSHI-09MAY01-C35964_1.pep
MNNQYGEDGDEATVMGFEVPRSPDSSYNNVYPVYEDDARDPPVVPPHLHRTMLSCPASINASGSLPXLPGNVVLNHLYIENREAPRSVVALGFTQRFRSKYVTVILYKPVPRRGSTGT

SEQ ID NO: 77232 - protein, 84 aa, Gossypium hirsutum
  Clone ID: uC-gsflnu33B142h01b1.pep
MNNQYGEDGDEATVMGFEVPRSPDSSYNNVYPGYEDDARDPPVVPPHLHRTMLSCPASINASGSLPLPGNVSLNHFYIENPEAP

SEQ ID NO: 77233 - protein, 90 aa, Gossypium hirsutum
  Clone ID: GOSHI-09MAY01-C35594_1.pep
ISCTKLQPLKQFHHDPTSIRVGSTKPHVNKIKSTTFYILSYYPANVSGLLHFEKLLVALRAYTCIQHHHHLTFLNAHPFAKANTLIDQLH

SEQ ID NO: 77234 - protein, 223 aa, Gossypium hirsutum
  Clone ID: GOSHI-09MAY01-C35554_1.pep
DSGKDAGRFTAAWELYKAQGDVVAACNEFGIKVTLFHGRGGSIGRGGGPTYLAIQSQPPGSVMGTLRSTEQGEMVQAKFGLPQIATRQLEIYTTAVLLATLRPPQPPREQKWCNLMEEISKISCQNYRSTVYENPEFLAYFQEATPQAELGYLNIGSRPTRRKATTGIGHLRAIPWIFAWTQTRFVLPAWLGVGAGLKGVCEKGHTEDLKAMYKEWPFFQSTV

SEQ ID NO: 77235 - protein, 115 aa, Gossypium hirsutum
  Clone ID: GOSHI-09MAY01-C35434_1.pep
PSCPPTRPFYFKDRKRSFSSPPSRPSPLSLPHGRTWVHRKVTPRSLRERRPVSHEAGFPCFFSERRSKTEPLRPTTTEEKRKGPRRLVGAPQTVNRSFILQVSDAWKAGGWCPTR

SEQ ID NO: 77236 - protein, 84 aa, Gossypium hirsutum
  Clone ID: LIB3145-014-Q1-K1-E7.pep
PSRFQLSLPSALGHHAHHHHCLGHQPPAFHASDTCKMKLGCALPPYTAVTAIVDRRLRRTIERPYRPHMKEVLRGEEERTPKFF

SEQ ID NO: 77237 - protein, 131 aa, Gossypium hirsutum
  unsure (1)..(131): unsure at all Xaa locations
  Clone ID: GOSHI-09MAY01-C35424_3.pep
ITEGVNNLNIMDSSPSNNTTRKNRFQVSNTKKPLFFYVNLAKRYMQQYNEVELSALGMAIATVATIAEILKNNGLAVEKKIMTSTIDMREESXGRPVQKAKIEILLAKSEKFDELMAAAAAEDALGNEEQS

SEQ ID NO: 77238 - protein, 127 aa, Gossypium hirsutum
  Clone ID: GOSHI-09MAY01-C35424_1.pep
MVGTTEGVDSSASNSKKNRIQVSNTQKPLFFYVNLAKRYMQQYNEVELSALGMAIATVVTIAEILKNNGLAVEKKIMTSTIDMREESGGRPVQKAKIEILLGKSEKFDELMAAAAEEALDDGGKAIS

SEQ ID NO: 77239 - protein, 72 aa, Gossypium hirsutum
  Clone ID: uC-gsflmaxxa004g08b1.pep
MVGTTEGVDSSASNNKKNRIQVSNTQKPLFFYVNLAKRYMQQYNEVELSALGMGILFLLFFTLAFYFTLFSV

SEQ ID NO: 77240 - protein, 131 aa, Gossypium hirsutum
  unsure (1)..(131): unsure at all Xaa locations
  Clone ID: LIB3145-019-Q1-K1-A9.pep
HASANSLLSSLPSLANINGTGSGNIVSSQIGPLIRVGNDNSSVVRDGRVSTSSPLATAGVMHGSPLSDDSSQHSDSGILNDGISNGVIRHSRSKPLDNAMYSQCVPAMCTLAKDPSXRIATLSRRVLSIIG

SEQ ID NO: 77241 - protein, 62 aa, Gossypium hirsutum
  Clone ID: LIB3145-019-Q1-K1-A10.pep
QIFGIWIQLIFGPSEYASAEFLYDLMMRNELMFSFLNRRSGWKGLHQQYYCYCWSHAWISFI

SEQ ID NO: 77242 - protein, 124 aa, Gossypium hirsutum
  Clone ID: GOSHI-09MAY01-C35754_1.pep
MEGNDNSTSKDYYKILEVDYDATDENIRLSYRKLALKWHPDKHKGDSAVTAKFQEINEAYNVLIDPDKRFEYDLTGIYEIDKYTLREYLARFKGMILTCNGLGFSHTSTWTEQLTDRNEFAEEG

SEQ ID NO: 77243 - protein, 321 aa, Gossypium hirsutum
  unsure (1)..(321): unsure at all Xaa locations
  Clone ID: GOSHI-09MAY01-C35764_3.pep
KYNCPEKYDPHDMQERYQRWVARHGRKYKSKNEWALRFGIYKSNSQFIDCVNSQNLSFKPTRPEFADMTNDEFRAMYLGYQSIRSPCESNSKGFAYDKYHNLPKSIDWRKKGAVAPIKNQGQCGSCWAFSAVAAIEGINQIKTGNLTSLSEQELIDCDTDSIDQGCNGGHMVQAYEFIIKNGGITTEKDYPYTGRDDTCKRTQAKNHAVTISGYKRLPTNNEXSLQIAVSQQPVSVAIDAAGLEFQFYFGGVFTGRLCXNELNHGVAIVGYGEVLNKKFWIVKNSWGTEWGEAGYVRMERGVSDKRGLCGIAMDTSYPVNK

SEQ ID NO: 77244 - protein, 112 aa, Gossypium hirsutum
  Clone ID: GOSHI-09MAY01-C35764_2.pep
RGRVGGRVGPPTNVPALLIAVSQHPVSVAIDAAGLEFQFYFGGVFTGDCGNELNHGVAIVGYGEVLNKKYWIVKNSWGTEWGEAGYVRLERGVSDKRGLCGIAMDTSYPVNK

SEQ ID NO: 77245 - protein, 264 aa, Gossypium hirsutum
  Clone ID: GOSHI-09MAY01-C35764_1.pep
AQKKFLFSILNTQLWDQSWQTAVVMENPSFTLLLVCALCMSSVVQCKYNCPEKYDPHDMQERYQRWVARHGRKYKSKNEWALRFGIYKSNSQFIDCVNSQNLSFKLTDNEFADMTNDEFRAMYLGYQSIRSPCESNSKGFAYDKYHNLPKSIDWRRKGAVAPIKKKGKSVKGKGKGKEKGRRGKEKEKGKGKKRGRGKRRRGKRRRGGNIIVMIARRRRNDIGSGEGGNAMTKMTVTMIIRRGRVNRIGERVLLGKRVVKMSWR

SEQ ID NO: 77246 - protein, 96 aa, Gossypium hirsutum
  Clone ID: LIB3145-058-Q1-K1-F7.pep
MRFGAFNLEVIQAAIRIAKQQGVSVSLDLASFEMVRNFRVPLRQLLESGDIDLCFANEDEATELLRGEGNAHPEAAVEYLSKYCRWAVVTLGSNGY

SEQ ID NO: 77247 - protein, 85 aa, Gossypium hirsutum
  Clone ID: GOSHI-09MAY01-C35714_2.pep
KGKEQNLQHQMKYTNGFSKTISIITGNSFYLHCNSQKLICKRNFENLQQINAILVALVINPLFLFLLCQELDLLTKLHTKTVKSK

SEQ ID NO: 77248 - protein, 73 aa, Gossypium hirsutum
  unsure (1)..(73): unsure at all Xaa locations
  Clone ID: GOSHI-09MAY01-C35714_1.pep
GFRPDPASGPWADRGGAWQPWNINMDEXEWWIFPVGLVMCKLFQSQLINWHIANLEIQDRSLYSNDFELFWQS

SEQ ID NO: 77249 - protein, 109 aa, Gossypium hirsutum
  unsure (1)..(109): unsure at all Xaa locations
  Clone ID: GOSHI-09MAY01-C35734_1.pep
PTRPPTRPKRSPFTPAKSDGTRSCLRGYSDHPNFMSYTESSKPKVRSCSAPXQRPHYESSSSTKRYSIHGFGELKSTTQRSAMHANFASKAYPGSGRLDRLGMPLGYRY

SEQ ID NO: 77250 - protein, 109 aa, Gossypium hirsutum
  Clone ID: GOSHI-09MAY01-C35664_1.pep
LMGCKNHLINETPPSSFFLIQYKQLHYTGMHSPKHVQLLQHSFFANKQNSYLGMQFASGFPLTSKMLAKAVVELESTRRATASLRAAVAIGGRVVARTTAIVTKTNPNF

SEQ ID NO: 77251 - protein, 218 aa, Gossypium hirsutum
  unsure (1)..(218): unsure at all Xaa locations
  Clone ID: GOSHI-09MAY01-C35604_1.pep
MESTDSSSASASAQPATPTGVSDSTPPDEELVVHYLKKKAASAPLPGPIIAEVDPYKFDPXWDLPSKATFGEQEWYFFSPRDRKYPNGARPNRAATSGYWKATGTEEPIVTSNGNQKVGVKKALVFYRGKPPKGIKTNWIMHEYRLIDNNSTSKPQIVDLANRKASLRLDDCVLCRIYKKNNTQRPMETDKEYTMEGMLATQLPTSSHQNLNAFTLKA

SEQ ID NO: 77252 - protein, 117 aa, Gossypium hirsutum
  Clone ID: GOSHI-09MAY01-C35164_1.pep
MENPHSPISIPEASPKPYKKSFVTTLMEAASLRSPFKEDTYFTSHLKASEKKALQELKDKLMASYGPDGECTMWGIPLLAEDEKADVVLLKFLRARDFRVLDSFRMLQKCLAWEKEF

SEQ ID NO: 77253 - protein, 78 aa, Gossypium hirsutum
  Clone ID: GOSHI-09MAY01-C35014_1.pep
GATASCITTPLDTIKTRLQVMGHEKRPSTRQVVKNLIADDGWKGFYRGLGPRFFSMSAWGTSMILAYEYLKRVCVKDD

SEQ ID NO: 77254 - protein, 189 aa, Gossypium hirsutum
  unsure (1)..(189): unsure at all Xaa locations
  Clone ID: GOSHI-09MAY01-C35004_1.pep
TTEMANKDLDRYYNALDKALMRFHSMKMEEINKIIRELWQQTYRGQDIDYISIHSDSEGAGTRSYSYPPPVLTGDAELEMRGRCSAGQKVLASLIIRLALAETFCLNWGILALDEPTTNLDGPNAESLAAALHRIMEDRKGPENFQLIVITHDERFAQRTXHRQHAEKYYRVAKDDHQHSIIEAQEIFD

SEQ ID NO: 77255 - protein, 286 aa, Gossypium hirsutum
  Clone ID: GOSHI-09MAY01-C35384_1.pep
VSLANITEIHEGLDFSSNDRRYSFGIFSVKFSTDGRELVAGSSDDSIYVYDLEANKLSLRIMAHTADVNTATFADESGNLIYSGSDDYLCMVWDRRCFGAKDKPAGVLVGHLEGITFLDSRGDGRYFISNGKDQTIKLWDIRKMSSDTSCNLGYRNFEWDYRWMDYPPQARDLKHPSDGSVATYKGHSVLRTLIRCYFSPEYCTGQKYIYTGSHDSRVYIYDVVTGAQVAVLKHHTSPVRDCSWHPHYPVLVSSSWDGDVVKWEFPGKGEAPVLANERRVRRQYHD

SEQ ID NO: 77256 - protein, 175 aa, Gossypium hirsutum
  Clone ID: GOSHI-09MAY01-C35344_1.pep
KEDGETKHTHKKNIQFPQHSENRTPAFEKPGDNLKWFHFVLAASMLPQPSTSAISTRSSVTRPSIIICHFLRMIQLSIPHMTFVPSIIFLPFSVRTASMVLLLIPSTTSIFMVNLISFLFSPSRLRFIPTTLPSTSPVIIILILSHRSTIRFGDLTLKSAILSTIVTVNLSSRPN

SEQ ID NO: 77257 - protein, 130 aa, Gossypium hirsutum
  Clone ID: GOSHI-09MAY01-C35314_1.pep
FIRHEASLPRELRRHLNSLEERLLESMVWDKGSSMYNSLIVAKPALSAEINRLGLLAEPMPPLDAIATHVNFSGSTPPVPSLQKHETSTGNAGSSILGQNGDVRSPMRPCTELTSVLVERNAFTSPVKDR

SEQ ID NO: 77258 - protein, 94 aa, Gossypium hirsutum
  Clone ID: GOSHI-09MAY01-C35304_1.pep
SLTFYTSRGKYGPFGEEVGTYFTSTTTQGKVVGFHGRCSSYLDAIGVHMQHWLGNQKASKMSLFKTFSRISIALLFWFSIIKMKLVPNNELLLS

SEQ ID NO: 77259 - protein, 91 aa, Gossypium hirsutum
  Clone ID: GOSHI-09MAY01-C35264_1.pep
QHLLKVILEVFFFLLRFYYFSFLFSFMCKRRSERNSPDVALHHGEALLRSPQSVIEAIESLVLALFATGKKRKWGRRKSLGFVGRVGGRVG

SEQ ID NO: 77260 - protein, 137 aa, Gossypium hirsutum
  Clone ID: GOSHI-09MAY01-C35204_1.pep
QNYKKQRYHNKGSSADDSDELSYFLFAVDCRGHLKLPATYFGNCTIARTVAVKRSALMGENGIVVAGKAIGREVMETYKGPLKGAEREKLKSRHPPIMVSPSPKFELYKVDFGWGRPRKTEVANIGSWDLFLCFLLQ

SEQ ID NO: 77261 - protein, 165 aa, Gossypium hirsutum
  unsure (1)..(165): unsure at all Xaa locations
  Clone ID: GOSHI-09MAY01-C36984_2.pep
EELQSVSDLINISNKKWNTDLIYNTFSAEIAKKILQIPLAETGHEDIQVWKGELSREFSVRSAYKLLQGANPDLVISXIQTETTDFYKKLCGLQLPSKITIIIWRISWDFIPHLANLRYRRVSASDRCPRCRSWVENSLYIFCQCRGFSREELRNNFAFSVLLYG

SEQ ID NO: 77262 - protein, 129 aa, Gossypium hirsutum
  Clone ID: GOSHI-09MAY01-C36984_1.pep
LVSDLINIPNKKWKTDLIYNTFSAEITKKISQIPLTETDHEDIQVWKGEPSGEFSVRSAYKLLQWANPDPSNFLIQTETTDFYKKLWGLQLPSKITIIIWRISWDFILHLANLRYRRVSTSDRCPCCRS

SEQ ID NO: 77263 - protein, 315 aa, Gossypium hirsutum
  Clone ID: GOSHI-09MAY01-C36954_1.pep
KSLLLFFVFQPTTPRVREVRGQEHDIKTPGSSAFGLHSPGVERRRDGNHNGTAVLTCTQTLDHVHRLQRQQSLGQGRSPHPDRVAAATGAAAVAPISVGSNAKPSSFVRYRECLKNHAASIGGNVYDGCGEFMPSGEEGTLEALKCAACDCHRNFHRKEVDGETQIGANPSRTSILNPLQLPPPLPSPTMLHPHHKYSIHTSPSSAIVASMNNMAFGSGGGGGNESSSEDLNVFQSNADGVPPPPPYVLSKKRFRTKFTQEQKDKMLELAEKVGWRINKQDEEEVQKFCAEYGVKRQVFKVWMHNNKNVKKPPPE

SEQ ID NO: 77264 - protein, 155 aa, Gossypium hirsutum
  Clone ID: GOSHI-09MAY01-C36804_1.pep
LYVANVGDSRTIISKAGKAIPLSEDHKPNRTDERKRIESAGGVVMWAGTWRVGGVLAMSRAFGDRMLKQFVVAEPEIQDREIDEEFELLVLASDGLWDVVPNEDAVSLAGAEEEPEKAARKLTEAAFTRGSADNITCIVVRFHHEKAAPVNPKHE

SEQ ID NO: 77265 - protein, 77 aa, Gossypium hirsutum
  Clone ID: LIB3148-034-Q1-K1-H10.pep
LNILLNLLSLSLSLSIYIYIKANAKSTNNTIKPNQPTNLNLNRFEIGYGNKDIKTFTYSNPPTPPLIILIHRHPLLA

SEQ ID NO: 77266 - protein, 111 aa, Gossypium hirsutum
  unsure (1)..(111): unsure at all Xaa locations
  Clone ID: LIB3145-033-Q1-K1-C11.pep
HSSAEYDYLFKLXLIGDSSGGKSCLLLRFSYDSYLDSYISTIGVDFKIRTVELDGKTIKLQIWDTAGQERFLTITSIYYRGAHGIIIVYDVXTEIESFNSFKQXWLNEIDR

SEQ ID NO: 77267 - protein, 253 aa, Gossypium hirsutum
  unsure (1)..(253): unsure at all Xaa locations
  Clone ID: GOSHI-09MAY01-C36544_1.pep
DGHIMLTDFDLSLRCDANPVLLKSASPVAEPAEKMSSPCSQSSCIXPLCLNPSFQVPCFTPRLLSLASRSRKIKSDLATQISPMPQLVLEPTSARSNSFVGTHEYLAPEIIKGEGHGNAVDWWTFGIFLFELLYGKTPFKGSGNDETLSNVVSHSLRFPSSPIVSFHARDLIRGLLVKEPENRLGSVKGATEIKQHPFFEGLNWALIRCAIPPEMPRFCDSSICLPTAALQKKDSSRGDELPGTGDHVEFDMF

SEQ ID NO: 77268 - protein, 77 aa, Gossypium hirsutum
  Clone ID: GOSHI-09MAY01-C36564_1.pep
IFMISKHHNFGTTKYKSIIHKFKERTEKAMLKQRFIPDEARESNIPITETQRKSQYNVSLNSFGRRLQKSLSSHTPR

SEQ ID NO: 77269 - protein, 94 aa, Gossypium hirsutum
  Clone ID: GOSHI-09MAY01-C36494_1.pep
YQLPFLSSSHSMPCRALYRCLKLFKLLLTHFFSLDQAKFFYSTLELIYSLFTHCDSNSFEAIQHLFLHHQPCAWYILASPSLILTKLSKTGKNG

SEQ ID NO: 77270 - protein, 182 aa, Gossypium hirsutum
  Clone ID: LIB3828-019-Q1-K6-H3.pep
LDFMLPSSCTVDKWLVALEYSKNIVAYFRERMKGWESSNRNESEWFNYISEDFGRILRDVAHIWAKSNKCIYTQDPIKSIFITNFGGRVKFLPNLNASDQPIEGDIDQLKYLMNYIVNMPFRSIIQNYQKFNMPNELSCFLTELNFRHLKYMSPAFLLDAPLFWRPVDKFHFIINLDHMLKC

SEQ ID NO: 77271 - protein, 95 aa, Gossypium hirsutum
  Clone ID: LIB3145-026-Q1-K1-E7.pep
RILRDVACIWAKSNKFIYTQDPIKSIFITNFGGRVKFLPNLNASDQPIEGDIDQLKYLMNYIVNMPFKSVIQNYQKFNMPNELSCFLTQLNFRHL

SEQ ID NO: 77272 - protein, 51 aa, Gossypium hirsutum
  Clone ID: GOSHI-09MAY01-C36734_1.pep
WTVHYLWRKFDDRFMRPVFGGKGFVPFVPGSPTGASNEASRTLRTITSMLL

SEQ ID NO: 77273 - protein, 166 aa, Gossypium hirsutum
  Clone ID: GOSHI-09MAY01-C36644_1.pep
FLSIFSLSSLPTTAIIPKANISLSVPSSQLVENLCNGKAVQNRRFCLKALSTPEVIAAMDTTQLGTLIMKLGAANAKATLNLYNEIIKKPGSPQALKALNICVEAYKYAILSFEMVSSEFVEDPQTANYDVAGIGPEIANCEKELINAKVQAPRLLAGNRFVKYYV

SEQ ID NO: 77274 - protein, 130 aa, Gossypium hirsutum
  Clone ID: LIB3148-042-Q1-K1-E10.pep
SSQLVENLCYGKAIQNRRVGLKALSTPEVIAAMDTTQLGTLIMKLGAANAKATLNVYNEIIKKPELVEDPQTANYDVAVIGPEIANCEKELINAKVQAPRLLAGNRFIKYYVSMGYEITSTLELENPNEY

SEQ ID NO: 77275 - protein, 213 aa, Gossypium hirsutum
  unsure (1)..(213): unsure at all Xaa locations
  Clone ID: GOSHI-09MAY01-C36664_1.pep
KSLDRESDRLRSEISLLESKLGHGDYSASNTKVLRMVNTLAVDNEAKQTIEALKTELQKTNEKVQALEELKSQSGDTGKLVDSYISEKITKLKEQIATLEKREERYKTVFADRISVFRRACCELFGYKIVMDEHQRPNGIPVTHFTLQSIYAQNDDDVDXFEYESGNTNILANDYTAQPEISHQVDIFVRKLNSIPAFTANLTVESFNRRTLS

SEQ ID NO: 77276 - protein, 121 aa, Gossypium hirsutum
  Clone ID: GOSHI-09MAY01-C36174_1.pep
QCAVCMDEFEQGAEAKQMPCKHLYHKDCILPWLELHNSCPVCRHELPTDDPDYERRVRGAQATGGGNDGDSSGGDNEQRSGDNRTAERSFRISLPWPFRARGSGSGSGSGDNPQTRQEDLD

SEQ ID NO: 77277 - protein, 168 aa, Gossypium hirsutum
  Clone ID: GOSHI-09MAY01-C36164_1.pep
VYKQIWLFFQVHLIKSEQTRAVDIYTIKQHLQNINDIKIQRQNIIEMSSLLSVQANNTTITKARQHFSFKQKLHTIYLSSSEEYNVSKSSFSLSLRFLLFFSLHFLFCLSLVILHLWFPFLRLHEAETRTARTLKQELHACLSVLFLGSKICPKSPFNYRERKKLGAF

SEQ ID NO: 77278 - protein, 47 aa, Gossypium hirsutum
  Clone ID: LIB3145-023-Q1-K1-D8.pep
MKFLFQCPCCSCFCFMKPKKGKPKMKDDKAETKKEVKAEKEKEAKAE

SEQ ID NO: 77279 - protein, 199 aa, Gossypium hirsutum
  Clone ID: GOSHI-09MAY01-C36114_1.pep
MSSLRSDPVHRIHPEPIDHFDRLPDSLLPLVFNKIGDVKALGRCCVVSRRFRSLVPQVENVVVRVDCVISDDDCSPSSSSYDKSRAAGPISNLLRILLGGIVKPFQALVQFLGPKRPVINETLNTHPVSSSLSVGPGADVNDGEMEQGGVTHHSPTQVLRNFNEIRFLRIELPSGELGIDDGVLFEWRADFGSTLDNCV

SEQ ID NO: 77280 - protein, 184 aa, Gossypium hirsutum
  Clone ID: GOSHI-09MAY01-C36054_1.pep
NPEEMKRVQQELAEVVGLDSRVEESDFDKLTYMKCTLKETLRLHPPIPLLLHETAEDAAVAGYQIPAKSRVMINAWAIGRDRNSWEDPDSFKPSRFLREGVPDFKGSNFEFIPFGSGRRSCPGMQLGLYALDMAVAHLLHCFTWELPDGMKPSELDMSDIFGLTAPRANRLYAVPKKRLVCPLF

SEQ ID NO: 77281 - protein, 223 aa, Gossypium hirsutum
  Clone ID: GOSHI-09MAY01-C36024_1.pep
SFVRPRVRQTRKTYEQKCSQMRNRNTKRDGLYSGDKTRAEVKDLHSRILVAIRSAETISERIEKLRDEGVQPQLTELLHGLMRNWQIMLESHETQNRIMFEVKSFNCPTYGKFCNDSHRLATLQLVAELHNWRSCFVAYLCSQKSYIEALSGWLAKFVAPEVELCSKKRSSAPTLRVNGPPLLATRHEWLATLEKLPKEAVSCALKSFGKDMRALWVQQGEEQ

SEQ ID NO: 77282 - protein, 200 aa, Gossypium hirsutum
  Clone ID: GOSHI-09MAY01-C36314_1.pep
MKLPALFKPKEPTSKQPWQWPSCKHPKTLSFRAGDDVFKTVNSMFFDPNSNNDSGVETPQSWFTNSSDSPSLSTTATTDSDHQGFDGESLETVVRGARSERLFFEPGGDTSSILEEAKAAGGGGDGLFPFKESVILAMESDDPYVDFRKSMEEMVETHGMKDWEWLEQLLGWYLKVNGKNNHGFIIGAFIDLLVAITSSS

SEQ ID NO: 77283 - protein, 193 aa, Gossypium hirsutum
  unsure (1)..(193): unsure at all Xaa locations
  Clone ID: GOSHI-09MAY01-C37874_1.pep
MAGNLGCVVVSVDGNEGSMDALRWALDNIKLRPSSPDSTQPPGHFLILYVQPPPSIAAGLNPGAIPFGGPTHLEVPAFTAAIEAHQKRITDAILNHALQICAEKKANVKTQVVIGDPKEKICEVIENVHADLLVMGSRAFGPIKRMFLGSVXSTYCANHAQCAVMIVKNKEASSKSYETCHQDNLLGAMLRCA

SEQ ID NO: 77284 - protein, 61 aa, Gossypium hirsutum
  Clone ID: LIB3145-047-Q1-K1-E5.pep
KKTITLQAPGVKLGSLKTAPPLFLFFFFFFFFFFFFFFFFFFFFFFFFFFFFFFFFFFFFF

SEQ ID NO: 77285 - protein, 287 aa, Gossypium hirsutum
  Clone ID: GOSHI-09MAY01-C37834_1.pep
MGNNLTPMTKKSAMDISEIKRSTPKSSHKSINFTHAKEFSKFTSPASGKIDGSRIDSNSKASKECPTPLRTPNQVSISGKLKKSSATPWSENRSARTPLNSSASVSKTARGKWNFLPTDCSKILSACRNKSQSPGIFASFNLRTEERAARRKQRLEEKFNVIQEQKVQQQTTLKEKAGTEFKKLRQSFCFKARPLPDFYKERTPKDQIQKVPLTKPESPGIGRKSTPCKTSIVESKSSVPPHRKSSIKNSCFMHVSEKKNRTSARSLASRIAMSAHENTSPNIQHKV

SEQ ID NO: 77286 - protein, 161 aa, Gossypium hirsutum
  Clone ID: GOSHI-09MAY01-C37584_1.pep
VSISGGPVYVSEAPGRHNFELLKKLVLPDGSILRARLPGRPTRDCLFTDPARDGVSLLKIWNMNKYTGVLGVYNCQGAAWNSAARKNTFHQTKTDSLSGHVKGHDVHLISEASLDPEWAGDSAVYCHQTGELITLPYNAAMPVSLKVPEHEIFTIAPIKNL

SEQ ID NO: 77287 - protein, 109 aa, Gossypium hirsutum
  unsure (1)..(109): unsure at all Xaa locations
  Clone ID: LIB3825-024-Q6-K6-H11.pep
MALENXLHFSFFCTTRXFVLVVGGHQXXSAENIHLPTFPGFNKPNLSFSSAFAHSFNGRCQKSRLICKASEAVDQVEAVTEAIWGELVLGSETPVLVEFWAPWCGPCRL

SEQ ID NO: 77288 - protein, 80 aa, Gossypium hirsutum
  Clone ID: LIB3145-043-Q1-K1-D8.pep
HLSSILARLSGEELKMALENCFQLSSVCTIRACVMQSYRHQFSSVEKIHLPTFRGLNKPNLSFSSSFAHSFNGRCQKIRL

SEQ ID NO: 77289 - protein, 60 aa, Gossypium hirsutum
  Clone ID: GOSHI-09MAY01-C37444_1.pep
MSLEKRLESLGLVRHNQNHVHVVSLHLITFAEIIGLNTSWDWLLQKKKINYYFLIIFIIY

SEQ ID NO: 77290 - protein, 132 aa, Gossypium hirsutum
  unsure (1)..(132): unsure at all Xaa locations
  Clone ID: GOSHI-09MAY01-C37474_1.pep
MLKNGAWVEQLHSDTTFPMDVADMILSIPLAERPHEDFQVWSAEASGEFTVRSSYKLLQNTAYDPRAYALQLDXDFYRKLWLLDLPSKIKITVWKISWNFLATRANLLFRRLTSTAMCPRCGSGSESMEHLF

SEQ ID NO: 77291 - protein, 97 aa, Gossypium hirsutum
  Clone ID: LIB3825-027-Q6-N6-F8.pep
FSASRWLRDHTKTFKFGVLKRRGSSQYVAPINYYKILHMILELMLYNLTKDFYRKLLPSLPYTFHMSPKAIWAINFPCPNRTYQCRFGTWYHHRAFD

SEQ ID NO: 77292 - protein, 82 aa, Gossypium hirsutum
  Clone ID: LIB3825-027-Q6-K6-F8.pep
LLRLGMEASGGVDRERRDKISLLAEELIQLSVKGSMVVPSSKPTLICTVWTGKVYSPDGFRAHMKSIWKTRKKFEIQVAGQN

SEQ ID NO: 77293 - protein, 170 aa, Gossypium hirsutum
  Clone ID: GOSHI-09MAY01-C37784_1.pep
PTRPARQDAAIEVSRQSDDASGLSLAETHAAGGLADILMEVLSALEPKTPESLKQDVIVDLVEQCRSYKKRVVLLVNHTTNEQLLCQGLALNDRLQHVLCQHDDILKGNTGSATTAVAETRVVPIVNVNHDDDDSEDDFAQLAHRDRQGIMLKDRSKEHKKVNLLELFLF

SEQ ID NO: 77294 - protein, 58 aa, Gossypium hirsutum
  Clone ID: LIB3828-023-Q6-K6-H9.pep
MIRLTVLDVVQSLKQDVIVDLVEQCRSYKKRVVLLVNHTSYEQLLCLGLALNDQLQHV

SEQ ID NO: 77295 - protein, 149 aa, Gossypium hirsutum
  unsure (1)..(149): unsure at all Xaa locations
  Clone ID: LIB3583-023-P1-K1-A3.pep
ARPPTRPARQDAAIEVSRQSDDASGLSLAEIQNASALTNVWLXSALGFEAPXTTVNMHLMMMMRMTEQCRSYKKRVGLLVNHTPTEQLLCQGLALNDRLQHVLCQHDDILKGNTGSXPQRGQHSRWPIGHVTRERNMVRGYSFKLFYSN

SEQ ID NO: 77296 - protein, 83 aa, Gossypium hirsutum
  unsure (1)..(83): unsure at all Xaa locations
  Clone ID: uC-gsflnu33B046a07b1.pep
AYTAKNTAIVFFLRTQDRXKEIKNSKDDFKLLCSFSXDLFSFSLARFPLLVCESTLMNTQISRKYRDSGEGRMFVSFEFLLCF

SEQ ID NO: 77297 - protein, 119 aa, Gossypium hirsutum
  Clone ID: LIB3829-019-Q6-K6-G12.pep
SLILQSPDPSFNLTVDGARAEIRSCPQRSPMEIRGSCTEKMALVTWRRPFGETARGSRPSGTVLAYSRSFWCSQLLSFSLGLVGPQVWAIETGSRVLMVGSDSCNWVKSRFKEFGFNLI

SEQ ID NO: 77298 - protein, 79 aa, Gossypium hirsutum
  Clone ID: LIB3145-045-Q1-K1-H9.pep
INPSLFLLFKKNSNHTLISLKNKIEIQKKQTFDPRPNLYIFEIFGYSSVSIHILKNRTKQKENKSTEKKKNCEITFAIL

SEQ ID NO: 77299 - protein, 275 aa, Gossypium hirsutum
  unsure (1)..(275): unsure at all Xaa locations
  Clone ID: GOSHI-09MAY01-C37674_1.pep
PTRPELASFSTYFSFSMSHKXGDGLAFIMVPSSFKVDVSGNSTFGISLGFGKKXKSGIVAVEFDTFRDAKHGDLNENHVGIDVGSLASVKARNLSSLNLVLSNGEKLHSWIDYEASSKRLEIRLSQSSSTRPDDPLLSYSIDLSKLWNDEQVFVGLSSSNGNSSQTCFIHLWSFKLRQVPNWMHSQPLDPEAITKNPKPLTTPHKSSKCFWKVLVVFVFGGACGALTASCVLYLWNMFGDRRPVVPEECGAEGVDFEYNKVKVVVVDNAVKDGKK

SEQ ID NO: 77300 - protein, 76 aa, Gossypium hirsutum
  Clone ID: GOSHI-09MAY01-C37634_1.pep
FVEILNKYLYFFEKGNPQITVAAIQSLIELITTEMHSDSSTLDPAADAFFASTLRYMEFQKQKGGAIGEKYEPIKV

SEQ ID NO: 77301 - protein, 214 aa, Gossypium hirsutum
  Clone ID: GOSHI-09MAY01-C37194_1.pep
VSIMKIHLLLTLFLVLFASFLSSSNCYTFYVDWVLHPKEKYNEWAGKMRFQVNDTIIFKYEKGSDSVLLVQKDDYDKCERKEPLMEMNNGSSEFKYPHSGPFYFISGKEGHCQKGQKMITVVMAVRHGTPSIHPPTAPSPKHHGPVTPGPAHSPYHHGPVAKPPTGSSPVPALAPGPIAKPPTGSSPVPALALGPIAKPPTALTPGPAQSPYHH

SEQ ID NO: 77302 - protein, 135 aa, Gossypium hirsutum
  Clone ID: GOSHI-09MAY01-C37184_1.pep
HASAHASGIVKKAVGNYAACLIGRALTCNYYRGDNYLEIDVDVASSAVANAILHLALGCATSVVIDMGFVVEGQTEDELPEKLIGAVRVSKMEMSSATVVDALTPSVQTAAGRGIGVCKVNDHKSDDGESDDNDK

SEQ ID NO: 77303 - protein, 175 aa, Gossypium hirsutum
  Clone ID: GOSHI-09MAY01-C37104_1.pep
MASSSVGMACLGLVLCMVVGPSLATVYTVGDTSGWATGVDYSGWANDKTFKVGDSLVFNYPTSHTVEEVSSSDYSTCTVGKAISTDSTGATTINLKTAGTHYFICGVAGHCESGMKLAIKVESSSSSSSTDKPSTTSPSTTTTTKIPDSSSSWNLSPVLAFATTWVALCVMMVVS

SEQ ID NO: 77304 - protein, 54 aa, Gossypium hirsutum
  Clone ID: LIB3083-049-Q1-L1-F11.pep
PIDFDMIHITPPHIYNVLNTIENRTSKVLIHKIKAIILNTNKALPLSSPSQPPF

SEQ ID NO: 77305 - protein, 85 aa, Gossypium hirsutum
  Clone ID: uC-gsronu33B062a08b1.pep
FRVRSFQSVGGPSLFHRRLSCSSVGMVCLGLVLCMVVAPSLATVYNVGDASGWATGADSSSWASDKTFKVGDPLVLNYPSSHTVE

SEQ ID NO: 77306 - protein, 218 aa, Gossypium hirsutum
  Clone ID: GOSHI-09MAY01-C37124_1.pep
AEIKGHRRTYIGAMPGKMGQCLKNVGTANPLVLIDEIDKLGRGHAGDPASALLELLDPEQNANFLDHYLDVPIDLSKVLFVCTANVVDNIPNPLLDRMEVIAIAGYIADEKMHIARDYLEKTAQETCGVKPEQVEVTDAALLGLIENYCREAGVRNLQKHIEKIYRKIALRLVREGSSNEFVISGEVVQPAEAKAEVDETDQHAAPNETATESSVQTS

SEQ ID NO: 77307 - protein, 186 aa, Gossypium hirsutum
  unsure (1)..(186): unsure at all Xaa locations
  Clone ID: GOSHI-09MAY01-C37094_1.pep
DTEYEGNVEATGDDFTVEPAESRXFRALLDVGLVRTTTGNHVLGVLKGALDGGVDIPHSEKRFAGFNKDSKQLDPEVHRKYTYGGHVAAYMKNLMEDEPEKYQSHFSEYIKRGIEPGSIEGMYKKVHAAIRADPEAKKSKKEPPKEHKRYNLKKLSHEERKAELIDRLKALNSLLEXDNDSDEDDD

SEQ ID NO: 77308 - protein, 110 aa, Gossypium hirsutum
  Clone ID: LIB3828-034-Q6-N6-F8.pep
SGAYIVRQAAKSVVASGLARRCIVQVSYAIGVPEPLSVFVDTYKTGKIPDKDILQLIKEIFDFRPGMISINLDLKRGGKFRYQKTAAYGHFGRDDKDFTWEIVKPLKPKA

SEQ ID NO: 77309 - protein, 69 aa, Gossypium hirsutum
  unsure (1)..(69): unsure at all Xaa locations
  Clone ID: LIB3145-037-Q1-K1-D2.pep
GRVGGRVGGRVGLALIXEACDFXPGMMSINLDLKRGGKFRYQKTAAYGHFGRDDPDFTWEIVKPLKPKA

SEQ ID NO: 77310 - protein, 198 aa, Gossypium hirsutum
  Clone ID: GOSHI-09MAY01-C37074_1.pep
MGKAKKAPKFAGMKKIVTQKAIKHYKDQVLNPNKKDLSKDKLPRNVPNVSSALFFTHNTSLGPPYRVLVDTNFINFSIQNKLDLEKGMMDCLYAKCTPCITDCVMAELEKLGQKYRVALRIAKDPRFERLPCVHQGTYADDCIVERVTQHKCFIVATCDRDLKRRIRKVPGVPIMYITQHKYSIERLPEATIGGAPRF

SEQ ID NO: 77311 - protein, 66 aa, Gossypium hirsutum
  Clone ID: LIB3829-015-Q1-N6-E7.pep
SFCKLLLLINYVFHWKQHKCFIVATCDRDLKRRIRKVPGVPIMYITQHKYSIERLPEATIGGAPRF

SEQ ID NO: 77312 - protein, 67 aa, Gossypium hirsutum
  unsure (1)..(67): unsure at all Xaa locations
  Clone ID: LIB3145-042-Q1-K1-C12.pep
GCEQINXFSXXYNXYKPILPTLNYFISHRVSKLXXPEISTAXXKYPNTCMXQNXXELHPQWLSSEKX

SEQ ID NO: 77313 - protein, 139 aa, Gossypium hirsutum
  Clone ID: GOSHI-09MAY01-C37064_1.pep
MSSFRFTALMIALLVTMSAVVSESRVARKDLGLDLGGIGLGVGAGIGLGLGGGSGSGSGAGAGSGSGSGGSSSSSSSSSASSSSSSGGSGAGSEAGSSSGSYAGSRAGSGAGSEAGSSAGSYAGSRAGSGRGRGRGNGN

SEQ ID NO: 77314 - protein, 101 aa, Gossypium hirsutum
  Clone ID: GOSHI-09MAY01-C37004_1.pep
SSSVSSDTRQPSLARLPFVDAFLAKAKNNKSLLSNRKIYSRRSTILPEFVDQTVRIYNGKNFVRCKITEGKVGHKFGEFALTRKRKHLRSKAEPAKKKGKK

SEQ ID NO: 77315 - protein, 83 aa, Gossypium hirsutum
  Clone ID: GOSHI-09MAY01-C37394_1.pep
PRVRNNLGLTSTWSYKLSAHLRNNYLTVFTIAALEIFRRFQWIFFRVENEWNKINFRPNVRLSMNDPSDDEVKLLSSSAGYNV

SEQ ID NO: 77316 - protein, 129 aa, Gossypium hirsutum
  unsure (1)..(129): unsure at all Xaa locations
  Clone ID: GOSHI-09MAY01-C37314_1.pep
LYKNFSNVLMERSPDASRDGTLQSLKSVNGDSMADDIEEPSTMEVDDENERPKKSXQMAVRRLNGYNVREKEQWCLSTLXGYVKAFSRQYASEIWPHIEKLDAEVFTEDAHPLFRKAVYSGLRRLSNEL

SEQ ID NO: 77317 - protein, 82 aa, Gossypium hirsutum
  unsure (1)..(82): unsure at all Xaa locations
  Clone ID: LIB3829-024-Q6-K6-E1.pep
KTKXKSXSNGGKNETNGYNVFVIKXXVVFINWWGGGKAFSRQYASEIWPHIEKLDAEVFTEDAHPLFRKAVYSGLRRLSNEL

SEQ ID NO: 77318 - protein, 86 aa, Gossypium hirsutum
  Clone ID: GOSHI-09MAY01-C37294_1.pep
DSKTVIKKCQSQEIDKSVLGAIIRDIQSKRTSLPEVSFQFIHRAENVEALNLAKEALKRREGAYLVKEGRIHSATDPEGRRCGHPD

SEQ ID NO: 77319 - protein, 130 aa, Gossypium hirsutum
  Clone ID: GOSHI-09MAY01-C37264_1.pep
NFVFVLLMKLYGLMHFDVMSRFMYFYYDPRVPIFPACERLILLRTDPKEMRDYSILLYHCGLYEQALKFLKLYQDMKSSSAQNPSTDPVSNLEEDTVKKLIVRLNLIAMEGGWTRPWYVRNYLGNNSEPW

SEQ ID NO: 77320 - protein, 53 aa, Gossypium hirsutum
  Clone ID: GOSHI-09MAY01-C37234_1.pep
PRVRIIVTRTEIDMQYIKAGCPGKYKKTLNDAVHSDTSGHYRTFLLSLLGPNN

SEQ ID NO: 77321 - protein, 186 aa, Gossypium hirsutum
  Clone ID: GOSHI-09MAY01-C30914_1.pep
LLDGIDMDVPAHPAARVVTNAFSKSIWVIFQLFFYALRPLFLKPKPPGCWEFINLFAQLALDATMVYFHGWKSFAYLILSTFVGGGMHPMARHFISEHYVFKPEQETYSYYGPLNLLTWSVGYHNEHHDFPRIPGYKLHKVKEIAPEYYEGLESYKSWSQVIYMYIMDQTVGPFSRMKRKISKKSR

SEQ ID NO: 77322 - protein, 207 aa, Gossypium hirsutum
  Clone ID: GOSHI-09MAY01-C30894_1.pep
MAAARSLSNPSSTTSLISQSRNQSKPTSPPSFLKPHSLQSPWLGFKISFQPSKTRPYLPNHRTITATISLSLPTSKTDRVASAGKVPKWSRRAIKSFAMAELEARKLKYPTTGTESLLMGILIEGTNLAAKFLRANGITLSKVRDETVKLLGKGDMFFFSPEHPPLTEDAQRALDWAVDEKLKSGGDGEITTTHLLLGIWSEVESPG

SEQ ID NO: 77323 - protein, 134 aa, Gossypium hirsutum
  Clone ID: GOSHI-09MAY01-C30814_1.pep
GFAQYHAVYPGEVGVNRALVNRDSFQRYNMDGIAEILLALQRIEQDEELTYEQLLVLETSLFLNGLDFYDQHRDMRLDIDNMSYEELLALEERMGNVSTGLSEEALSKCLKKSIYDTASSEFANVSFEGEKDDV

SEQ ID NO: 77324 - protein, 149 aa, Gossypium hirsutum
  Clone ID: GOSHI-09MAY01-C30554_1.pep
MAAVISCNSYSPLAASKWINPTLPTKASTFLATPKYNPHKHVQCKLQNEQKGRPFSLKECAISIILAAELITGIPSLDAYAANPPLPDLSGLISGPPIKDPGALLRYALPINNKAGREGQKPLGDITESLKIAGVKALDSVERNVRQAS

SEQ ID NO: 77325 - protein, 186 aa, Gossypium hirsutum
  Clone ID: GOSHI-09MAY01-C30544_1.pep
MSVALSSSHQTFIANAFSFNRKPKAKLPNSPTFITCRFHSDDHDDSSWRNEKQLAKLAMVTLAAGVLTLGSVGDASAAKSGGRVGGQAFRSAAPRSAPRANNNSRTNIYINPRVAPPLVGGYGYGYGVPFYGGWGWSPFSFFAPGPSVAVGVGGGFDTLLLFMFLGAVAAVVRRFFGSRNEDEDEY

SEQ ID NO: 77326 - protein, 193 aa, Gossypium hirsutum
  Clone ID: GOSHI-09MAY01-C30534_1.pep
MKLLHSSDQKSQWPATGAKGSLLRYALAHQQLEAVIQLEYTIGFHDGYIQVNARVDNLRFHVARLGFSKKNDEMDDCLNEKHFPSRIRVWVGPEVGSTYVSGLTLGRSTNNGENEVETQRILKGRFGKYSKDSSHVKARARVSMKNKMKNWRWDQDAEGNAVVFDAVLCDNVTGHEIATWKSLNKIATAAAMV

SEQ ID NO: 77327 - protein, 177 aa, Gossypium hirsutum
  Clone ID: GOSHI-09MAY01-C30774_1.pep
MEPTRIHSNGDSLFQDITLAPDIPVYATTAAYNKDPCPNKLHLGIGVYRTEEGKCHTLNVVKQVEQTLANDLSADKEYLPITGMPEFNKLSAELMFGSGSPAIKESRVVTVQCVSGCLSLRVGAEFLAKHYHRHVRYLPEPTYGNHPNLISAAGLTLKTYRYYDPKTLVLDFQGLLE

SEQ ID NO: 77328 - protein, 107 aa, Gossypium hirsutum
  Clone ID: GOSHI-09MAY01-C30724_2.pep
MSWLSILCGLLLLLCILKPGIRSSADRLDGRVLELDDSNFDSAISSFNYILVDFYAPWCGHCQRLSPQLDEAAPILAGLKDPIAVAKLNADKFTTVARKYEIDGYPT

SEQ ID NO: 77329 - protein, 157 aa, Gossypium hirsutum
  unsure (1)..(157): unsure at all Xaa locations
  Clone ID: GOSHI-09MAY01-C30724_1.pep
SQQTLFLKETGKTKKKKKGKKREKEARSPIPTMRLPMIILLVLTIWKAGNGSRANELKADGKVLELDESNFDSAILSFDYILVDFYAPWCGHCKRLSPQLDEAAPVLAGLNEPIVLAKVNADKFTRLACKHXFDGYSTLKFFMHGVPMEYNGPRKAY

SEQ ID NO: 77330 - protein, 217 aa, Gossypium hirsutum
  Clone ID: GOSHI-09MAY01-C30324_1.pep
MEMAISFHNSSFKSPFINSSSNPKPKFLFPTQLSGLISSPLSSFNSKRTCLKFGSRTFTKPVKCSVSQAAQPAIEKRSQLKRRSDIRNIAIVAHVDHGKTTLVDAMLKQSKVFRDNQFVQERVMDSNDLERERGITILSKNTSITYKGTKINIIDTPGHSDFGGEVERILNMVEGVLLVVVLLTFSFLEFHLFKWCSCKVIFFLVNSSSSNLLGFKL

SEQ ID NO: 77331 - protein, 189 aa, Gossypium hirsutum
  Clone ID: GOSHI-09MAY01-C30214_2.pep
MTSLVAGAILLLLSLTGIVSAGRDVTGDILRLPSEANKFFHGGDDDEVEGTRWAVLIAGSNGYWNYRHQADVCHAYQLLRNGGLKEENIIVFMYDDIAYNEENPRPGIIINNPHGDDVYKGVPKDYTGENVTVNNFFAAILGNKSALTGGSGKVVNSGPSDHIFIYYSDHGGPGVLGMPTLPYLYADDL

SEQ ID NO: 77332 - protein, 140 aa, Gossypium hirsutum
  Clone ID: GOSHI-09MAY01-C30214_1.pep
MGKFWIGLVLPCVVRKHAYELLRNGGPKEENIIGFMYDDIAYNEENPRPGIIINNPHGDDVYKGVPKDYTGENVTVNNFFAAILGNKSALTGGSGTVVNSGPSDHIFIYYSDHGGPGVLGMPTLPYLYADDLIDVLKEKH

SEQ ID NO: 77333 - protein, 104 aa, Gossypium hirsutum
  Clone ID: GOSHI-09MAY01-C31194_1.pep
MAIRKPSKLPQTAVLKQILKRCSSLGRKHGYDEDVLPLDVPKGHFAVYVGENRSRYIVPISFLTHPEFQCLLRRAEEEFGFNHDMGLTIPCEEVVFRSLASMLR

SEQ ID NO: 77334 - protein, 221 aa, Gossypium hirsutum
  unsure (1)..(221): unsure at all Xaa locations
  Clone ID: GOSHI-09MAY01-C31184_1.pep
MATMLSLSPNPPITTLPSLRSSFKGNLRNLKPNPFHIIRIRTKQQGVEARKGTRSLVVVNQAATTQVSVTASNMRFRLDNLGPQPGSRKKGKRKGRGISAGQGGSCGFGMRGQKSRSGPGVRKGFEGGQMPLYRRIPKLRGIAGGMHAGLPKYIPVNSKDIATAGFQEGDEVPXETLKEKGLINPSGRERKLPMKILGDWELNVKLNLKARAFSASANEKL

SEQ ID NO: 77335 - protein, 82 aa, Gossypium hirsutum
  Clone ID: LIB3120-017-Q1-K1-A7.pep
TLPLPRVATLVSHGCSAGGSSSIVKIEPEGVENHFYSTLFFRVLRAGFSRVFQDEAKGPFWRIAGHRIRWWRGGRTATMMGI

SEQ ID NO: 77336 - protein, 110 aa, Gossypium hirsutum
  Clone ID: uC-gsflmaxxa004h02b1.pep
DRIGSDSLSDSAELKSLKRCGYGAMGRQKGGFRLRLAALYRNQPSKAEKKELNRDGSQPLRGSILTTEVDPPALQPWGTGVATRGRGNGQGRGGRGEAKSPGGVAAELWW

SEQ ID NO: 77337 - protein, 75 aa, Gossypium hirsutum
  Clone ID: uC-gsronu33B114d07b1.pep
SKTILNRNINKKGEEETHRFPTVATPEGPPPLSKSNPEGVENHLYSTLFFRVLRAGFSRVFQDEAKGPFWRIAGH

SEQ ID NO: 77338 - protein, 139 aa, Gossypium hirsutum
  unsure (1)..(139): unsure at all Xaa locations
  Clone ID: GOSHI-09MAY01-C31064_1.pep
TTTINYNPKRNRFRKQHRGRMKGISYRGNRICFGRYALQALEPAWITSRQIEAVRRAMTRNVRRGGKIWVRIFTDKPVTVRPTXTRMCSVKGSSEYWVAVGKPGRILYEMSGVAENIARKAISIAASKMPIKTQFIISG

SEQ ID NO: 77339 - protein, 251 aa, Gossypium hirsutum
  unsure (1)..(251): unsure at all Xaa locations
  Clone ID: GOSHI-09MAY01-C31004_1.pep
EAYDVVYDINGRXAAEVEPILDALPNLEQFIYCSSAGVYLKSDMLPHCEIDAGPPKSRHKGKLNTESLLESRDVNWTSVRPVYIYGPLNYNPVEEWFFHRLKAGRPIPIPNSGVQITQLGHVKDLATAFIAVLGNEKASKQVFNISGEKYVTFDGLAKACAKAGGFPEPEIVHYNPKEFDFGKKKAFPFRDQHFFASLEKAKHVLGWKPEFGLVEGLTDSYNLYFGRGTFMKEAYFSTDDMILGKTFVLQS

SEQ ID NO: 77340 - protein, 59 aa, Gossypium hirsutum
  Clone ID: GOSHI-09MAY01-C31394_1.pep
SLSIFFSSAEPYPFSTSADLPSQTATDKFGLLMIIFGLVIPLSTPISTKPRGICGRFAR

SEQ ID NO: 77341 - protein, 147 aa, Gossypium hirsutum
  Clone ID: GOSHI-09MAY01-C31374_1.pep
HASGFRHIELFDTVKNEFTELTRHVSPTTHHLNPFISPGSARVGYHKCRGESNGAKATQLLLENVKSPVPNLSLFRMYGSFPSFSPAGDRIAYVDFPGVYVVNRDGSNLRQVFHLNAFGSAWDPVRKGIVYTSAGPEFSWAGTEVDI

SEQ ID NO: 77342 - protein, 128 aa, Gossypium hirsutum
  Clone ID: GOSHI-09MAY01-C31284_1.pep
DHASGTLSFFSLRNHIRGKKTNDFGDSRYMSVVTMTTVGYGDLVPHDFLSQLVCTGFITVGMLLFGIVAKLAAKYLVFKQQKVLINALHTARIMGPMEALNEIESIEIDYTKCLISLIAMAVHFVIGI

SEQ ID NO: 77343 - protein, 145 aa, Gossypium hirsutum
  Clone ID: GOSHI-09MAY01-C31204_1.pep
RPAMPKVRRFESLTQLEPVDLEKRIAMAELEDESSLLRSVSVNNNGMSEEKLLKLLKAKFPSEIFKFRADNLLLDFFWETFMVEDKGERHDMAFEDFGVKSLKVVEDCVKWEFSGIFLGWELHDSRKASLKDMERNENWRNFNEE

SEQ ID NO: 77344 - protein, 101 aa, Gossypium hirsutum
  unsure (1)..(101): unsure at all Xaa locations
  Clone ID: GOSHI-09MAY01-C32994_1.pep
VALSQHRGVKEVSEGMSKTSGIPXSEICEHRFLLYNKDASQHIFEVSAGRDSLVLGEGQILAQVKHVVKVGQGVVGFGRNMTGLVKLAFTAGKRVRTETNI

SEQ ID NO: 77345 - protein, 121 aa, Gossypium hirsutum
  unsure (1)..(121): unsure at all Xaa locations
  Clone ID: GOSHI-09MAY01-C32984_1.pep
MMLQTACSSFXWLLNVGNQKDGLFPASFSFLVAIXGISLLYSFWKARKPMAPLPPGPRGLPILGYLPFLGFDNLHLVFTELGGVYGPIYKLWLGNKLNRSNSFPSLGKEXVRDHDIAFQSE

SEQ ID NO: 77346 - protein, 96 aa, Gossypium hirsutum
  Clone ID: GOSHI-09MAY01-C32844_3.pep
MALNGNGCCWIQERILSRNGCSVFLTPRSRSSAAILPRKSTALSFSSSFQFQGFVVDRKQSSSSMQTAAVRHLVGSVTKTQGLRFAVVVARFNEIV

SEQ ID NO: 77347 - protein, 225 aa, Gossypium hirsutum
  Clone ID: GOSHI-09MAY01-C32844_1.pep
MALNGNGCCWVQERILSGNGCGVFLTPRSRSSTAILPLKSTALSFSSSFQFQGFVVDRKQSSSSIQTAAVRHLVGSVTKTQGLRFAVVVARFNEIVTKPLLEGALDTFRKYSVNEEDIDVVWVPGSFEIGIVAERLGKSRNYHAILCIGAVIRGDTTHYDAVANSVASGVLSAGLNSGVPCIFGVLTCEDMDQALNRAGGKSGNKGAECALTAIEMASLFDHHLK

SEQ ID NO: 77348 - protein, 90 aa, Gossypium hirsutum
  Clone ID: LIB3582-040-P1-K1-F2.pep
FYGSFHVLKWSCPLITWLLVSSLYFSFFIIPCDLNLQFINFAGVPCIFGVLTCENMDQALNRAGGKSGNKGAECALTAIEMASLFDHHLK

SEQ ID NO: 77349 - protein, 120 aa, Gossypium hirsutum
  Clone ID: GOSHI-09MAY01-C32764_1.pep
HASETFSTATPFLTTSTTLSLSLSTHLHRLSSSLSSTCFPFKPNLHRVRRSPSLLASYGNPHLFNHEDHHSTYKSLLSTRILGPKSNFWQMGPSEPSCSREILVKSSASDSSNTVFSTLS

SEQ ID NO: 77350 - protein, 140 aa, Gossypium hirsutum
  Clone ID: GOSHI-09MAY01-C32714_2.pep
MAVASVVACILLFISSTMWMGEARIPGVYSGGAWQNAHATFYGGSDASGTMGGACGYGNLYSQGYGVNTAALSTALFNNGFSCGACFEIKCASDPQWCHSGSPSIFITATNFCPPNYALPSDNGGWCNPPRPHFDLAMPM

SEQ ID NO: 77351 - protein, 259 aa, Gossypium hirsutum
  Clone ID: GOSHI-09MAY01-C32714_1.pep
MGIAGAVCIIVGFISSMWLAEARIPGVYSGGAWQNAHATFYGGSDASGTMGGACGYGNLYSQGYGVNTAALSTALFNNGLSCGACFEIKCASDPKWCHSGSPSIFITATNFCPPNYALPSDNGGWCNPPRSHFDLAMPMFLKIAEYRAGIVPVSYRRVPCRKRGGIRFTINGFRYFNLVLISNVAGSGNIVKASVKGSRTGWMSMSRNWGQNWQSNVVLVGQSLSFRVTGSDRRTSTSWNIVPAHWQFGQTFTGKNFRV

SEQ ID NO: 77352 - protein, 121 aa, Gossypium hirsutum
  Clone ID: LIB3135-014-Q1-K1-A2.pep
DAWAAALSTALFNNGFSCGACFEIKCASDPQRCHSGSPCIFMTATNFCPPNYALSSDNGGWCNPSRTDFDLAMPMFLKIADYRAGIGPVSSRRIATMFPYNFFFSFFFIIKWERRLPVKLI

SEQ ID NO: 77353 - protein, 124 aa, Gossypium hirsutum
  Clone ID: GOSHI-09MAY01-C32154_1.pep
SSSEEGENDVFFDSLDCLSIEEPVLANQGLECGKLEYEIWMNEPGNVKERRERFLLGMDLVEFAYSSRIKDLQRITECSDAVLSSSCSSAGNGEGSIADCDRKLMCEANLLLDESTASALESEN

SEQ ID NO: 77354 - protein, 135 aa, Gossypium hirsutum
  Clone ID: GOSHI-09MAY01-C32164_1.pep
MATTSPMASRLKSSFTSSLTRKLVGPKGISGAPFIFSPGKTRTPCFTVKAVQSDKPTFQVIQPINGDPFIGSLETPITSSPLIAWDLSNLPAYRTAGNPLLRGIEVGLAHGFLLVGPFVKAGPLRNTAGAGQAGS

SEQ ID NO: 77355 - protein, 129 aa, Gossypium hirsutum
  Clone ID: LIB3120-027-Q1-K1-F5.pep
MAEDAARKSIYHFSVKDIRGNDVSLSDYSGKVVLIVNVASKCGLTQSNYKELNVLYEKYKNQGFEILAFPCNQFAGQEPGTNEQIQEVACTMFKAEFPIFDKVEVNGKNATPLYKFLKSEKGGYFGDAI

SEQ ID NO: 77356 - protein, 43 aa, Gossypium hirsutum
  Clone ID: LIB3147-019-Q1-K1-H3.pep
IQEVACTMFKAEFPIFDKVEVNAKNATPLYKFLKSEKGGYFGD

SEQ ID NO: 77357 - protein, 51 aa, Gossypium hirsutum
  Clone ID: uC-gsflmaxxa067h08b1.pep
FLFPHFILHNTAQNSLGFLLFFLDIKSPDFFIIQFRLGSFSSQEKPSFKES

SEQ ID NO: 77358 - protein, 54 aa, Gossypium hirsutum
  Clone ID: LIB3120-026-Q1-K1-E5.pep
SSLRFSSKYETPHALSRNQAWSNLNKIKPKKLLKPTVIHPRLEPKHKAYHIPIF

SEQ ID NO: 77359 - protein, 239 aa, Gossypium hirsutum
  Clone ID: GOSHI-09MAY01-C32274_1.pep
MGDYNDAFMRNQNAAAAVQARVKPPQNRANIQQLKLIGQSHPTGLTANLLKLFEPRPPLEFKPPPEKRKCPPYTGMAQFVSHFAEPGDPEYAPPVQEAETPAQRRARIHKLRLEKGLEKAAEELKNYDPNNDPNVSGDPYKTLFVARLNYETSESRIKREFESYGPIKRVRLVTDKSTNKPRGYAFIEYMHTRDMKAAYKQADGRKIDGRRVLVDVERGKTVPNWRPRRLGGGLGTTKI

SEQ ID NO: 77360 - protein, 224 aa, Gossypium hirsutum
  unsure (1)..(224): unsure at all Xaa locations
  Clone ID: GOSHI-09MAY01-C32204_1.pep
PIKIRGDIHGQYSDLVRGFEYGGXPPHANYLFLGDYVDRGKQSLETICLLLAYKIKHPENFLLLRGNHECASINRIYGFYDECKRRFNVRLWRTFTECFNCLPVAALIDEKILCMHGGLSPDLNNLDQIRSLHRPTDVPDTGLLCDLLWSDPSKDVQGWGMNDRGVSFTFGPDKVSEFLQKHDLHLICRAHQVVEDGYEFFADRQLVTIFSAPNYCGEFDNAGA

SEQ ID NO: 77361 - protein, 227 aa, Gossypium hirsutum
  Clone ID: GOSHI-09MAY01-C33844_1.pep
ITITPNFPVDTGNGLSAGAIAGIVIGSCVILILLLIILRLMGYLGGKHDEYSELHGLELQTGYFSLRQIKAATNNFDSANKIGEGGFGPVYKGILPDGRVLAVKQLSSKSKHGSREFVTEIGMISGLQHPNLVKLYGCCIEGNQLLLIYEYLENNSLARALFGRDEQRLNLHWSTRKKICLGIARGLAYLHEESRLKIVHRDIKATNVLLDKDLNAKISDFGLPNLD

SEQ ID NO: 77362 - protein, 112 aa, Gossypium hirsutum
  Clone ID: GOSHI-09MAY01-C33544_1.pep
KIYRYLKKNSSMEITNPKPSSKRLLFDRRYGGVLDEWKDPSEESSGCCPRKVRFLSFLPLLNQILAIAVLNHSSFLRFFLGVIFERVCIIPLTKAFLKTGTNSINFVGRSTV

SEQ ID NO: 77363 - protein, 95 aa, Gossypium hirsutum
  Clone ID: GOSHI-09MAY01-C33494_1.pep
FVNKSPFTVAHVHSPISLKPKYPVTPNATPKHGPRGPKSLTEDRRPRVSETLGTASVRQRILNSRRNRCANPTTGRFASSTYDCCPFSCRHLCFA

SEQ ID NO: 77364 - protein, 88 aa, Gossypium hirsutum
  Clone ID: GOSHI-09MAY01-C33784_1.pep
WEQKHLPLTKRGPLRQNSGAIGSGETVEEAAITTAYKVAEAESRSFLAAEAVKEAERVSKMAEDTDSMLQLVKEIYEQCSRGETVILV

SEQ ID NO: 77365 - protein, 130 aa, Gossypium hirsutum
  unsure (1)..(130): unsure at all Xaa locations
  Clone ID: GOSHI-09MAY01-C33744_1.pep
PTRPHRSHAITGLVAKWHVCATIGSFDEADGETPMAQIASPPLLPVAVDWESGEEDEGDDLDNTKLVPIFAHTVSFQKRQALATYLEHNRAXGMTGYGVMVHRTVNPHHISASRLTLLLWLLNKTIVNLT

SEQ ID NO: 77366 - protein, 122 aa, Gossypium hirsutum
  unsure (1)..(122): unsure at all Xaa locations
  Clone ID: LIB3146-022-Q1-K1-F6.pep
RNATKITYRSQAITGLAAAAHVCATINSFXKTDGETPMAQIVSPQMYPVDVDWESDEEDEGDDLDNTKLVPIFAHTXTYLEHNRTGITVYGFMVDKTWIHTIFRIELALLLWLLNKTIVNLT

SEQ ID NO: 77367 - protein, 322 aa, Gossypium hirsutum
  unsure (1)..(322): unsure at all Xaa locations
  Clone ID: GOSHI-09MAY01-C33604_1.pep
MWSPQTPSNQETRNESLDHNKGSNYVKFVNGVAVVRGRTRSLVERFERRDLLNCSGDLATDSIAPAVPEADKTPAIIEGGTKISKTQPISANDVSTAESQSSRTEPASSCEGGITASPIPTRESTPTSVGIITGNQISRRESTFTPGRMIARNQNSRKESTFASDRIITINRISRRESTSTSDGVIKKNQITRNESTSISDGIISRNQHSKKEAAAANDVSGPNGLYTENQISRRGFNSGNDRNVTNIESRISKDESISTNDGNLTESLMQTHDTFVSTLRSRLTKLQVVRHFWEKXDIKGSIGALRKLPDHSVQADVIGVL

SEQ ID NO: 77368 - protein, 36 aa, Gossypium hirsutum
  unsure (1)..(36): unsure at all Xaa locations
  Clone ID: LIB3135-006-Q1-K1-A8.pep
NLALDISSLPIIKGIGSGHRNLILNKRMTKSKEXRG

SEQ ID NO: 77369 - protein, 94 aa, Gossypium hirsutum
  Clone ID: GOSHI-09MAY01-C33624_1.pep
SVPSTTAGPVKEGLGWQSQQLLTERLICDRRIFRCGRLSPYLKKHPTSLLLQDAREFYLHSEEVFFYVEESTLGFSVVSFPPKCYEATIRIKNL

SEQ ID NO: 77370 - protein, 255 aa, Gossypium hirsutum
  Clone ID: GOSHI-09MAY01-C33194_1.pep
MAFASVFRKSANALAPLAIRLTRVQRNYHSSIFRALNHGLQSQKPAVNRFYPNSFHFSTAVASKKPSSDESLVRVLESEIQFAEGDNSEQVVGTPSGFPFEVEDNPGTQTVTLKREYNGELIKVDVHMLDLNEDEQDEDEVEDKDGDNTNARIPFVVTVSKKDGPSLEFSCTAFHDGIGIDSLSFRNPNPEDDELAYEGPDFNDLDENLQKGFYKYLEVRGIKPSTTNYLREYMADKDNREYLLWLKNLKKFVEE

SEQ ID NO: 77371 - protein, 71 aa, Gossypium hirsutum
  Clone ID: GOSHI-09MAY01-C33164_4.pep
HENLYDTLKSYVVYFSGVRLVTWEFYCGCGTAEWCRVVWPSLPLDLVSVYAMTMRGLVVWIVRLMTLSVLD

SEQ ID NO: 77372 - protein, 68 aa, Gossypium hirsutum
  Clone ID: LIB3120-057-Q1-K1-E10.pep
RCEVLGLYVGLNARLKSEPVAPSSFVPICYTRVRFRFRGGNHRYTKVLRVPLAITPTHDVRLRNPVHP

SEQ ID NO: 77373 - protein, 84 aa, Gossypium hirsutum
  Clone ID: LIB3120-057-Q1-K1-G12.pep
YMSWKYKAQSSGRSTSESIYTNRAVSIVCPLAGKFAALVVPTNWLMCGERWPVHRVSPCPSVYRSVVSGCLVVVSGTSLSKGGN

SEQ ID NO: 77374 - protein, 76 aa, Gossypium hirsutum
  Clone ID: LIB3120-057-Q1-K1-C10.pep
SRRTRSRTINIRRQRTINRNVNQYPHPNLHRPIRTINSNVITRRRTLQHSHHSKNMRSSPLMTPTDILRFYECPSR

SEQ ID NO: 77375 - protein, 126 aa, Gossypium hirsutum
  Clone ID: LIB3120-057-Q1-K1-D11.pep
SSSSNTNTNGILIARSNLPGHIREGPVIATIDGSTERHTDADDNSPKGTATITAEAAKLVTNTTDVGIDTTTPAIPTPGDHQTVKARPRSRPNGTTTPAPTIEVTTTKQHNDRHTGFYNIAITTVR

SEQ ID NO: 77376 - protein, 144 aa, Gossypium hirsutum
  unsure (1)..(144): unsure at all Xaa locations
  Clone ID: LIB3120-057-Q1-K1-F11.pep
LIIIRSQAIRHVSSATLSLRTTQHQSILRIRHXRHQTRPSRHLSSLIKILNIRRSQSQIRTTRNLRRHTLTLRSQRQNNQTSVTRTRRNTTIASSNRRPINPNMLLNRHHVNDSHTTSLNCTQNMNSPLMATTDILRFYECPSR

SEQ ID NO: 77377 - protein, 103 aa, Gossypium hirsutum
  Clone ID: LIB3120-057-Q1-K1-G9.pep
SLNSNKNHHQIEHHHNQNHTNHHHQTLTHNRPNSLNNRHININQALNNSQNRHNSLQLTQQSNRHHHHIANRLTIKTDPIRSNLRIIRINKQQYKHTHNSKTR

SEQ ID NO: 77378 - protein, 139 aa, Gossypium hirsutum
  Clone ID: LIB3120-057-Q1-K1-F12.pep
PSAGFARRATVSVFAPDCLNIAVWCSQCTSDLIPESNVYPTKRDLDPQSDLRISTQSDQQNHHNSSTTTTKAQSKAAPHRSRPLNYHRTKHTQTLTQSNRYPSQSQTRITPQESVDGSHRYTKVLRVSVALTTTQTYSE

SEQ ID NO: 77379 - protein, 127 aa, Gossypium hirsutum
  Clone ID: LIB3120-057-Q1-K1-D9.pep
SQTAAPSSNTFRSSDNLSVNARNQVRNLSRHLRSKGICILTSAITRTIMMSNRCNPTNIESTHHQDSPRHQGCRNTNSKSKTQRHHHHHMRSHINAKPTPMQSMNARINSPLMATTDILRFYECPSR

SEQ ID NO: 77380 - protein, 126 aa, Gossypium hirsutum
  Clone ID: LIB3120-057-Q1-K1-E11.pep
THMFRTTRRRRLNATTNRLRRLVGKSIIRITNIKRSTKISNRSTISINMSLTSINIRHDNRHSNNNVQTTTTRNNSVLTILTSTLRSNSRRSSTIIRHVTRPTQNSVSSPLMATTDILRFYECPSR

SEQ ID NO: 77381 - protein, 79 aa, Gossypium hirsutum
  Clone ID: LIB3120-057-Q1-K1-F9.pep
CYVILRTLMARLLRVVWSYWIHFPGMTLLALRLRIGRYGLVDHALIVAPSVLDDLVTTIGSNTIADGGVIAKHRLSTLY

SEQ ID NO: 77382 - protein, 112 aa, Gossypium hirsutum
  Clone ID: LIB3120-057-Q1-K1-H12.pep
HQRHHTRPSNSNQPNMSANRRQFRQPNSSLNTRTIPSRLNSQKVHTQPPIRQTTKFINCPYSNHLISRSNRQLNVHKRPLRNTNKRQIRHTLTMSPLMATTDILRFYECPSR

SEQ ID NO: 77383 - protein, 123 aa, Gossypium hirsutum
  Clone ID: LIB3120-057-Q1-K1-B10.pep
STPMGTSPRRYKHAQCTQTTMITTASRISKSESIPRPMCLQDSNPPKPRQPRPRRHLMMKWIRTSIRKTYRTSSHHQTNTTRLIHTPMPTRPNPPTTPRTTVCTISPLMATTDILRFYECPSR

SEQ ID NO: 77384 - protein, 99 aa, Gossypium hirsutum
  Clone ID: LIB3120-057-Q1-K1-G10.pep
RRGWYARTRSVNAANLARWTSNVRYYIMFIGMWPCRATSTCSRSCTGLFEYRCEVLRLYVGLNARLKSTVSEHARPIAPISSRLMATTDILRFYECPSR

SEQ ID NO: 77385 - protein, 62 aa, Gossypium hirsutum
  Clone ID: LIB3120-057-Q1-K1-H11.pep
PIMVRVLNHSNVVYLQRNMHLTPGDQPHLQYVRWQSADGNHRYTKVLRVSVALTTTQTYSEK

SEQ ID NO: 77386 - protein, 100 aa, Gossypium hirsutum
  Clone ID: LIB3120-057-Q1-K1-A10.pep
LVNETTAKIPSASAIKILNRQSTRLRVQNLRLRALITRHISRVIRTNLMTKHSRHAIAIILVNSLLRPNRVHRRNVNLRALTSPLMATTDILRFYECPSR

SEQ ID NO: 77387 - protein, 83 aa, Gossypium hirsutum
  Clone ID: LIB3120-057-Q1-K1-H10.pep
TPMIRPHSVRDVQCQIRRSYITTLTKMNIVNRINRYLSRRRMNTHLSLNKRGIQRASPRYNQRATSPLMATTDILRFYECPSR

SEQ ID NO: 77388 - protein, 77 aa, Gossypium hirsutum
  Clone ID: LIB3120-057-Q1-K1-C9.pep
PQLKPLPRNWVTLVPFAQGSTLTLISVISPITKGLSMAKRTYSIRKRIAIASVKITAISPLDGNHRIILRFYECPSR

SEQ ID NO: 77389 - protein, 76 aa, Gossypium hirsutum
  Clone ID: LIB3120-057-Q1-K1-C11.pep
KLKPTRNITNNGPKPPAEETSYNHHTTWSEPSTTPHTAYPIECAYAPAESADGNHRYTKVLRVSVALTPTQTYSEK

SEQ ID NO: 77390 - protein, 73 aa, Gossypium hirsutum
  Clone ID: LIB3120-057-Q1-K1-E9.pep
KRQYSDTGRRLRLQKLPTTWYSTPPDESKSYTKPNSTVHQPRSSKSPQSADGNHRYTKVLRVSVALTTTQTYV

SEQ ID NO: 77391 - protein, 188 aa, Gossypium hirsutum
  unsure (1)..(188): unsure at all Xaa locations
  Clone ID: GOSHI-09MAY01-C33104_1.pep
PRVRTNAVIQFDPYKKQWTRLSSMQTPRSHFACCVMSGKVYVSGGRNLSYPRGLSLAEVYDPLGDRWEDMPEMPNPQMDCLGISYKGKFHVWSDQVRLAEQNPSEIFDPSNKTWCTVYDIWPFSRAMQFAVQVMGDDQVYSVVDWGESFVKTRDSLRGEGHNVGAVXPPVLLPDHWIKTLAPFGYFFF

SEQ ID NO: 77392 - protein, 154 aa, Gossypium hirsutum
  Clone ID: GOSHI-09MAY01-C33124_2.pep
PRVRTSSLQSLYLSSPFLHGSTSLPLLSKPNSSPPHQPLRSPAFLPPIRAMKSMQGQVVCATNDKTVAVEVVRLAPHPKYKRRVRKKKKFQAHDPDNQFKVGDYVQLEKSRPISKTKTFIAVAVPSRNGKQEKEEAGELGIPLESKQTQEQPQA

SEQ ID NO: 77393 - protein, 386 aa, Gossypium hirsutum
  Clone ID: GOSHI-09MAY01-C33124_1.pep
MADAGGSAVSKRMWCSVPERLQLHMAMLALQFGYAGFHVVSRAALNMGVSKLVFPVYRNIIAFLLLLPFAYFLEKKDRPAITLNFLLQFFLLALVGITANQGFYLLGLDNTSPTFASAIQNSVPAITFLMAALLRIEKVRLDRKDGISKVIGTALCVAGASVITLYQGPTIYSPRPSLNTPTPPMFVSLGDANGKNWTLGCLFLIGHCLSWSGWLVLQAPVLKKYPARLSVTSYTCFFGLIQVLVIAAVFERDAQAWVFHSGGELFTILYAGVVASGIAFAVQIWCIDRGGPVFVAVYQPVQTLVVAIMSSLALGEEFYLGGIIGAVLIITGLYLVLWGKSEERKFAAQEKAAIQSSTAEHGNSRASSHIKTSLTQPLLPPSTENV

SEQ ID NO: 77394 - protein, 163 aa, Gossypium hirsutum
  Clone ID: GOSHI-09MAY01-C33064_1.pep
MASTLFRTIQIHPFFLYPTALFSRRNGVLYCTVKSRQTQTASQEMQHPPKAKVPQHALKKTVVKITRDYEAFFGIETHVQLSTLTKAFCSCPYNYGSQPNTNICPICMGLPGALPVLNSKVIEFAVKLGLALNCKLSLNSKFDRKQYFYPDLPKGYQISQFDI

SEQ ID NO: 77395 - protein, 117 aa, Gossypium hirsutum
  Clone ID: GOSHI-09MAY01-C33324_1.pep
RTYCYPKTFPISAHINLFFLPIATPSPPFVVVPIISFFSLSHSLFVPILAVVFLAKKTHCASLKNHVFGCPQLALKNLFWCLAKSSPSWPIMVVCRPKPPLGATEFYYFYHLFPKSF

SEQ ID NO: 77396 - protein, 53 aa, Gossypium hirsutum
  Clone ID: LIB3149-033-Q1-K1-B2.pep
SLSFDNSDLGNGCWFEHLESIVKLGFVRILVSHQISVRLRCYIGNINSYGLVL

SEQ ID NO: 77397 - protein, 174 aa, Gossypium hirsutum
  Clone ID: GOSHI-09MAY01-C33244_1.pep
TNLPTPLPLKENQYLRIVLAGSCLVVEKMQESKDPGIKLFGKKIHLPADGEISTLSVDEFDKAQCGNRVVDDEDYEEFDDDDDDDGGGGDGDEEEDEQKDKTELDSLAEQIADTGQEDDNIQPSNREESTNPETSPEPNVNPKTPSIDEETGKSKTGKTDKEQSDGSKSQEKTL

SEQ ID NO: 77398 - protein, 159 aa, Gossypium hirsutum
  Clone ID: GOSHI-09MAY01-C33214_1.pep
MGFTEKPEGLVKESWEGLKPDIPHFSLRFFSLILEIAPGAKNMFSFLRESEEIPQNNPKLKAHAVKVFKMTCESAIQLREKGEVVVADTTLKYLGTVHVKSGVKDPHFEVVKEALFRTIEEAFGEEKWNEEMKNAWGEAYDQLAEAIKAEMKNHHDETA

SEQ ID NO: 77399 - protein, 70 aa, Gossypium hirsutum
  Clone ID: LIB3148-011-Q1-K1-A1.pep
VVADTTLKYLGTVHVKSGVKDPHFEVVKEALIRTIEEAIGEEKWNEEMKNAWGEAYDQLAEMKNHHDETA

SEQ ID NO: 77400 - protein, 142 aa, Gossypium hirsutum
  Clone ID: GOSHI-09MAY01-C28544_1.pep
RPTSTLFHHIDSFSAKEKAWSRTQPYCVTENKPCIGWLQRYFRDCLCNLKDEFSFGFGIISLVCWGVAEIPQIITNFKTKSAHGVSLLFLLTWVAGDVFNLVGCLLEPATLPTQFYTALLYTISTVVLVLQSVYYDYINRWW

SEQ ID NO: 77401 - protein, 92 aa, Gossypium hirsutum
  Clone ID: GOSHI-09MAY01-C28514_1.pep
KASKPCCLSCYWPLEKGFSHYIDHKYHTLEVLHTVLSLFFCYQTFLLPSLISLYIIPFASKQPPKPSPLPTWDLQSIMSTFLVLLCCLLSLD

SEQ ID NO: 77402 - protein, 45 aa, Gossypium hirsutum
  Clone ID: LIB3048-035-Q1-L1-H1.pep
KGSSHYIDHKYHTLEVIHTVLTLCFSYQTFPTPLLNIPVYNFICA

SEQ ID NO: 77403 - protein, 144 aa, Gossypium hirsutum
  unsure (1)..(144): unsure at all Xaa locations
  Clone ID: GOSHI-09MAY01-C28264_1.pep
DFIPLLRPLLRGCLNKCRDLQTRRLAFFNNYYVKKRREIMAAEGDKHKISCAIDHIIXYAQMKGEISEENVLYIVENINVAAIETTLWSMEWAIAELVNHPHVQHRIRQEISRVLNGEAVKESNLHQLPYLQATVKETLRLHTP

SEQ ID NO: 77404 - protein, 66 aa, Gossypium hirsutum
  Clone ID: GOSHI-09MAY01-C29504_1.pep
YWLLTRILNGLLNNLGGWPSLTVLWSGQGRNYGNAEKSGNAHFFHFHHALVLAFTTATSFQMGFKA

SEQ ID NO: 77405 - protein, 102 aa, Gossypium hirsutum
  Clone ID: LIB3827-001-Q1-K6-D8.pep
MASSVGFAHPTSSLIINKKDKCLSVVPSTSQLSIYKCKKPISNNISMAMATRQSERKPATTGSMKSPMTMTEKLLAKGAEKAEVKAGDNVWVNVDVFMTNDI

SEQ ID NO: 77406 - protein, 96 aa, Gossypium hirsutum
  Clone ID: LIB3048-051-Q1-L1-A8.pep
VGFAHPTSSLIISKKDKSLSVVPSTSQLSIYKCKKPMSNNISMAMATRQSERKPATTGSMKSPMTMTEKILAKGAEKAEVKAGDNVWVNVDVFMTN

SEQ ID NO: 77407 - protein, 264 aa, Gossypium hirsutum
  unsure (1)..(264): unsure at all Xaa locations
  Clone ID: GOSHI-09MAY01-C29604_1.pep
MRNPMRPYLLLSLVFFFNLYHSMAVSDPTHQALLQCLTQSIPTDTASSIIVSKSNPPYTSVLRAYTRNARFNTSSTPKPLIIITPLDEPHVSAAVICSRKLGFQLKIRSGGHDHEGLSYGFDKXPFFGLDMXNLRSVSVNMTDETAWVDAGATLGELFYNIWKNSKVHEFRAGVCPTVXVGGHLTVLDGLLVDHVVNAKLVDVNGKILDRKAWAKNFLGAIKXGGGAARSALLSYEIKFIPVTETVTVFRIERSLTKRHPPPPP

SEQ ID NO: 77408 - protein, 134 aa, Gossypium hirsutum
  unsure (1)..(134): unsure at all Xaa locations
  Clone ID: GOSHI-09MAY01-C29014_1.pep
LTLVLEAVINXKVDEEPNCAELISFFESLIAPCIPLRPIRIDGALKGGHKRGRLAINLEEDEQPKKXVRLGIPATQWVSVYNARRPMKQRYHYNVADSRLHQHVENGNEDGSFISCVASAAYLWALIMDAGTGF

SEQ ID NO: 77409 - protein, 53 aa, Gossypium hirsutum
  unsure (1)..(53): unsure at all Xaa locations
  Clone ID: LIB3048-041-Q1-L1-H7.pep
MLFHVSVTFYQSCRYHYNVADSRLHQHVEKGNEDAXVINCVASAAKFWALIMD

SEQ ID NO: 77410 - protein, 149 aa, Gossypium hirsutum
  unsure (1)..(149): unsure at all Xaa locations
  Clone ID: GOSHI-09MAY01-C24994_2.pep
KGSMRRKKKAVHKTTTTDDKRLQSTLKRIGVPARPPTRGVNVFKDDVVIQFINPKVQASIAANTWVVSGSPQTXKLQDILPGIINQLGPDNLDNLRKLAEQFQKQAPGAGEGTGTGAVATQEEDDEEVPDLVPGETFEAAAEEVQAAAK

SEQ ID NO: 77411 - protein, 164 aa, Gossypium hirsutum
  Clone ID: GOSHI-09MAY01-C24994_1.pep
MNKERLMKMAGAVRTGGKGSMRRKKKAVHKTTTTDDKRLQSTLKRIGVNAIPAIEEVNIFKDDVVIQFINPKVQASIAANTWVVSGSPQTKKLQDILPGIINQLGPDNLDNLRKLAEQFQKQAPAAGAGDGTGAATTQEEDDEEVPDLVPGETFEAAAEGQAAK

SEQ ID NO: 77412 - protein, 164 aa, Gossypium hirsutum
  unsure (1)..(164): unsure at all Xaa locations
  Clone ID: AI727504.1.pep
MNVERLQKMAGAVRTGGKGSMRRKKKAVHKTTTTDDKRLQSTLKRIGVNAIPAIEEVNIFKDDAVIQFLNPKVQASIAANTWVVSGSPQTKKLQDILPGIINQLGPNNLDNLRKLAEQFQKQAPAATGIGTGVTTTQKNEDEEVPXLVPGETFEAAAEESEAVK

SEQ ID NO: 77413 - protein, 138 aa, Gossypium hirsutum
  unsure (1)..(138): unsure at all Xaa locations
  Clone ID: uC-gsronu33b025c01b1.pep
AAAATKGITSNPSFCSALAAALTSFVGNNGSGGGTASELGFASSCYLQGKKPLSMVNPHQQQKQGCMRRKKKAVHKTTTTDDKRLLSTLKRIGVNAIPAIEEVNIFKDXVGIQLINPQVQAXFAANTWVVSGSSQTKN

SEQ ID NO: 77414 - protein, 59 aa, Gossypium hirsutum
  unsure (1)..(59): unsure at all Xaa locations
  Clone ID: uC-gsflmaxxa014d07b1.pep
MRRKKMADHKTTTTDDKRLQSTLKRIGVNAIPAIEEVNIXFKDDVCMQFINPKVQASIA

SEQ ID NO: 77415 - protein, 78 aa, Gossypium hirsutum
  Clone ID: LIB3135-058-Q1-K1-A10.pep
IHSHTYRDRESHFLISYICTRNYTSFLLVTIINTTENSTKNGRLGNPFFFSKKKKEKRGFNALQNHLLKYPSLELVHI

SEQ ID NO: 77416 - protein, 48 aa, Gossypium hirsutum
  Clone ID: LIB3149-001-P1-K1-D2.pep
EPFLEFIPTHTEIQRKPFLNILDLYSKLLHCYLFVLCTLNDCNNNKYY

SEQ ID NO: 77417 - protein, 212 aa, Gossypium hirsutum
  Clone ID: GOSHI-09MAY01-C24894_1.pep
MKIGFLVFVAVALLAFLCSPNAVYGIRFVIDREECFSHDVKYEGDTIHVSFVVIKADSTWHNSHEGVDLVVKGPTGDQIQDYRDKISEKFEFVAHQKGIHHFCFSNKSPYYETVDFDVHESHFTYYDQHAKDEHFNPLLEQISKLEEALYNIQFEQHWLEAQTERQAIVNEAMSKRAVHKAFYESAALIGASVLQVYLLRRLFERKLGMSRV

SEQ ID NO: 77418 - protein, 150 aa, Gossypium hirsutum
  unsure (1)..(150): unsure at all Xaa locations
  Clone ID: GOSHI-09MAY01-C24804_3.pep
MILKGKNSLKQIGRCSSSLIIPHVQSHDFNFTPRLRGRVGADLPSSGQVFAVPVAPGDVIIAGTDGLFDNLYNNEITAVVVHALRAGLGPQVTAQXIAALARQRAQARDRQTPFSTAAQDAGFRYYGGKLDDITVVVSYITSSEEKNKSR

SEQ ID NO: 77419 - protein, 108 aa, Gossypium hirsutum
  Clone ID: GOSHI-09MAY01-C24804_2.pep
LITIMTGVEHGEHIISLYSTNIKGISDKKPNQTKDNWIATNQASQLKFPGYKSSKSSSSLSKWCHSRCSFPCRSTGRQLLRIQLFLLEASSELVTYDTTTVMSSSFPP

SEQ ID NO: 77420 - protein, 170 aa, Gossypium hirsutum
  Clone ID: GOSHI-09MAY01-C24804_1.pep
PTRPPTRPACVIALGDQGLHAINLGDSGFMVVRDGCTIFRSPVQQHDFNFTYQLESGNNADLPSSGQIFAVPVAPGDVIIAGTDGLFDNLYNNEITAVVVHALRAGFGPEVTAQKIAALARERAQAKDRQTPFSTAAQDAGFRYYGGKLDDITVVVSYVTSSDEASSKKS

SEQ ID NO: 77421 - protein, 120 aa, Gossypium hirsutum
  unsure (1)..(120): unsure at all Xaa locations
  Clone ID: GOSHI-09MAY01-C24834_1.pep
PTRPLEPFAKKXASFRAAIDYIGSERRDVCMPSHGGNMGHAIQGQRAFSGHKKYITPNKRHMLPYFLNSSMPEAEFNRIIKELHHESLGQPELMTSKAGRDVTKYPVPECMCNDAHSHFI

SEQ ID NO: 77422 - protein, 232 aa, Gossypium hirsutum
  Clone ID: GOSHI-09MAY01-C24824_2.pep
MKLKAQELRERARKRKEEEERRMEREREKERIRVGKELLEAKRIEEENERKRLVALRKAEKEEEKRAREKIRQKLEEDKAERRRKLGLPPEEPSAAPKPSASIVEEKKSALPVRPATKAEHMRECLRSLKQNHKDDDAKVKRAFQTLLTYIGNVARNPDEEKFRKIRLNNQTFQDRVGSVKGGVEFLELCGFEKVEGEEFLFLSRNKVDMQVLNSAGSELNSAINNPFFGVL

SEQ ID NO: 77423 - protein, 103 aa, Gossypium hirsutum
  Clone ID: LIB3582-030-P1-K1-D9.pep
YISDIFQDVIEDLYVCGTVFSCFIFILFINNRERARKKKEEEERRMEREREKERIRVGKELLEAKRIEEENERKRLVALRKAEKEEEKRAREKIRQKLEEDRF

SEQ ID NO: 77424 - protein, 115 aa, Gossypium hirsutum
  unsure (1)..(115): unsure at all Xaa locations
  Clone ID: LIB3828-031-Q6-K6-G11.pep
GGAGGGITRCLRSLKQNHKDDDAKVKRAFQTLLTYIGNVARNPDEEKXKGGLSNQTFQDRVGSVKGVEFLELCGFEKVEGEEFLFLSRNKVDMQVLNSAGSELNSAINNPFFGVL

SEQ ID NO: 77425 - protein, 122 aa, Gossypium hirsutum
  Clone ID: GOSHI-09MAY01-C24574_1.pep
TDYKMTTENSTKNFWLLNLPSKIKMTAWKISWNYLPTRINMQLRKLSNDTHCPRCGEVAETMNHIFRECLGFSNRYLHSSVRLSIALRGPFGRTGTREYMKKLVDQGQFRSPSAGNIHQVNS

SEQ ID NO: 77426 - protein, 166 aa, Gossypium hirsutum
  Clone ID: GOSHI-09MAY01-C24534_1.pep
EEYPRSEAVRVTLAPRAGTLSLPQLYEAEIIMNSQLPWSKQLVHNWKWTLSVWTSLYVYMFFLILLVGCFRQLFFPFTASAGVERDASVEELREPVMGGRRNDRVEVSDLMSKWQHSRRKRKAIFLNKGVSEIAGSSASSMSLTREDKSAVIEEDVGDSESVCLGG

SEQ ID NO: 77427 - protein, 85 aa, Gossypium hirsutum
  Clone ID: GOSHI-09MAY01-C24464_1.pep
CPSAVLPVLDSLVDPLQKTINFKPKQDAVKQEVDRNEDMIRSALRAIASLNRISGGDSSMKLKNLMSEISKSPTLWDKYYSIRNE

SEQ ID NO: 77428 - protein, 433 aa, Gossypium hirsutum
  Clone ID: GOSHI-09MAY01-C24784_1.pep
KNAKGVTPAQPPGFENVAVARSSALQSERSYHDKNLSGINDNSGISVNTKKYHSLPDISGLSVPHRVPEKSGQWDSSIGYGLSIGRTNYGTPMYSNAGSRVGVPFSFDELSHLKGYRDALPLQLGSGSGTGSLWSRQPFEQFGVADKSHTAGNEAVGSGLNSVTRDTASGVDLESKLLQSFRHCIARLLKLDGSDWLFRQNDGADEELIDRVAARERFLYDAEAREMSQVVLIREPQYLSSERRYGSTQKSDEANFANFSISSVPHCGEGCIWKADLIISFGVWCIHRILDLSLMESRPELWGKYTYVLNRLQGVIDLAFSKPRTPMSPCFCLQIPQEYQKRLSPPVSNGMLPPAAKPGKGKCTNAVTLLDMIKDVEIAISCRKGRTGTAAGDVAFPKGKENLASVLKRYKRRLSSKASNVPTSCTMLAAYSS

SEQ ID NO: 77429 - protein, 208 aa, Gossypium hirsutum
  Clone ID: GOSHI-09MAY01-C24754_1.pep
EIGQLSTVPPKQRTRQAIEEFIKRKRDLPREAFKGGFILEKIAMPLSTGHLNLINTNIDNNPSVTFNYFGHPRDLRRCVNGIRMAAKVIQSDRFTNFTKCDKPTVERLLNMSVNANINLIPKHTNDTKSLEQFCKDTVITIWHYHGGCHVGKVVDPNHKVLGTRRLRIVDGSTFSESPGTNPQGTVLMMGRYMGVKILRRRLGKAAGV

SEQ ID NO: 77430 - protein, 159 aa, Gossypium hirsutum
  Clone ID: GOSHI-09MAY01-C24714_2.pep
GPGMPLSKESLAEAKRRLEALDKKDAERRRTAEVKNNLEEYIYATKEKLETSEDFEKVSSNDERQSVIKKLDEVQEWLYTDGEDASASEFQDRLNSLKATADPIFFRFKELTARPEAVEVARQYLSGLKQTIRGWETEKPWLPKDRIDELSTRMDKLKT

SEQ ID NO: 77431 - protein, 127 aa, Gossypium hirsutum
  unsure (1)..(127): unsure at all Xaa locations
  Clone ID: LIB3189-015-P1-K1-D10.pep
RKLKKRTFKVPLKIVEXTTGPGMPFSKESLAESKHRLEALDKKDAERRRTAELKNNLEEYIYATKEKLETSEDFEKVSSNDERQSVIKKLDEVHVWLYTDGVDSIVLFFQVLFMFILCYFFFSFFFF

SEQ ID NO: 77432 - protein, 137 aa, Gossypium hirsutum
  Clone ID: GOSHI-09MAY01-C24704_1.pep
KSVLQGILLSSEGETLNSMNGLLYMSPIAVLVLVPTALVMEPNVLEVIISLGRQHRYMWLRLFINSTLAYSANLSNFLVTKHTSALTLQVLGNAKGAVAVVISILLFRNPVTAVGIGGYTMTVLGVVAYGEAKRRVK

SEQ ID NO: 77433 - protein, 211 aa, Gossypium hirsutum
  unsure (1)..(211): unsure at all Xaa locations
  Clone ID: GOSHI-09MAY01-C24154_1.pep
MRECSYHXNGNRLHLPHDPQLQRSLQLAFRIKDDQENDDAKRQRHDDDDDDDDDDDDMETDDHDEFEENHASHGDDRGIYRVLGGSAKRSRQVQVHEDAGFHNSSNSQDCNKSSFSYPPPAQADINQAPPENPRAAWLQKQWIESRSLQLEEQKLQIQVEMLELEKQRFKWQRFSKKRDRELEKMRMENERMKLENERMALELKRKELDAD

SEQ ID NO: 77434 - protein, 110 aa, Gossypium hirsutum
  Clone ID: GOSHI-09MAY01-C24114_1.pep
MDRYQKVEKPKPESPINENEIRITSQGAIRNYINYAIALLQDKHVKEIVLKAMGQAISKTVAIAEILKKRIPRLHQDTSISSVSITDVWEPIEEGLVPVEMIRHVSMISI

SEQ ID NO: 77435 - protein, 250 aa, Gossypium hirsutum
  unsure (1)..(250): unsure at all Xaa locations
  Clone ID: GOSHI-09MAY01-C24054_1.pep
VTQLSPSVLKAEGVPVYRAVQHSGEFVLTFPRAYHAGFNCGFNCAEAVNVAPVDWLEHGQLAVELYSEQHRKTSLSHDKLLLGSARQAIQALRELHVLGRETPGNSRWKRVCGKDGMLTKAVRMRKQMEEERVNCLPPDMPVRKMEKDFDLESERECFSCFYDLHLSACSCKCSPERFACLKHVKSFCSCQDEDKFVLLRYTVDELQMLIEALEGGLXAVKLWASKISGRFQVLIVMLICLSGFRHEVLN

SEQ ID NO: 77436 - protein, 159 aa, Gossypium hirsutum
  Clone ID: GOSHI-09MAY01-C24074_1.pep
QRIGTGIAVSAMAMVIAALVEMKRLQTAREHGLVDKPNVTVPMRVWWLVPQYSLCGLSDVLAIVGLQEFYYDQMPNELRSIGIALYLSILGVGSFLSSFLISVIETVTGKDGRDSWFADNLNRAHLDYFYWLLAALSALGLALYVYSARSYIYARRSTS

SEQ ID NO: 77437 - protein, 96 aa, Gossypium hirsutum
  unsure (1)..(96): unsure at all Xaa locations
  Clone ID: LIB3585-063-P1-K2-C1.pep
SRCALLRLSDVLAIVGLQEFYYDQMPNELRSIGIAFYLSILGFGSFLSSFLISVIETVTGKDGRDSWFANNLNRAHLGYLYWLXAALSAXGWALYV

SEQ ID NO: 77438 - protein, 134 aa, Gossypium hirsutum
  unsure (1)..(134): unsure at all Xaa locations
  Clone ID: GOSHI-09MAY01-C24064_1.pep
RRSRHRLTPGTVKFAAFHVLSLEGSKGLTVLELADKIQKSGLRDLTTSKTPEASISVALTRDAKLFERIAPSTYCVRPAYRKDPADAEAILATARKKIRAXLENGFLGVEDADEVERDEVERDDVERDEDSECD

SEQ ID NO: 77439 - protein, 118 aa, Gossypium hirsutum
  Clone ID: GOSHI-09MAY01-C25974_1.pep
IIIFSKTTDDSDREGSNKRVKDIEVCVPIVYGTIAFYLGRKASESQSHKWTVYVRGATNEDLGAVIKHVVFQLHPSFNNPTRIVEAPPFELSECGWGEFEIGISIFFHSDVCDKHLDL

SEQ ID NO: 77440 - protein, 91 aa, Gossypium hirsutum
  Clone ID: GOSHI-09MAY01-C25964_1.pep
LYYLNFFFCMENCQQVESGTALCKRGGGGGGDAENNSDGLNRGVELMNVDHCRKVPLTEDSNLVDVAVRGDGGGMGEVKLGNEVKVVEMKR

SEQ ID NO: 77441 - protein, 291 aa, Gossypium hirsutum
  Clone ID: GOSHI-09MAY01-C25924_1.pep
LEYVKREKNGQFQAFLLKYVNSWVVSIYCHKVIRLSAATQDYPRSIICNVHGVNPKFLEIGKERFEQQHSSIHQAFTKGAYYIGKMIWNKGYGELLKLLNDHQKELAGLEIDLYGNGEDSDQVKEAANKLKLTVRVHPGRDHADPLFLDYKVFLNPSTTDVVCTTTAEALAMGKIVVCANHPSNDFFKQFPNCRIYDDDNGFVEATCKALSEEPVPLTDAQRYELSWEAATERFLKVSELNQVFATEREKNSSKEFASVSLNLWKSMEDTSAYFHHLGLGFETTRRAFGAI

SEQ ID NO: 77442 - protein, 73 aa, Gossypium hirsutum
  unsure (1)..(73): unsure at all Xaa locations
  Clone ID: LIB3048-052-Q1-L1-F10.pep
SIMGSLHGSHPKLLGIGAXRFQLRHISIHQAFTKGAYYIGKMIRNKGYGELLELLNDHQKELAGLEIDLYGNG

SEQ ID NO: 77443 - protein, 139 aa, Gossypium hirsutum
  Clone ID: GOSHI-09MAY01-C25854_1.pep
KIEDPEIVHGLASHSKKGEDFTLLKTECQRALGDGFTTFSVFGLFDGHNGSAAAIYTKENLLNNVLSAIPADLNRDEWVAALPRALVAGFVKTDKDFQQRAKTSGTTVTFVILEGWVVTVASVGDSCCIFESAEGGIYH

SEQ ID NO: 77444 - protein, 139 aa, Gossypium hirsutum
  Clone ID: GOSHI-09MAY01-C25814_1.pep
AAAKGGVTKKKSGHADEDHSPEHSQADENERVAGDDDDDDVQWQTDTSLAAAQQRIQEQLSASTADMVMLSTDEEKKKSVKKSPEPETKVHENGGGAHDELADEIKVYFKNGSAPNQLRSFLGSLTGTCKEVMDALFIA

SEQ ID NO: 77445 - protein, 287 aa, Gossypium hirsutum
  unsure (1)..(287): unsure at all Xaa locations
  Clone ID: GOSHI-09MAY01-C25804_1.pep
IHHEPREKNAMSVSSLSVLLRAAIYLETTVACRLDLERRMALQLGQAVLDDLLIPAYSVTGDTLFDVDTMQRILTNYVEYETEGHHFGYKEDDEYISPPPSDMERVGKLMESYLAEIASDRNLPISKFIGLAELIPEQSRVTEDGMYRAIDIYLKAHPTITDLERKKVCSLMDCQKLSREACAHAAQNDRLPVQTVVQVLYYEQQRLRDVMNGSMFKWNFPFHIFQSEFYXPPDIPPVSDELSSLKRENEDLKLELVKMRMRLKEIEDHHPLFRQQQAVLWELLSII

SEQ ID NO: 77446 - protein, 246 aa, Gossypium hirsutum
  Clone ID: GOSHI-09MAY01-C25824_2.pep
VLMSGGPIDVSFAKNDPRVSAIIWAGYPGQAGGTAIADVLFGTTNPGGKLPMTWYPQDYVAKVPMTNMGMRPSRGYPGRTYRFYKGPVVFPFGHGLSYTSFKHSLPSAPTDLSVLLGTNLFATKNYSTLSSNAIRVKHAKCDSLSSLFHIDVENTGNMDGTHTLLVFSTPPAGQKWSPNKQLIGFHRVHVVAGSKQRVKINIHACNHLSVVDEFGIRRIPMGSHSLHIGDLKHSISLQANLEGIKV

SEQ ID NO: 77447 - protein, 280 aa, Gossypium hirsutum
  unsure (1)..(280): unsure at all Xaa locations
  Clone ID: GOSHI-09MAY01-C25824_1.pep
RTVAVIGPNSDVTVTMIGNYAGVACGYTSPLQGISRYARTIHQAGCSDVACGTNNLFGAAEVAAHEADATVLVMGLDQSIEAEFRDRVGLLLPGRQQELVSRVARASRGPTVLVLMSGGPIDVSFAKNDPRVSAIIWAGYPGQAGGTAIADVLFGTTNPGGKLPMTWYPQDYVAKVPMTNMGMRPSRGYPGRTYRFYKGPVVFPFGHGLSYTSFKHSLALAPTDLSVLLDTNLFATKTXTLASHAIRVKHAKGAPPPSFYMNVKHWHMDGTTHCCFSRHC

SEQ ID NO: 77448 - protein, 142 aa, Gossypium hirsutum
  Clone ID: AI054688.1.pep
DVACGTNNLFGAADVAAHEADATVLVMGLDQSIEAEFRDRVGLLLPGRQQELVSRVARASIGPTVLVLMSGGPIDVSFALNDPLVRAIIWAGYPCHAGRTCYGVVYFVLSFSMIIAYLIYLCNFIYISYYYFGSMPLDAFLD

SEQ ID NO: 77449 - protein, 126 aa, Gossypium hirsutum
  Clone ID: AI054800.1.pep
DVACGTNNLFGAAEVAAHEADATVLVMGLDQSIEAEFRDRVGLLLPGRQQELVSRVARASRGPTVLVLMSGGPIDVSFAKNDPRVSAIIWAGYPGQAGGTAMWDALFGTTNPGGKLPMTWYPKISI

SEQ ID NO: 77450 - protein, 80 aa, Gossypium hirsutum
  unsure (1)..(80): unsure at all Xaa locations
  Clone ID: GOSHI-09MAY01-C25554_1.pep
MTGYIVGALVPMXFTLLLRSSKKVKKRGVPVDVGGEPGYTIRNSRFPSPVETSWEGISTLAEXFEQACKQHADKPLLGTR

SEQ ID NO: 77451 - protein, 203 aa, Gossypium hirsutum
  Clone ID: GOSHI-09MAY01-C25544_1.pep
DAWEEFSLRSVCPTANIGGVIGKGGAIINQIRQESSAAIKVDSSTTDGDDCLITISAKEFFEDTYSPAIEAAARLQPRCSEKVERDSGIVSFTTRLLVPTSRIGCLIGKGGAIVTEMRRITKANIRILSKENLPKIASEDDEMVQIAGDLDGAKDALVQITTRLRANLFDREGAVNALVPVLPYLHVPTEGTDSLSYESREGK

SEQ ID NO: 77452 - protein, 76 aa, Gossypium hirsutum
  unsure (1)..(76): unsure at all Xaa locations
  Clone ID: LIB3493-025-P1-M1-B11.pep
VCPTANIGGVIGKRGAIINQIXQESGASIKVDSSTTDGDDCLITISPNEFFDDTYSPAIEAAARLQPRCSENEELL

SEQ ID NO: 77453 - protein, 178 aa, Gossypium hirsutum
  unsure (1)..(178): unsure at all Xaa locations
  Clone ID: GOSHI-09MAY01-C25574_1.pep
VDIPEEEAVCRICLVELGEGGETLKMECSCKGELALAHKDCAVKWFSIKGNKTCDVCKQDVQNLPVTLLKVNDPRIVIRRPPTVPQQAQVSGYRVWQDIPVLVMVSILAYFXCFLEQLLVSDLGPRALAISLPFSCALGLLSSMIASTMVSRSYIWAYGSFQFAMVILFAHIFYTVLA

SEQ ID NO: 77454 - protein, 191 aa, Gossypium hirsutum
  Clone ID: GOSHI-09MAY01-C25494_1.pep
MGSVDEERSLLEAELDQAESSGLYTGDGSADFNGNPVLKQSTGNWRACPFILGNECCERLAYYGIATNLVSYLTKKLHEGNVSAARNVTTWQGTCYLTPLIGAVLADAYWGRYWTIAAFSTIYFFGMCTLTLSASIPALKPAECVGSICPSATPAQYAVFFFGLYLIALGTGGIKPCVSSFGADQFDDTDP

SEQ ID NO: 77455 - protein, 89 aa, Gossypium hirsutum
  Clone ID: GOSHI-09MAY01-C25414_2.pep
DKFFISFFLGLRNWNFWGMEVSVIRSCSQATNLKTELGFKDSRFSFGKFNEKLFFRKPNSVSFQSPLRRGKSWLRITAQAAQSDPLPKS

SEQ ID NO: 77456 - protein, 537 aa, Gossypium hirsutum
  unsure (1)..(537): unsure at all Xaa locations
  Clone ID: GOSHI-09MAY01-C25414_1.pep
MEVSVIRSCSQATNPKTELGFSDSRLSFGKFNEKLFSRKPNSVSFESPLRRGKSGLRITAQAAQSDRLPKSKSSTKSKTLNRIRLSAGLPLDVVSGGTVNQFRAISAXGLKALKLLGLEGVELPIWWGVVEHESMGKXYNWSGYLTIAEMVRKAGLKLNVTLCFHASSQPKIPLPEWVLDIGKTKSNIFFKDRAGKPYRGCLSLAVDELAVLNGKTPMEVYQDFCESFKSAFSAFIGSTITGITMGLGPDGELRYPSHRGFAKSGTVPGAGEFQCYDKNMLHLLKQHAEACGKPKWGLGGPHNAPAYSELPTANTFFKDHGGSWESPYGDFFLSWYSSQLIAHGDRLLSLASSVFSDSAVNIFGKVPLMHSWHGTRSHPSELTAGFYNTATRKGYEEVAEMFARNSCKIILPGMDQSDKYQLKESLSSPELLLAEIGTACNKHGVRISGQNSTVGAPDGLKQIKKNMLSENLNDSFIFQRIGAQFFAPEHFPLFIEFVRKLNQPEPHSGNLPTKEGTTTATDSVHTRSNLSIHMQSA

SEQ ID NO: 77457 - protein, 256 aa, Gossypium hirsutum
  unsure (1)..(256): unsure at all Xaa locations
  Clone ID: GOSHI-09MAY01-C25424_1.pep
VECFRSKKVLKAPHMCESDDPDTAWYRNLEACVTPLPEVSSSDDVAGGAIXKWPERAYAVPPRIRSGSTPGITAERFVEDNKLWKERVXHYKRIISPLPTGRYRNIMDMNAYLGGFAAAMLNYPVWVMNVVPINSNHDTLGVIYERGLIGTYQDWCEAFSTYPRTYDLIHASGLFTLYQNRCDITYILLEMDRILRPEGTVIFRDTVELLVKIQSITDGMRWKSQIMDHESGPFNPEKILVAVKTYWTGEATQKQL

SEQ ID NO: 77458 - protein, 77 aa, Gossypium hirsutum
  Clone ID: LIB3493-026-P1-M1-E8.pep
NRCDITYILLEMDRILRPEGTVIFRDTVELLVKIQSITDGMRWKSQIMDHESGPFNPEKILVAVKTYWTGEATQKQL

SEQ ID NO: 77459 - protein, 49 aa, Gossypium hirsutum
  Clone ID: LIB3147-005-Q1-K1-D5.pep
FLLLSKHTGLVKQLKNSSNWDFNHLSFLHFICHNFSSWEQSKSLKFHPR

SEQ ID NO: 77460 - protein, 59 aa, Gossypium hirsutum
  Clone ID: GOSHI-09MAY01-C25784_1.pep
KTQKLILLICVSSQLKPSQFLFVLLLKTLKWIKVVQNQSTQNQETKETMRKRAKRDCDY

SEQ ID NO: 77461 - protein, 144 aa, Gossypium hirsutum
  Clone ID: GOSHI-09MAY01-C25744_1.pep
SPLQVGLGAQDHLQAKTSSISHLNGATVDDFLPPGFEGSRSTDQMQINLTDILVVKWRCPLRFVLDLNWQVVAGEESKEADVQNQRELRVLEAVYPRPSAIPTNPSVSADMANCQYDDKQTPQIPITPIEDDDAAIGTQSNALA

SEQ ID NO: 77462 - protein, 324 aa, Gossypium hirsutum
  Clone ID: GOSHI-09MAY01-C25774_1.pep
LRSSEYHDRNAQYYRIQEDMGMRKVHIYEFSRLSMVYTLLSKRKLLWFVQNGKVDGWDDPRFPTVQGIVRRGLKIEALIQFILEQGASKNLNLMEWDKLWTLNKKIIDPVCPRHTAVIEERRVLLTLTDGPDKPFVRIIPRHKKYDGAGEKATTYTKRIWLDYADAECISVDEEVTLMDWGNAIVKEIIKDQDGNITQLVGVLHLQGSVKTTKLKLTWLAETSELVNLSLVEFDYLITKKKLEEGEDFLDALNPCTKKETAAIGDSNIRNLKQGEILQLERKGYFRCDVPFARPSKPVVLFAIPDGRQQSVLKYAFYPIFHFDP

SEQ ID NO: 77463 - protein, 102 aa, Gossypium hirsutum
  Clone ID: LIB3135-037-Q1-K1-C4.pep
TKLKLTWLAETSELVNLSLVEFDYLITKKKLEEGEDFLDALNPCTKKETAAIGDSNIRNLKQGEILQLERKGYFRCDVPFVRPSKPVVLIAIPDGRQQSMLK

SEQ ID NO: 77464 - protein, 155 aa, Gossypium hirsutum
  Clone ID: GOSHI-09MAY01-C25764_1.pep
ILSVSIFWCFVEKEKKSNYKVNIFRFAGDMTHLISILVLLLKIYATKSCSGISLKTQELYALVFLTRYLDLFTDFISVYNTIMKLVFIASSLAIVWCMRMHRVVRRSYDKDLDTFRHYFLILASLILALLVHEKFTFHEIFWAFSIYLEALAILP

SEQ ID NO: 77465 - protein, 114 aa, Gossypium hirsutum
  Clone ID: GOSHI-09MAY01-C25704_1.pep
RTEPKPVPCDLEVKADRLRKDDISVLRHQNKGVKKADEAVIGIGQTNAENINSVSEMDSNNDKQRLKSAYEWRERARNIKEAQVSSSLEENKDKYVSAQVVNESVETGRKPEAA

SEQ ID NO: 77466 - protein, 90 aa, Gossypium hirsutum
  Clone ID: LIB3048-001-Q1-L1-G12.pep
RSLESPTTFNTPFTNQSPRTINQISDMDSNNDYQTLKSAYQCMERARNIKEAHVYSSLEYNKDQSLSSQVVNESVETGRKPEAANASVVD

SEQ ID NO: 77467 - protein, 329 aa, Gossypium hirsutum
  Clone ID: GOSHI-09MAY01-C25644_1.pep
LETRDTVALNKVLHDKIYKNRELQTMRLLDHPNVVSLKHCFFSTTEKDELYLNLVLEYVPETVHRVIKHYNKMNQRMPLIYVKLYFYQICRALAYIHNSIGVCHRDIKPQNLLVNPHTHQLKLCDFGSAKVLVKGEPNISYICSRYYRAPELIFGATEYTTAIDIWSAGCVLAELLLGQPLFPGESGVDQLVEIIKVLGTPTREEIKCMNPNYTEFKFPQIKAHPWHKIFHKRMPPEAVDLVSRLLQYSPNLRSTAIEALVHPFFDELRDPNTRLPNGRFLPPLFNFKPHELKGVPTDMLPKLIPEHAKKQCSFLGLLWIYIPPFCLNL

SEQ ID NO: 77468 - protein, 231 aa, Gossypium hirsutum
  unsure (1)..(231): unsure at all Xaa locations
  Clone ID: GOSHI-09MAY01-C25674_1.pep
MMAEGLDNRHIRGARSNGHLMQPNAGVFGSSGNGSLSRNGNHYMWXNSNSPQQNLPTAMVWPNSPSFVNGIHANRLPHIPAFPRAPSVMLNVGSPVHHHIGSAPPVNSAFWDKRHPYIGESPETSGFPLGSLGSVGFPSSSLSHPVEYASHNIFSHVGGNCMDLTKTGGVRSPQQMRHLFPRRNPIMPASLDSPNDRVRNFSYRRNESNSSNADXNXYELDIDRIIRREDS

SEQ ID NO: 77469 - protein, 102 aa, Gossypium hirsutum
  unsure (1)..(102): unsure at all Xaa locations
  Clone ID: GOSHI-09MAY01-C25614_2.pep
EEEKNMKRVSFVMILCAVAVFSGETRTVEAVTCSPIELIPCLPAISTPAKPSSAACCXKVKEQLPCFCGYLKDPGAKPFIDTPNIPKVASSCGVAHAFPPKC

SEQ ID NO: 77470 - protein, 98 aa, Gossypium hirsutum
  Clone ID: GOSHI-09MAY01-C25614_1.pep
MKRVSFVILCVVALAVVVFSGETCMVEAVTCNPIELSPCLAAITVPSQPPSAACCSKLKEQQPCFCGYIKDPTLKQYMNNPNIPKVASSCGVAYPPKC

SEQ ID NO: 77471 - protein, 28 aa, Gossypium hirsutum
  Clone ID: uC-gsflmaxxa069c01b1.pep
NVASLEQIPLQVIECPLGKLMCRLVKQI

SEQ ID NO: 77472 - protein, 173 aa, Gossypium hirsutum
  Clone ID: GOSHI-09MAY01-C25004_1.pep
MAMMSSCGNITVQSADQLKQLKDIFMRFDMDSDGSLTQLELAALLRSLGLKPSGDQIHLLLGDIDANGNGLVEFEELVSAILPDITHQILINEAHLLEVFQLFDRDGNGFITPAELAGSMAKMGHPLTFRELSDMMKEADSNGDGVVSVFDFTSIMANSAADFLGIKLNHSVK

SEQ ID NO: 77473 - protein, 321 aa, Gossypium hirsutum
  unsure (1)..(321): unsure at all Xaa locations
  Clone ID: GOSHI-09MAY01-C25394_1.pep
MYHPSARSKTLLVLLPISALVLVLLSFVALLTNSPRATQLQHLHVHNHLQIAHSACEGTLYPDLCVSTISVLPDLASKSLPELIQATLNQTMYEVRLSSANCTGIEKRIKSYSKREEAAINDCLELFDDTLEELKVSLADLAPKKLAVSRNYHDLQTFLSAAMTNQYTCLDGFARSKGNVRNIIKKGLHNITHHVSNSLVMLKKVPXSARAKSEYFPQQGRXKNGFPSWLSRKDRKLLQASVNETEFDLIVAKDGTGNFTTINHAVAAAPNNSNTRFVIYIKAGSYLENVEVVKKKKMLMFVGDGIGKTVVKASKMSLMAL

SEQ ID NO: 77474 - protein, 144 aa, Gossypium hirsutum
  unsure (1)..(144): unsure at all Xaa locations
  Clone ID: GOSHI-09MAY01-C25384_2.pep
MAFEKDLNLDATELRLGLPGTSDESAKNQTPATLRSNNKRALPEESMSSNATASKNCDQETAPLPKAQVIGWPPIRSYRKNNLQPKKSEGEISGIYVKVSMDGAPYLRKIDLEVFKGYPELLXALEDMFKFKAGEYSEREGYNG

SEQ ID NO: 77475 - protein, 144 aa, Gossypium hirsutum
  Clone ID: GOSHI-09MAY01-C25384_1.pep
DAWADAWAKQAWIVDGESPQVRNPSFYTAILQKKNNLQPNGRVGEISGIYVKVSMDGAPYLRKIDLKVFKGYPELLKALEEMFKFKAGEYSEREGYNGSEFVPTYEDKDGDWMLVGDVPWEMFTNSCKKLKIMKGSEARGLGCV

SEQ ID NO: 77476 - protein, 61 aa, Gossypium hirsutum
  unsure (1)..(61): unsure at all Xaa locations
  Clone ID: LIB3146-027-Q1-K1-E3.pep
SVPRVRPRVRARVREREGYNGSVFVPTYEDKNGDXMLVGYVPWEMCTNSCKKLRIMKGSEA

SEQ ID NO: 77477 - protein, 80 aa, Gossypium hirsutum
  Clone ID: uC-gsronu33B108b02b1.pep
FIFFFFFFFFFFIFFFFFFFFKDQRQKKDLIYNIHEKEKKENHVMNLICFPLYKFHKEIRNMPKLYMKIYIFWVMPWTTS

SEQ ID NO: 77478 - protein, 112 aa, Gossypium hirsutum
  Clone ID: GOSHI-09MAY01-C25364_1.pep
DAWALRETVKNLRNKNEKAMSNGADAVRQSLFQEADKYCKHISGKLSRGHGCLKALAFLVVAFAVGAAVVTPNIDPSDWSKLSEAIGTADWDKLSEALSTADWNKLSKVFSS

SEQ ID NO: 77479 - protein, 112 aa, Gossypium hirsutum
  Clone ID: GOSHI-09MAY01-C25334_1.pep
DAPFSLPMKDSNSVGIPSSSGHTMPGMMQMMPTGNSERSGTQSVNPGNLPVMFGYLPVQLPLLDKDNPWGMVSHPPQFLASLPGRSPPNADKQSDGLKISQASMHTIARNSF

SEQ ID NO: 77480 - protein, 110 aa, Gossypium hirsutum
  Clone ID: GOSHI-09MAY01-C25294_1.pep
MESSRGQGGIQQLLAAEQEAQHIVNTARNAKMARLKQAKEEAEKEIAEYRAQVEKEFQRKLAESSGDSGANVKRLEKETEAKIDHLKNEAARISDDVVQMLLKHVTTVKN

SEQ ID NO: 77481 - protein, 304 aa, Gossypium hirsutum
  unsure (1)..(304): unsure at all Xaa locations
  Clone ID: GOSHI-09MAY01-C26994_2.pep
SLCKNYGGGGGILPTDSARKXRDHELELVEVVADQVAVALSHAAILEESMRARDQLMGADVDLDLARQEAEKAIHARNDFLAVMNHEMRTPMHAIIALCSLLLETELTPEQRVMIETVLKSSNLLATLINDVLDLSRLEDGCLELDFGMFDLHGIFREAINLIKPIASVKKLSMTMILAPDLPMFAIGDERRLMQTILNVVGNAVKFTKEGYISIIASVAKPETLRDWRPPEFYPVSTEGHFYLRVQVKDSGCGVLPQDIPILFTKFAQPQSGNSGGAGLGLAICRRFVNLMGRHIWIESEGLD

SEQ ID NO: 77482 - protein, 129 aa, Gossypium hirsutum
  Clone ID: GOSHI-09MAY01-C26994_1.pep
SYHLVLQVKDSGCGVLPQDIPILFTKFAQPQSGNSGGAGLGLAICRRFVNLMGGHIWIESEGLDKGCAVTFLVKLGICSNPDDSAIHQASSQVRAYHGSADLSGQKPILRDHGHRAISSSPNARYQRSL

SEQ ID NO: 77483 - protein, 163 aa, Gossypium hirsutum
  Clone ID: LIB3829-033-Q1-N6-F5.pep
TKEGYVSIIASVAKPESLRDWRRPEFYPVSSQGHFYLRVQVKDSGCGVLPQDIPILFTKFAQPRSGSSQNSGGAGLGLAICKRFVNLMGGHIWLESEGVNKGSTATFLIRLGICNNPNDALIRPQVSSRVRAYHGSADLSGQKPILRENDGGVSANARYQRSL

SEQ ID NO: 77484 - protein, 163 aa, Gossypium hirsutum
  unsure (1)..(163): unsure at all Xaa locations
  Clone ID: GOSHI-09MAY01-C26804_1.pep
AKKCKVQDSDYERDRDHDRDRDRDLDRERYMERERHREREQXICEPDRDHYRERDTHRDHDHDRDYDSQWDRDRDHDRDRRYSDRDMDRDHDRDDVHDERRSSRFKDSRGWKRSPDDRDDGNDTKSRGTKLHYSDMENKSSTSGRVEVDADGGRSQSRPANLD

SEQ ID NO: 77485 - protein, 118 aa, Gossypium hirsutum
  Clone ID: GOSHI-09MAY01-C26534_1.pep
MAASLLLSWTAPNPEAMVPNIGANKSSFLSGTKLFLLTKPHYRKPTAQKCFKPPFAKSIDHIPKQFIEQNLKDGLMENYKNVPGYLYGLSPSQMDMFMTEDNPVRRQSESVTEESISS

SEQ ID NO: 77486 - protein, 136 aa, Gossypium hirsutum
  Clone ID: GOSHI-09MAY01-C26524_1.pep
AKPKAEEKPVAEPEPEPKKEEEENKEEKKEEKEEETPAAEISEEPKVETDAPAAVEVKEEENTPPPPPPADAPAAEVVVVETEVAEKAKAVDDDGAKTVEAIEESVVAVAAPTAEKEKEEPSAEVAPQSEETKEAQ

SEQ ID NO: 77487 - protein, 139 aa, Gossypium hirsutum
  Clone ID: GOSHI-09MAY01-C26774_1.pep
MGSSGEFRVDSNPDYDHESEVKAFDDTKAGVKGIVDSGVTQIPRIFIDQSLILEKNNTDCSNNQLGVPIIDLQGIGGDSARHAEVINQVRNACADWGFFQVVHHGIPASVLDEMIDGIRRFHEQDTEVKIQFYTRDATR

SEQ ID NO: 77488 - protein, 58 aa, Gossypium hirsutum
  Clone ID: GOSHI-09MAY01-C26714_1.pep
QTWSYTGSPMSVPMPRPRHGLTLAHSLPWSNHGLFHQFIMSCSTNVLDPAFLTIDPSI

SEQ ID NO: 77489 - protein, 80 aa, Gossypium hirsutum
  Clone ID: GOSHI-09MAY01-C26694_1.pep
MVHMDDSARAFKHRGEDDCAAIEGYMEQYGVTAHEAYDEFIKHIESSWKDINVEFLKPTEMPVPGLNRSLNLARVMDVLY

SEQ ID NO: 77490 - protein, 132 aa, Gossypium hirsutum
  Clone ID: GOSHI-09MAY01-C26684_1.pep
GAQWLVVSRRIHPRPYWQMCVFLCMGGNSTTWMNTAVLVTCMRNFPKNRGPVSGILKGYVGLSTAIFTDICTALFSSDPSTFLFILAVVPAIVCLTATFFLHEIPTPTFNPSELRQETLYFHVFNGIAIILA

SEQ ID NO: 77491 - protein, 148 aa, Gossypium hirsutum
  Clone ID: GOSHI-09MAY01-C26644_1.pep
FSLRSTHGGYQKHRSSIHSRVTFPAGNPILEPSVEMNFTSKLLLGSHGRLYRNALKMPALILDEKEKKVSRFISSNGLVEDPCAIEKERALINPWTSQEKEIFMDKLAAFGKDFRKGASFLDHMTSADCVEFYYQNHKSECFEKTKKN

SEQ ID NO: 77492 - protein, 99 aa, Gossypium hirsutum
  unsure (1)..(99): unsure at all Xaa locations
  Clone ID: AF056950.1.pep
MTIKLGFTFSDPCAIEKERALINPWTSQEKEIFMDKLAAFGKDFRKVASFLDHKTTADCVEFYYKNHKSECFEKXKKNDLSKQQGKSXXNTYLLTXEKK

SEQ ID NO: 77493 - protein, 253 aa, Gossypium hirsutum
  Clone ID: GOSHI-09MAY01-C26194_1.pep
DNMLASTAADDEKEKSNISSSNSGKSKNKKELDLPHGSSNRLDQLEPEPVASGLERVNPCQKEANGPCVLEKESPLQLNVCSNPEVAKQPSAYPKVKPRRGLAKTIKPIEDEDILRKQPQMLEIDRTSDTKSEVQPMFSSDPCLEFRVNAPRGGVPHEDASAEGLVSTAASSVLQEKYLGKTRMESARKNLENKNSSKVKKMKELDLPRRISKRLAGLEHEPVGNGLSAEVAIQNTTRKSGEARSKTTMCFGG

SEQ ID NO: 77494 - protein, 53 aa, Gossypium hirsutum
  Clone ID: LIB3048-011-Q1-L1-E9.pep
NILASTAADDEKEKSNISSSNSGKSKNMIELDLPHGSSNRLDQLQPDPLTKIL

SEQ ID NO: 77495 - protein, 97 aa, Gossypium hirsutum
  unsure (1)..(97): unsure at all Xaa locations
  Clone ID: LIB3048-007-Q1-L1-F3.pep
VFLAIFFSSILERINFLYYYLQGFSVLHFPRFSLKFGQQQLDSIWITGTTLLRKALILEFGDXVIDNVARILNEPISXCIWKRVLTGSPINMTGGKT

SEQ ID NO: 77496 - protein, 62 aa, Gossypium hirsutum
  Clone ID: LIB3048-014-Q1-L1-G4.pep
SHSNSTVFAIGSRPQFFLPSSFSSILERISFLYYYLQGFSVLHFPRFRLKFGQQQLDFIWIT

SEQ ID NO: 77497 - protein, 255 aa, Gossypium hirsutum
  Clone ID: GOSHI-09MAY01-C26114_1.pep
EATELGKRAKEVKKAADALHQEERSGSKGRKWRKNVKAVEKELLQLEEDVKLLEEMYPQGEKAETSWALTVLGYLAKLVLGILGLIVSVAWFIHIVIYLLSDPPLSPFLNEVFIKLDDIWGLLGTVAFAFFCFYLLLAVIAGAMMLGLRLVFITIHPMKWGATLMNSFLFNVGLILLCSISVIQFCATAFGYYAQATAAQEIFGHTLQSLRGIKYLYKYNVFQIAFIVLAALTFVYYVAFGWRRKKPSGRFQLSS

SEQ ID NO: 77498 - protein, 65 aa, Gossypium hirsutum
  Clone ID: GOSHI-09MAY01-C26134_1.pep
FSLADLCPVLKLKFMPLHIYQWRLQTQVFKICHSCKPLPINMSCLVEPPLLNLMRTCKHLVSALI

SEQ ID NO: 77499 - protein, 252 aa, Gossypium hirsutum
  Clone ID: GOSHI-09MAY01-C26124_1.pep
MNLWSDDNTSVMESFMSSDISALWPPPPPPPPPQQSQPSVPLNQDSLQQRLQALLEGVRNCWTYAIFWQSSYDYAGAAVLGWGDGYYKGEEDKEKAKSKASLSTIAEQQHRKKVLRELNSLISGSTANTDDAVDEEVTDTEWFFLVSMTQSFVNGNGLPGQAFFNSCPVWVAGSDRLANSTCERAKQGRVFGLQTIVCIPLANGVVELGSSEFIIQSSDLVNKVRALFNGIEAETWSMSNNTDDPSSFWISD

SEQ ID NO: 77500 - protein, 295 aa, Gossypium hirsutum
  unsure (1)..(295): unsure at all Xaa locations
  Clone ID: GOSHI-09MAY01-C26054_1.pep
VFPFTFLLLLLTCPSXKSPIHPRDVLPLLPRQVSWPILNSLNSAIDLLPAFVGSVSSQNHIVSWKGACFYENTARMEFHNKSGSEFGGGTLHIKVSKAHSWTCLDLYLFATPYRVTWDYYFLSREHTLEIDKWEDRAEYEYVKNKGISIFLMQAGMLGTLEALWEVFPLFTNTGWGESANLGFLKKHMGASFESRPQPWYTNISVDDIHSGDFLVISKIRGRWGGFETLEKWVTGSYAGHSAVFLKDSEGKLWVGESGHENEKGEDIIAVIPWDEWWDLELNKDDSNPHIAVLPL

SEQ ID NO: 77501 - protein, 92 aa, Gossypium hirsutum
  unsure (1)..(92): unsure at all Xaa locations
  Clone ID: LIB3048-006-Q1-L1-E3.pep
TAYHEFGGGTLHIKVKQSPXSWTGVLESXISFATPYRVTWDYYFLSREHTLEIDKWEDRTEYEYVKNKXISIFLMQAGMLGTLEALWEVFPL

SEQ ID NO: 77502 - protein, 223 aa, Gossypium hirsutum
  Clone ID: GOSHI-09MAY01-C26004_1.pep
MEVNAIWLLLLLPCSFPGFLISSCMGNQIDYLNRLVASRRSSNPPRPESWAQLDDQGNSHSSPVFVGSQKGLMQADKIDKLPGQPEGVDFDQYAGYVTVDPVADRALFYFFVESPVNSPNKPLVLWLNGGPGCSSLGYGAMQELGPFRVNSDGKTLYRNEYAWNNVANVIFLESPAGVGYSYSKNSSDYTQVGDKRTAEDSYVFLLNWLERFPQYKTRHLFIT

SEQ ID NO: 77503 - protein, 124 aa, Gossypium hirsutum
  Clone ID: GOSHI-09MAY01-C26024_1.pep
MAGKLTTGNITGIEKLHIVGGAEDRTAITNGNAAKNKPLVVCFGELLIDFVPTVGGVSLAEAPAFKKAPGGAPANVAVGVSRLGGSSAFVGKVGDDEFGYMLADILKQNNVDNSGMRFDRTART

SEQ ID NO: 77504 - protein, 134 aa, Gossypium hirsutum
  Clone ID: GOSHI-09MAY01-C26374_1.pep
MGKDTIADIITSIRNADMNRKGTIQIGSTNITENIVKILLREGFIDNVRKHRERNKYFLVLTLRHRRNRKGPHRTILNLRRISRPGLRIYSNYQQIPRILGGMGIVILSTSRGIMTDREARLEGIGGEILCSIW

SEQ ID NO: 77505 - protein, 30 aa, Gossypium hirsutum
  Clone ID: LIB3120-002-Q1-K1-C9.pep
MKIRASVRKICEKCRLIRMRGRIIVICFNP

SEQ ID NO: 77506 - protein, 206 aa, Gossypium hirsutum
  Clone ID: GOSHI-09MAY01-C26304_1.pep
AVKPWSTGLSGQLQKAFVTGVPKLKRSELEAACEDFSNVISSSTVGTVYKGTLSSGIEISVAYIPVKFAKDWSRNLEAQFRNKIETLSKVNHKNFVNLVGYCEEDEPFTRMMVFEYAPNGTLFEHLHIKESEHLDWTTRLRIMVGIASCLEHMHQLNPPIPHTNLSSAAVNLTEDYAAKVYDPFSWNEITAAESETDRKTIQIHHH

SEQ ID NO: 77507 - protein, 124 aa, Gossypium hirsutum
  unsure (1)..(124): unsure at all Xaa locations
  Clone ID: GOSHI-09MAY01-C26324_1.pep
EADEETDGSVRLGGRNRSPDLPLNEDDDKIRSAVEVKKNGGAFQPFQKEKTAEMSGQSAGGKTNGSATSTCTTESGSRGGEANCANSSETDEKEGQASRKQTRWWAPELHRRXFLHALQQLGGS

SEQ ID NO: 77508 - protein, 96 aa, Gossypium hirsutum
  unsure (1)..(96): unsure at all Xaa locations
  Clone ID: GOSHI-09MAY01-C26204_1.pep
MGRRLNDPEHSRFSXLILLSVALFSCALVYAVVSTFLNPNVGSQDSSFESFEIVASGDLGERKDECCRGIENLELWGPAVKWGSEFKFNSSVEMCQ

SEQ ID NO: 77509 - protein, 173 aa, Gossypium hirsutum
  unsure (1)..(173): unsure at all Xaa locations
  Clone ID: GOSHI-09MAY01-C27984_1.pep
MELGSALHFLDSKSILVTGAAGFLAKIFVEKILRVQPNVKKFYLLLRAADHKSAIHRFHNEIIGKDLFKVLKEKCGKNFSSFISEKITLIPGDISHEDLGIKDCTLVQEMLNXCDVGVNLAATTNSDERYDVALGLNTFGAQFVANFAKKCVKLKVLVHVSTAYVSEKKTGLS

SEQ ID NO: 77510 - protein, 168 aa, Gossypium hirsutum
  unsure (1)..(168): unsure at all Xaa locations
  Clone ID: uC-gsflnu33B093g03b1.pep
FSSEITLIPGDISHEDLGIKDCNLVQEMLNEVDVVVNLAATTNFDERYDVALGLNTFGAKFVANFAKKCVKLKVLVHVSTAYVSGEKTGLILENSYSMGETLNGVSGLDINXEKNVIEQKLNELRLLGASDKDITQAMTDLGIQRARFYGWPYTYVFTKAMGEMLAGE

SEQ ID NO: 77511 - protein, 189 aa, Gossypium hirsutum
  Clone ID: GOSHI-09MAY01-C27864_1.pep
YPPALHDEVWRLDRIAKDGALHKKLLKAEIVTVEDFLRLLVRDSQKLRNILGSGMSNRMWENTVEHAKTCILGGKLYVYYPDQTHNTGVVFNHIYELRGLIADGQFLSLESLNHNQKLFVDSLVKRAYENWHQVIEYDDKVLNTLRSTKVANPSAAPVNDNNYDADYYATTAQKSRQQYITSEPSPQCP

SEQ ID NO: 77512 - protein, 103 aa, Gossypium hirsutum
  Clone ID: LIB3149-033-Q1-K1-G11.pep
RMWDNTLELSYTCILGGKRGVYYPDQTHNTGVVFNHIYELRGLIADGQFLSLESLNHNQKLFVDSLVKRAYENWHQVIEYDDKVLNTLRSTKVANSTSSPVNY

SEQ ID NO: 77513 - protein, 132 aa, Gossypium hirsutum
  Clone ID: GOSHI-09MAY01-C27824_1.pep
IVRLDQRLLDAPVAEDGENWSVGQRQLVCLARVLLKKRRILVLDEATASIDTATDNVIQETIRKETCRCTVITVAHRIPTVIDNDLVLVLDNGMIVEYDKPKILLEDKSSWFSKLVAEFLRSSKSNHPKNLV

SEQ ID NO: 77514 - protein, 196 aa, Gossypium hirsutum
  unsure (1)..(196): unsure at all Xaa locations
  Clone ID: GOSHI-09MAY01-C27584_1.pep
LMHRGILSDPHRXLVKNGQLLQFLRILKEKGKRLFLLTNSPYYFVDGGMQFMLEDSTGNSDSWKELFDVVIAKANKPGFYTSEHPFRCYDTEKDTLAFTKVDTFLKNKIYYHGSLKSFLQITKWKGPEVIYFGDHLFSDLRGPSKAGWRTAAIIHELEDEIRIQNEDRYRFEQAKFHILQEPGLGDYMPFIPLNLT

SEQ ID NO: 77515 - protein, 183 aa, Gossypium hirsutum
  Clone ID: GOSHI-09MAY01-C27454_1.pep
NYSCPHLVEFVSSESILVSNITFLNAPAYNIHPVYCSHVHIHHITVYASPGSPYTVGIVPDSSDNICIEDCSISMGHDAIALKSGWDEYGIAYGIPTANVHIRRVQLQSFSGSSLAFGSQMSGGISDVQVQQLHLYDSLTGIEFRTSKGRGGYIKEIAISDVDMLNIKTAFCANGHFGSPSDD

SEQ ID NO: 77516 - protein, 215 aa, Gossypium hirsutum
  Clone ID: GOSHI-09MAY01-C27474_1.pep
GPGFVPPASDVNKLCDILDKMKPEDVGLSKSLQFFKPTGAVNGTPRVTYTTIYQCDQFSLCIFFLPETAVIPLHNHPEMTVFSKLLLGKMHIKSYDWVEPKDSIPPSKLRLARLKANSVYTAPCNTSVLYPTTGGNIHQFTAVTPCAVLDVLGPPYSKEDDRDCSYYKDFPYSAFSNEGETTRVSEEEREGLGWLEEIEAPENAMMDRIDWVLKL

SEQ ID NO: 77517 - protein, 252 aa, Gossypium hirsutum
  unsure (1)..(252): unsure at all Xaa locations
  Clone ID: GOSHI-09MAY01-C27764_1.pep
MKSMEGIQHKTVIVNGINMHIAEKGEGPLILFLHGFPELWYSWRNQINGLAALGYRALAPDLRGYGGTDAPDSVADYTCCHVVGDLIALLDTVAPPEKEDKVFVVGHDWGAIIAWYLCLFRPDRVKALFNLSVPFIPYDPRFKPVETWKAFYGKDHYIVRFQEPGVIEAEFAEIGVGRAVLELLSYRVPDPLYLPKGNLFGYPLDSPVNLPPWLSEKDADCYATQFQITGIXGALNYYRNFDRYWELFAPWW

SEQ ID NO: 77518 - protein, 145 aa, Gossypium hirsutum
  unsure (1)..(145): unsure at all Xaa locations
  Clone ID: GOSHI-09MAY01-C27124_1.pep
PNMVGRRKKKSFQHLKEKIATRIDGWSTRMLSXRGKEVFIKSVLQAIPTYAMSCFLLPKTLXGEFENIFAKFWWQKTHGMRGIHWCQWKYLCRPKEEGGLGFRNMAQFNVSLLAKQGWRIINNSNSLVAQVLTAKPFPSVDFLNS

SEQ ID NO: 77519 - protein, 64 aa, Gossypium hirsutum
  Clone ID: GOSHI-09MAY01-C27084_1.pep
TSLCMPFSSSAHFFLVLIFSMIELLIWKRWIRQLLESFFTDHLVVNIAVLSFMLHAIFGYAFVV

SEQ ID NO: 77520 - protein, 142 aa, Gossypium hirsutum
  unsure (1)..(142): unsure at all Xaa locations
  Clone ID: AI054530.1.pep
MSRERERFDEIGKKIKREADVVSFGGHHHQMGRRHIMGSHGTLNTITPCAACKLLRRRCAEECPXSPLFLPHXTXKVASVHKXFGASNVSKMLMEVPENQRADAASSLCYEANVGLETLLWLMGAFXLLHTSQSYSWIMEAW

SEQ ID NO: 77521 - protein, 78 aa, Gossypium hirsutum
  Clone ID: LIB3048-021-Q1-L1-G10.pep
NLSLSLDIKACSQKWRTQIFSGVKGREEKRRDGRKRRNEGKGCLKGKVYKRKVCMVYCLYKIWEYYRQKGYVYFTRRS

SEQ ID NO: 77522 - protein, 140 aa, Gossypium hirsutum
  unsure (1)..(140): unsure at all Xaa locations
  Clone ID: GOSHI-09MAY01-C27284_1.pep
ELVRLPKGKKAMGGKWVYAEEEFPGKNEIRYKARLVAKGYAQKEGIDYNELFSPVVKHSSIRILLALVAQYDLELVQLDVKTAFLHGDLEDEIYMTQPDGFKVAGKENXVCKLTKSLYGLKQSPRQWYKRFDQFMKGQMY

SEQ ID NO: 77523 - protein, 437 aa, Gossypium hirsutum
  unsure (1)..(437): unsure at all Xaa locations
  Clone ID: GOSHI-09MAY01-C20984_1.pep
MPPNLTKPNSGFTSKPSPLCTCVSLIFLLIIGFPAPPPPPGDPKKVLLFQQIFLSSASNSTIASYLRSLTSHPHLAGTKPSLETIHYVKTHFQNLGLETHTVPFQTLLSYPVHASVLMHFGNGTVLNLPLNEMGIPSYPSSGLIQPYHAFSPSGTVHGKVVFANHGREDDYRTLGLMGVNVNGCIVVIRKGGGXSGGAVVKIAEXKGALGVLMYAEGDVSKGSFGSGVERGTVMEGGGDPLAAGWGADEDGERLKLEDKKVLQRFPGIPSLPLPFESAQLILDSLGGPLAPQEWRDSGRSNLSHVGSGLVMVNFTYPRGKKSATLYIVVAVLGGLHEPDRYVLMGNHRDAWTYGAVDPNSGTATLLDIARRYALLMRKGWNPRRTIIFCSWDAEEFGMIGSTEWVEQNLVNLGAKAVAYLNVHCAVQGPGLFAGPTS

SEQ ID NO: 77524 - protein, 169 aa, Gossypium hirsutum
  unsure (1)..(169): unsure at all Xaa locations
  Clone ID: GOSHI-09MAY01-C20584_1.pep
HVSADSNCWTCPSGTGFMIRGKTYLKDNAKIMGSDPLLKLIAVDWFKVDTATDKIALHPRSLAQSDAGKKLPFILVINLEVPAKPNYSLVLYYAAERPVRKDSLLGRFADGTDLFRDARFKLIPSIVEGYWMVKRAVGTKACLLGKXAVTCKYFRHDNFLEIDVDIGSS

SEQ ID NO: 77525 - protein, 178 aa, Gossypium hirsutum
  unsure (1)..(178): unsure at all Xaa locations
  Clone ID: GOSHI-09MAY01-C20544_1.pep
MGLCTSKPSPNPSDSTNASINTRNNDIHRKPNSVSASPLPDGVNSKEDQGKQGEEEKESSNSNNEGKKSPFFPFYSPSPAQYLFSKKSPARSSTNSTPKRFFRRPFPPPSPAKHIRAVLARRHGSVKPNEAAIPEGSDAXAAGATGTGLDKSFGFSKHFGSKYELGEQIXRGHFGYTC

SEQ ID NO: 77526 - protein, 219 aa, Gossypium hirsutum
  Clone ID: GOSHI-09MAY01-C20574_1.pep
GTSPEQLGGGGHVGNADSLDPDMRVSAEASIKSAMQLFIKFSAGIVLDSLHESNRSHLVAKLVFLDQLCDISPYLPRSSLEAHVPYAILRSIYSQYYANSPLMPMALLSASPRHSPAVSLAHASPIMRQPRGDSTPQYSANDSGYFKGSSSHSQEQLYDAESANLRGVENKHRNVRRSGPLDYSSSRKVKYEGSSSGGTGPSPLPRFAVSGLVHIIQLG

SEQ ID NO: 77527 - protein, 147 aa, Gossypium hirsutum
  unsure (1)..(147): unsure at all Xaa locations
  Clone ID: GOSHI-09MAY01-C20514_1.pep
SAARGAMTGQLTXLKSDVYSFGVVLLEXITGRKAIDNSRAGGEQNLVAWARPLLKDRRKFAQXADPLLQGQYPVRGLYQALAVAALCVQEQPNMRPLRPDVVTALTYPASQKYDPGTQTVQGSRTGSSTPRMRREYFQVTESNHLLL

SEQ ID NO: 77528 - protein, 242 aa, Gossypium hirsutum
  Clone ID: GOSHI-09MAY01-C20484_1.pep
EAAAPRILHRDVKSTNILLDKNCRAKITDLGMAKRLRADGLPSCSSSPARMQGTFGYFAPEYAIVGKASPMSDVFSFGVVLLELITGRQPIHKSNNKEESLVIWATPRLQDSKRVTSELPDTRLKGNFPEEEMQIMAYLAKECLLLDPDARPTMSEVVQILSTIAPDKLKRRSIPVNFYQMPSAYKTNNEAFLERHQTVIEDLYDAEEHMPSTSKSAESSRPSSMNDIRIAGKQIVTCLRVH

SEQ ID NO: 77529 - protein, 101 aa, Gossypium hirsutum
  Clone ID: LIB3828-028-Q6-N6-C6.pep
MQTNYANRLRTSRKLTSNNLIVYQEMNEKYKKRKRYTLFLKGMGRVIYDTRSLHHALFAPKTVSATRTCKPTIATRKHFFFLILTHLLSGERQLSMFQRFD

SEQ ID NO: 77530 - protein, 58 aa, Gossypium hirsutum
  Clone ID: LIB3083-112-Q1-L1-G10.pep
FFDSIYHVGRDSATFLLEGWGGSFMIHAAFTMHNLHQKLFLQLEHVNQPLLQGNIFSF

SEQ ID NO: 77531 - protein, 47 aa, Gossypium hirsutum
  Clone ID: LIB3083-046-Q1-G1-E4.pep
SNLWNMENCLSPFRSLVNLKKKKCFHVAMVGLHVRAAETVFGANYAW

SEQ ID NO: 77532 - protein, 126 aa, Gossypium hirsutum
  Clone ID: GOSHI-09MAY01-C20744_1.pep
LRPFYVTNQNCSGVFIHHSLSSSSYILNYKLPSQPFQAIIIRIAEALYLSFLEGTISAETPLPSCVSNKYVIVDVVDQLLSTNLVVSHAKSFTVTPEFNNKKNAEEKSIRPRAKSCCGVGGLTRSQ

SEQ ID NO: 77533 - protein, 156 aa, Gossypium hirsutum
  Clone ID: GOSHI-09MAY01-C20194_1.pep
PRVRPRGRFDVKTVVRNIYILFCRSELQVAGDNEEIMDLVDPSTPLPPWFTEEDLEVYATLYQNSGFRTALQVPYRCSQLDYGITNPKVTAPSLLIMGEKDYFMKFPGMEEYMKKGIVKQFMPNLDITFMPEGNHFVQEQLPEQVNELIITFLNKD

SEQ ID NO: 77534 - protein, 72 aa, Gossypium hirsutum
  Clone ID: GOSHI-09MAY01-C20184_1.pep
TKMEKRENKRQSPPFYTTYHTKANCCCCQNNLCSIFSWRSLCLNFSQPSFTKFTPQEKAIYLNEGDPPVKPR

SEQ ID NO: 77535 - protein, 210 aa, Gossypium hirsutum
  Clone ID: GOSHI-09MAY01-C20164_2.pep
HVPSRISRPKDKKVYVIGEDGILKELELAGFQYLGGPEDGGKKIELKPGPRVGHDKDVGAVVVGFDRYLRYYKVQYGTLCIRENPGCLFIATNRDAVTHLTDAQEWAGGGSMVGAICGSTQREPLVVGKPSTFMMDYLANKFGILKSQICMVGDRLDTDILFGQNGGCKTLLVLSGVTSLSMLQSPSNSIQPDFYTNKISDFLSIKAATL

SEQ ID NO: 77536 - protein, 82 aa, Gossypium hirsutum
  Clone ID: GOSHI-09MAY01-C20164_1.pep
MLSNSIVFMLLNRFGILKSQICMVGDRLDTDILFGQNGGCKTLLVLSGVTNLSMLQSPSNSIQPDFYTNKISDFLSIKTATV

SEQ ID NO: 77537 - protein, 233 aa, Gossypium hirsutum
  Clone ID: GOSHI-09MAY01-C20134_1.pep
IPEPLGGAHADPVWTSQQIRFAITRAMDELTKMDTEELLRHRMLKFRSIGGFQEGKPVEPERKRNMKPSDASMLNAADIESDLEKLKKNILEAKVPSDPITDQAIEKLGQGVDNEVTRAFISMGLHEKLESLKLELSRASDNQTLNPNLKAKADKLMHEFKQNLSRPVTYLGLKHKLDKLSMVSRLIEQKEKGEKLKAAVNQKIPFEINEKLEQLQTAQANLSKGDPLDEHLV

SEQ ID NO: 77538 - protein, 145 aa, Gossypium hirsutum
  Clone ID: GOSHI-09MAY01-C20124_1.pep
MSILWEKSETWRWLVRRTRDSKPFFLAFATLCGVVPGVIGYGVMQLTNSRNPHLEARLRENARPESLMMGKVNQERLAEYLGELQRKEDTNDRYVAALRGETLTRTPYQRIQPVPKQNAEKKSNSNEKAYHVVWLLKVLSYTLFS

SEQ ID NO: 77539 - protein, 88 aa, Gossypium hirsutum
  Clone ID: uC-gsflmaxxa061d12b1.pep
THTKTNALYLSLKLLISCFKRIKKAKDGVKLLEKCMRVLLYRDRSAINKLQIAKITEEGMTISPPYSIKTYWEFSAFENPTQGAVGSW

SEQ ID NO: 77540 - protein, 31 aa, Gossypium hirsutum
  Clone ID: LIB3083-031-Q1-L1-A5.pep
EGMTISPPYSLKTYWEFSVFENPTQGAVGSW

SEQ ID NO: 77541 - protein, 140 aa, Gossypium hirsutum
  Clone ID: GOSHI-09MAY01-C21954_1.pep
NPKVARMASLDHMLGISSNSLVAMGSQLSEAEERERAFTNRGRWNQLRSMGDAKNLLQYMFNSLGDSRYQLWEKGIEIREMKEQLKELVGLLRQSELQRKEVENELKLREQAVAIALATSATVNSPISLKHIDDDVKSSS

SEQ ID NO: 77542 - protein, 84 aa, Gossypium hirsutum
  Clone ID: LIB3083-074-Q1-L1-F4.pep
RWNQLRSMVDAKNLLQYMFNSLGDSRYQLWEKGIEIREMKEQLKELVGLLRQSELQRKEVENELKLREQAVAIALATSATVSFM

SEQ ID NO: 77543 - protein, 227 aa, Gossypium hirsutum
  Clone ID: GOSHI-09MAY01-C21814_1.pep
MNDEKREGKGKKQEIKKKEKIDGLIFMCNARTKPDCFRYCVMGVSAGKTDLVLGIRPGLKLFLYDYDVRLLYGIYRATSSGAMKLEPKAFGGAFPAQVRFSVHSDCFPLAENIFKKAIKENYDEKNKFKTELTARQVRKLTELFRPVPVHSTALPFHSPSRAAARITEHPEKREAHDRPREARPSSHREASVRDPYANISARNYAGFPHERNQRVAYGEVASNKRED

SEQ ID NO: 77544 - protein, 45 aa, Gossypium hirsutum
  Clone ID: GOSHI-09MAY01-C21834_1.pep
NGPPPLGYFIYYFFFFLFFFFFFFFLFFFFFFFFFFFFFFFFLIK

SEQ ID NO: 77545 - protein, 207 aa, Gossypium hirsutum
  Clone ID: GOSHI-09MAY01-C21544_1.pep
MTAQADKEIEEILAAHLDQQKIDSEIPEQPVVEDDDEEDDDDDDDEDDAEGHHEGEGDGTVRSKQSRSEKKSRKAMLKLGMKPISGVSRVTVKKSKNILFVISKPDVFKSPASDTYVIFGEAKIEDLSSQLQTQAAEQFKAPDLSHVISKPESSTAVQDDEEVDDTGVEPKDIELVMTQAGVSRSKAVKALKAADGDIVSAIMELTT

SEQ ID NO: 77546 - protein, 146 aa, Gossypium hirsutum
  Clone ID: LIB3147-049-Q1-K1-C8.pep
IEEILPAHLDQHNILPNIPEPPVILHYNQEHHDDNDDEDDAEGHHEGKGDGTGRSKQSRTEKKSHKAMLKLVMKPIPGVSRVTVHKSKNILFVISKPDVFKSPASDTYVIFGEAKIEDLSSQLQTRAAEQFMASDLSQVISKPESS

SEQ ID NO: 77547 - protein, 271 aa, Gossypium hirsutum
  Clone ID: GOSHI-09MAY01-C21574_1.pep
PGLTQRLVGLFALLGAASFLGGTMRMTVSLCVILVELTNDLLLLPLVMLVLLISKTVGDMFNHGVYGQIVKLKGLPYMEAHAEPYMKHLVARDVVSGPLITFSGVEKVGNILHALKTTGHNGFPVIDEPPFADAPELCGLVLRSHLLVLLKGKIFSWDRVLSGDEVVRRISKFDFAKAGSGKGVKLEDLDIKDEEMDMYVDLHPITNTSPYTVVETMSLAKAAVLFRQLGLRHMCVVPKSQGRPPIVGILTRHDFLPEHILGLYPHIRLRK

SEQ ID NO: 77548 - protein, 206 aa, Gossypium hirsutum
  Clone ID: GOSHI-09MAY01-C21514_1.pep
GDERFGVIYFILLLPRLNEHDFEVLSSPEVIETRDALLQKLQKNKNVQVENSSPDASQQSGNFSETKRETFVSEEKVSEIVNAAEGLEITSSEDNTEQWLEEAEFSSGSSLSIKKNLEHEEDVSFSDLEDDDTDTSNRASVRKSTQHDKALSSSGSNDWVQLNKRLETRGALQKAGQTSCRDKDSEVEESNDWLTDDDFVDVVRGK

SEQ ID NO: 77549 - protein, 71 aa, Gossypium hirsutum
  Clone ID: GOSHI-09MAY01-C21444_1.pep
RLLLSWRDPRATALFVIVCLAAAIVWYVTPFQVVALLAGFYILRHPRFRHKLPSVPLNFFRRLPARTDSML

SEQ ID NO: 77550 - protein, 202 aa, Gossypium hirsutum
  Clone ID: GOSHI-09MAY01-C21414_1.pep
ARLIQFSVMNKLKRRAFKAIVGRFSVEEVAGIKEGFQLMDTANRGMINIDELRVGLHKLGHTIRDANLQILMVAGDVDKDGYLDYGEVVAISVHLREMGNDEHLKKACEFFDRNQSGYIEIEELRDALSDEVETNSEEVISAIMHDVDTDKDGRISYDEFAVMMKAGTDWRKASRQYSRERFNNLSLKLMMDGSLQMNSEPR

SEQ ID NO: 77551 - protein, 296 aa, Gossypium hirsutum
  Clone ID: GOSHI-09MAY01-C21424_1.pep
MRSNSKPHSPFNTKLILICASVVLFVFLLITTTSSFSKPPISQSHLSNSTHPVDDSEPTPLDCPSLPLTPTCTKTPPSLANALIHYATTNITPQQTLKEISVSARVLEKKAPCNFLVFGLGHDSLMWAGLNHGGRTVFLEEDKAWIEQIKQKLPSLESYHVEYVTKVHQADDLLETGMKEECKVVGDPRFSKCDLALKGFPNEIYDIEWDLIMVDAPTGFHDEAPGRMNAIYTAGLMARNREEGETDVFVHDVNRVVEDKFSMAFLCEGYLREQQGLLRHFTIPSHRSRSGRPFCP

SEQ ID NO: 77552 - protein, 113 aa, Gossypium hirsutum
  Clone ID: LIB3584-039-P1-K1-G7.pep
LFTSSNAEFYISLVFGCVIFSEVLHFNSSGSREYFDAPKLLSRSSQASNDEENAKIASASVPLSMLLIPSLKEVIADDSEGSVVRAVTNSLINMERAKPGSCEALVRKLLERL

SEQ ID NO: 77553 - protein, 91 aa, Gossypium hirsutum
  unsure (1)..(91): unsure at all Xaa locations
  Clone ID: LIB3083-072-Q1-L1-B8.pep
EDSASXLAEAKAAIQAGLRKANARDRSSRSKLNSPGHENRRXDLTSNCSDXLAVLREXFDAPKLLSRSSQASNDEENAKIASASVPLSMLL

SEQ ID NO: 77554 - protein, 285 aa, Gossypium hirsutum
  Clone ID: GOSHI-09MAY01-C21704_1.pep
MAFDGFVSDNTKDMQTLALNEPPPSAADIDHWERAKCKAEIMGHPMYDQLLEAHVACLRVATPVDQLAQIDAQLARSQDVLAKYSSAAAAAGSAEEELDHFMANYVLLLGFFKDQLQQHVRVHAMEAVMACWDLEQSLQSLTGVSPGEGTGATMSDDEDEVVDSDTSLFDGSFDGIDSMGFGPLVPSETERSLMERVRQELKHELKQCYKEKIVDIREEILRKRRAGKLPGDTTSFLKAWWQSHSKWPYPTEEDKAKLVQETGLQVKEINNWFINQRKRNWHSNP

SEQ ID NO: 77555 - protein, 51 aa, Gossypium hirsutum
  Clone ID: GOSHI-09MAY01-C21734_1.pep
MATLVEPPNGVKPKGKHYYSMWQTLFEIDTKYVPIKPIGRGAYGIVCSAIN

SEQ ID NO: 77556 - protein, 204 aa, Gossypium hirsutum
  unsure (1)..(204): unsure at all Xaa locations
  Clone ID: GOSHI-09MAY01-C21054_1.pep
STSDVYGYPLQHPHKETXWGYVNPIGERSCYDEGKRTAETLTMDYHRGDRVEVRIARIFNTYGPRMCFDDGRVVSNFVAQAIRKQPMTVYGDGKQTRSFQYVSDLVDGLVALMEGEHIGPFNLGNPGEFTMLELAEVVKDTIDPSATIEYKPNTADDPHMRKPDISKAKELLNWEPKIPLREGLPLMVNDFRNRILNEDEGKGA

SEQ ID NO: 77557 - protein, 107 aa, Gossypium hirsutum
  Clone ID: GOSHI-09MAY01-C21304_1.pep
MERKLVVLGIPWEVDTEGLREYMSKYGDLEDCIVMKERTTGRSRGFGYVTFASADDAKNVLSIEHFLGERMFGVKIATPKEEMRAPVKKVTRIFVARIPPSVDESTF

SEQ ID NO: 77558 - protein, 256 aa, Gossypium hirsutum
  Clone ID: GOSHI-09MAY01-C21284_1.pep
MATVSDSPEDSPNPNPPPSPPSDFPSKSESNAPEQVTPWIDSAVEQALLYQKIIEQNVNDAIKASRSRLSEIRSTSSAHFNLTIESLKDVKSQLDVYEDLAFGKVKEGINIAASNPLITGGAAVGLGFLVLKRPRHLLYYKTLRLFQSEESLISRADIRVKELRQSIDRLKAESEKLERSASVAEDELIRGQTKLRQAGSNRSVIQSAYKIERQAAGLKDTLGELQAEKSSFSSQVSNFASQAKRDRNVLTREFQN

SEQ ID NO: 77559 - protein, 133 aa, Gossypium hirsutum
  Clone ID: GOSHI-09MAY01-C21214_1.pep
IDSTINPNKTRVFFTTMSSIHSKSKDWGREDGLKCFNETKPVMKKKFWGSGSNKDMMSVVAGVINKMKVPVSVLNIAQLAEYRIDAHSSIYTETGGRLLNDEEKADPGRHADCIHWCLPGVPDTWNQIFLAHL

SEQ ID NO: 77560 - protein, 110 aa, Gossypium hirsutum
  unsure (1)..(110): unsure at all Xaa locations
  Clone ID: GOSHI-09MAY01-C22944_1.pep
SAIIICVYSFCDGPKLSRGPYLGTTMICCVSSLMFVSVKASYASGXVVVEKGSAMETALFICSLALAIAHIIVAYRTSCRERRKLLVYKIDIEAXSACKNGFPRYPKIVK

SEQ ID NO: 77561 - protein, 51 aa, Gossypium hirsutum
  Clone ID: LIB3083-092-Q1-L1-F4.pep
FICSLALAIAHIIVAYRTSCRERRKLLVYKIDIEAISACKNGFPRYPKIVK

SEQ ID NO: 77562 - protein, 85 aa, Gossypium hirsutum
  Clone ID: GOSHI-09MAY01-C22924_3.pep
RFYSYGLEKKYRDDLYKDFEQLTLDFYHKGNLYGLEKYWAFHHFRDQGEPLKKHPELDRLLGEEYRGLEDFRAKERNAGTRDDSQ

SEQ ID NO: 77563 - protein, 300 aa, Gossypium hirsutum
  Clone ID: GOSHI-09MAY01-C22924_1.pep
PTRPPTRPPRSPRGALGVSNLKTGENAAGSSNLEESGGSSSRRKQNKGFSKQQSFHKQRFFSGNSKNHGASRNSIAIISESPPSNSVGYFFGSTPPDSHGPRPPSKLSCSPHGTLSSSPPVGSLPKSFPPFQHPSHQLLEENGFKQQKYLKFHKRCLNDRKKPGIGCSEEMNSLYRFWSYFLRDMFVPSMYNEFRKLALEDAAANYNYGLECLFRFYSYGLEKKYRDDLYNDFEQLTLDFYHKGNLYGLEKYWAFHHFRDQKEPIKKHPELDRLLREEYRRLEDFRTKEKNTSSTREERH

SEQ ID NO: 77564 - protein, 141 aa, Gossypium hirsutum
  unsure (1)..(141): unsure at all Xaa locations
  Clone ID: AI054579.1.pep
EESVVLSSRRKQNKGFSKQHAFHKQRFFSSNTKNHGTARNSIAIISESPPTNSVGYFFGSTPPDSYGPRTXWKXSCSPHGTLLSSXPXXVPWQXSFPPFQIXSIXLLEENGFKHKKYLKFHKRCLNDRKNXEMGGSEGNIS

SEQ ID NO: 77565 - protein, 134 aa, Gossypium hirsutum
  unsure (1)..(134): unsure at all Xaa locations
  Clone ID: GOSHI-09MAY01-C22864_2.pep
MAVSSATFSTFVSPQTVSFSGKPSSLRLLHPTNVPLVRTLTXATASKTDSGPRKPRGILKPRPVSPEMQALVGVPEIPRTEVLKQIWAYIKEHNLQDPNNXRFIICDEQLNKIFGGKDRVEFLEIAGLINPHFL

SEQ ID NO: 77566 - protein, 158 aa, Gossypium hirsutum
  Clone ID: uC-gsronu33B159e08b1.pep
LSQIPFALQFLPHKLRRKSEEEQKWLSLRPHFLLLSRPHTVSFLGKPSSFRLLHPTNVHMVRTLTQATASKTDTGPRKPRGIMKPRPVSPEMQALVGVPEIPRTEVLKQIWAYIKEHNLQDPYNKRVIICDDKLKKIFGGNDRVEFLEIAGLINPHFL

SEQ ID NO: 77567 - protein, 138 aa, Gossypium hirsutum
  unsure (1)..(138): unsure at all Xaa locations
  Clone ID: LIB3543-029-Q1-K6-H8.pep
MRNKKAVSSATFSTFVSPQTCXSXPNPGGGRLFLSTNVHMVRTLTQATASKTDTGPRKPRGIMKPRPVSPEMQALVGVPEIPRTEVLKQIWAYIKEHNLQDPNNKKVIICDDKLKKIFGGKDRVEFLEIAGLINPHFL

SEQ ID NO: 77568 - protein, 92 aa, Gossypium hirsutum
  Clone ID: LIB3146-004-P1-K1-H7.pep
HASAVFFILLYVRMVRTLTRATASKTDSGPRKPRGIMKPRPVSPEMQALVGVPEIPRTEVLKQIWAYIKEHNLQDPNNKRFIICVDKLKKIF

SEQ ID NO: 77569 - protein, 455 aa, Gossypium hirsutum
  unsure (1)..(455): unsure at all Xaa locations
  Clone ID: GOSHI-09MAY01-C22814_1.pep
MGSAAVEDMIEASSGVHFSGFHMDGLDSRHIKKPMMSPATENMHNQPFLIGVAGGAASGKTTVCDMIIQQLHDQRVVLVNQDSFYHKLTEEELARVHEYNFDHPDAFDTEKLLDSIDNLRHGRAVDIPKYDFKSYKLDVFPVRRVNPSDVIILEGILIFHDPRVRELMNMKIFVDTDADVRLARRITRDTVGKGRDIGAVLDQYSKFVKPAFDDFILPTKKYADIXIIPRGGDNHVAIDLIVQHIRTKLGQHDLCKIYPNLYVIQSTFQIRGMHTLIRDSQTTKHDFVFYADRLIRLVVEHGLGHLPFTEKQVITPTGSVYTGVDFCKRLCGVSVIRSGESMENALRACCKGIKIGKILIHREGDNGQQLIYEKLPQDISKRHVLLLDPILGTGNSAVQAISLLIKKGVPESNIIFLNLISAPQGVHLVCKSFPRLYIVSFXIDIWLNKDFCFIP

SEQ ID NO: 77570 - protein, 138 aa, Gossypium hirsutum
  Clone ID: LIB3543-022-Q1-K1-D1.pep
MGSNSVEDMIEASSGVHFSGFHMDGLESKNIEKPTTSPGAENVHKQPFIIGVAGGAASGKTTVCDMIIQQLHDQRVVLVNQDSFYHNLTEEELARVHEYNFDHPDAFDTEKLLDSIENLRHDRAVDIPNYDFKSYKSN

SEQ ID NO: 77571 - protein, 288 aa, Gossypium hirsutum
  Clone ID: GOSHI-09MAY01-C22514_1.pep
QPNVPALHLPGSNLQSSRLRSSLNARDIQAEDFNLLSDFDVQQLQLMNELPGLTQPSMSSSSFNRSGRMKTLTPSNLDDLFSAESSSPRYSDQVLAAAVFSPTHKSAVLNQFQQQQSMLSPINTTFSPKSIEHPLLQASLSGRMSPRNVEPISPMSSRVSMLAQREKQQQFRSLSSRELGSGSAAIVGSPVNSWSKWGSSNGKPDWAVNADGLDKHRRSSSFELGNGDEPDLSWVQSLVKESPTEIKEKIAAPVSGEGSSMNADPVDNAVLGAWLEQMQLDQLVAQQN

SEQ ID NO: 77572 - protein, 138 aa, Gossypium hirsutum
  Clone ID: GOSHI-09MAY01-C22504_1.pep
MDFYGHPYRFSLSSFSLVSDFIEKVKDFFNFAVSAIIGNIFSAILTFFFALVGPLLGAMTGALIGQETESGFVRGAAVGAISGAVFSIEVFESSLLLWQSDESGILCLLYLIDVIASLLSGRLVRERIGPAMLSAVQS

SEQ ID NO: 77573 - protein, 180 aa, Gossypium hirsutum
  unsure (1)..(180): unsure at all Xaa locations
  Clone ID: GOSHI-09MAY01-C22454_1.pep
MAKEVVNPDELVVVGEELDHVRIITLNRPRHLNVISSKVVSLLAKYLEKWERDEQAQLILIKGAGRAFSAGGDLKMFYEGRKSKDSCLEVVYRMYWLCYHIHTYKKTQVALVQGISMGGGASLMVPMKFSVVTEKTVFATPEASIGFHVDCGFSYMLSHLPGHLGEYLXLTGARLNGKEL

SEQ ID NO: 77574 - protein, 171 aa, Gossypium hirsutum
  Clone ID: GOSHI-09MAY01-C22444_1.pep
MFWRMTGYSSASPIDAILVKDNFTLEELLDEDEIIQECKSLNGKLINFLRERAQVEQLIQYIVVEPPENADKKQIYKFPSIACEIFTCEVDIILKTLVEDEGLMNLLFSFLNSNHSHGTQLTGYFNRIVICLLLRKTSAFMQYIKGHQEIVEMLIDLIGITSIMEVLIRLI

SEQ ID NO: 77575 - protein, 120 aa, Gossypium hirsutum
  Clone ID: GOSHI-09MAY01-C22404_2.pep
NPKGKEFANKLVGLASRAAANNNVVIDVCLVTSFAVLGIRSLNQQNVIESLEAEKDSLTKSNKALKKVMWDWKQQLFAEASSPSPLVPLDSLKAIYGESPTPPTGDAAKGVKSPPAKFVV

SEQ ID NO: 77576 - protein, 183 aa, Gossypium hirsutum
  Clone ID: GOSHI-09MAY01-C22404_1.pep
DAWGLTQMEGLNMYGNGVDNGLVLRKRVMVVVDESSHSKHAMIWALTHVANKGDLLTLLHVIPPTQKTSYSSSSFSPYLANSLGSLCKACKPEVEVEALVIQGPKLGTVMSQVKKLEVSVLVLGQKRHSPFLSCVCGSSSTEEFVERCINNADCLTIGVKRQSKGVGGYLISTRWQKNLWLLA

SEQ ID NO: 77577 - protein, 57 aa, Gossypium hirsutum
  Clone ID: LIB3145-057-Q1-K1-E3.pep
FETTVSPTEAREPLRSISRTYKNLKPVICLRLQTKNASSSTLYFFTTKTVLSSFQYI

SEQ ID NO: 77578 - protein, 106 aa, Gossypium hirsutum
  Clone ID: LIB3146-021-Q1-K1-F2.pep
PRVRPRVRPRVRGRVGSYSSSSFSPYLANSLGSLCKACKPEVEVEALVIQGPKLGTVMSQVKKLEVSVLVLGQKRHSPFLSCVCGSSSTDEFVERCINMQIVNHWG

SEQ ID NO: 77579 - protein, 135 aa, Gossypium hirsutum
  Clone ID: GOSHI-09MAY01-C22424_2.pep
YYTELSSSRQTDARVQLNGRKSASGNYRYDSNAKPQSFTLSQSSSNNYQALSLASSTNDENFEGSIRNLKFEEAEETVVASLAKASENLEVDLSLTTAAAPKNDCIEWNESSTVIDTLTSELLEDNSAAPLPPNE

SEQ ID NO: 77580 - protein, 139 aa, Gossypium hirsutum
  Clone ID: uC-gsflmaxxa009d04b1.pep
MGDCKGDRLRACCFIIILVMLLVCCCTNGEDPYRFYTWNVTYGDIYPLGVKQQVILINGQFPGPQIETVTNENLIINVFNSLDQPFLISWNGVQQRRNSWQDGVYGTNCPIPPWGNFTYTLQVKDQIGSYFYFPSLALH

SEQ ID NO: 77581 - protein, 119 aa, Gossypium hirsutum
  Clone ID: uC-gsflmaxxa009d05b1.pep
VVGISVLLKRSGSSKGPVVLGRTFATIPSEDLSYARDSSNSFRSSVGHGSVSASSSTEFSSSRQTDARVQLNGRKSELENYRYDLNAKPQSFTLSQSSSNNYQALRFASSTNDENFEGS

SEQ ID NO: 77582 - protein, 59 aa, Gossypium hirsutum
  Clone ID: GOSHI-09MAY01-C22134_1.pep
RFYFIYESPIVSPTFHLFVFHNHQQGKQAKAATPLPLFLQLLSLFIHYSLSVSMLLFFS

SEQ ID NO: 77583 - protein, 101 aa, Gossypium hirsutum
  Clone ID: GOSHI-09MAY01-C22384_1.pep
DDILLLWKITRLFENGVECREVLDAIIDRCAALQNIRQAVLHYRKVFNQQHIEPRVRRVALNRGAEYLERYFRLIAFAAYLGSEAFDSFCGQGECKMSFKN

SEQ ID NO: 77584 - protein, 190 aa, Gossypium hirsutum
  Clone ID: GOSHI-09MAY01-C22344_1.pep
KKKPILDGLKERQEQEKRLQKVAKTMDHLERAKREEAAPLIEAAFQRRLVEEKVLHEREQQLEVELSRQRHDGDLKEKNRLARMLENKMIFQESVISRRQAEFDQRRVEREERIKQIIQARKQERDIKRKKIFYVRSEEERIKKMRKEEEACKREEAERLRKEEAEHKAKMDEIAEQQRQRERELQEKER

SEQ ID NO: 77585 - protein, 134 aa, Gossypium hirsutum
  unsure (1)..(134): unsure at all Xaa locations
  Clone ID: GOSHI-09MAY01-C22364_2.pep
MSHLLKLYLFXYNSLQAFGWTISLVRILSCFIATKSVIGAYASAGDLICLLQTCAFLEVVHGAIGIVPSGVLFPLMQWGGRTHFLLAIVRRIHEVQELSAVFITFFAWSLTEVIRYSHYAXTYLGGCSSWLTYL

SEQ ID NO: 77586 - protein, 223 aa, Gossypium hirsutum
  Clone ID: GOSHI-09MAY01-C22364_1.pep
MSFLFFFISIHYFPQLNSKLIIGRTISLVRILSCFIATKSVIGAYASAGDLICLLQTCAFLEVVHGAIGIVPSGVLFPLMQWGGRTHFLLAIVRRIHEVQELSAVFITFFAWSLTEVIRYSHYALNISGGCPSWLTYLRYTLFIVLYPMGLAPGEMWLMYQALPYIKEKNLYGDFFASVPLAYDNFVTVVLLIYPFLWLNLDLHLFKQRRSKLGKQHHKKKKI

SEQ ID NO: 77587 - protein, 348 aa, Gossypium hirsutum
  Clone ID: GOSHI-09MAY01-C22284_1.pep
AKLHNRNNGYSAVSKQCVSSFGAKQVEVSFSKQSEKKGSFFNWFYFSINIGALISSSLIVWIQDNARWGLGFGIPALFMGLAIGSFFSGTALYRFQRPGGSPITRMCQVLVAAFHKRSLKVPEDSTLLYETGDKHSAIEGSRKLEHSEELKCLDKAAIVTDVETKSGDFSNPWRLCTVTQVEELKILIRMFPIWVTGIVFSAVYAQMSTMFVEQGMMMDTKIGSFTIPPASLSTFDVISVIFWVPIYDRIIVPIARKFTRKERGFSELRRMGIGLFISVLCMSAAAVVETRRLHLAKELDLVDKQVAVPISILWQIPQYFLLGAAEVCTFIGQLEFSYDQSPDAMRGM

SEQ ID NO: 77588 - protein, 228 aa, Gossypium hirsutum
  unsure (1)..(228): unsure at all Xaa locations
  Clone ID: GOSHI-09MAY01-C22244_1.pep
RHYGGTGIGLSISKHLVELMHGEIGFASEPGVGSTFSFTGAFGKGEVSSLDSKWKQYDPVVSEFQGLGALIIDNRSIRAEVTKYHLRRLGISVDITSSLESACTYVSSIFTTSAFAHLAMILIDKDVWNQETVLQLRSLLEQHRKNCKLNVSTNLPEIFLFXVPSMSPVERSKLKTSGFVDNVLMKPLRLSVLIACFQEALGGTKGKVRGKKMSTLGSLLREKRISRR

SEQ ID NO: 77589 - protein, 146 aa, Gossypium hirsutum
  Clone ID: GOSHI-09MAY01-C22224_1.pep
MVSDASKKKAAQKKAAAAAKRGGKAAAAAASSKAAAAATAENGVDKVSDKVSMLQISDRTCTGVLCSHPLSRDIRIESLSVTFHGHDLIVDSTLELNYGRRYGLLGLNGCGKSTLLTAIGLRELPIPEHMDIYHLTREIEASDMSA

SEQ ID NO: 77590 - protein, 151 aa, Gossypium hirsutum
  unsure (1)..(151): unsure at all Xaa locations
  Clone ID: LIB3582-041-P1-K1-D9.pep
MVSDASKKKAAQKKAAAAAKRGGKAAASSKAAAAATAENGVDNASDKVSMLQISDRTCTGVLCSHPLSRDIRIESLSVTFHGHDLIVDSTLELNYGRRYGLLGLNGCGKSTLLTAIGLRELXISEHMDIYHLTREXEASDMSALXAVISCD

SEQ ID NO: 77591 - protein, 74 aa, Gossypium hirsutum
  Clone ID: LIB3493-006-P1-M1-F12.pep
MVSDASKKKAAQKKAAAAAKRGGKAAAAAASSKAAAAATAENGVDKVSDKVSMLQISDRTCNRVLCSHPLSRDI

SEQ ID NO: 77592 - protein, 229 aa, Gossypium hirsutum
  Clone ID: GOSHI-09MAY01-C23914_1.pep
GFKKGEPDRWEFANVGFLRGKFGLQEEVEGLKRDKNVLMQELVRLRQQQQATDNQLQAYGQSVQMMEQRQQQMMSFLAKVMQTPGFLNQLLQQQNESNRQLTGANKKRRLHRQDEENLTGENGAVSPNGQTVKFQPLHNEHQMMEVNTSPRREHGAPPSSALHSSSSSSEISEVTLPEVSPASWRSYLQAESGVPDSSLSTAAAQLTTETSVHKSQKDAIFRSVPQMLG

SEQ ID NO: 77593 - protein, 121 aa, Gossypium hirsutum
  unsure (1)..(121): unsure at all Xaa locations
  Clone ID: GOSHI-09MAY01-C23594_5.pep
ELIPKLDLAKKHISSQLHVNLPDIEGRPLVGTGLHLERTRXFLVVLGHGSGPLLLFVYLLVSTPLLYDFYNYRPNEPQYSVLLGDFLQCVAQCGALIFFVGMKNSMPKRQLRRKAPKQKAT

SEQ ID NO: 77594 - protein, 177 aa, Gossypium hirsutum
  Clone ID: GOSHI-09MAY01-C23594_3.pep
MGFASFAGRVFFASIFILSAWQMFNEFGVDGGPAAKELIPKLDLAKKHISSQLHVNLPDIEVRQLVATAIILKGLGAILFVFGHGFGALLLFVYLLVSTPLLYDFYNYRPNEPQYSVLLGDFLQCVAQCGALIFFVGMKNSMPKRQLRREAPEHISYLDVIKEVKFWHSPVIPCRSI

SEQ ID NO: 77595 - protein, 242 aa, Gossypium hirsutum
  unsure (1)..(242): unsure at all Xaa locations
  Clone ID: GOSHI-09MAY01-C23594_2.pep
MEFWGIEVKAGQPIKTDPGASHVIHLSQATLGESKNKAESVPLYVNVNGKKLVLGTLSHQNCPQLCFDLVFEQGFELSHNWKNGSVYFLGYRTFVPEEGSDDEFDSEEESSEDEELPVAAENGKAKTDAKTANAGKPDAVKQAVKITEPSDNKKNEDDDDDSDSEEXGSGSDDGDDVVAVDESSDDEDEETPKKVESSKKRPAEAATPVSAKNAKPAATPQKTDGXKGGHTATPHPSKQAGK

SEQ ID NO: 77596 - protein, 101 aa, Gossypium hirsutum
  Clone ID: LIB3828-014-Q1-K6-F3.pep
FSDATKTLVLSLVFHHPHQWSSGVTHSFFYLSLFDFMFMFLLLFEALIFFLKNSNEMMLAFPWVLFELLSFNGKLVFVAVFDWVLGLLLSTLIASVAGFII

SEQ ID NO: 77597 - protein, 192 aa, Gossypium hirsutum
  unsure (1)..(192): unsure at all Xaa locations
  Clone ID: LIB3582-040-P1-K1-D12.pep
MWCINFLCGDEELDAKEATKEEGPESKKLLRCIQRRLYLRHGHVFISIWVNYLGYKTFVPEEGSDDEYDSEEESSEDEELAVAAENXKAKTDAKTAKANAGKPDAVKQAVKIAEPSNNKKNEDDDDDXDSEDGSGSDDEDDSXDEDEEMPVDESSDEDEETPKKVESSKKRPAEAATPVSAKKAKPVISGLY

SEQ ID NO: 77598 - protein, 170 aa, Gossypium hirsutum
  Clone ID: uC-gsronu33B150a09b1.pep
IYCPQLCFDLVFEQGFELSHNWKNGSVYFLGYKAFVPEEGSDEEFDSEEESSEDEELPVAAENGKAKTDAKTAKANAGKPDAVKQAVKIAEPSNNKKNEDDDDDSDSEDGSGSDDEDDSEDEDEEMSVDESSDEDEETPKKVESSKKRPAEAATPVSAKKAKPAATPQKT

SEQ ID NO: 77599 - protein, 79 aa, Gossypium hirsutum
  Clone ID: LIB3135-058-Q1-K1-H1.pep
MPELYHGFGALLLFVYLLVSTPLLYDFYNYRPNEPQYSVLLGDFLQCVAQCGALIFFVGMKNSMPKRQLRRKSPKQKAT

SEQ ID NO: 77600 - protein, 192 aa, Gossypium hirsutum
  Clone ID: GOSHI-09MAY01-C23514_1.pep
LLEYEKHKIHGGMLPHADTSVVEPNGVEAQAGSNQAPGSGRAKRDAAARAMRSWHSQRVLDNGEVCHPIIKDKTSSPTLKSDRQLKNFGLLKRKKPSTLDSGVRVSQLKATKSQRSFGRLDTAVVDVGAPADWVKINVQKTVDCYEVYALVPGLLREEVVSLPSRIDPPPTSAVVTLHGQLFVRVPFEAADV

SEQ ID NO: 77601 - protein, 164 aa, Gossypium hirsutum
  unsure (1)..(164): unsure at all Xaa locations
  Clone ID: LIB3825-009-Q1-K6-D4.pep
VRNGEVCHPIIKXKTSSPTLKSDRQLKNFGLLKRKKPSTLDSGVRVSQLKATKSQRSFGRLDTAVVDVGAPADWVKINVQKTVDCYEVYALVPGLLREEVHVQSDPAGRLVISGQPKELKNPWGVTPFKKVVSLPSRIDPHHTSAVVTLHGQLFVRVPFEAADV

SEQ ID NO: 77602 - protein, 520 aa, Gossypium hirsutum
  unsure (1)..(520): unsure at all Xaa locations
  Clone ID: GOSHI-09MAY01-C23504_1.pep
MGYCKAPCVFLLCLFISFCLPRQLLADEVDKNLTAQLFIDASEQSSRPIPQTLFGIFFEEINHAGAGGLWAELVSNRGFEAGGANIPSNIDPWSIIGDESSIIVSTDRSSCFERNKVALKMEVLCNSEGTHICPSGGVGIYNPWFWGMNIEQGKSYKIVFYVRSTGAIDISVSFTSSDGLQTLSSTNIKASASDVSNWTKMEVLLEAIGXTNRNSRLQLTTSKNGVVWFDQVSAMPLDTYKGHGFRNELAEMLADIKPRFIRFPGGCFVEGEWLRNAFRWKASVGPWEERPGHFGDVWMYWTDDGLGYFEFLQLAEDLGALPIWVFNNGISHNDQVDTSSVLPFVQEALDGIEFARGDASSTWGAVRAAMGHPDPFDLKYVAIGNEDCGKKNYRGNYLKFYDAIKRAYPDIEIITNCDGSSRPLDHPTDLYDFHVYTSANNLFSMSHKFDRTTRQGPKAFVSEYAVSGKDAGXGSLLAALAEAAFLIGXWEKNSGVVHMASYAPLFVNSNDRRWNPDAIV

SEQ ID NO: 77603 - protein, 117 aa, Gossypium hirsutum
  Clone ID: GOSHI-09MAY01-C23454_1.pep
GHEEKLPWYRGKEWSYLRGGLTTLDRDYGWINNIHHDIGTHVIHHLFPQIPHYHLVEATEAARPVLRKYYREPEQSGPLPFHLIGSLMRSLKNDHYVSDTGDVVNYQTDPELRKNAS

SEQ ID NO: 77604 - protein, 55 aa, Gossypium hirsutum
  Clone ID: LIB3146-055-Q1-K1-C2.pep
MAGHATCYREPEQSAPLPFHLIRSLMRSLKKEHYVSDTADVVYYQTDPELKKNAS

SEQ ID NO: 77605 - protein, 225 aa, Gossypium hirsutum
  Clone ID: GOSHI-09MAY01-C23474_1.pep
FQFEPSMAEAVVLDLAYSIIGKFSSLTLPETEPWLNVKDDLDDIRNAVSAIKAKLLDALVRSATSNFTAWLKKLEDALCDARNLLEELSFEVWRENLFCSGWPISFAIADMCARIQAIKKRLTSLESEFKIPFMAGTRQQGNFFVHKDEERSVNDFRGQLKEYLEYMLFDPPSQAVCWNWMKTMEKIHDTYPYKKMGYGMADPVHQSMSNGGKKRNLKFVSDDLR

SEQ ID NO: 77606 - protein, 134 aa, Gossypium hirsutum
  Clone ID: GOSHI-09MAY01-C23464_1.pep
MGSFFSSDSTPEKPSSSSEPSSVLTFHSSPRWQLHFNSVKETSQLMVIDFSASWCGPCKFMEPVLNGMAAKFTEVQFVKLDVDELPDVAQEFGVQGMPTFVLLKKGKEVDRVVGAQKNDLEKKIEKHRDLVAAT

SEQ ID NO: 77607 - protein, 197 aa, Gossypium hirsutum
  Clone ID: GOSHI-09MAY01-C23644_1.pep
RNKESDESIPASNIVSDKTSLHSQTPASRPLVPPGFTSTVLERNVGTKSSMHSHSSQVGSSEIDGNLSESKGSLLINGISDDLLGKHSKQCEEETLSEQRLESKNIHLLHNIKSVKAPNTPSALDIFNDTISKDSQIYKSSSLSEAFIAPGNGEVTELDSKKLVADKIVTGDQPGCCPFNSRLAFWNCCNSKWRWLH

SEQ ID NO: 77608 - protein, 84 aa, Gossypium hirsutum
  Clone ID: GOSHI-09MAY01-C23674_1.pep
KISSHSPIKVAGYAVGGGHVLHMVCDLTIAADNAIFGQTGPKVGSFDAGYGSYIMSRLEVGGNATPIFYGTEEGNRGENSIWGE

SEQ ID NO: 77609 - protein, 143 aa, Gossypium hirsutum
  Clone ID: LIB3149-035-Q1-K1-C8.pep
AFCSGGDQALRKADGYADFENFGRLNVLDLQVQIRRLPKPVIAMVAGYAVGGGHVLHMVCDLTIAADNAIFGQTGPKVGSFDAGYGSSIMSRLVGPKKAREMWFLARFYTASEAEKMGLVNAVVPLEKLEQETIKWCREILRN

SEQ ID NO: 77610 - protein, 136 aa, Gossypium hirsutum
  Clone ID: GOSHI-09MAY01-C23004_3.pep
VAWEHEQFSRLRVTAATLSELSVTPELLESTGGLFDTRQYVNETAIVRGVKLVAESLARHIYGHQGKNIQIFADESSLAVNPAYIRSWLDVLSQTPRVAPFLSKDDPSVMALKKELAGHVDEVNVQHETLEGFLLL

SEQ ID NO: 77611 - protein, 328 aa, Gossypium hirsutum
  Clone ID: GOSHI-09MAY01-C23004_2.pep
PRVRPRVRHYRWEVTATTGGYKFVIPTAEPKKVASPTMTNIQGWLSGLKTDGDANQLPTIAIVASYDTFGAAPALSVGSDSNGSGIVALLEISRLFSLLYSNPKTRGRYNLLFGLTSGGPYNYNGTQKWLRSFDQRLRESIDYAICLNSIGSWDNELWIHVSKPPENAYIKQIFEGLSNVAEELHLKVGLKHKKINISNPRVAWEHEQFSRLRVTAATLSELSAAPELLQGTGGLFDTRQFVNETAITRGVKLVAESLARHIYGHQGKNVQIFADGGSLAVNPAYIQSWLDLLSQTPRVAPFLSKNDPFVMALQKELADHTDEVNMQH

SEQ ID NO: 77612 - protein, 194 aa, Gossypium hirsutum
  unsure (1)..(194): unsure at all Xaa locations
  Clone ID: GOSHI-09MAY01-C23004_1.pep
WLDRPTRSVTAVTLSELCVTPXLLESTGGLFDTRQYVNETAIVRGVKLVAESLARHIYGHQGKNIQIFADESSLAVNPAYIRSWLDLLSQTPRVAPFLSKDDPFVMALKKELAGHVDEVNVQHETLEGIFTFYDSTSARLNIYQVASVTFDLLLLLVLGSYLIVLFSFLVITTRGLDDLISLFRRPPSRKVKTA

SEQ ID NO: 77613 - protein, 200 aa, Gossypium hirsutum
  unsure (1)..(200): unsure at all Xaa locations
  Clone ID: GOSHI-09MAY01-C23254_1.pep
MGKRKRARASRDEDEEDEXVQEEEGNHSSSNEKSLYEILGVEKAASQQEIKKAYYKLALRLHPDKNPGDEEAKEKFQQLQKVISILGDEEKRAVYDQTGCVDDTDLAGDVVENLKSFFRTMYKKVTDADIEEFEANYRGSDSEKKDLIDLYRKFKGNMNKLFCSMLCSDPKLDSHRFXDMLDEGVAARELXESAAYERWA

SEQ ID NO: 77614 - protein, 131 aa, Gossypium hirsutum
  Clone ID: GOSHI-09MAY01-C23274_1.pep
WMHRVLHDIKPLYKYPPASPHIYNKQNTLSPFAGLAFHPVDGILQAVPHVIALSIIPTHFTTHVGLLFLEAVWTANIHDCIHGKLWPVMGAGYHTIHHTTYRHNYGHYTIWMDWMLGTLRDPSDALAKKVT

SEQ ID NO: 77615 - protein, 81 aa, Gossypium hirsutum
  unsure (1)..(81): unsure at all Xaa locations
  Clone ID: LIB3147-023-Q1-K1-F9.pep
GSKHPIHPDGVMAIVMVICSVVNSVVPSTHYXXRNLDISIIILLLRERMHKAGALPAAAPDSTLYFQTRTGPIPLVFSCIN

SEQ ID NO: 77616 - protein, 92 aa, Gossypium hirsutum
  Clone ID: LIB3147-023-Q1-K1-F8.pep
KQFAISGLAFHPVDGILQAVPHVIALFIIPTHFTTHVGLLFLEAVWTANIHDCIHGKLWPVMGAGYHTIHHTTYRHNYGHYTIWMDWMLGTL

SEQ ID NO: 77617 - protein, 91 aa, Gossypium hirsutum
  Clone ID: GOSHI-09MAY01-C23214_1.pep
GEPQGFSPSQGFKTRARELNLGAPKKKFFVGKAGGVKFGSFKRGPPLFFFFFFFFFFFFFFFFFFFFFFFFFFFFFFFFFFFFFKNMTITY

SEQ ID NO: 77618 - protein, 222 aa, Gossypium hirsutum
  Clone ID: GOSHI-09MAY01-C98444_1.pep
PRVRTTPSSARHKRGCNCKKSNCLKKYCECFQGGVGCSINCRCEGCKNAFGRKDGSAIVETDGEPGEEEMDPSEKNALDKNFEKPDILNNEEQNPASALPTTPLQLCRPLVQLPFSSKSKPPRSFIAIGSSSALYTGQRYGKPSIIRPQNIIEKHFQTIAEDETPEILRGNSSPGTGIKTSSPNSKRISPPQCELGSTPGGQSGRKLILQSIPSFPSLTPKH

SEQ ID NO: 77619 - protein, 145 aa, Gossypium hirsutum
  Clone ID: uC-gsflnu33B019c12b1.pep
KNAFGRKDGSAIMETDGEPGEEETDPSEKNALDKNFEKPDILNNEEQNPASALPTTPLQLCRPLVQLPFSSKSKPPRSFIAIGSSSALYTGQRYGKPSIIRPQNIIEKHFQTIAEDETPEILRGNSSSGTGIKTSSPNSKRISSP

SEQ ID NO: 77620 - protein, 69 aa, Gossypium hirsutum
  Clone ID: GOSHI-09MAY01-C98114_1.pep
TECPCSWVVITIEDGEHPTVYERRMEPKGSCGKLSDGFGLADDGTVDQRRRMMVGWVGPEPSHMSAHGE

SEQ ID NO: 77621 - protein, 157 aa, Gossypium hirsutum
  Clone ID: GOSHI-09MAY01-C98384_1.pep
LTSQPNSSFVGASSLNYKGERQFSFLQSANSSHPGVSVCQPLVNANPSSSNGGISQKMLLNGLNRTVESNRALSLLSSQPAETREISLSPMMQSGSTSSLIPNLQYKGLGMEGEQVGTILATDQSANTDLHGNGVFRIGHPGSSASGTHHRLTFSWE

SEQ ID NO: 77622 - protein, 79 aa, Gossypium hirsutum
  Clone ID: GOSHI-09MAY01-C98364_1.pep
TLLCWIFPFFCKLCFYNCCKHAHASLTQNLKLNLQVYPRYSHSSCQLILGVSTNLMQASGFVTDPNFASVAEKRSQTYI

SEQ ID NO: 77623 - protein, 130 aa, Gossypium hirsutum
  unsure (1)..(130): unsure at all Xaa locations
  Clone ID: GOSHI-09MAY01-C98334_1.pep
SEEFFFFVGGLEQQARQVXKSGVGRCINCGSRADLVEYEKVLKLFFVPVWRWPGKDPLLHCNNCKLFFPEDLSFPPPKIDSSSAAVSDSLRCRFCDRLVEPEFSIHEPGEDVLWSKFHINRIMVPVSLEP

SEQ ID NO: 77624 - protein, 165 aa, Gossypium hirsutum
  Clone ID: GOSHI-09MAY01-C99814_1.pep
MSTVPYSLWAAILSWFTPTVFFVFLNLTIGSFYFTSTLSSGGPGSDAHRQYHPDDETYPKFVRSPSMLQRLKSINLSAYRSQEPVVASATTAYDSVSDVGDFHFSFQQQTPQQQRQPSFERSPSVLQRLKSINLYGYFSPEQPKAMEVTPIILQRSFRVRDLMKR

SEQ ID NO: 77625 - protein, 69 aa, Gossypium hirsutum
  Clone ID: GOSHI-09MAY01-C99684_1.pep
GVRAKQDQGIVTREELGNCLREVMIGERSGEIKSNASKWKRLAKRAVSVGGSSDRNIDEFIAKLLKPDQ

SEQ ID NO: 77626 - protein, 115 aa, Gossypium hirsutum
  Clone ID: AI055640.1.pep
SLRQEHLPSENMQDWAVTPACVPAPFQHPLNSRELFSQNWFTGEHQVPVRGGWAGSDGFSGQSQSIMGASNADQSFFGVLSHCNQFHSSSPYESMGSTGQVIPQRNNGMVTELRI

SEQ ID NO: 77627 - protein, 179 aa, Gossypium hirsutum
  Clone ID: LIB3829-014-Q6-K6-C11.pep
MGDGHFNGQFREQLQSSLLLEERQKRQNEVYMGQNMPQNIYSTGGRYLSLRQEHLPSENMQDWAVTPARMPAPFQHPLNSRELLSQNWFTGEHQVPVRGGWAGSDGFSGQSQSIMSASNADQSFFSVLSHCNQFHSSSPYVSMGSTGQFIPQRNNGMVRGGPSGIIGNSMQQAALPFDY

SEQ ID NO: 77628 - protein, 110 aa, Gossypium hirsutum
  Clone ID: GOSHI-09MAY01-C99394_1.pep
GCPVRKHIETAVDNTNAVVITYKGVHDHDMPVPKKRHGPSSAPLVAAAAPASMNNLQLAIADGEQKQVTSTKWSVGTEGELTGEAVDLGGEKAMESARTLLSIGFEIKPC

SEQ ID NO: 77629 - protein, 50 aa, Gossypium hirsutum
  unsure (1)..(50): unsure at all Xaa locations
  Clone ID: LIB3829-011-Q6-K6-B7.pep
AXHTKLXELGLKPHLLSDSLLDSLLNFAIEFKDRIDTKQIMPSISWKKMG

SEQ ID NO: 77630 - protein, 96 aa, Gossypium hirsutum
  Clone ID: LIB3829-015-Q1-N6-H8.pep
PPSLSQLIRWLAMKGTSCLSRWIFLRFVNGAAVLFTFHVKHGLYVPSKSKLGYESIERERVIFLGLLSRAFLVQEPLVSLFCIYLLIMDETYKHFL

SEQ ID NO: 77631 - protein, 316 aa, Gossypium hirsutum
  unsure (1)..(316): unsure at all Xaa locations
  Clone ID: GOSHI-09MAY01-C99254_1.pep
ILHIQGGQCGNQIGAKFWEVACAEHGIDSTGXYHGDSDLQLERINGYYNEPRCGRYVPRAALMDLEPGTMDGARSGPYGQIXRPDNFVFGQSGAGNNWAKGHYTESAELIDSVLDVGRKESECCVCLHGFXVCHSLGGGTGSGMGTLLISKITEEYPDRMMLTFSVFPSPXVSDTVVEPYNATLSVHQLVENADECMVLDNEALYDICFRTLKLTTPSCKNMLFLSGFHLIFNVDXTNDLFGLLVGAVGDLNHLISATMSGVTCCLRFPGQLNSDLRKLAVNLIPFPRLHFFMVGFAPLTSRGSQQYRALTVPELT

SEQ ID NO: 77632 - protein, 66 aa, Gossypium hirsutum
  Clone ID: GOSHI-09MAY01-C99234_1.pep
TYTDMAKLKISSTPHRSIKDEKHMGFFMLMHSDCFITSTWWWWWHLQLQRWDLLRWWSLTLLLTRS

SEQ ID NO: 77633 - protein, 129 aa, Gossypium hirsutum
  Clone ID: GOSHI-09MAY01-C94434_1.pep
MEALGWWLMLVGSLRLASVWFGFFDIWALRLAVFSNTTMSEVHGRTFGVWTLLTCTLCFLCAFNLENKPLYLVTFLSFIYAFGHFLTEYLFYQTMALSNLTTVGIFAGTSIIWMLLQWNSRQPTHVKRI

SEQ ID NO: 77634 - protein, 60 aa, Gossypium hirsutum
  Clone ID: GOSHI-09MAY01-C94424_1.pep
YVGETQRKRFVVPITVLNHPSFNDLLKRAEEEFGFNHPMGGLTIPCREDAFLNLTSRLQA

SEQ ID NO: 77635 - protein, 140 aa, Gossypium hirsutum
  Clone ID: GOSHI-09MAY01-C94124_1.pep
TPDLQISDDDLILSSVLSLGEKQSRTGYTVCVQHIPTALTFQSSGERSYFANQIKTLNRLKAKLLVVANEQGVSDVSSINTAAMMDMWQKETRRYMFHPSKLVRDVKTGLELPDLNSVLDGNIEALIVAHINTRQSNFTI

SEQ ID NO: 77636 - protein, 86 aa, Gossypium hirsutum
  Clone ID: GOSHI-09MAY01-C94034_1.pep
FHKGIPQLLGTIVTYKHRKKERRHIRSYFRRVNHRRPATNTQDVNAFNSSSVCSYQWNTNHKTPKMSYTFYYASLLLLLFSCFSLP

SEQ ID NO: 77637 - protein, 202 aa, Gossypium hirsutum
  unsure (1)..(202): unsure at all Xaa locations
  Clone ID: GOSHI-09MAY01-C94374_1.pep
ETEGTITAPWKQLLLNALESNSHLKHSSYFQLATVGCNGRPSNRTLVFRGFQESSDKFHINTDNRTHKIKKLKHCPFAEICWYFTDSWEQFRISGNSXMLLDGSNPDNFKLQQREKSWFASSVKSRLQYLGPNPGLPRISEHQSEEEVRLDPSIGPVAAFCLLVLDPDQVDYLNLKNNERVKFVSTLDMNGVKNWTSERINP

SEQ ID NO: 77638 - protein, 152 aa, Gossypium hirsutum
  unsure (1)..(152): unsure at all Xaa locations
  Clone ID: uC-gsflnu33B084f05b1.pep
FFRPNSHLKHSSYFQLATVGCNGRPSNRTLVFRGFQESSDKFHINTDNRTHKEELKHCPFAEICWYFTDSWEQFRISGRVDVIDGSNPDNFKLQQREKSWFASSVKSRLQYLGPNPGLPRISEHQSEEEVRLDPSIXPVAAFWMLVLDPDQV

SEQ ID NO: 77639 - protein, 124 aa, Gossypium hirsutum
  Clone ID: GOSHI-09MAY01-C94364_1.pep
GPGNSDSDEDLPKTSSKTRSSMIFSHRTTASPNARRGSTLKTTVSSESKVVSDPMPYLGPGNSGSDEDLPESSSKAHSSTGVSHKKNDSSSNSRRGSTLKTTVSFVASGSFRLWWGEEFLLKEL

SEQ ID NO: 77640 - protein, 143 aa, Gossypium hirsutum
  Clone ID: GOSHI-09MAY01-C95884_1.pep
CQAKELLDHLERVLANEPVSVKSGQHVVEVKPQGVNKGLVAEHLLPPMRQKGKLPDFVLCIGDDRSDEDMFEVIMRAKTSPRLSPVAEVFACTVGQKPSKAKYYVEDRSEILRMLQALANASEQAAKTAPTPASCGGLIINRE

SEQ ID NO: 77641 - protein, 95 aa, Gossypium hirsutum
  Clone ID: LIB3825-034-Q6-N6-C5.pep
RQKGKLPDFVLCIGDDRSDEDMFEVIMRAKTSPRLSPVAEVFACTVGQKPSKAKYYVEDRSEILRMLQALANASEQAAKTAPTPASCGGLIINRE

SEQ ID NO: 77642 - protein, 189 aa, Gossypium hirsutum
  Clone ID: LIB3829-012-Q6-K6-E3.pep
QRGLEEEVVFKLLCQADKVGSLIGKGGSVVRAMQNDTGAAIKIADTSHDSDERIVVISAREHAEQRYSPAQDAVVRVQSRIAEIGFEPGAPIVARLLVPLQQVGYLLGKGGHIVSEMRRATGANIRVSLKEQLSKSAGLQNDEVVQVIGSLQSVQDALFHITGRLRESILPMKPPFPGINPPPYLPPYP

SEQ ID NO: 77643 - protein, 182 aa, Gossypium hirsutum
  unsure (1)..(182): unsure at all Xaa locations
  Clone ID: LIB3828-006-Q1-K6-C12.pep
FFKXEGKFCHHVHHGVINLVIMVQXXXXXXXXXXXXXXXXXXXXXXXXXXXXXXXXXXXXXXXXXXXXXXXXXXXXXXXXXXXXXXXXXXXXXXXXXXXXXXXXXXIINSRVVTRPQYRXDDNAVAHNRGGLEEEVVFKLLCQADKVGSLIEKGGSVVWAMQNDTGAQSRLLILLMIQMSGL

SEQ ID NO: 77644 - protein, 143 aa, Gossypium hirsutum
  Clone ID: GOSHI-09MAY01-C95004_1.pep
SSPPVSPMAQSLSRSLGSASINEMVASLRNLQLGKVKSWKTQVGCCSPSSPSSFGSPRTAMIRPGFCSLPSTPTRNLTRPGISYPDSWDKVCEEEPVMERVESGRDLRAKMFEKLSKENSLERVNPDQSSGGPDLNWVSDLVN

SEQ ID NO: 77645 - protein, 70 aa, Gossypium hirsutum
  Clone ID: GOSHI-09MAY01-C95384_1.pep
STSPNQAMEVDTSVAENGGINNGVHENNGQEAKEDGEDHANGEDGVLPSEDHPNTENETQVSTNDENTVT

SEQ ID NO: 77646 - protein, 224 aa, Gossypium hirsutum
  unsure (1)..(224): unsure at all Xaa locations
  Clone ID: GOSHI-09MAY01-C96994_1.pep
HASGSPSHGKNKNYRCLSPSSKAQAIARGQKELMEMVSRMPESCFELTLKDLVEQQQPVVVEPRQKSVAEGRGTIDQHTYNKEKGKKKMKKNPKPQFIXSGSTDNGGLLLKMVFPFSLGSKCKNKKKKNNESNTNHNSKVSAKPTVSDESGRNVDKEWWKKRSGSSESEGGGSNINSGSSQSSRSSSTGSSSCGNINNTSHRYVITENFSYLCAFKCWICLNDK

SEQ ID NO: 77647 - protein, 201 aa, Gossypium hirsutum
  Clone ID: GOSHI-09MAY01-C96484_1.pep
AANGCDLEYVAYEFFTQVFVLYEEEIANSKAQVTAIHLIIGALQRMNVFSVENRDTLTHKTTGYSARLLKKPDQCRAVYACSHLFWVDGQDGIRDGERVLLCLKRALRIANAAQQMASIARDSSGPVTLFVEILNKYLYYFEKGNKQITAAAIQHLIELINTEMQGDSATSDAFLASTLRYIQFQKQRGGVMGAKFESIKL

SEQ ID NO: 77648 - protein, 77 aa, Gossypium hirsutum
  unsure (1)..(77): unsure at all Xaa locations
  Clone ID: LIB3825-032-Q6-N6-E1.pep
AQVTAIHLIIGTLXRMNVFGVENRDTLTHKATGYSARLLKKADQCRAIYACSHLFWVDDQDGIKDGERSGLKTCPLV

SEQ ID NO: 77649 - protein, 75 aa, Gossypium hirsutum
  Clone ID: LIB3829-030-Q6-N6-H12.pep
VKILNKYFFFFEKGNNQIPSSPIQGLIELINTEMQSDSPNPDSVADAFLASPLRYIQFQKQKGGVMGEKFESIKL

SEQ ID NO: 77650 - protein, 255 aa, Gossypium hirsutum
  unsure (1)..(255): unsure at all Xaa locations
  Clone ID: GOSHI-09MAY01-C96724_1.pep
CLIMNCTVGVVRTRLEGPKQCSIHVLPSEMGQNLKALLESEVGCDITFQVGDEAFKAHKLILAARSPVFRAQFFGLVGDPNIDKVVVKDVEPSVFKAMLLFIYSDKFPDIQEITGSGSTXMSTNMVQHLLAAADLYNLDRLKGLSEAXLCEKLNAGTVATTLALAEQHHCSQLKAVCLKFAATPANLGAVMQSEGFRHLEESCPSLLSELLKAFASVEECASMLSSKKRSGSSVYRIDLAAEVHVAEPVNPKTGV

SEQ ID NO: 77651 - protein, 164 aa, Gossypium hirsutum
  Clone ID: GOSHI-09MAY01-C96664_1.pep
KRNLFFLFCFFDFLDLPVLQCFFFVFKKRKTPIYNRFSLLKSPKKIPPFQNTIRFPSNPSSKIQSVFPSFEISKILPQKVISFGLYSRITTFLYFYLDRSSVVFCFVGCMWLSVCRCQKASDAWVAGDRRAVAVGVRRRWQQQTCGWGFFLCLKVGVVLGHSGL

SEQ ID NO: 77652 - protein, 230 aa, Gossypium hirsutum
  Clone ID: GOSHI-09MAY01-C96134_1.pep
TSLLCDNILGLAYPCLVAAPRLRVSRLFSYLSAFTGNPSPPRSFSSLPKSATMPGVDPPAVEWPAKKVRDTFIKFFEGKNHVYWNSSPVVPHNDPTLLFANAGMNQYKPIFLGTVDPNTAMSKLTRACNTQKCIRAGGKHNDLDDVGKDTYHHTFFEMLGNWSFGDYFKKEAIEWAWELLTKVYGLPTDRIYATYFGGDASSGLPPDNEARDIWLKFLPPGRVLPFGCKD

SEQ ID NO: 77653 - protein, 180 aa, Gossypium hirsutum
  Clone ID: GOSHI-09MAY01-C96014_1.pep
SRSTTTLLVFAAIILILYKEWIGKALSAGLLLVVANMIRARQERLKDKQKEIVVCTGSDHTLSTRENIVSAQYGFLTVREIIKEANVTILKLHSVLVSRAHKHANTVMLAMIGLAIIFAVIPFKYLIIAVVFHSMITTSPLAKHMVNNQGGDRDRRLKEWWESIPPTPIRVINEAPVSPK

SEQ ID NO: 77654 - protein, 109 aa, Gossypium hirsutum
  unsure (1)..(109): unsure at all Xaa locations
  Clone ID: GOSHI-09MAY01-C97994_1.pep
PGKVEAAAGGLKRIGMAFIVATTMVFGGAALMFGIAASKLELHSQSDDVRTKGKDLVQPKFDMIREQLVPLRTWAENTSKKWHLEREXPIKDKPIIKELSKTLGAKTNN

SEQ ID NO: 77655 - protein, 69 aa, Gossypium hirsutum
  Clone ID: GOSHI-09MAY01-C97764_1.pep
DIIVRSYFKCYTGWPQCRVSSILNFFIFFLKLLFLFQIGPKLPQMLGLERLDLVMVCLCLVCFECDLFN

SEQ ID NO: 77656 - protein, 231 aa, Gossypium hirsutum
  Clone ID: GOSHI-09MAY01-C90574_1.pep
TGNEGELEKNPQSTISSSQVFFIHVCCGLALVAGFWVAHHVYSLNLVFDPTKTLCLIWAIEFPVVILLFSCCRQKPEKCSYFTAIARGLLGLPIGALLNALGALALGAPVGLQYLEKTVNWSLLMSSFTFVPTACVYGSSWTDWCRIFACTKPNGPLEFMLCLPAHGAVIGAWFGAWPMPLDWERPWQDWPICVSYGAMAGYVVGMVGSFGLALIMHTGRKQLKQSKWYSF

SEQ ID NO: 77657 - protein, 248 aa, Gossypium hirsutum
  unsure (1)..(248): unsure at all Xaa locations
  Clone ID: GOSHI-09MAY01-C90514_1.pep
VFHCVCAPLYRXSPNFFLADQLTSQVQAFRSLEFYICYYGWGXSKETNTCEESEVYKVLYIVVAIIPYWFLFVQCLRRLVEEKDTAHGLNGLKYFSTITAVAIRTIYSHQKQKTKTWLVLAAATSGIATMASTYWDIVIDWGLLNRNSSNPWLRDKLVVPHKGVYYAAMVLNCVLRLAWTQQVLGIQTVPFLHKTALVAVVASLEIIRRGIWNFFRLENEHLNNVGKYRAFKSVPLPFYYEYSADKST

SEQ ID NO: 77658 - protein, 272 aa, Gossypium hirsutum
  unsure (1)..(272): unsure at all Xaa locations
  Clone ID: GOSHI-09MAY01-C90474_1.pep
EKRKREKFNLKEKVSNIKYGLTLRRRLFGRKIQSMVDTYGAYDGPVKDILSGPTVINFSERHENPPGGPPSPASVCSSTNEEFWRQVDYPSPISTPDVTLGEENAVQQVFKEISSNWREGRRQLNELESDGVDDVSIEEESTESDIGDIEDHPEGYVRGLPVASGLYGGIXDKSLXSRWEPVSEAXLVMLSFXTSWKNSFRKLGAGIVEEDKKVDRKVLLDLLNEALSTILGPPVTLSRFRRKLVGSSILPHPRGRKLLNSVWGIIQTNLYP

SEQ ID NO: 77659 - protein, 328 aa, Gossypium hirsutum
  Clone ID: GOSHI-09MAY01-C90264_1.pep
MATRVLSSSPKLLNNLRSFIKPLNSASAASASPLNFDEKPELSTVEKQHPIATTLHQPTTTLDLDDHQKLFASVPTLKLLRSSVNLGLAANETFVDFGMWVMNSRLMETPLLRDIVLKTVKHTFFEHFCAGETTTEAGECVRKIQEAGLRGMLVYAVEHTSDNAGCDRNLEGFSQSVEFAKSLPPSSVSFVIAKITAICPISLLKRMSDLLRWQYKDSSLNLPWKLNTLPIFTDSSPLYHTLQRPQPLTPQEESDLELAHQRLLKLCQKCTQYNVPLTIDAEDTSIQPAIDYFTYSSAIMYNKDDNPIVYATMQAYLKDARERLFNTA

SEQ ID NO: 77660 - protein, 215 aa, Gossypium hirsutum
  Clone ID: GOSHI-09MAY01-C91844_1.pep
LCKEIPNGRSTWQQHDENKELITLKDKILKVDTNSQTRWDNCNGRLKYWLDQWVDTKSKDVEVEDIDSVWTSNRKPTRLKTFSRQYHCDAEGVDSPVRVQRRRSFHGKQSSLGEDSSFITSPVVPTYMAATQSTKAKVRSMSSPKLRPGTCDTQSESYSPYKNKLCLISSVTSKPNAYEQRSPTLKGIKSKQTLKDLSFDSKCSLPNWVQKSPFK

SEQ ID NO: 77661 - protein, 71 aa, Gossypium hirsutum
  Clone ID: GOSHI-09MAY01-C91834_1.pep
TQYLIFTRKGRMVLRDADPPLDCSWLVTKSKHIPLGCKFRARCPIVCQKQCQQQLGIYGQLTHSCTVVFLN

SEQ ID NO: 77662 - protein, 60 aa, Gossypium hirsutum
  Clone ID: GOSHI-09MAY01-C91504_1.pep
SFSQFYMDGGLNPASECLLEKLVLTESQIMEQDALVPEPYDMMKFLFFMVKKYSMMFLYY

SEQ ID NO: 77663 - protein, 84 aa, Gossypium hirsutum
  Clone ID: GOSHI-09MAY01-C91394_1.pep
MADQAQMKKDEKMSQTSMNSQSSDQNASYTSQASNLLQQTGEQMKNMAQGAAEAVKNTLGMNNATNNASNAPDTNHPSNPFSRG

SEQ ID NO: 77664 - protein, 115 aa, Gossypium hirsutum
  Clone ID: GOSHI-09MAY01-C91364_1.pep
YVMGPFVIHKQIQPAFCSKISNLEDKVAGNSSSSGDSSRYPNHGCTITARRLASSNTTDSTSNRTANRAFNCTNTRGCTCNFTNVSNVTITVGCSGNNGGGGGLDVSRNHHEKGN

SEQ ID NO: 77665 - protein, 115 aa, Gossypium hirsutum
  unsure (1)..(115): unsure at all Xaa locations
  Clone ID: GOSHI-09MAY01-C91324_1.pep
LFCPISFFQWVLSVQSVEPFVYDVNFAGAVGDGESDDTEAFKXAWNVVCCSHVPLGIFRVPYGQKFLVQPLTFNGECRPKNITIQIDGILIAPSDPSSWKCNDANCNNWITFQHF

SEQ ID NO: 77666 - protein, 114 aa, Gossypium hirsutum
  Clone ID: GOSHI-09MAY01-C91264_1.pep
WLPNSSNNSSFGDEMSARGVHVPKNGTANISSEESPKSRECYDVLLYFGIVDFFQNYSVIKRIEHAYKSLQFDRKMIAAVNPKAYSSRFQEFISDIFKADDTPSLPTELTNGCR

SEQ ID NO: 77667 - protein, 72 aa, Gossypium hirsutum
  Clone ID: GOSHI-09MAY01-C91204_1.pep
AIQLDIQDHNMDHNTGICDQYYAQLCYELSLVSNLLSHLIYKLIYILAFINAKISKILSQTLTMTATMPATE

SEQ ID NO: 77668 - protein, 56 aa, Gossypium hirsutum
  Clone ID: GOSHI-09MAY01-C92904_1.pep
MGPTAVEGRKCESPSHKFKGMCMNRDNCAIVCQTEGYEDGKCEGFRRRCICIKPCF

SEQ ID NO: 77669 - protein, 48 aa, Gossypium hirsutum
  Clone ID: GOSHI-09MAY01-C92554_1.pep
DAQRLVKRASYMEFNDVLKSTRTQLERELSLEDVSSVKDLPAYNLLRR

SEQ ID NO: 77670 - protein, 106 aa, Gossypium hirsutum
  Clone ID: GOSHI-09MAY01-C92544_1.pep
QGISPSHYNSSLWNDPKAKGCLGQEQPLLGSSYPGGVPQALGVLKRVLSTVRKKVKLLDITVLSLLRKDGHPSVYGFGGSTGLDCSHWCLAGVPDTWNEILFNLIF

SEQ ID NO: 77671 - protein, 257 aa, Gossypium hirsutum
  unsure (1)..(257): unsure at all Xaa locations
  Clone ID: GOSHI-09MAY01-C92664_1.pep
CSSTRPPTRPPARSVKEEIEACGGEKAVEWKRIMERSFERMDMEVQQSTVDSVENPNCRCELQTPQCDAVGSTAVVAVVTQDKIIVANCGDSRAVLCQNGVALPLSDDHKPDRPDELLRIEEAGGRVIYWDGARVLGVLAMSRAIGDNYLKPFVIPEPEVTITERSSKDECLILGSDGLWDVVTNETACGVARMCXRAHKPASPPMAPDSDAVVRGAGVESSDKACWDASILLTKLALARHSTDNVSVVVVDLKENQ

SEQ ID NO: 77672 - protein, 92 aa, Gossypium hirsutum
  Clone ID: GOSHI-09MAY01-C92044_1.pep
MRLNESDLLREYTGQRYEIEMPMTSWVGKIPEYPHPVASSISSRVMVELGMVTAVITAAAVLVVGFLAAAVFAVTSFKFKCITLHIESMFMY

SEQ ID NO: 77673 - protein, 177 aa, Gossypium hirsutum
  Clone ID: GOSHI-09MAY01-C92004_1.pep
IASDLELPTRPPTRPPTRPPRVRRCQARPPLPSFLFFIYLLLYCNGKQKERKKESEDRMGKKTFRIDFCYSISLPPLQIQFNGLYSQKKIQKSPLFVFSFSKFFFRFLPFFLPSLLSLGRGLWEVSVLFVGLRSVCVLQVSYEDVARLGLARRMDGGVWAWLGSEAAEASVRIEAKG

SEQ ID NO: 77674 - protein, 114 aa, Gossypium hirsutum
  Clone ID: GOSHI-09MAY01-C92294_1.pep
TSVQLCLPKADDLPLDLQPRHFLPSNFSPLQFSQALVDLHTQLCTRFMPYGSNILIFREYFHLNKWSIEHLTGINKWSIEHLNPDPWQMTYLPPHFLALQPYSSNFCSGSIFDP

SEQ ID NO: 77675 - protein, 351 aa, Gossypium hirsutum
  unsure (1)..(351): unsure at all Xaa locations
  Clone ID: GOSHI-09MAY01-C93984_1.pep
APFVHACLKXQWGSQVKIHRLLLESRFRTRKKEEADLFFVPAYVKCVRMLGGLNDKEINQTYVKVLSQMPYFRRSGGRDHIFVFPSGAGAHLFRSWSTYINRSIILTPEGDRTDKKDTSAFNTWKDIIVPGNVDDGMTKTGATVFQPLPLSKRKYLANYLGRAQKKVGRLKLIELAKQYPDKLECPELQFSGPNKLGRVEYFQHLGNSKFCLAPRGESSWTLRFYESFFVECVPVILSEXVELPFQNVIDYTEISIKWPSTSIGPELLDYLASIPDEVIEQIIGRGRQVRCLWVYAPDSEPCSTMRALMWELQRKVRQFHQSAETFWLHNGSVVNRNLVEFAKWKPPMPLP

SEQ ID NO: 77676 - protein, 297 aa, Gossypium hirsutum
  Clone ID: GOSHI-09MAY01-C93514_1.pep
MVDLDWKAKMVSSDIPNKSPKLSNKLQVSIPTPFRFSNISSPLSTSASASSTYDYYLRLPELRKLWETKEFPAWQNERVLKPALHALEITFRFISIVLSDPRSYSNRREWKRRLESLTTSQIELIAMLCEEENEDKTAAGTAPIVDLTSSNGVLARESSSAEVWKLHGETTVVSRTSKDSLLPRLATWQKSEDAAQKILYTIECEMRRCPYTLGLGEPNLSGKPSLDYDAVCKPNDIHALKRSPYDHCIENHENATLFTTHQILESWIQTAKQVLKRIASRIDAEIFETAASDCYLM

SEQ ID NO: 77677 - protein, 264 aa, Gossypium hirsutum
  Clone ID: GOSHI-09MAY01-C93494_1.pep
MWGVCYPKSVSHFLEMGSAIKHFVELVEQAGTVFEVANTIRGLVENHWEFPKGIDQNVNNLKRKRDELNGQKEDVESRIKSELRPRKKVKKEVDLWIENVKRINGEIPNLESKVRGSSFFPRGFLVKNVRKKEEEVEELLEKGRFSDDLVVNDLSWIGQVLPTPSLVVETVKRKKNEIMQHFRNDEVQKIGVYGMPGVGKTSAVTLVNNELLKGEIEFKIIVWVTVARNCSVIELQNKIAKAMNVSISEDEDETFKSRDCCLKF

SEQ ID NO: 77678 - protein, 66 aa, Gossypium hirsutum
  Clone ID: GOSHI-09MAY01-C93484_1.pep
CILKVVLCRNLVTKVCFLFLIPELLKCWSQLKKKNMPARHCPTCDQWFLTIPFANVMKKKERYMQS

SEQ ID NO: 77679 - protein, 72 aa, Gossypium hirsutum
  Clone ID: GOSHI-09MAY01-C93454_1.pep
YLWCWLFGASFPMSISNISMTTCRRPKTPVKFLKLALLAYGYPNIQHCRVQLPIIESKPETSFYSTFYYCVL

SEQ ID NO: 77680 - protein, 109 aa, Gossypium hirsutum
  unsure (1)..(109): unsure at all Xaa locations
  Clone ID: GOSHI-09MAY01-C93404_1.pep
AAWGATSGVLGVLYPLLMAAFLGVGDGVLNTQLSALLALLFKHDTEGAFAQLKVWQSSAIAVVFFLSPVVXLHTMVEIMAGAISISLVSFLFLTLKVEKAFSSHQVTNM

SEQ ID NO: 77681 - protein, 109 aa, Gossypium hirsutum
  Clone ID: LIB3825-008-Q1-N6-E12.pep
NAWGATSGVLGVINPLLMAAFLGGGDGVLNTQHSALLARLFKHDPEGAFAQLKVWQSSAIAVVFFLSPVVTLQPMVEITAGAISISLVSFKSPPPPQEKAFSSQQVTNM

SEQ ID NO: 77682 - protein, 182 aa, Gossypium hirsutum
  unsure (1)..(182): unsure at all Xaa locations
  Clone ID: GOSHI-09MAY01-C93764_1.pep
MRWQPQLGRMGMKVEEAGKKRLFAIGSPLYQALVRPIHDXVMTVLTKLRMDGTYNQTQPLQYLRGKKKXFSFDLKAAIDSLPVILTSCMIAGFFGNPFPFATSWAFILTSVVFQLPYSLYNQGYRSSVVTFTKGQSLDFXSSWPLFTLTHHTLVWIAAERVYGTTKLCDYAILGDGDRRREG

SEQ ID NO: 77683 - protein, 337 aa, Gossypium hirsutum
  unsure (1)..(337): unsure at all Xaa locations
  Clone ID: GOSHI-09MAY01-C93734_1.pep
IIDMASKASFADQQKQVQENIHNQIKSLCTVMDAILLDVNEPQESQSKATPSRSGLSFAIGRNGPTNNHPDVPKTRPLKRTELSQRLKDSIGYTLDVKQXIPHSEAGQGVFLNGEATVGSVIAIYPGVIYSPAQYRYMPGYPRVDAQNTYLITRYDGTVINAQPWGFGGETRELWDGSKMLDAKLNTVATEKGSDRLWKMLSKPLESSRVGNGEVLERRNPLALAHFANHPAKDTVPNVMICPYDFPLTEKDMRAYIPNLSFGNAEEVNMRRFGSFWFRWGSRNSESNGPVLKTLVLVATTALCDEEVLLNYRLSNSKRRPSWYTPVDEEEDQRRWS

SEQ ID NO: 77684 - protein, 119 aa, Gossypium hirsutum
  Clone ID: GOSHI-09MAY01-C93684_1.pep
MGGKCPSRKVKKRRFSHKTARRDKFLLKGDDLVYDELQKSDTEKKPLPRDEDLPGMGQYYCLHCDRYFANSTVRDEHFKTKRHKKRLKQMSGPAPHTQLDAELAAGMGMPDNGLALMSM

SEQ ID NO: 77685 - protein, 62 aa, Gossypium hirsutum
  Clone ID: GOSHI-09MAY01-C93644_1.pep
QPQNSSSHYSFDLNLQSLLTPSHSSPLYSDPQHKILDFTFMERFGTRNFCRDGKNVDWKRWF

SEQ ID NO: 77686 - protein, 203 aa, Gossypium hirsutum
  Clone ID: GOSHI-09MAY01-C93624_1.pep
MEMRIWVLVVGMGMGWFHVWRKGSGHETWVRVERLEKGLCGKSRPVFFKRVATIVTKLFHIVEPDVAVFGKKDYQQWRIIQRMVRDLDFAIEIVGSEITRDSDGLALSSRNVHLSPEERQKALSISRSLSKAKAAAKEGQVKCRELKDSAILTITQAGGRIDYAEIVDQENLKSVEEIKGPVVFCIAAWFGKVRLIDNMEIDI

SEQ ID NO: 77687 - protein, 97 aa, Gossypium hirsutum
  unsure (1)..(97): unsure at all Xaa locations
  Clone ID: LIB3828-021-Q1-N6-E1.pep
SCLNVLFKCTKKKLLEYTNLHAYMRDVYQIPKVAATCNFLEIMDGYYRXVFPLNPGSIRPVMPSVCEHEFLCRPSEREAMSSVGKRVQHVLTCNVEP

SEQ ID NO: 77688 - protein, 166 aa, Gossypium hirsutum
  Clone ID: uC-gsflnu33B011g06b1.pep
KNPQTGLYALFRVLSQRGIAKKIQVIAKASVPIIKFVEKKSGAAFDISFDVDNGPKAAEFIKEAVLKWPQLRPLCLILKVFLQQRDLNEVYSSGIGSYALLAMIVAMLQKVTAVVDAALEAHLHCPQLYLYSIDERVVPYNTVPLLCCQNPTDVICSSSLSIDDQL

SEQ ID NO: 77689 - protein, 93 aa, Gossypium hirsutum
  Clone ID: GOSHI-09MAY01-C93014_1.pep
SGRGKLGLLHERYQKCVFHYVLKHANDAAYYLAREGLKRYDTYLFGGFPLFGQKAIEADLGHLCSLCPYGEDSASLVKKSKFQLKGLFQVWCL

SEQ ID NO: 77690 - protein, 66 aa, Gossypium hirsutum
  Clone ID: GOSHI-09MAY01-C93224_1.pep
SIPGSISFHQYSVLDLDHFLSELLKRSYEVLLRAVTCTGVLYETWTFVRNAHGGGDCPQERNRKKR

SEQ ID NO: 77691 - protein, 196 aa, Gossypium hirsutum
  unsure (1)..(196): unsure at all Xaa locations
  Clone ID: GOSHI-09MAY01-C88444_1.pep
MLSSSSSSYLQEALICKASRFDVNGDHILFGGKMSPLSKTDLQRVFEKLDKNGDGFVSLEELNWLLXRTGSVQFSLEELEPLVGKPCLNLDEFLFFYESISNPLAHGGDEEEEEELVIHGGGEEEDSDLAKAFKVFDLNGDGLGGCEELEYVLGRLGMWGENSGKDCRSMIWYYDTNSDGMVDFQEFKNMMLHSRS

SEQ ID NO: 77692 - protein, 81 aa, Gossypium hirsutum
  Clone ID: GOSHI-09MAY01-C88784_1.pep
MREVAFLNQLPAEATCSSGKSPHDVANYVQRILAATLGFECPNFPRKDKYRVLAGNDGTVSCTSLVDKVKKVVSTFKPFLQ

SEQ ID NO: 77693 - protein, 170 aa, Gossypium hirsutum
  unsure (1)..(170): unsure at all Xaa locations
  Clone ID: GOSHI-09MAY01-C88714_1.pep
FNCLPVAALIDEKILCMHGGLSPDLKTLDQIRSISRPVDVPDQGLLCDLLWADPDKDLDGWGEFDWGAPYPSGADIGAEFLNTHDXLDLICRAHQVVEDGYESFAKRLSVTXFSAPIYCGEFDNAGAMMSVDDSLTCSFQILKSLEKKGKGGFGNNTFRPGTPPHKGGKR

SEQ ID NO: 77694 - protein, 235 aa, Gossypium hirsutum
  Clone ID: GOSHI-09MAY01-C88154_1.pep
MVEGQVEKHEPMNENPDDELSSTIVELNEACPKSPQDLKSENKNYGHEELEVTRLDSVTEKEIPNPEIKHHENQFRTDWEIAAASEKLAECQETILNLGKQLKALASTKEAVLFDNIVSSPTLTAIPTPPRKKMMSQRSSLLDQMIAEDNAETNDLASPKSKEKGNPTSSFISNRTVAPPDSIAGLSGEKIQEDNAAVKSLAIVPSKKQGGSLWKKLLWRKTKSKSKKTSLPPAS

SEQ ID NO: 77695 - protein, 205 aa, Gossypium hirsutum
  Clone ID: GOSHI-09MAY01-C88394_1.pep
EVPVHNIKNRFNLLVLVGPWFDLPWLVFLSKSPILREVFRNLDLLAVSKLIEKKLIALGSPPSSLLWELKWRPIVENAHQIFKVIAEFGSFAKYIWSFVTPKPIVSRFRYPRQVPVKTPKADVISKDLVRRGFRSVGPTVIYSFMQVAGITNDHLTSCFRFQECITAAEAKEENVTKDPTEKKETVNVINTESSVAIDELSFSSE

SEQ ID NO: 77696 - protein, 242 aa, Gossypium hirsutum
  unsure (1)..(242): unsure at all Xaa locations
  Clone ID: GOSHI-09MAY01-C89824_2.pep
RQKREITVEGRDVPKPVKSFADVGFPDYVLGEVMKAGFVEPTAIQPQGWPMAFPAPGLIGIAETGSRKTLAYLLPAIVHVNAQPILAPGDGPIVLVLAPTRELAVQIQQEAAKFGASSRIKNTCIYGGVPNGPQVPDLQKGVEIVIATPRRLIDMWDSHRTNLRRVTYLVLXDEADRMFDMGXEPQIPKIVSQIPPDRQTLYLDCTLPQGANHAICQHVDIVSESQKYNKLVKLLEDIMDGS

SEQ ID NO: 77697 - protein, 299 aa, Gossypium hirsutum
  unsure (1)..(299): unsure at all Xaa locations
  Clone ID: GOSHI-09MAY01-C89824_1.pep
VSRSGDPASYRDRRSDSGFGGASAYGGSGRSLSSRKDYDAGEPPRKLDLDGLTPFEKNFYVESPSVAAMSEMEVEEYRQKREITVEGRDVPKPVKSFADVGFPDYVLQEVMKAGFVEPTAIQAQGWPMALKGRDLIGIAETGSGKTLAYLLPAIVHVNAQPILAPGDGPIVLVLAPTRELAVQIQQEAAKFGASSRIKNTCIYGGXVPKGPQVRDLQXGVEIVIATPGRLIDMLDSHHTNLRXVTYLVLDEAXRMLILGFEPXNQKMVLRXPDRQTLSXSATCPREVEQLEGSFFNSVK

SEQ ID NO: 77698 - protein, 145 aa, Gossypium hirsutum
  Clone ID: GOSHI-09MAY01-C89574_1.pep
SMSLPGFFSICMLQSIVAITCGALMMFYTKEVTVLGHGHEIASKLQGSTPHDQLLIQTSESFSGLLLFTIGFVLFMVAFVKDGEFQSFFAKGCVSVHVSMATWRVCFEGKLLGFGHEWLRQALGDIALALSWVFLLVCSWREKYD

SEQ ID NO: 77699 - protein, 232 aa, Gossypium hirsutum
  unsure (1)..(232): unsure at all Xaa locations
  Clone ID: GOSHI-09MAY01-C89684_1.pep
VSETLYLGGGCMDRYLSLNPLNRQRLGGLGVSSMLIASKXEEITPPNVFYFCYITDNAXGGDEWSKWLRIYLSPLKFELGNPTVKTFLRRFTRVAQEDYKASSLQLEFLGCYLXQLSLLDYGCVKFLPSMVAASVIFLTMFIIKPKCHPWSSALQRNLGYKASDLKECVLILHELYLSRRGDSLHAVREKYNQHKFKYVATIPASLEIPASYFKDVQEVEIIDVEDVQVVEV

SEQ ID NO: 77700 - protein, 161 aa, Gossypium hirsutum
  unsure (1)..(161): unsure at all Xaa locations
  Clone ID: LIB3543-036-Q1-K1-E11.pep
KYEKHSSKVRNFCYITDNTYTKDEVVKMEANILKSLKFELGNPTVKTFLRRFTRVAQEDYKASSLQLEFLGCYLAELSLLDYGCVKFLPSMVAASVIFLTMFIIKPKCHPWSSALQRNLGYKASDLKECVLILHELYLSRRGDSLHAVREKXNQHKFKYVA

SEQ ID NO: 77701 - protein, 184 aa, Gossypium hirsutum
  Clone ID: GOSHI-09MAY01-C89344_1.pep
MGLWEAFLNWLRSLFFKQEMELSLIGLQNAGKTSLVNVIATGGYSEDMIPTVGFNMRKVTKGNVTIKLWDLGGQPRFRSMWERYCRAVSAIVYVVDAADNDNLSVSRRELHDLLSKSSLNGIPVLVLGNKIDKPEALSKEDLTEQMGLKSITDREVCCYMISCKNSTNIDAVIDWLVKHSKSKN

SEQ ID NO: 77702 - protein, 216 aa, Gossypium hirsutum
  unsure (1)..(216): unsure at all Xaa locations
  Clone ID: LIB3543-060-Q6-K6-B8.pep
PMFDPAWSNLQLVYDLLLRFISYSSLXAKWQKKHVDHSFILKLLDLFESEDPRERDCLKTILHRIYGKFMVHRPFVRKAVSNIIYRFVFETERHNGIAELLEIFGSIISGFAIPLKEEHKMFLCRALIPLHKPKSIGVYHQQLTYCVVQFVDKDQKLANNVIKGLLKYWPITNSQKELMFISELEEILEMTNMVEFQKIMVPVFRRIACCLNSSHY

SEQ ID NO: 77703 - protein, 139 aa, Gossypium hirsutum
  unsure (1)..(139): unsure at all Xaa locations
  Clone ID: uC-gsflmaxxa091h11b1.pep
CVAKKYVDHSFMCGFLDLFDAEDPRERDCLKTILHRIYGKLMVHRPFVRKAVSNIIYRFVFETERHNGIAELLEIFGSIISGFAVPLKEEHKMFFGKSLIPLHKPKLVGVYHQQLTFCVVQFIDKDPKXADSVIKGLLK

SEQ ID NO: 77704 - protein, 297 aa, Gossypium hirsutum
  unsure (1)..(297): unsure at all Xaa locations
  Clone ID: GOSHI-09MAY01-C89244_1.pep
WPSNLKSNXDDSSDLENGEEALPGFSEYSLDQLRAATAGFSTDNIVSEHGEKAPNVVYRGTLDEDRLIAVKRFNRSAWPDPRQFLEEARAVGQLRSDRLANLIGCCCEGDERLLVAEFMPNETLSKHLFHWENQHMKWPMRLRVALYLAQALEYCSSRRRALYHDLNAYRILFDQDGNPRLSSFGLMKNSRDGKRYSTNLAFTPPEYLRTGRVIPESVVYSFGTLLLDLLSGKHIPPSHALDLIRGKNFLMLLDSCLEGQFSNDDGTELVRLASRCLQYEPRERPNVKSLVLLLPHF

SEQ ID NO: 77705 - protein, 198 aa, Gossypium hirsutum
  Clone ID: GOSHI-09MAY01-C89224_1.pep
MEKDTSYYDILGVNVDASIPQIKKAYYLKARRVHPDKNPDDPKAADKFHALGEAYQVLTDPEKREAYDKRGKTRVIPDTMLDPTAVFGMLFGSDFFEDYVGQLAMATLSAIEVESNSLLDKEAHRKKLEENMQAFQKQREDKLIEILKNRLQPFVEGHTNEFIQWANSEARDLSKAAFGEAMLHTIGYIYTKKAAKEL

SEQ ID NO: 77706 - protein, 147 aa, Gossypium hirsutum
  Clone ID: LIB3543-048-Q6-K6-H3.pep
LISNVKSSVAREESMEKDTSYYDILGVSVDASIPEIKKAYYLNARRVHPDKNLDDPKAADKFHDLGEAYQVLTDPEKREAYDKRGKTGVIPDTMLDPTAVFGMLFGSDFFEDYVGQLAMATLSAIEVESDSLLDEEAHRKKLEENMQ

SEQ ID NO: 77707 - protein, 81 aa, Gossypium hirsutum
  unsure (1)..(81): unsure at all Xaa locations
  Clone ID: LIB3825-022-Q1-N6-G7.pep
HCGKKKNQWKKTLHIMIYWVSVLMHLYXEIKKAYYLNARRVHPDKNLDDPKAADKFHVSYHLLTMLLVDQLFEKCPKRRPL

SEQ ID NO: 77708 - protein, 103 aa, Gossypium hirsutum
  Clone ID: AI731214.1.pep
GEDRMPLGGSADGNLESRSQYLCAVWNPVENTTRWKEIKARAAAKPKQMRKENVAAEGELQVPFSSDLRSGCSANYDQSKPLRRDVAVDASLSDGLVSPVSPG

SEQ ID NO: 77709 - protein, 161 aa, Gossypium hirsutum
  Clone ID: LIB3582-030-P1-K1-G11.pep
MDSTKGASLVRLDDDRSKNQMPLDGSADGNLKSRSQYLCSVLNPVENTTQWKEIKARAAAKPKQMRKENVAAEGESQVPFSSDLRSNCSTNYNQSKPLLQDIAVDASLSNWLVSPSKSQFTGSTNSCSIAFDTLQSKTNISDGLFSRRSREDRVILDITNL

SEQ ID NO: 77710 - protein, 104 aa, Gossypium hirsutum
  Clone ID: GOSHI-09MAY01-C84864_1.pep
ESHFSLILTSGREFDPRFRCGAPLKIVASIYPINGRVESGGLVIELAPEGYPLNSIPDPVTVEAYACLRVGHLLEELGFNNICVEGDALTILTICPTLGEQSCT

SEQ ID NO: 77711 - protein, 179 aa, Gossypium hirsutum
  unsure (1)..(179): unsure at all Xaa locations
  Clone ID: GOSHI-09MAY01-C84814_1.pep
MSESGLTVLDGTHLRSFNPSLPELNGSVSGAQLLEIADSKASTSLFGLSLPQNLKASALSRVIARPGDHADVTFRQTELDKDKASKFLSDYISAIADELKDDPLVVSILDGNTLKMFLEDEDDYAMLAENLFTDMDXKDKGKICKNELRNALVHMGVEMGIPPFSEFPLLNGILKNMGP

SEQ ID NO: 77712 - protein, 149 aa, Gossypium hirsutum
  unsure (1)..(149): unsure at all Xaa locations
  Clone ID: GOSHI-09MAY01-C84504_1.pep
MILLQWKPFFSPPPTPQFHKQSTLSQRRPSINVTIPPSKVEITSTATKAIEEHDEKRHYRGVRRRPWGKFAAEIRDPNRKGSRIWLGTFETAIEAAXAYDRAXAFKLRGSKAILNFPLEIGNSNSTESQPSNKRKREEEEQRGSVKRKR

SEQ ID NO: 77713 - protein, 263 aa, Gossypium hirsutum
  Clone ID: GOSHI-09MAY01-C84494_1.pep
DAWDWDHISMPPSCRGNGLSIRGECSMRNVRSRPALDLESNLVRTHLSSNTSYLTSHPVEHSSSVNITGQSSNAMSRDWSHLRMSPSHGRIPAADSNVFNHETNRFLGGSSATNASVEGGGLQHNFISGRNPVLPQGFHGNSAQSVRGPRTNYFQRSSPNFRASSSSVHMGHAASHEEGMQVVSESYSTRHPRPLTAVTWRNNERSGRSRISNDRYQSLADDAAFHGRFSSEGFMIVDRSAFYGSRNMFDQHRDMRLDIDNMT

SEQ ID NO: 77714 - protein, 132 aa, Gossypium hirsutum
  unsure (1)..(132): unsure at all Xaa locations
  Clone ID: GOSHI-09MAY01-C84484_1.pep
MTRPFRLLGAANSSATTEPPPEQAATVDSDFVVILAALLCALICVLGLIAVARCAWLRRLSGAFAPNPSASSRPPPPANKGLKKKILKSLPKATFSPDFSAKFSDCAICLTEFAAGDEIRVLPQCXHGYHVV

SEQ ID NO: 77715 - protein, 198 aa, Gossypium hirsutum
  Clone ID: GOSHI-09MAY01-C84404_1.pep
MALLYSLCCVSFSALVIVALYVSPVVSTSRRVLGDYGKLENGFRVTLKHVDSSKNLTKWERIQRGIKRGNHRLQRLNAMVLAASGDSAEVQAPIVAGNGEFLMDLSIGTPPNSYSAILDTGSDLIWTQCKPCTQCFDQSTPIFDPQKSSTFTKLSCSSDLCEALPQSTCSDGSCEYLYTYGDYSSTQGVMATETFKFD

SEQ ID NO: 77716 - protein, 266 aa, Gossypium hirsutum
  unsure (1)..(266): unsure at all Xaa locations
  Clone ID: GOSHI-09MAY01-C84424_1.pep
MTPSRESXSFALTPKGTPIRDGLHINEEMDLHDSAKLEQRRQADLRRNLRSGLGTLPQPKNEYQIVIQPPPEDNEEPEEKIEEDMSDRIARERAEEEARQQALLKKRSKVLQRELPRPPSASLELIRDSLMRTDGDKSSFVPPTSIEQADEMIRKELLSLLEHDNAKYPLDEKANKAKKKGAKRPANGSIPSIEDFEEEEIXEPDSLFKEEADFLRVAMGHENESLDDFVEAHNTCLNDLMYFPTRNAYGLSSVAGNMEKLAALQT

SEQ ID NO: 77717 - protein, 108 aa, Gossypium hirsutum
  Clone ID: GOSHI-09MAY01-C84144_1.pep
FSTQGPMVQLYENNLKDEQAKHEKLEVQDDSCTSSDTGAASQETPVTADTGDQRQGNPNRLNNGGSHGYVSEPCDTKVWDSGYTTCQKTKMDFLPTCSMIEEVFGDGS

SEQ ID NO: 77718 - protein, 180 aa, Gossypium hirsutum
  Clone ID: GOSHI-09MAY01-C84314_1.pep
MFLRRKHSQKDDSDQRDSKVSELRTAIGPLSGRSAKYCTDACLRRYLEARNWNVDKAKKMLEETLKWRLTYKPEEIRWHEVAHEGETGKVSRANFHDHQGRTVLIMRPGMQNTKSAENNIRHLVYLLENAIMNLAEGQEQMSWLIDFTGFSVNTSIPIKVARDIVYILQGHYPERLACAF

SEQ ID NO: 77719 - protein, 271 aa, Gossypium hirsutum
  Clone ID: GOSHI-09MAY01-C85574_1.pep
AISTLTRRPLGVSLRYHRLHHHRSPTLATLSSSSSQPPSSTAVTPPLPTSAGENTLSSQTHQHPNPGSFNYALANPKGATHYLVIARAPPSNIEKIIFDFRFLALFAVGGSLAGSLLCFLNGCVYIFEAYKVYWTSCVKGIHTGNMVLRLVEAIDVYLAGTVMLIFGMGLYGLFISNLNPELPADVDRALKGSSLFGMFAMKERPKWMKISSPDELKTKVGHVIVMILLVKMFERSKMVAINTGMDLLSYAICIFLSSASLYILHHLHKPE

SEQ ID NO: 77720 - protein, 158 aa, Gossypium hirsutum
  Clone ID: GOSHI-09MAY01-C85184_1.pep
KFVSYGNLSAATGVSGSQFSQAIVGHMGNRTQPVRYASQYHPVQAAPAYLNPNSQAVMFGHMGQLICVPVSHDLVPNAAAISPEPARPPLTPHHVQFPKPQGSAPDQASQFCVPQPFIAGGQPPLAVPSHIPYLQPPFPVNCPIQIPGSNGLFSTKLP

SEQ ID NO: 77721 - protein, 97 aa, Gossypium hirsutum
  Clone ID: uC-gsronu33B160c06b1.pep
PKPEAQYAQKKSTADESTRSFWNRPESWGSHEWLLAWPPSHFSSLLCMAEFAQEYTRRSSNRIYSQMIEGKYNFYFSSNLYIRLPKAIICTLIFVTN

SEQ ID NO: 77722 - protein, 111 aa, Gossypium hirsutum
  Clone ID: LIB3827-001-Q1-K6-H7.pep
KSTADESTRSFWNRPESWGSQEWLLARPPWRVSSLRGRSESAQEYTRRPTNRIQQIKANFIFIFNSKNWAKKSGCFHPRYFKRKAGRPIESQRVEKWPKGVFPKLILGFFG

SEQ ID NO: 77723 - protein, 112 aa, Gossypium hirsutum
  Clone ID: GOSHI-09MAY01-C86864_1.pep
AQCSTFRVAYVISGPLLVPLSVALSVLLGWHIYLILQNKTTIEYHEGVRAMWLAEKGGTVYKHPYDLGAYENLTTVLGPSIFCWICPFSRHIGNGLRFRTAYDRVSTSSTSK

SEQ ID NO: 77724 - protein, 94 aa, Gossypium hirsutum
  Clone ID: GOSHI-09MAY01-C86784_1.pep
MTPSTGAEEIAQNAVALLLKHTRGYHADEEELYETPDMSARNQSKKKEKKLKRVLGPEKPSFLDSNPDPEYETWVPPEGQSGDGRTTLNDRYGY

SEQ ID NO: 77725 - protein, 261 aa, Gossypium hirsutum
  Clone ID: GOSHI-09MAY01-C86754_1.pep
RKQVKLIVNGYGLTGFLDGTVAPPSRFVILPDGSRAPNLAAQVFTQQDQLLMSWLLSTVTSSHQSSFDDACTACNIWSMTVNLFAADTGAKQSRIRHELHSLKKGNLSIKAYVNQIKDLCALLDASGSRISDEEKIEVVLAGLPSDFEAVISSARLSPGVLPLQRLVDALVNCESRQARVLQDVSLNVNLVEDASSVEGVSHGGRAPVRGSGRTFRSRIQCQICSRFGHVAQKCYYRYHRDSNDSSVVSSVSHQGATSRTL

SEQ ID NO: 77726 - protein, 81 aa, Gossypium hirsutum
  Clone ID: GOSHI-09MAY01-C86704_1.pep
TKDKFSRFIFTVPAKLKQEINPNGTNQRIMNIQPHQEAVTIIAFYFSMFFCSLYAVPSLTKIKVSSIHQVLLTLRFSSTKY

SEQ ID NO: 77727 - protein, 113 aa, Gossypium hirsutum
  Clone ID: GOSHI-09MAY01-C86734_1.pep
AENPSEMRQYEWFAPAPVTMWFDTTPTNQSKLHDYANKFWSGLLEGYYLPRASSYFSYLFKSLEKNESFKLVEWRKQWISFSNKWQAGLELYPVKAQGNFLTIAKALFDKYLS

SEQ ID NO: 77728 - protein, 187 aa, Gossypium hirsutum
  unsure (1)..(187): unsure at all Xaa locations
  Clone ID: AW187601.1.pep
MAKGSESGSESDPNGWSRARGLVVKTLVLIGGAFLLKRLTKSTTRWDHAKIVARSLSGEKFSREQASRDPDNYFNFRIFTCPATEMVDGSKVLYFEQAFWRTPQKPFRQRFLMVKPCPKDLKCDVEVSSYAIRDVEDYXNFCDRPRDQRPLPEEIIGDIAEPLTTIYLNRCEKGKRCLYEGSTPPXG

SEQ ID NO: 77729 - protein, 143 aa, Gossypium hirsutum
  Clone ID: LIB3584-009-P1-K1-E5.pep
SPSVRKSSESGSESDPNGWSRARGLVVKTLVLIGGAFLLKRLTKSTTRWDHAKIVARSLSGEKFSREQASRDPDNYFNFRIFTCPATEMVDGSKVLYFEQAFWRTPQKPFRQVNYHARRYTDQTSMIIEYLKLYLCFLFCVFL

SEQ ID NO: 77730 - protein, 265 aa, Gossypium hirsutum
  Clone ID: GOSHI-09MAY01-C87964_1.pep
KVVTGIALPAGMDKLYTGSKDETVRAWDTNTGQCMGVINLGGEVGCMISEGPWLFVGIPNVVKAWNTQTNQELSLSGPVGQVYTMVVGNDLLFAGTQDGTILAWKFNAVTNNFEPAASLKGHTLAVVSLVVGANRLYSGSMDHSIKAWSLETLQCLQTLTEHTSVVMSLLCWEQFLFSCSLDQTIKVWVATESGNLEVTYTHKEEHGLLNLRGMPDSESKPVLMCSCNDNSVRLYDLPSFSEKGKIFAKQEIRAIEVGPWGLFFT

SEQ ID NO: 77731 - protein, 323 aa, Gossypium hirsutum
  Clone ID: GOSHI-09MAY01-C87824_1.pep
MVGIFSLVTGWPGPSGFGSSSTAEQVTQGIDGTNLTAIITGGASGIGLETSRVLALRGVHVIIGARNVKAANEAKKTILTEIETARVDVLELDLCSIRSIRAFADNFIALNLPLNILINNAGIMFCPFQLSQDGIEVQFATNHIGHFLLTELLLDQMKNTVKTTGIQGRIVNLSSIAHTHCYKNGLRFDHIIAKDGYNDKRAFGQSKLANILHANELSRRLQEEGVNVTVNSVHPGLIMTPLFRHSAVLMNFLKFFSFFLWKNVPQGAATTCYVALHPRLKGVTAKYFVDCNEMTPSSYARDEALARKLWDFSHKLINSVSKP

SEQ ID NO: 77732 - protein, 83 aa, Gossypium hirsutum
  Clone ID: GOSHI-09MAY01-C87594_1.pep
IKARSTLFQQPFRCRDHCPVVVLALDCATIGASSRKRPLNHRDPRGHLSIFCLKSRFLTTNGRVWRCERWCMGACMPDDRSLA

SEQ ID NO: 77733 - protein, 335 aa, Gossypium hirsutum
  Clone ID: GOSHI-09MAY01-C87714_1.pep
MHIKEWKSHMWREKSRKETDNPSDNEIEDNVTMLKGTNAVRGVEPECKSGNRNGGKQKHELRVGNALVPKKKRGGLAKEEGLLEADHCMIEEVILEQNDQNKKLTSNKKCKYDNLLLASCQVDTEVGVKLKRKRKEQFEEKTLENNVNKEDETHKSGSNYTETKDVDVEDRDNQNQVNDKKTKKRSKDEEGDAMKVEQPVLPAHEKKRSDVEMGAKNANDKEIQLSNGIIIEELEIGKPDGKIASLGKKVRVHYTGKLKESGQVFDSSVGRAHLKFRLGGKKVQELWNVGLDGMRIGGKRRLIVPPSVSYTNEGTSENIPPNSWLVFDVELVKVK

SEQ ID NO: 77734 - protein, 99 aa, Gossypium hirsutum
  Clone ID: GOSHI-09MAY01-C87674_1.pep
WIHTHPTQSCFMSSIDLHTHYSYQIMLPESVAIVMAPRDASRKHGIFRLTTPGGMSVIRQCQKRGFHPHIQPPDGGPLYSTCTDVYMNPNLNFDVIDLR

SEQ ID NO: 77735 - protein, 150 aa, Gossypium hirsutum
  Clone ID: GOSHI-09MAY01-C87184_1.pep
MKSSTSKMKTKLNKKLVQQQQQQSNGEEQESKDIACTSIYNNNNSSGAKKRGRGGALMEGSRCSRVNGRGWRCCQQTLVGYSLCEHHLGKGRLRSMTSRELHGESGGNDAEGEDQKPLMMPKKRAKLGMVKARSISSLLGQKRQCNCSSR

SEQ ID NO: 77736 - protein, 137 aa, Gossypium hirsutum
  Clone ID: GOSHI-09MAY01-C87174_1.pep
NCCYRYEDEPPEPEIEEGAEEEVENNNNDDVPVDLVETEEKEDEDANDKISRKTSKYMTKYERARILGTRALQISMNAPVMVELEGETDPLEIAMKELRERKIPFTIRRYLPGGSYEDWGVDELIVEDSWKRQVGGN

SEQ ID NO: 77737 - protein, 99 aa, Gossypium hirsutum
  Clone ID: GOSHI-09MAY01-C87004_1.pep
GVGWKMSPSISKKAKRLPMKISLLQGTASEMMPVKVRMRPPGGQGMGKGKKNGKAWKEMLPLLLIPKCNAYSSEDVRIAALLSTTFLNHVVLHAIVEHF

SEQ ID NO: 77738 - protein, 84 aa, Gossypium hirsutum
  Clone ID: GOSHI-09MAY01-C87024_2.pep
RCHKDRSGFDGAWTTNPLTFDNSFFKELLSGTGADIMQLPSDKVFVSDPVFRPFVEKYAADEGEFFADYANAHLRLFELGFADD

SEQ ID NO: 77739 - protein, 247 aa, Gossypium hirsutum
  unsure (1)..(247): unsure at all Xaa locations
  Clone ID: GOSHI-09MAY01-C87024_1.pep
SYPVVSEDYKKXIESARGKLRGLIAEKNCAPIIVRLAWHSAGTFDWKTNTGGPFGTMKHAAELAHKANTGLDIAINLLEPIKEQFPIISYADFYQLAGVVAVEVTGGPEIPFHPGRPDKEEVPPEGRLPSATDGADRLREIFINQMGFTDKDIVALSGAHTLGRCHKDRSGFDGAWTTNPLTFDNSYFKELLSGTGADIMQLPSDKVFVFDPVFRPFVXKYAADEDEFFADYANAPLRPSELGFADD

SEQ ID NO: 77740 - protein, 171 aa, Gossypium hirsutum
  unsure (1)..(171): unsure at all Xaa locations
  Clone ID: LIB3585-050-P1-K1-A4.pep
MACLSCSCISIAMAKAVIHPRIASLTDKPSPQETQTNSKPKTATRPRKKRQRLRQQKPHPPPSIVQIERAIGAGSFRDADSSDLEEQRRKTIFDGLLPVTGGKXEGDIEKKLRETGEWIGTTTEATFRSSGKTILLVVLQWILPIWTFSLLVASGVIKLPFSTPLIDDLIM

SEQ ID NO: 77741 - protein, 123 aa, Gossypium hirsutum
  Clone ID: uC-gsflmaxxa005b09b1.pep
LRVGETQTNSKPKTATRPRKRRQRLRQQKPHPPPSVVQIERAIGAGSFRDADSSDLEEQRRKTIFDGLLPVTGGKFEGDIEKKLRETGEWIGTTTEATFRSSGTSFFSLFSFNRVQISFSTER

SEQ ID NO: 77742 - protein, 222 aa, Gossypium hirsutum
  Clone ID: GOSHI-09MAY01-C80814_1.pep
PRVREKENPALLSHCNGGFFADQFENLANFRAHYEGTGPEIWEQTDGNVDAFVAAAGTGGTVAGVSTFLQEKSPKIKCFLIDPPGSGLFNKVTRGVMYTKEEAEGRRLKNPFDTITEGIGINRLTKNFMMAKLDGAFQGTDKEAVEMSRFLLKNDGLFLGSSSAMNCVGAVRVAKALGPGHTIVTILCDNGMRHLSKFYDPKYLAQYGLMPTATGLEFMSTK

SEQ ID NO: 77743 - protein, 344 aa, Gossypium hirsutum
  unsure (1)..(344): unsure at all Xaa locations
  Clone ID: GOSHI-09MAY01-C80044_1.pep
SNLPPTPFPPNILSAISVSSHNLKTXQSMVKSILEXQGNLNRTNAASICDEILSNSDYRINSTVDALSRGKIKDARAWMSAALCYQYDCWGALKYANDTQLVNQTMAFLDSLTQHTSNALSMMAAYDNYGDNINSWAPPKTERDGFYEKGSGGTELVFDGGFPTGLKPDVTVCKDGSGGCYKTVQEAVNAAPDNAEAGRRFVIEIKEGVYEETVRVPLAKKNVVFLGEGRGRTVITGSLNVAQXGMTTYESATVGVLGDGFMASGLTIKNTASPDAHQALAFRSDSDLSLIENCEFIGNQDTLYAHSLRQFYNKCHIHGNVDFIFXNSTAVFQECEILVVPPEF

SEQ ID NO: 77744 - protein, 195 aa, Gossypium hirsutum
  Clone ID: GOSHI-09MAY01-C80364_1.pep
LTRPQIVAGAGAGVAVSFLACPTELIKCRLQAQSALAHSGSASVAVKYGGPMDVARHVLRSEGGVRGLFKGLVPTLAREVPGNAAMFGVYEALKQYMAEGPDTSKLGRGSLIVAGGLAGASFWIFVYPVDVIKSVVQVDDYRNPKYTGSMNAFNRILASEGVKGLFKGFGPAMARSIPANAACFLAFEVARSALG

SEQ ID NO: 77745 - protein, 199 aa, Gossypium hirsutum
  Clone ID: GOSHI-09MAY01-C80214_1.pep
EDRMPSALFLKMRSAVRNGIQRTECELQDSLKILIGKGKLGFCIYRFFHSSSLSGLADLQGFFPSGTVLAACSDSLSVNCGRNISAVGAFPRTVFVPSVSGPAFQACRYHIDCALVDSSQIPPTVSKCQSNPMAVSSSGVVIGGFVDSLKLKHGHLSSSTSSADILYGNRSIPFQNKFEKFERPNNFAIYGQLLHNIGK

SEQ ID NO: 77746 - protein, 88 aa, Gossypium hirsutum
  Clone ID: GOSHI-09MAY01-C81894_1.pep
PRVRQNKAASAALSSILRNETERPMVRHEAAEALGSIADDQSVALLEEFARDPEPIVSQSCEVALSMLEFERAGKSFEFLFMQTPVVH

SEQ ID NO: 77747 - protein, 109 aa, Gossypium hirsutum
  Clone ID: GOSHI-09MAY01-C81834_2.pep
PRVRPRMKVKVRGKKSEKLHELVLELLKNISLVMKTRGILMQRSALGGDSLGELTWLHVNNIAPSLQSEVFPDQGPELKHGETGCAGSGETVSVPSNETTTLEGAGAGS

SEQ ID NO: 77748 - protein, 88 aa, Gossypium hirsutum
  Clone ID: uC-gsronu33B139c08b1.pep
LKNLIHISKEGSLFLPICTQYLQTILGFAEYQRQHNLMCPNVSMRITSRNSNVLCATLYAGNYKPFSSINCTQHLTSRTSPFKGGCFI

SEQ ID NO: 77749 - protein, 204 aa, Gossypium hirsutum
  unsure (1)..(204): unsure at all Xaa locations
  Clone ID: GOSHI-09MAY01-C81684_1.pep
MRTIFSKSPSPPTRHHTFTESLIEENIEAAELSITKWDSLHGDDHVSYCNIASVFSENNRDEAKQYLSSIKGLQKAMRYLASLESTSDKLVRAQTLMQTAMKRLEREFYQFLKANRNYLDPESVSNHSSSRPSGFQXSFSDSEEDESENDSIPEVERGSSAVIADLRAIAEAMISAGYAKECFKIYRTIRKSIVDEALYNLGVE

SEQ ID NO: 77750 - protein, 237 aa, Gossypium hirsutum
  unsure (1)..(237): unsure at all Xaa locations
  Clone ID: GOSHI-09MAY01-C81314_2.pep
MYKNQLQELAQRSCFNLPSXSCIREGPDHAPRFKATVNFNGETFESPTFCSTLRQAEHAAAEVALNTLANRGPSKALAARILDETGVYKNLLQETAHRAGLNLPVYTTIRSGPGHVPTFSCMVELGGMSFTGEPARTKKKAQKNAAMSAWSALRKLSRYGSSSSSPPSLESQGREEQVQTVIARFLSSLQPSESKQCLQYDCQYGKSRSIPVCIDLTQSTPNLYSMQSQSWPYRFSP

SEQ ID NO: 77751 - protein, 137 aa, Gossypium hirsutum
  unsure (1)..(137): unsure at all Xaa locations
  Clone ID: AW187596.1.pep
MYKNQLPKLAQRXCFNLSSSYSCIREGSDHAPWFKATLNFNRETFESPTFSSTLRQVEHVAIALNTLAKRGTSKALAARILDETGVYKNLLQETAHXAGLNLPVYTTIRSGPGHXPTFSCMVEPCFFHETEHSKADI

SEQ ID NO: 77752 - protein, 190 aa, Gossypium hirsutum
  Clone ID: GOSHI-09MAY01-C81274_1.pep
MRGLKLPLSQTQRVRLQRAFEKLQSLSAKANSDASVTVADAIPVNYEDAFLKGYGTTDLNGELVATVCGVVERVNKLVYVRALRARYKPEVGDVVVGRVVEVAQKRWRLEINFSQDAVLMLSSMNMPDGIQRRRTALDELNMRSIFEENDFVCAEVRNFQHDGSLQLQARSQKYGKLEKGQLLIIDPYLV

SEQ ID NO: 77753 - protein, 93 aa, Gossypium hirsutum
  unsure (1)..(93): unsure at all Xaa locations
  Clone ID: LIB3829-015-Q1-N6-A1.pep
DPQKIINRNKSPNFHTVHYNMXKPNLKPKTNKTLRPNYIGPNSPKLKPCLQQTLALVPQPTTPCMASLRRNHDHLATLARPYASTSPCTCKSG

SEQ ID NO: 77754 - protein, 100 aa, Gossypium hirsutum
  Clone ID: LIB3585-016-P1-K1-B10.pep
PNSPKLKPCLQQTLALVPQPTTPCMASLRRNHDHLATLARPHASTSPCTFRRVFLHCGDFQQSKFHKTHSGSDEGRKSNENEGFPSLFTFFPSFSLLFPF

SEQ ID NO: 77755 - protein, 98 aa, Gossypium hirsutum
  Clone ID: LIB3584-040-P1-K1-A9.pep
HSQMGVPVFYRQSFSSEPRAIRFGHHTYTDFVDTVVAHFCHGYNSAHIVDLGTCAFVIGFSNGFKAAISSANVGIDLGPVCPHFLLMTAVAVSINYEI

SEQ ID NO: 77756 - protein, 67 aa, Gossypium hirsutum
  Clone ID: LIB3584-040-P1-K1-A8.pep
GRVRDIPDDIDPAIAEIMRKCGHTDPKSLPTLAELMAGLKPLLKPITNAQAPRSTIYASKTHYRSEP

SEQ ID NO: 77757 - protein, 208 aa, Gossypium hirsutum
  Clone ID: GOSHI-09MAY01-C82494_1.pep
IGQKGVVSINGISNQELSEDECQQLRQSIIKSGQIKWFTVGEILEKAMALQAVRVNDCLDSEILRVKNLCNQASKKGDTKELRECEEKLQLLNSPDERHRRLHEIPDIHRDPNRNLFSDEASGELDEKKKGMELSVNSIEADKIWHYQDPLGKIQGPFAMAMLRGWSSSGHFPPELRVRRVSEKQENSILLTDALVGQYSQLQQLVQH

SEQ ID NO: 77758 - protein, 114 aa, Gossypium hirsutum
  unsure (1)..(114): unsure at all Xaa locations
  Clone ID: LIB3825-005-Q1-K6-G7.pep
FSILPKTTGIDLWNSLMXEMEENYRRLKEINKKMRREIREXGGDLNELNIKELQALKAKMDSSLLAIRERKPPLKRLLTMFLRYHIIKTRTDKHKNKVRNLEERHANLVMDLRM

SEQ ID NO: 77759 - protein, 196 aa, Gossypium hirsutum
  unsure (1)..(196): unsure at all Xaa locations
  Clone ID: GOSHI-09MAY01-C82484_1.pep
MGGGDINASKEAASKDVGDAVTVSISCSSGSKFSVQTNLDSTVEAXKALLARNCGVPADQQRLIYKGRILKDDQTLRSYGLEADHTVHLVRSVAPRAPPPTTNAAGSIGSGALNTSQTNTTAVDLDDAGALGAGGAGLGASLFPGLGDSAGLFGAGLPNFEQLQQQLTRNPNIMREISNIPAVQNLMNNPEILYNL

SEQ ID NO: 77760 - protein, 115 aa, Gossypium hirsutum
  Clone ID: GOSHI-09MAY01-C83924_1.pep
IPEFPRFLSNSPLHSSLSQNQLKPVKAQPQKQKKLGHSISHRGQRIGSKEEQVIPMNIRSFLFPNGSKTLEGFFFRRLEGGHGDEWVMAMMDVEEVEVSRSNQWPLLFFGIWHAC

SEQ ID NO: 77761 - protein, 134 aa, Gossypium hirsutum
  Clone ID: LIB3493-037-P1-M1-G1.pep
MAKQMDDAEFWLPPKFLMDDDFVLEKEKLQRSNIGENNPKSLVSVHGFPTEFPYEFDYSSALGSPVESVVGSIETESSDEDEFLAGLTRRLPLSITHKLTVPSFSWDKNEKTGALASSPQSTLSGFVSWSASSN

SEQ ID NO: 77762 - protein, 81 aa, Gossypium hirsutum
  unsure (1)..(81): unsure at all Xaa locations
  Clone ID: LIB3829-022-Q6-K6-F2.pep
XRSXXWGGGGXLPLSITHKLTVPRFSWDKNEKTGALASSPQSTLSGFVSWSASSNGSPNGPSHVPYXPTSPLAAQTDTWDL

SEQ ID NO: 77763 - protein, 164 aa, Gossypium hirsutum
  Clone ID: GOSHI-09MAY01-C83444_1.pep
MREVAIEIENPEGGSQGISPMRQPLEPLIRGLPHDIALLCLARVPPEYHTVLKFVSRRWRDLVHGERLHAHRKKHNLDETWIYALCRHKFEQVCCYVLDPNSSRRSWKLMRELPSRSLLRKGVGFEVLGKRLYLMGGCRSSEDATDETYCYDASKNSWTEANPL

SEQ ID NO: 77764 - protein, 113 aa, Gossypium hirsutum
  Clone ID: GOSHI-09MAY01-C83164_1.pep
FTRPGGLADIKIDEYMRSFSGDVISRACFGSNYCKGEEIFLKLRALQEAMSKKGLSTGVPGMRYLPIKSNREACELEKEVRDLILHVVNERKGAATYENDLLQMVVDGAKNSD

SEQ ID NO: 77765 - protein, 116 aa, Gossypium hirsutum
  Clone ID: GOSHI-09MAY01-C118383_1.pep
MKIDVNETKSKNKEVSVSDTTLHGEEKQLVEDEGSSGEKDDKLGNGDKVSKQPVDRKGNTKKETNTKSNKSFKGKKAKATAKHSSNVCETCGEEFQSKNKLHKHLGDSGHATLKFR

SEQ ID NO: 77766 - protein, 149 aa, Gossypium hirsutum
  unsure (1)..(149): unsure at all Xaa locations
  Clone ID: GOSHI-09MAY01-C119593_1.pep
MAVANFPALQFKTCDIFRSTPKCFKLLPLQKTNLFVKTLVVEAKANTRTESAKIRNRRMLKKFNGTPRRPRLSVFCSEKQLYAMLVDDKNKKCLFYGSTLQKSIRDDPTCTTIDAAXRVGEELVKACIDLNINEISYYDRNGFARGERM

SEQ ID NO: 77767 - protein, 139 aa, Gossypium hirsutum
  Clone ID: GOSHI-09MAY01-C119603_2.pep
LHASAHASGDVGDIVLQQGLNLVQDMSSKTYNTFSGFPVVDRWRSWENFKTLNSTDAVEDPEKIKLLVTVEDTRVGIHLGDQDRIFTPFVQADSSTSRHYGGTGIGLSISVHLVELMHGEIGFVSEPDIGRTFSFTGSF

SEQ ID NO: 77768 - protein, 124 aa, Gossypium hirsutum
  Clone ID: AI055728.1.pep
PGRFRQIIINLVGNSIKFTQDKGHIFVSVHLVDEVKGACDVGDKVLQQGLNLVQDMSSKTYNTLSGFPVVDRWRSWENFKTLNSKDAVEDPEKIKLLVTVEDTSVGIHFGAQNRFSHPLWQLSH

SEQ ID NO: 77769 - protein, 195 aa, Gossypium hirsutum
  unsure (1)..(195): unsure at all Xaa locations
  Clone ID: GOSHI-09MAY01-C119363_1.pep
LVAFGGYNGKYNNEVFVMKLKPRDLSHPKIFQSPAAAAAAASVTAAYALAKSEKLDFPQIIDLNFNGVENNVPKKDINLEINAIKEKKVVLESSIDEARAENSRLREKIDEXSNHTELSKELQSVQSQLISERSRCFKLEAQIAELQKMLESLESIENEVQILRRQKSALEQEMEVSSTQQQGSGGVWRWIARGT

SEQ ID NO: 77770 - protein, 162 aa, Gossypium hirsutum
  Clone ID: GOSHI-09MAY01-C115813_1.pep
MALLPLLFSSLLVVSLAEMSGKIGVNYGREGDNLPSPYESIQIMKSIKVGQIKLNDSNPEILTLLSGTKIHVAVTVPNDDIIRIGSNDSMAEQWVRNNILPHYPDTMIRFVLVGDRVVNSNMDVNGTMEQSLVPAMRGIKSALTAHGVKNVKVSTTLGMDVV

SEQ ID NO: 77771 - protein, 149 aa, Gossypium hirsutum
  Clone ID: GOSHI-09MAY01-C115723_1.pep
MLPVKSLTRFNCVCKYWCSSFQTPHFISKNYHNNLENNNLNLLLSRCDGNTFQPYLSSLSNEKDQNYIVKQNIHLPFFEDDSPSVYGACHGLLCLFDSSKDKAAIWNPSTREFKILPPSSIQPPPYFSPFEETYLTFDERSFNDAAFGV

SEQ ID NO: 77772 - protein, 67 aa, Gossypium hirsutum
  Clone ID: GOSHI-09MAY01-C115713_1.pep
GLTTPSLNKVCFFLFFWGYFPFCLLIDPLPVSVLLRLLGKKICPLKLNSAWILFEKGPCLVFGLSQI

SEQ ID NO: 77773 - protein, 87 aa, Gossypium hirsutum
  unsure (1)..(87): unsure at all Xaa locations
  Clone ID: uC-gsflmaxxa040d05b1.pep
EEETCTLLTISLHALQGSQRPRTMRVVAQIGNSNVLXLVDLGSTHNFMDAKLARQSNLPVELSTKLQVIIADGGIMSTQNVFIFVQW

SEQ ID NO: 77774 - protein, 85 aa, Gossypium hirsutum
  Clone ID: uC-gsflmaxxa040d10b1.pep
LHASDFSSQLSLLQIDNKINKRSWREKLGKCDFTLASLLLLHNQSSSGYERHLSLGCLLNPHEIITSLQHYGSWIVWRNTGGVDH

SEQ ID NO: 77775 - protein, 129 aa, Gossypium hirsutum
  unsure (1)..(129): unsure at all Xaa locations
  Clone ID: GOSHI-09MAY01-C115033_1.pep
LTRPVPVLAVXSLSEMSYCAHQRKLTIIPVPLLLGFVLAGFLKETALELSPLLKDAEVPWHLIAIAIFFTLIKLPGPYYPYWGRIFIPHIANGALFRTLWFMFLWYRRSKISGAELPNSLVNVRDSEVE

SEQ ID NO: 77776 - protein, 200 aa, Gossypium hirsutum
  unsure (1)..(200): unsure at all Xaa locations
  Clone ID: GOSHI-09MAY01-C115263_1.pep
QVYFGEAKMAAKFFAEVGFPCPSRRNPSDHFLRCINSDFDIVAEALKGSNRITELKNTLDPLAHLPTAQIKTWLVKKYRSSDYAAKARARIREISGIEGLVIEKKHSGEAKWLTQLSTLTNRSFVNMSRDLGYYWLRIAIYVALSIWGGSIFFDVGTNYNSILXRGACGGFISGFMTFMSIGGFPSFIEELKVFYRERRN

SEQ ID NO: 77777 - protein, 183 aa, Gossypium hirsutum
  Clone ID: GOSHI-09MAY01-C116983_1.pep
TNAAVIAMSRNCPNLVVFRLCIMGRHRPDHVTGEPMDDGFGAIVMNCKKLTRLAVSGLLTDKAFDYIGRYGKLVRTLSVALAGDSDMALKYVLEGCPQLQKLEIRDSPFGDAALCSGLHHYYNMRFLWMSSCKLTHQGCQQIARAMPRLVVEVIRSADGEEVYDRVQTLYMYRSLEGPKNDAP

SEQ ID NO: 77778 - protein, 124 aa, Gossypium hirsutum
  unsure (1)..(124): unsure at all Xaa locations
  Clone ID: GOSHI-09MAY01-C116513_1.pep
MPERSKSSSVSNLPLILDIDDFKGDFSFDALFGNLVNELLPSFQEEEADTAGGHGLGGTEALPNGHARASSDAAKFAQGDSIPLFPEVDALLSLFTDSCKELIDLRKQADGRLHTLKEXVSTQD

SEQ ID NO: 77779 - protein, 72 aa, Gossypium hirsutum
  unsure (1)..(72): unsure at all Xaa locations
  Clone ID: AI727772.1.pep
MENXGKVLMQNYEFXKMLGQGNFAKFYYXKNIQNNQNVAIKVIEKEXGREISMIDXTXNEISTMSLVKHPNI

SEQ ID NO: 77780 - protein, 61 aa, Gossypium hirsutum
  unsure (1)..(61): unsure at all Xaa locations
  Clone ID: uC-gsflmaxxa061a06b1.pep
SKLAVVLIRAESNFGSLFIAQIYQISCEIKHTVPYPEPIXERAHGXXLEKQIHQQNQNKXQ

SEQ ID NO: 77781 - protein, 92 aa, Gossypium hirsutum
  Clone ID: GOSHI-09MAY01-C116193_1.pep
MAVSPCLSVNDQKKHWWLSNRKVVDKYIKDARSLIATHEQSEIVSALNLLDAALAISPRFEVALELKARSLLYLRRFKDVANLLQDYIPSLK

SEQ ID NO: 77782 - protein, 231 aa, Gossypium hirsutum
  Clone ID: GOSHI-09MAY01-C116163_1.pep
SSSPFGNAGMVPPPMPGNPAFSQAQLSAGFQAQYQLSQAQALAQAQSKAQAQAQAQAHAQLQARLQAQGLALNQAQNAGFGTLGSSSPSMSTPGSASAKRILQRPPMRPPGVPMMNTMSPLRTMELTAAARRKKQKLPEKQLQDGVAAILPESALYTQLLEFEARVDAALARKKVDIQEALKNPPCVQKTLRIYVFNTFANQIKTIPQKPNAEASTWTLKIIGRILEDGVD

SEQ ID NO: 77783 - protein, 83 aa, Gossypium hirsutum
  Clone ID: GOSHI-09MAY01-C111103_2.pep
KERKKLLYSLFYSTRRHSPPFQLRLKRTKGTDGAPPLNWRRTWAMRGQRAAMLRRLLQRGGREASCCVVDFFLVWVTVWVWGC

SEQ ID NO: 77784 - protein, 84 aa, Gossypium hirsutum
  Clone ID: uC-gsronu33B044h01b1.pep
PLVRKKLLYSLFYSTRRHSPPFQLRLKRSKGTDGAPPLNWRRTWAMRGQRAAMLRRLLQRGGREASCCVVDFFLVWVTGWVWGW

SEQ ID NO: 77785 - protein, 116 aa, Gossypium hirsutum
  Clone ID: uC-gsronu33B178f03b1.pep
FTTKYWKFFEDRSRSSLWTRRKLRRAAFTLNLVRLRGLPWSGADGQEKVQLTAAELESLRPELADIEEGEAHSEAQLEHIDVILRSARLFGYLHIRSMWTALPGEPAPIDDIDVDD

SEQ ID NO: 77786 - protein, 80 aa, Gossypium hirsutum
  Clone ID: uC-gsronu33B116c10b1.pep
VCTSYYSEYNFMDDGFGKIKVIPDHFQVSTPPSEDSLQNRSSPDSQPSTGNSSRSRSSLWSRRKLRRAAFMLNLFSLRGL

SEQ ID NO: 77787 - protein, 215 aa, Gossypium hirsutum
  Clone ID: GOSHI-09MAY01-C112533_1.pep
LLQLYKKKCQGGINTEIKRGLISGTGFGVSFFFLFSVYATSFYAGAQLVEHGYTTFRDVFQVFFALTMAAIGISQSSSFAPDSGKAKSAAASIFAIIDRESKIDPSDESGMKLENVKGDIELHHVSFKYPSRPDIQILRDLSLSIRSGKTVALVGESGSGKSTVISLLQRFYDPDSGRISLDGVDIQKLQLKWLRQQMGLVSQEPVLFNDTIRAN

SEQ ID NO: 77788 - protein, 139 aa, Gossypium hirsutum
  unsure (1)..(139): unsure at all Xaa locations
  Clone ID: uC-gsronu33B106e09b2.pep
SLLVFPNFEFIVFQVYGGEARISTLRKLFPLMEDKKSLASLAERVHIKGKASLLAAVDYYVGMHSDIFVSASPGNMHNALVGHRTFENMKTIRPNMVLLGQLFLNKNISWSQFHQAMVEGIKQTGALXLSNXKQSIYTY

SEQ ID NO: 77789 - protein, 177 aa, Gossypium hirsutum
  Clone ID: uC-gsflnu33B126g11b1.pep
SLGDALVHRLTYPPGQSQASSTDYLRETTDQNGKQNPQKFVVLHLRFDKDMAAHSACDFGGGKAEKLALAKYRQTIWQGRVLNSQFTDKELRSQGRCPLTPEEIGLLLAALGFDNNTRLYLASHKVYGGEARISTLRNLFPLMEDKKSLASSAERVHIKGKASLLAAADYHVGMHSD

SEQ ID NO: 77790 - protein, 107 aa, Gossypium hirsutum
  Clone ID: GOSHI-09MAY01-C112113_1.pep
SPALAPLTYHRHITSLPLLSLFSKMLGAPIKISSSPSCCSSSENRKAIMLSPVCLDKSRSFQFLFSGSKLRCSKTLDTKQLSSAKFRVSRGSKFRGFCDSKTQEVAD

SEQ ID NO: 77791 - protein, 113 aa, Gossypium hirsutum
  Clone ID: uC-gsronu33B096h02b1.pep
HSDAHASDAVSLFTYHRHITLLTLLSLFSKMLGAPIKISSSPSCCSSFENRKAIMLSPVCLDKSRSFQFLFSGSKLRCSKTLDTKQLFSAKFKVFRGSKFRGFCDSKTQGVAD

SEQ ID NO: 77792 - protein, 183 aa, Gossypium hirsutum
  unsure (1)..(183): unsure at all Xaa locations
  Clone ID: GOSHI-09MAY01-C113823_1.pep
MLGTGLGFGRVRGEDRFYNPAKARRSYQKQQTDQLRRAQSDYTVSQSNVTRDSEKGLGSTDPPKPVLVPVSEPVVSPLSNSERFLDSVIPSVPALYLSKRTMRGWRTYDGEFQPYFVLGDLWESFTEWSAYGAGVPLILNVCDSVVQYYVPYLSGIQIYADSVKLXLQSRQPVQDSDSDFRDS

SEQ ID NO: 77793 - protein, 209 aa, Gossypium hirsutum
  Clone ID: GOSHI-09MAY01-C113743_1.pep
MASLLVKIFSIFFIIICIFTPQALSVVPEECKTETDGCTNKEKALPLKIIAIFSILIASIIGVCSPLFTRSVPALNPERSLFVIVKCFASGIILATGFMHVLPDSFDMLTSKCLKENPWHKFPFTGFVAMLSAIVTLIVDSVATSIYSKKSNNEVIPEVASPAGGTQQDMAVVNVGHSHGHHHGLKPAQGAVDQHLLRYRVIAMVLALG

SEQ ID NO: 77794 - protein, 184 aa, Gossypium hirsutum
  Clone ID: GOSHI-09MAY01-C113143_1.pep
IDKSPPIGSIARTLSWDDLCSDTATLNSSKPSKVSPGAKEEEHDWVLSVQTLLSSAGLNDKEYFESFIDGWHSPESPLDPSLRDKYANLNDKEPLHEAKRRQWRSNKTLVGDCVNAAVVDITGYGSNNRMNEMSLRRSHMRDMESASPTLVDHVCAQIKEWASGDRNHVVDNDIPWTVTACGGK

SEQ ID NO: 77795 - protein, 128 aa, Gossypium hirsutum
  Clone ID: uC-gsronu33B136f05b1.pep
YNVHEMQSRASPRGVLMLLLPLLIPVVLSGLDLFIIIHDHPTISDRQCTTSHDSFPHLPCVCFRLFLCWGFNLGHRCCGSPTPHDTHITPFSLCSIAVRMVHLLSFTLSLFPFEEIFKLFIFSLDNKL

SEQ ID NO: 77796 - protein, 65 aa, Gossypium hirsutum
  Clone ID: uC-gsronu33B136f10b1.pep
IDSCLFEFCNLRNALQGIDFISPSDDEICAKWLGIKVVQQGKTLVILLLLTTSYHSFPHFTLCIF

SEQ ID NO: 77797 - protein, 163 aa, Gossypium hirsutum
  Clone ID: GOSHI-09MAY01-C113293_1.pep
PMDDALLRRMTKLGHSVYAETAQRTIFYGGQESAINPYLLDKAKGSMLLAGIGSSQNNSLNPNTAHINAPFTSTIATSPIESGFGAPPTPNFSTTVTQECIRSAQRPIPGDLPIARRASLHRFLEKRKDRMTTRAPYEISNSTASSSKPGDDKSWLGLAAQSP

SEQ ID NO: 77798 - protein, 161 aa, Gossypium hirsutum
  unsure (1)..(161): unsure at all Xaa locations
  Clone ID: GOSHI-09MAY01-C8918_1.pep
FHTKVVLSDARINVEGEGAPNVAGLLKRSSVRICSVNKYACDVGXLPVILLQQVASQVIRWLHEEALMVGINTNRDFLSLPFDLAQGESVSLVAHVDPEHIQGGISWWLVMEDGFAEDWNLQMEMYDGTPEYRKFLGHLNLDVLYSTMMDLVPLCHGGGTQ

SEQ ID NO: 77799 - protein, 437 aa, Gossypium hirsutum
  unsure (1)..(437): unsure at all Xaa locations
  Clone ID: GOSHI-09MAY01-C8908_1.pep
VTIVPSDAPDDYMALQDLKAKPAFRAKFGVKDEWVLPFEIVPIIDIPEYGDRAAEKVCLDLKIKSQNEKDKLAEAKRLVYLRGFTEGTMIVGEYAGRRVQEAKPLLRTKLIETGQAIIYSEPEKKVMSRSGDECVVALTDQWYITYGEPEWKKLSEECLSNMNLYSDETRHGFEHTLGWLNQWACSRSFGLGTRIPWDEEFLVESLSDSTIYMAYYTVAHLLQNGDMYGKSADLVQPAQMTDEVWEFLFCGGPYPKSSNIPAATLNKMKQEFEYWYPFDLRVSGKDLIQNHLTFCIYNHTAIMSKDHWPRGFRCNGHIMLXSEKMSKSTGNFRTLRQAIEEFSADATRFSLADAGDGVDDANFVFETANTAILRLTKEIAWMEEILAAESSLRTGPPSTYADRVFENEINIAVKMTEKNYRDYMFREALKTGFYDLQ

SEQ ID NO: 77800 - protein, 149 aa, Gossypium hirsutum
  unsure (1)..(149): unsure at all Xaa locations
  Clone ID: AI731620.1.pep
LGTRIPWDEKFLVESLSDSTIYMAYYTVAHLLQNGDMYGKSSDLVQPAQMTDEVWEFLFCXVPYPKSSNIPAATLNKMKQEFEYWYPFHLRVSGKDLIQNHLTFCIYHHSAIMSKDHWPRGFRCNGLIIPNQKRTPIPRKISGPLPQAN

SEQ ID NO: 77801 - protein, 119 aa, Gossypium hirsutum
  Clone ID: GOSHI-09MAY01-C8898_2.pep
MGVLGDSQKEGFGSSWGGLKRLVRRKHVDSAHSKRSGHHQLAKELTVPHLIAIGVGSTIGAGVYILVGTVAREHSGPALAISFLIAGIAAALSAFCYAELAIRCPSAGSAYHYSYICVG

SEQ ID NO: 77802 - protein, 148 aa, Gossypium hirsutum
  Clone ID: GOSHI-09MAY01-C8898_1.pep
MGVLVDSQKEGFGSSWGGLKSLVRRKQVDSAHSKRSGHHQLAKELTVPHLIAIGVGSTIGAGVYILVGTVAREHSGPALAISFLIAGIAAALSAFCYAELASRCPSAGSAYHYSYICVGEGVAWLIGWALILEYTIGGAAVARGISPN

SEQ ID NO: 77803 - protein, 127 aa, Gossypium hirsutum
  Clone ID: LIB3166-007-P1-K1-E11.pep
FLILKILELFSSSSISPSLSASSSSSSSSSPSSSSPSSSSSLSSNSSSSSSSSSSPISSSSSSSSPSASSSTSPLTNNSSSSESSKSSISKSLPLAFLERFEYNPISPNSGNTYSKVENRKRGKTLK

SEQ ID NO: 77804 - protein, 93 aa, Gossypium hirsutum
  unsure (1)..(93): unsure at all Xaa locations
  Clone ID: LIB3825-016-Q1-K6-A12.pep
LSRSLTLFRALPFSPSLSSSSSSSSSSSSTPSPSSSLFXNSSSSSSSSSSPISSSSSSSSPSASSSTSPLTNNSSSSESSKSSISTSLPLAFA

SEQ ID NO: 77805 - protein, 189 aa, Gossypium hirsutum
  unsure (1)..(189): unsure at all Xaa locations
  Clone ID: GOSHI-09MAY01-C8878_1.pep
MKRSRCSSTKVERKIIEKNRRNHMKNLYSMLNSLLPHQNSKEPLSLPDQVDEAVKYIKRLQTKLKESRERKESLMGRTRSYRCTHSNDSTKPAEIWINEMGSVYXVALMTGPGCQYMFYEMIRIFHEDGAHVLNANFWVVGNTIFHIVHAEIGEFCVAKIIKEKLNKFVNEDRCKEEELGQELYWDYEI

SEQ ID NO: 77806 - protein, 127 aa, Gossypium hirsutum
  unsure (1)..(127): unsure at all Xaa locations
  Clone ID: AW186697.1.pep
IILLVKLFTTMEESGSRFNGANNAVRKKRSSRRPRPDSLSYTESQNHSPLSSTPPSDDVSKVSSDENAGVDANSKRKEFNLNQHVSRNSPDIGLESDKSHKRQKQDGGFNAFYDNEPGRSGSNXKRS

SEQ ID NO: 77807 - protein, 65 aa, Gossypium hirsutum
  Clone ID: LIB3166-007-P1-K1-C10.pep
HASAFFFLSIILFDLILPVVNCSCFCYALGSMRFKSHVFIFLLLGLAVLLDYPSGKVIYHYGRVG

SEQ ID NO: 77808 - protein, 107 aa, Gossypium hirsutum
  Clone ID: GOSHI-09MAY01-C8818_1.pep
WRTFYKSQHLAAVLLLFFIFTTSTSPSSARLLSDSPPSTTETTLDLALADLVEVEDHKTDVVLDVAKQHPEPQPQPCDIHMVPMKKPHVGILKSPTQRLARKYGPMI

SEQ ID NO: 77809 - protein, 81 aa, Gossypium hirsutum
  Clone ID: GOSHI-09MAY01-C8598_2.pep
SSLNIGRLKKLKPKRERMAWIWLEAALPLGIIAGMLCVMGNAQYFIHKAYHGRPKHIGNDMWDVAMERRDKKLFENLSSSD

SEQ ID NO: 77810 - protein, 99 aa, Gossypium hirsutum
  Clone ID: GOSHI-09MAY01-C8598_1.pep
PTRPVGLNPWTKQISLSVLTQKIGRLEKEKQRRERMAWIWLEAALPLGIIAGMLCVMGNAQYFIHKAYHGRPKHIGNDMWDVAMERRDKKLFENLSSSD

SEQ ID NO: 77811 - protein, 74 aa, Gossypium hirsutum
  unsure (1)..(74): unsure at all Xaa locations
  Clone ID: LIB3166-003-P1-K1-G12.pep
RADELKEGLFCNVKHEFRKYCTFQQVLNVYISCNTPTPETVTGVKLEVLLNLSYLLNNSKSLILIFGXXLIFYF

SEQ ID NO: 77812 - protein, 112 aa, Gossypium hirsutum
  Clone ID: GOSHI-09MAY01-C8548_1.pep
MGNCWGSGSSDRDATSHVYSSTNLPTTPGSSNYCSNNMGSSVTSSISNSRSQFSVSVSEIVEEEVPDGQILETSNLKVFTFAELKAATKSFNTLLGEGGFGKVYKGWLDERT

SEQ ID NO: 77813 - protein, 57 aa, Gossypium hirsutum
  Clone ID: LIB3166-027-P1-K1-E12.pep
LYCKGCCFCSPYKAFDRRDLAEFGAYINMGYCWGSGSSDRDATSHVYSSTNLPTTPG

SEQ ID NO: 77814 - protein, 213 aa, Gossypium hirsutum
  unsure (1)..(213): unsure at all Xaa locations
  Clone ID: GOSHI-09MAY01-C8578_2.pep
FPARHPNEGIGERTHHFTLLDGEMVIDTLPDSQKQERRYLIYDMMAINTVSIVERPFYERWKMLEKEVIEPRNYERQNIYQSRNPYYRYDLEPFRVRRKDFWLLSTVNKVLKEFIPXLSHEADGLIFQGWDDPYVPRTHEGLLKWKYARLNSVDFLFEIGSDDRPQLFLFERGRRKLMDRDTGEFRDGPDPXSSFSGKIIECSWDPDQQVWIY

SEQ ID NO: 77815 - protein, 153 aa, Gossypium hirsutum
  Clone ID: GOSHI-09MAY01-C8578_1.pep
DAWGLIFQGWDDPYVPRTHARPPARASARLNSVDFLFEISSDDRPQLFLFERGKRKLMDRDTVEFRDVSDPPSSFSGKIIECSWDPDQQVWVYMRIRTDKSTPNDFNTFKKVMRSIRDNITDEILLNEINEIIRLPMYADRIRMDSKASARRK

SEQ ID NO: 77816 - protein, 185 aa, Gossypium hirsutum
  unsure (1)..(185): unsure at all Xaa locations
  Clone ID: GOSHI-09MAY01-C8538_3.pep
MAVKPSKADKXKIAYDAKLCQLLDEYTQILIAAADNVGSNQLQXLRKGLRGEXQIVLMGKYTVMTRSAPVRAEKPGTQAFXNLIPLLQGNVGLIFTKGDLKEVSEEVAKYKVGAPARVGLVAPIDVVVPPGNTGLDPSQTSFFQVLNIPTKINKGTVEIITPVELIKKGDKVGSSEAALLAKLGI

SEQ ID NO: 77817 - protein, 162 aa, Gossypium hirsutum
  Clone ID: GOSHI-09MAY01-C8538_2.pep
MAVKPSKADKKIAYDAKLCQLLDEYTQILIAAADNVGSNQLQNIRKGLRGDSVVLMGKNTMMKRSVRMHAEKTGNQAFLNLIPLLQGNVGLIFTKGDLKEVSEEVAKYKVGAPARVGLLAPIDVVVPPGNTGLDPSQTSFFQVLNIPTKINKGTVNYHPCRA

SEQ ID NO: 77818 - protein, 321 aa, Gossypium hirsutum
  Clone ID: GOSHI-09MAY01-C8538_1.pep
MAVKPSKADKKIAYDAKLCQLLDEYTQILIAAADNVGSKQLQNIRKGLRGDSVVLMGKNTMMKRSVRMHAEKTGNQAFLNLIPLLQGNVGLIFTKGDLKEVSEEVAKYKVGAPARVGLVAPIDVVVPPGNTGLDPSQTSFFQVLNIPTKINKGTVEIITPVELIKKGDKVGSSEAALLAKLGIRPFSYGLVVLSVYDNGSVFSPEVLDLTEDDLIEKFATGVSMVTALSLAISYPTLAAAPHMFINGYKNVLAVAVATEYSFPQADKVKEYLADPSKFAVAAAPVAGGGGGAAPAAAPAEEEKKPEPEEESDDDMGFSLFD

SEQ ID NO: 77819 - protein, 96 aa, Gossypium hirsutum
  unsure (1)..(96): unsure at all Xaa locations
  Clone ID: AI054598.1.pep
MAVKPSKADKKIAYDAKLCQLLDEYTQILIAAADNVGSNQLQNIXKGLRGDXVVLMGKNLXERXVRMHAEKTGTKLFLPYPLVQVCGFXSYKGDLX

SEQ ID NO: 77820 - protein, 101 aa, Gossypium hirsutum
  Clone ID: LIB3197-030-Q1-M1-H5.pep
PWDAHILFAGVEIPRTLRSQNIRKGLRGDSVVLMGKNTMMKRSVRMHAEKTGNQAFLNLIPLLQGNVGLIFTKGDLKEVSEEVAKYKVGAPARVGLGAPID

SEQ ID NO: 77821 - protein, 115 aa, Gossypium hirsutum
  unsure (1)..(115): unsure at all Xaa locations
  Clone ID: uC-gsronu33B146h08b1.pep
LLDLPTRPFFRSPTRTAKYKVGAPARVGLVAPIDVVVPPGNTGLDPSQTSFLQVLNISTKINKGTVEIITPVELIKKGEKVGSSEAALLAKLGIRPFSYXLVVLSVYDNGSIFSP

SEQ ID NO: 77822 - protein, 59 aa, Gossypium hirsutum
  Clone ID: uC-gsronu33B041c02b1.pep
IFIGLRGDSVVLMGKNTMMKRSVRMHAEKTGNQAFLNLIPLLQGNVGLIFTKGDLKEVM

SEQ ID NO: 77823 - protein, 110 aa, Gossypium hirsutum
  Clone ID: GOSHI-09MAY01-C8528_3.pep
MSRVYVGNLDPRVSERDLEDEFRVFGVIRSVWVARRPPGYAFIDFDDHRDAEDAIRELDGKNGWRVELSHNSRGRGGPGGGSGGGGGGGRGRSGGSDLKCYECGEPGHFA

SEQ ID NO: 77824 - protein, 185 aa, Gossypium hirsutum
  Clone ID: GOSHI-09MAY01-C8528_2.pep
MSRVYVGNLDPRVSERDLEDEFRVFGVIRSVWVARRPPGYAFIDFDDHRDAEDAIRELDGKNGWRVELSHNSRGRGGRGGGGGGGGGRGRSGGSDLKCYECGEAGHFARECRTRGGSGRRRSRSPRYRRSPSYGRRSYSPRGRSPRRRSPSPRGRSYSRSPPYRGREELPYANGNGARERRRSRS

SEQ ID NO: 77825 - protein, 179 aa, Gossypium hirsutum
  Clone ID: GOSHI-09MAY01-C8528_1.pep
MSRVYVGNLDPRVSERDLEDEFRVFGVIRSVWVARRPPGYAFIDFDDRRDAEDAIRELDGKNGWRVELSHNSRGRGGRGGGQGRSGGSDLKCYECGEPGHFARECRMRGGSGRRRSRSPRYRSSPSYGRRSYSPRARSPRRRSPSPRGRGHSKSPPYRGREELPYANGNGARERRRSRS

SEQ ID NO: 77826 - protein, 95 aa, Gossypium hirsutum
  unsure (1)..(95): unsure at all Xaa locations
  Clone ID: uC-gsronu33B080h03b1.pep
MSRVYVVNLYPPVSERHLEDEXRVSAVIRSVWVARRPPGYAFIDSDDHRDAEDAIRELDGKNGWRVELSHNSRGIGGRRGGGSGSCRSRRKHSCG

SEQ ID NO: 77827 - protein, 82 aa, Gossypium hirsutum
  Clone ID: LIB3135-060-Q1-K1-H11.pep
MAEAAVFAFCTLTTHHLSFESQKETLSRVYLGNLDQQFSYRNLENKFRAFEVIRRVWFVQRQPVFPFINFKNPKTPKNPIPN

SEQ ID NO: 77828 - protein, 68 aa, Gossypium hirsutum
  Clone ID: LIB3166-002-Q1-K1-G7.pep
MSGDYVGNLYPKSCEPDLKHELCVFGVIRNVWVAKRPPGYAFIDFDDHRDSEDAIRELNCKNGWRVEL

SEQ ID NO: 77829 - protein, 218 aa, Gossypium hirsutum
  Clone ID: GOSHI-09MAY01-C8458_1.pep
MVFWVFGYGSLVWNPGFEYDEKVIGFIKDYRRVFDLACIDHRGTPEDPARTCTLEHIEGAVCWGAAYCVRGSPEKERAAMLYLERRECEYDQKTLVDVFKETDPLRPALSGVIVFTSTPDKVSNKYYLGPAPLEEMAWQIATAVGPCGNNRDYLFSLEKAMFDIGHEDDLVIKLANEVRKVLGTMAKEKKLVGSPLKPLKSQTQHRSHQFSCICFLRK

SEQ ID NO: 77830 - protein, 144 aa, Gossypium hirsutum
  unsure (1)..(144): unsure at all Xaa locations
  Clone ID: LIB3585-040-P1-K1-H6.pep
DFRHFTHLSCFGDICTPEDPPKTCTLEHIERTACXCADYCVLLNPEKEXSINAVLLDEGXCEYYHNTLVDXFKETDPLRPALSEVIYFTSTPDKVSNXYYLEPAPLEEMALQIATADGPCGNNMHYLFSLDKAMFDICHDDDLV

SEQ ID NO: 77831 - protein, 81 aa, Gossypium hirsutum
  unsure (1)..(81): unsure at all Xaa locations
  Clone ID: LIB3166-002-Q1-K1-A2.pep
MVFWVFGYGSLVWNPGFEYDEKVIGFIKDYKRGFDLACIDHRGTPENPARTCTLEHIEXAVCWGAAYCVRGSPEGERAHGV

SEQ ID NO: 77832 - protein, 125 aa, Gossypium hirsutum
  Clone ID: GOSHI-09MAY01-C8478_1.pep
MNFLLGAFKPACNILITFSDAKTRKQVPMKKENGQMVMVPLFQSQENIAGKISIEPLQGKKIEHNGVKVELLGQIEMYFDRGNFYDFTSLVRELDVPGDIYERETYPFEFSTVEMPYETYSGVNV

SEQ ID NO: 77833 - protein, 45 aa, Gossypium hirsutum
  Clone ID: LIB3189-010-P1-K1-H6.pep
LVKNKLTNHSDLEAYLLASFSMGKCDQDIACRLESSKQEIHAVTI

SEQ ID NO: 77834 - protein, 206 aa, Gossypium hirsutum
  Clone ID: GOSHI-09MAY01-C8788_3.pep
MGGKISMAAFFVVLAANVLQSTYGATYKVGGSTGWRVPTNIDFYEDWADDKVFVVGDALVFNFTTGKHNVAVVTEAAYEACNTTDTITIICDGPARITLNRTGNFYFICAVPGHCSGGQKLNVEVRNGNNRTAAVPAPGPSPTTTPVATSPTTSTPPTAATPTSPGTPTATAPGTSSPPPGTNSASSLVSTLSPVFFMAIALVLMC

SEQ ID NO: 77835 - protein, 167 aa, Gossypium hirsutum
  unsure (1)..(167): unsure at all Xaa locations
  Clone ID: GOSHI-09MAY01-C8788_2.pep
MSGKITMAMAALFVVLAANVLQSTNGVSFTVGDFTGWRKPIKEDFYQNWAHGKSFVKGDVLGFKSGLEKSEKVAEVTEKAYDLCEIASTISSAIPIPINITLNXPGAYYFISTIADNCWNGQKLNITVGDESNPTAAVPAAGPSLTTSPGTSIPPLVTNSASSLCST

SEQ ID NO: 77836 - protein, 192 aa, Gossypium hirsutum
  Clone ID: GOSHI-09MAY01-C8788_1.pep
MSGKITMAMAALFVVLAANVLQSTNGATYTVGDSTGWRVPANNDFYDDWADNKAFVVGDVLVFNFTTGQHDVAEVTETAYDACTTANTISTVSTGPARITLNRTGDFYFICAVPGHCSGGQKLNVEVRNGNNGTAAVPAPGPSPTTTPVATSPTTSTPPTAATPTPPGTSSPPPGTNSASSLVSTLSPVFFM

SEQ ID NO: 77837 - protein, 81 aa, Gossypium hirsutum
  Clone ID: LIB3146-032-Q1-K1-D2.pep
YFYACGFAGFKSGLEKSEKVAEVTEKAYDLCEIANTISSAIPIPINITLNRTGAYYFISTIADNCWNGQKLNITVGDESNP

SEQ ID NO: 77838 - protein, 81 aa, Gossypium hirsutum
  Clone ID: LIB3166-006-P1-K1-C10.pep
EHGKFSMSGKITMAMAALFVVLAANVLQSTNGATYTVGDSTGWRVPANNDFYDDWADNKASAVGDVLGESLSFKTFVNRAC

SEQ ID NO: 77839 - protein, 138 aa, Gossypium hirsutum
  Clone ID: GOSHI-09MAY01-C8708_2.pep
DNSGGETELPEIDPRAEDRELRNHLLRKYSGYLSSLKQELSKKKKKGKLPKEARQKLLSWWELHYKWPYPSETEKVALAESTGLDQKQINNWFINQRKRHWKPSEDMQFMVMDGLHPQNAALYMDVHYMGDGPYCLGP

SEQ ID NO: 77840 - protein, 276 aa, Gossypium hirsutum
  unsure (1)..(276): unsure at all Xaa locations
  Clone ID: GOSHI-09MAY01-C8708_1.pep
HQQKGNESSSEVEAIKAKIIAHPQYSNLLEAYMDCQKVGAPPEVVVRLAAVRQEFEARQRSSVTSRDNSKDPELDQFMEAYYDMLVKYREELTRPIHEAWDFMRRIEAQLNMLANGPVRIFNSDENCEGVASSEEDQENSGGETELPEFDPRVEDRELKNHLLRKYSGYLSSLKQELSKKKKKGKLPKEARQKLLSWWELHYKWPYPSESGKVALAESTGFXTRKQINNWVINQRKRHWKPSEDMQFMVMDGLHPQNAALYMDGHYMGDGPYRLGP

SEQ ID NO: 77841 - protein, 69 aa, Gossypium hirsutum
  Clone ID: LIB3166-005-P1-K1-C12.pep
FSIFEKSTLIVSCLPIPYDDRQGCRSLLSGPGCLPVILMCKGTVSLSVCTPLHFTHNIMLILSFGIFLC

SEQ ID NO: 77842 - protein, 199 aa, Gossypium hirsutum
  unsure (1)..(199): unsure at all Xaa locations
  Clone ID: GOSHI-09MAY01-C8698_1.pep
QEDALLKAIDFGLSIFFKPGERFTDVVGSPYYVAPEVLRKHYGPEADVWSAGVILYILLSGVPPFWAENEQGIFEEVLHGDLDFDSDPWPSISESAKDLVRKMLIRDPRKRLTAHEVLCHPWIQIDGVAPDKPLDSAVLSRMKQFSAMNKLKKMALRVIAESLSEEEIPGLXELFQMIDADNSGPIPFEDLKPGLKKWE

SEQ ID NO: 77843 - protein, 136 aa, Gossypium hirsutum
  Clone ID: GOSHI-09MAY01-C108663_1.pep
NSRVDRTRPEKLAFVALDYEQELETAKSRSSGEMSYELPDGQVITIGAERFRCPEVLLQPSLIGMEAPGIHETTYNSIMKCDVDIRKDLYGNIVLSGGTTMFPGIADRMSKEITALAPSSMKIKVVAPPERKYSVW

SEQ ID NO: 77844 - protein, 232 aa, Gossypium hirsutum
  Clone ID: GOSHI-09MAY01-C8198_1.pep
MIRNSERKASSIISLQTSNLRSAFLGEKNGSCVSSIPITRVSLVRKAIECKESRIGKQPITVPSNVTITMEGQDIKVKGPLGEMALTYPREVKVDREESGALRIRKSVETRRANQMHGLFRTLTDNMVVGVSKGFEKRLQLIGVGYRATLEGKDLVLSLGFSHPVRMAIPDDIQVKVEENTRIVVSGYDKSDVGQFAVTIRKWRPPEPFKGKGVKYADKVVRRKVGKAGKKK

SEQ ID NO: 77845 - protein, 232 aa, Gossypium hirsutum
  unsure (1)..(232): unsure at all Xaa locations
  Clone ID: GOSHI-09MAY01-C8108_1.pep
KATDSPLPTVPGYDVXGVVVKVGSQVKELKEGDEVYGNINEKALEGPRQFGSLAQYTAVEEKLLALKPKNLDFSQAAGLPLAIETAYEGLERTGFSSGKSILVLNGSGGVGSLVIQLAKRVFGASKVAATSSTGKLEVLKSLGADLAIDYTKENFEDLPEKFDVVFDAIGQCDRAVKAVKEGGSVVALTGAVTPPGFRFVVTSKGEVLKKLKLYLESGKGEPVVDPXGPFPF

SEQ ID NO: 77846 - protein, 138 aa, Gossypium hirsutum
  unsure (1)..(138): unsure at all Xaa locations
  Clone ID: GOSHI-09MAY01-C8138_1.pep
MASLQVLHATNLKQSPLQGFLPLSSRYAVAAPLKSTVLSRTKTIGQKNQKRSFTVVAAVGDVSADGTNYLIAGAARVALGGTAFPIFFSRKDTCXECDGAGFVRKAGATLRPNAARKDQAQIVCARCNGLGKLNQIDK

SEQ ID NO: 77847 - protein, 271 aa, Gossypium hirsutum
  unsure (1)..(271): unsure at all Xaa locations
  Clone ID: GOSHI-09MAY01-C8088_1.pep
MGIVEEARNLKGLGSGDRVIVLAHGFGTDQSVWKHLVPHLVDDFRVVLYDNMGAGTTNPEYFDFNRYATLEGYAYDLLAILEEIHVDSCIFVGHSVSAMVGAIASISRPDFFSKIIMISGSPRYLNDVDYYGGFEQEELDQLFEAMEANYKAWCSGFAPLVVGGDLESVAVQEFSRTLFNMRPDISLSVAQTIFQSDMRQILNLVTVPCHILQSVKDLAVPVVVSEYLYQNLGGESIVEVMSSDGHLPHLNXHKFAIPVLLKHIRYDISVA

SEQ ID NO: 77848 - protein, 77 aa, Gossypium hirsutum
  unsure (1)..(77): unsure at all Xaa locations
  Clone ID: LIB3165-025-P1-K1-A7.pep
EAHNMKVLGSGDRVIDLAHGFGTDQSVWKHLVPHLVDYFRVVXYDNMGAGTTNPEYFDINCYAXLSEGYAYDFACVP

SEQ ID NO: 77849 - protein, 275 aa, Gossypium hirsutum
  Clone ID: GOSHI-09MAY01-C8008_1.pep
MEFLMKICLLFLCGLISHFVNMFFQKRNQQCYMLGYECFKAADDRKLDTDACVKVVLRNKNLGLDQYRFLLKTIVSSGLGEETYGPRNVIDGREEFPSENDAHAEMDEIMFSTLDTLFEKTGVSPSEIDILVVDVSLFSPAPSLTSRIINRYKMRDNIKSFSLSGMGCSASMVAIDMVQQLFKTYKNQFAIVVSTESIARHWYCGKEKSMMLSNCLFRNGGCSILLTNKRDLKDRCLLKLKCAVRTNFGSIYLGLGVPFCLTRWKGMMMAGEELD

SEQ ID NO: 77850 - protein, 237 aa, Gossypium hirsutum
  Clone ID: GOSHI-09MAY01-C8358_1.pep
MESVVWQGLALSGIFSWIVITCYFDVTKKIRSLLQPWVSHHVVSGTSIILKIQKHQHKFLDALFSGLSCIVSVPFYTAFLPLLFWSGHGKLARQMTLLMALCDYLGNCIKDVVSAPRPNCPPVRRITATKDEEENALEYGLPSSHTLNTVCLSGFLVCYVLSYTQCEDAFVKLGAVTLACLLVGFIGSGRIYLGMHSLIDIIGGLVFGFMILAIWLTVHEYCDAFIVSGQMLHHLWA

SEQ ID NO: 77851 - protein, 102 aa, Gossypium hirsutum
  Clone ID: GOSHI-09MAY01-C8348_4.pep
HASELNSTQMALFLCVLFLLLSSASACDRCLHQSKAAYFSKASALSAGACGYGSLALGLSGGHLAAGVSSLYKDGAGCGACFQIRCKNSTLCSSEGTRITLT

SEQ ID NO: 77852 - protein, 89 aa, Gossypium hirsutum
  Clone ID: GOSHI-09MAY01-C8348_2.pep
TIFLFAAQVGSANWNFMCRNHGAVWDTSRVPNGALQFTFGVTSGFVGKWIRAKSVLPAEWITGVIYDSGVQITDIAKEGCSPCDDSHWR

SEQ ID NO: 77853 - protein, 280 aa, Gossypium hirsutum
  Clone ID: GOSHI-09MAY01-C8348_1.pep
PTRPPTRPPTPPPAPLLNSTQMALFLCVLFLLLSSASACDRCLHQSKAAYFSKASALSAGACGYGSLALGLSGGHLAAGVSSLYKDGAGCGACFQIRCKNSTLCSSEGTRITLTDLNHNNETDFVLSSRAFMAMANKGMGRDILKLGIVDVEYKRIPCEYKNQNLAVRVEESSQKPTYLAIKLMYQGGQTEVVAMDVAQVGSANWNFMSRNHGAVWDTSRVPNGALQFRFLVTSGFDGKWIWAKSVLPAEWKTGVIYDSGVQITDIAKEGCSPCDDSHWR

SEQ ID NO: 77854 - protein, 142 aa, Gossypium hirsutum
  Clone ID: uC-gsronu33B057d12b1.pep
RLRVRSTQMALFVCVLFLLLSSASACDRCLHQSKAAYFSKASALSAGACGYGSLALGLSGGHLAAGVSSLYKDGAGCGACFQIRCKNSTLCSSEGTRITLTDLNHNNETEFVLSSRAFMAMANKGIGRDILKLGIVDVEYKQ

SEQ ID NO: 77855 - protein, 113 aa, Gossypium hirsutum
  unsure (1)..(113): unsure at all Xaa locations
  Clone ID: LIB3166-040-P1-K1-A12.pep
LNSTHLFLFLCFLFRGGSSASARDRCLHQSKAAYFSKASALSAGACGYGSLALGLSGXHLAAGDSFLYIDRSLLCSFFSVFVPVFLLYLNYILYTFVFPPHLLLLSPFSLYLF

SEQ ID NO: 77856 - protein, 256 aa, Gossypium hirsutum
  Clone ID: GOSHI-09MAY01-C8368_1.pep
MATHSRPPPPRPLDLDLTIVSAKHLKNVNWQNGDLKPYAVFWVDPDRRLSTRSDDSGSTRPVWNERFTLPLVVPPHETVLTLEIFHSKPSETPKPLVATLRVELKELPDLDDGSKIRTFSLLRPSGRPQGKIRLKLGIRERPLPPPHDYHFAPPSSYYYTNAPPPPRYSAPPYVSLPPPPPPPSSSPPPPNPPYSSIPEGYPPYYSSHYYSSPPPPMPPRPFFERASSYGTPSAPVDYSPYDQKPRGGSKIGVGTG

SEQ ID NO: 77857 - protein, 142 aa, Gossypium hirsutum
  Clone ID: GOSHI-09MAY01-C108323_1.pep
MKFEVEVVLACFVTLILIQQVLCDEFSKSSGSNKWTCTCSSLHPAKQSDVLKSNCSRSCNCSPVQPNGDRWKCLCDSDGFPKAAVDNRDTTCFTACNCTAGSFSEAPLRNNYANTVAVIVLLLCVNLTTLALLASTTCYFFP

SEQ ID NO: 77858 - protein, 369 aa, Gossypium hirsutum
  Clone ID: GOSHI-09MAY01-C8308_1.pep
GFNIYVGGGMGRTHRMEATFPRLGEPLGYVPKEDILYAIKAIVATQRDHGRRDDRKYSRMKYLISSWGIEKFRNVVEQYYGKKFEPFHELPEWEFKSYLGWHEQGDGALFCGLHVDNGRIGGKMKKTLREVIEKYNLNVRITPNQNLILCDIRSAWRRPITTVLAQAGLLHPRYVDPLNLTAMACPAFPLCPLAITEAERGIPDILKRVRAVFEKVGLKYSESIVIRVTGCPNGCARPYMAELGLVGDGPNSYQIWLGGTPNQTQLARTFMNKVKVQDLEKVFEPLFYYWKRKRQPKESFGDFTTRMGFEKLHELVDKWEGPVQSPVRYNLKPFADKETYEAMEELAKLQNKSPHQLAMEVIRHFDAAH

SEQ ID NO: 77859 - protein, 149 aa, Gossypium hirsutum
  Clone ID: GOSHI-09MAY01-C8328_1.pep
MGFPVVYTDVFVPKFFVHTLSFLGFIRNLILSLFNYLGLSDFLETDTVWPENPTRTTPFKPPVSALLIREILPVVKFEELALVGGGDPPESCAVCLCEFEGKEEIRWLKNCKHVFHRTCLDRWMDHDQVTCPLWRTSVVPDEMQAEFNN

SEQ ID NO: 77860 - protein, 200 aa, Gossypium hirsutum
  unsure (1)..(200): unsure at all Xaa locations
  Clone ID: GOSHI-09MAY01-C8288_1.pep
MLSETLKNKYQLCEEIGRGRFGVISRVFCPSTQSSFACKSIDKRLLSDPTDRECLENEPKIMTLLSPHSNIVQIYDMFESDDTLQLIIDLCQPFTLYDKILEPDMSEPKAAAYMQQLMLGLAHCHRFGIVHRDIKPDNIFFDFRGNLKIGDFGSSTWLGGSXTADGLVGTPYYVAPEVVMGRAYNEKADVWSAGVVCTLC

SEQ ID NO: 77861 - protein, 222 aa, Gossypium hirsutum
  unsure (1)..(222): unsure at all Xaa locations
  Clone ID: GOSHI-09MAY01-C8258_1.pep
ITATLCRDFRFFFLFRLSPFVFFSPLKLTPLFPSLFFTQKSVRRMDGGTLHSLRTVEEVFRDFKGRRAGIIKALTADVGEFFEQCDPXRKNLCLCGLPTEQWEVTLPAEEVPPELSEPALGINFARDGMQEKDWLALVAVHSDAWLLAVAHYFGAWFGFDKADRKRLFTMINDFPTIFEIVSGSAKKQTKEKSSVSNHSSNKSKSSGKARGSGSAKTQRRAL

SEQ ID NO: 77862 - protein, 39 aa, Gossypium hirsutum
  Clone ID: GOSHI-09MAY01-C8278_4.pep
LPGFFGEYVGLTGARLDGAEMLACGLATHFVPSAVCIPS

SEQ ID NO: 77863 - protein, 112 aa, Gossypium hirsutum
  Clone ID: GOSHI-09MAY01-C8278_2.pep
HSFAHASGLCCSTCSSETGSTGHQGVGACLAREYRMVCHVMRGEFSKDFFEGCRAMLLDKDKNPKWEPSKLEHIADTTIDRYFSKVKDEDWEDLKPPTRSKFNLPPYVIAKL

SEQ ID NO: 77864 - protein, 383 aa, Gossypium hirsutum
  unsure (1)..(383): unsure at all Xaa locations
  Clone ID: GOSHI-09MAY01-C8278_1.pep
MSSSVSSQHDHVLVEENSFARILTLNRPKQLNALSFQMISRLLELFLAYEEDPNVKLVMLKGEGRAFCAGGDVVAVVHDIWAGGWRAGANFFMKEFSLNYLMATYSKPQVSILNGIVMGGGNGVSMHGRFRVATENSVFAMPETALGLFPDVGASYFLSRLPGFFGEYVGLTGARLDGAEMLACGLATHFVPSAKLPMVEAALCDADSSDPVIISSIIDQYCEKPSLKEQTVYNRLDVIDRCFSQRTVEEILSALEREXVDQRDGWIFATIQTLKKASPTSLKISLRSIRVGRVQGVGACLAREYRMVCHVMRGEFSNDFFEGCRAILLDKDKNPKWEPSKLEHIADTTVDRYFSKVKDEDWEDLKLPTRSKFNLPPYVIAKL

SEQ ID NO: 77865 - protein, 57 aa, Gossypium hirsutum
  Clone ID: LIB3825-019-Q1-K6-E3.pep
YPLIFSHLFLLLLVIQPPTFNFQSNPMSSSVSSQHDHVLSPSFSPFSAVLGFLLLLF

SEQ ID NO: 77866 - protein, 52 aa, Gossypium hirsutum
  Clone ID: GOSHI-09MAY01-C8238_1.pep
VGQGTGNFMIELSIKIFSENERGITVQNIRLFHHCLQQSLHHRNINETTQNL

SEQ ID NO: 77867 - protein, 130 aa, Gossypium hirsutum
  Clone ID: LIB3166-020-P1-K1-H10.pep
LLTKQSWSISSALGCSVLKLTEWSYSNCESLSSNDDWMAGKIVLCFASDYNQSLLNDAILSVKAAGGLGVIVSRSSSNYYPYAMNFPCLQVTYETGTQILYYIRSTSNPQVRLSPSRTHIGKPVSTNVAY

SEQ ID NO: 77868 - protein, 60 aa, Gossypium hirsutum
  Clone ID: LIB3493-036-P1-M1-D11.pep
GRVGYPEVAGVMPPRNCESLSSNDDWMAGKIVLCFASDYNQSLLNDAILSVKAAGGLGVI

SEQ ID NO: 77869 - protein, 203 aa, Gossypium hirsutum
  Clone ID: GOSHI-09MAY01-C9968_1.pep
PSLQVPTNYSLSARSTARGTPEAVVKKDGEAVWALPPEDLTARVKKLMEGLRSEFGGPQFEPHVTVVGAISLTADDALAKFWSACDGRKAYNATVDRVATGTFFYQCIFLLLHPTPEVAETSAHCSSHFGYKSSTPYMPHLSLLYADLTEEEKKKAQEKANMLDESISSLSFQISRLALYKTDTEDKTLKSWEKVAGCNLSPN

SEQ ID NO: 77870 - protein, 126 aa, Gossypium hirsutum
  unsure (1)..(126): unsure at all Xaa locations
  Clone ID: LIB3147-037-Q1-K2-H2.pep
KDVYSVWALLYEDVTARVKKLMEGLRSEFGGPQFEPHVTVVGAISLTADDALAKFWSACDGRKAYNATVDRVATGTFFYQCIFLLLHPTPEVAETSAHCSSHFGYKSSTXGEKKKAQEKLICWMKA

SEQ ID NO: 77871 - protein, 121 aa, Gossypium hirsutum
  Clone ID: LIB3166-019-P1-K1-F2.pep
LLRREAFFPQVRLSPALALRPPPRLYGVPVLLSFSRTTRSRPLVRAVISDDKAVESAKTSPLDQKHSNGSSDSSSKQVKAVVTIKKKMKENITEKIENQWEMLMNGIGRGILIQLISEEID

SEQ ID NO: 77872 - protein, 72 aa, Gossypium hirsutum
  Clone ID: LIB3083-091-Q1-L1-B10.pep
KGFSYSTALYSLMTARTRGLDFVVRKKKSSTGTPYSRGGDRRAVPEKVDLREEGFGLKANILYSGDREYQNP

SEQ ID NO: 77873 - protein, 456 aa, Gossypium hirsutum
  Clone ID: GOSHI-09MAY01-C9818_1.pep
MVCPEFSHPQSSSPMAKPRNRSFWCLPDAFLVFGVAFLALLLVASFWSFFTPTPNFEPTVTDPPSKLSMNPVDCSESGFGVNLKSDPKDPTFYDDPEMGYSLEKPVKDWDQKRAEWLKHHPSFAAGARERIVLVTGSQPKPCKNPIGDHLLLRFFKNKVDYCRIHGYDIFYNNLLLHPKMGSYWAKLPVVKAAMLAHPEAEWIWWVDSDALFTDMEFKLPLERYKNHNLVVHGWPKLIYEKKSWTSLNAGVFLIRNCQWSMDLINTWSSMGPMSKDYEKWGQIQRSTFKDKLFPESDDQSALVYLLYTEKEKYYDHIYLEGEFYFEGYWVEIVGGYENTTERYLEIERGAPKLRRRHAEKVSEQYAAFREEFLKEAGNGKGSWRRPLITHFTGCQPCSGDHNPMYAGESCWNGMVKALNFADNQVLHKYGFVHSDLDDSSTVTEIPFDYPADEGPW

SEQ ID NO: 77874 - protein, 129 aa, Gossypium hirsutum
  Clone ID: LIB3166-018-P1-K1-G2.pep
GQPFRQPFRQRVFFWSFFTPTRNFEPTVTDPPSKLNMNPVDCSESGFGVNLKSDPKNPTFYDDPEMSYSLEKPVKDWDKKRAEWLKHHPSFAAGARERIVLVTGSQPKPCKNPIGDHLLLRFFKNKVDY

SEQ ID NO: 77875 - protein, 309 aa, Gossypium hirsutum
  unsure (1)..(309): unsure at all Xaa locations
  Clone ID: GOSHI-09MAY01-C9838_1.pep
CPEFLQCINAAANLKGEHSQISPXTAPSWFDRYGSFKNEQMSHLYDARKTAMLKAAEKALIVDRPSDSMHALHSNEQVNAAAYPSQLDSACKSSKPIVSELISSHSLPPEITNQDLVVVRGRKRKSMVFELLPWHREVKQVSQRSQNISVAEVEWVHAANRLIEKVEDEPEMFEDWPPGVRSKRRLILTRQLMQQLLRAPPRVILSADASKSYEAVAYFVARSVLGDACSTACIPESDTAILPXVKAPSSEKLQKERNQSTLKXAEDFVIKTKKLENDLQSLDKRASILDLRLECQDLEKISVINRFAK

SEQ ID NO: 77876 - protein, 72 aa, Gossypium hirsutum
  Clone ID: LIB3829-012-Q6-N6-A10.pep
YKWPAMAGNDLRASIAFKFWSKDAPRDKKIIGQKKKKGKNQSSNDQRERHCTLSGRLRGIGSAITYLWEKNL

SEQ ID NO: 77877 - protein, 54 aa, Gossypium hirsutum
  Clone ID: GOSHI-09MAY01-C9588_4.pep
IYLLTTGARESAFRNSKTIAECLADELINAAKGSSNSYAIKKKDEIERVAKANR

SEQ ID NO: 77878 - protein, 209 aa, Gossypium hirsutum
  Clone ID: GOSHI-09MAY01-C9588_2.pep
MSTAVAATETSKDPTQPTSEVKLFNRWSFEDVQVTDISLSDYIGVQASKHATYVPHTAGRYSVKRFRKAQCPIVERLTNSLMMHGRNNGKKLMAVRIVKHAMEIIYLLTDQNPIQVIVDAIINSGPREDATRIGSAGVVRRQAVDISPLRRVNQAIYLLTTGARESAFRNIKTIAECLADELINAAKGSSNSYAIKKKDEIERVAKANR

SEQ ID NO: 77879 - protein, 211 aa, Gossypium hirsutum
  Clone ID: GOSHI-09MAY01-C9588_1.pep
MATDVAAPATAAPKDPTQPHLEVKLFNRWSFEEVQVADISLSDYIGVQASKHATYVPHTAGRYSVKRFRKAQCPIVERLTNSLMMHGRNNGKKLMAVRIVKHAMDIIYLLTDQNPIQVIVDAIINSGPREDATRIGSAGVVRRQAVDISPLRRVNQAIYLLTTGARESAFRNIKTIAECLADELINAAKGSSNSYAIKKKDEIERVAKANR

SEQ ID NO: 77880 - protein, 113 aa, Gossypium hirsutum
  unsure (1)..(113): unsure at all Xaa locations
  Clone ID: LIB3582-039-P1-K1-G10.pep
LQDPPTSHPDVRLFNRWSSXEDQVGDITWSDYIGGQPCKHATYVPHTAGRYCTKRYRKAHCPIGERLANSLMMHGRNNGKKLIAVRIVKHAMEMIYLLADQNPIQVIGDAIIN

SEQ ID NO: 77881 - protein, 70 aa, Gossypium hirsutum
  Clone ID: LIB3145-023-Q1-K1-D2.pep
LVNLGSKHNTHCMSRTPKKKRIAHKVLIKTIEILPSFSSVIRTRSSFSFLILSSTSICARREASNSLRNA

SEQ ID NO: 77882 - protein, 186 aa, Gossypium hirsutum
  Clone ID: GOSHI-09MAY01-C9518_1.pep
PPCFTAVASRPFPLLLPASHFSSVRRFPPLLLICRLPPPSVTLSQRRKKKTGGPSRQCQVCNQTQSKYKCPSCLIPYCSLACFKTHKETPCEKSESVKEKSGTPSVNLGSNDNAITTSVKPESTNDAVPPSVEPKSSEGRPTASREFLVGRKLEVEDPSEVLQIMQMQAIASSNDIREALKDEHLQ

SEQ ID NO: 77883 - protein, 68 aa, Gossypium hirsutum
  unsure (1)..(68): unsure at all Xaa locations
  Clone ID: LIB3166-015-P1-K1-C6.pep
MGGPSRQCQVCNQTQSKYKCPSCLVPYCSLACFKTHKGTPSVNLXSIDNAVTTCVKPGVTNDAVPPSV

SEQ ID NO: 77884 - protein, 169 aa, Gossypium hirsutum
  Clone ID: GOSHI-09MAY01-C9538_1.pep
MGTKSKTQGFAFLLLVSTAHSFYLPGVAPRDLQRGDPLYVKVNKLSSTKTQLPYDYYYLKYCKPSKIVNNAENLGEVLRGDRIENSVYTFEMREDQPCKVVCRIKLDADSAKNFKEKIDDEYRVNMILDNPPVAVRRQRRDGSQSTTYEHGFRVGFKGNYAGSKEEKYF

SEQ ID NO: 77885 - protein, 142 aa, Gossypium hirsutum
  Clone ID: GOSHI-09MAY01-C9488_1.pep
QKLLAAISTGTLVEEAIDECRSLSKSVAKDEPVLLEGEWQMIWSSQVETDSWLENAGNGLMGSQIVKNEQMKFLVSILPGIRFSMIGKFVKSGTKTYDVTMNDAALIVGPFGYPLEMENKINMELLYNDDKIRISKGYNNIL

SEQ ID NO: 77886 - protein, 69 aa, Gossypium hirsutum
  unsure (1)..(69): unsure at all Xaa locations
  Clone ID: GOSHI-09MAY01-C109773_1.pep
NAGAMMSVDETLMCSFQILKPADKKTXFNFGGTATARPGSASASVFGSTTTAKPGNTPAGVKSFLGTRI

SEQ ID NO: 77887 - protein, 250 aa, Gossypium hirsutum
  Clone ID: GOSHI-09MAY01-C9748_1.pep
ELMAISLAAESKREEEKAKGVNSDNAENPDIVPFEDNEEEEEEESEEEDESFGAAAQGRGRGRGIMWPPHMPLARGARPMPGMRGFPPMMMGGDGFSYGPVTPDGFGMPDLFGAPRPFAPYGPRFSGDFTGPASGMMFPGRPPQPGGMFPSGGIGMMMGPGRAPFMGGMGPTGANPARGGRPVGMPPMFPLPPAPASQNSGRAIKRDQRTPTNDRSSAGSEQGRGQEMGGPGGGLEDETQYQQEGQKAHH

SEQ ID NO: 77888 - protein, 66 aa, Gossypium hirsutum
  Clone ID: LIB3166-016-P1-K1-H6.pep
FGYSLLFVSLQADAAAEGDAIVEGTVYIDGKAPIGIIDYDLRCATLDWWPPEKCDYWTCKWGLAGL

SEQ ID NO: 77889 - protein, 79 aa, Gossypium hirsutum
  Clone ID: LIB3272-035-P1-K1-C9.pep
LGDSSLFVSLQATAAAEGDAIADGTVYIDGKAPIGTIHDHFPGTTVDCWPSNKSNIGTCFWRQAILLNLTPNNYIFSNA

SEQ ID NO: 77890 - protein, 82 aa, Gossypium hirsutum
  Clone ID: GOSHI-09MAY01-C9678_1.pep
MNSIFSSFDALWGELLGQAVRSSFASTTNKDGVRLFSGRVKVTTEEDMKNKQQGNVEKKQQRAPRFAPELDGLHCFETLVSY

SEQ ID NO: 77891 - protein, 51 aa, Gossypium hirsutum
  Clone ID: LIB3166-021-P1-K1-C2.pep
ILSFMGLKLFNNIDSFFFLIAEARNSYCICKNLGLIEILYLKSPFFLALWF

SEQ ID NO: 77892 - protein, 217 aa, Gossypium hirsutum
  unsure (1)..(217): unsure at all Xaa locations
  Clone ID: GOSHI-09MAY01-C9668_1.pep
MGVGHSSLSSCSVDSLCIIAFTAQPKTSSFSNSNRQKPLFPTKKHSPFAVLKIGTLNCARVAGEMEIGKGIAAAGKPIVDLHGIDDGLIQKIVYDALVWSSLHGLVVGDRNDQRSGKLPGVGMVHAPIALLPTSFPESHWKQACELAPICNELIDRVSLDGKFLQDSLARTKKXDAFTSRLLDIHSRXLEMNKKEEIRLGLHRSNYMLDEKTKLLLH

SEQ ID NO: 77893 - protein, 226 aa, Gossypium hirsutum
  Clone ID: GOSHI-09MAY01-C9638_1.pep
MVDLDWKAKMVSSDISNKSSKLSIPTPLRLLNMSSPLSTSASASSAYEYYLRLPELRMLWEAKEFPAWQNEVVLKPALHALEITFRFISIVLSDPRPYSNRREWTRRLESLATSQIELIAMICEDENEDKTTAGTAPIVDLTSSNGVLARECSSTEVWKVHGETTVVNRTSKSSLLPRLATWQKSEDVAEKILYSIECEMRRCSYTLGLGEPNLSGKPNLDYDAVC

SEQ ID NO: 77894 - protein, 378 aa, Gossypium hirsutum
  Clone ID: GOSHI-09MAY01-C9628_1.pep
ASARQLAKALEVPLVNDLGYTKRYVRCLQISEVVNSMKDLIDYSRETRTGPMESLAKFPRRTSTSSGFHAQSQQPEEQHQQQQQTPQQQMMTQSSNGDQSSAQASGMQLAANNGVANVNNSLNVASASTSAGTIAGPLHQNSMNSRQQNSMNNASSPYGGNSVQIPSPGSSSTIPQTQANPSPFQSPTPSSSNNPPQAPHGALAASSHMSSANSPAMNMPMQQPALSSEADPNESQSSVQKIIHEIMSSQLNNTGGMVGAGTLGNDVKSVNGMLPPSNNMVLSGGNTLVANGTISNNSVIGGVGFGSMSGGLGQSAMVNGIRATMGNNPVMNGRMGMAQMARDQLMNHQQQDMGNQLLNGLGAVNGFNNYQFDWKPSP

SEQ ID NO: 77895 - protein, 331 aa, Gossypium hirsutum
  Clone ID: GOSHI-09MAY01-C9158_1.pep
MNYFPDEVLEHVFDFITSHKDRNSVSLVCKSWYKIERYSRLGLASGNCYSISPERLIARFPGLKSLTLKGKPHFADFNLVPHDWGGFVYPWIEALAKSRIGLEELRLKRMVVSDESLELLSKSFVNFKSLVLVSCEGFTTDGLAAIAANCRFLRELDLQENEVDDHRGHWLSCFPESCTSLISLNFACLRGEVNLGALERLVSRSPNLKSLRLNRAVPLDTLQKLLMRAPQLVDLGIGSYVHDPFSEAYNKLKIAIQRCKSIRSLSGFLEVAPHCMSAIYPICGNLTFLNLSYAPGLHGNKLMKLIQHCRKLQRLWVCPFNYLQSSCRYSI

SEQ ID NO: 77896 - protein, 168 aa, Gossypium hirsutum
  unsure (1)..(168): unsure at all Xaa locations
  Clone ID: GOSHI-09MAY01-C9168_1.pep
MEFSQADFDRLLVAEHTRKTSEVNYAKDPLDAENLTKWGGALLELAQFQTVSDAKQMINDAISKLDEALMINPSKHEXLWCMGNALSTTAFMATDSDEAKVSFDKAAQFFQRAVDADPGNEPYQKSLEVAAKAPRLHMDFQKAAATNRVWVGHLLLLQLQLLPRRKNQ

SEQ ID NO: 77897 - protein, 184 aa, Gossypium hirsutum
  unsure (1)..(184): unsure at all Xaa locations
  Clone ID: GOSHI-09MAY01-C9138_1.pep
MGSAAPEYQPLLLGLDSHSRIPDLSSVAIEEFLQHRPIALRWWPRLVAWESRLLWLLSGSSIVLSIFNYMLSFVTLMFTGHLGALELAGASIACVGIQGLAYGIMLXMASAVQTVCGQAYGAKQYSAMGIICQRAIILHLGAAVLLTFLYWFSGDVLQAIGQTESIAQQGQVFSRGLIPQIYAF

SEQ ID NO: 77898 - protein, 111 aa, Gossypium hirsutum
  unsure (1)..(111): unsure at all Xaa locations
  Clone ID: GOSHI-09MAY01-C9058_2.pep
ASAHASAHASAHVFSCSRVRLTFLVAESCLIAGATRNAYHTKYRGMIYAQNFSCETLRKGVFIAGAVFVVATMILNVYYYMYFAKATTTXPAHRANRTNSTVWDDWFMLKG

SEQ ID NO: 77899 - protein, 191 aa, Gossypium hirsutum
  Clone ID: GOSHI-09MAY01-C9058_1.pep
MGEGKGSTLVHLLVVVLSLVAFGFAIAAERRRSVGTVVKDDITNSTYCVYNSDVATGYGVGAFLFLLSGESLLMGVTKCMCFGRPLAPGSDRAWSIIYFVSSWLTFLVAEACLIAGATRNAYHTKYRGMIYAQNFSCETLRKGVFIAGAVFVVATMILNVYYYMYFAKATTTMPAHKANRTNSTVGMTGYA

SEQ ID NO: 77900 - protein, 230 aa, Gossypium hirsutum
  Clone ID: GOSHI-09MAY01-C9078_1.pep
MTTAARPTWQPAKGGNEQGGTRIFGPSQKYSSRDLAAHTTLKPRKDGQDTQDELQKRNLRNELEERERRHFSSRDKSYNDDRDHRKGNHLLLEGAKREAEDRIVPRSVDADDSDVEVNSDNESDDDDDDDDEDDEEALLAELERIKKEKAEEKLRQEKLEQEEQLKAKEAELLRGNPLLNNPTSFGVKRRWDDDVVFKNQARGETKPQKRFINDTIRNDFHRKFLLKYMK

SEQ ID NO: 77901 - protein, 230 aa, Gossypium hirsutum
  unsure (1)..(230): unsure at all Xaa locations
  Clone ID: GOSHI-09MAY01-C9068_1.pep
RDRNKINRQVTFAKRRMXFTQKAYELSILCDAEVALIIFSNRGKLYEFSSSNSIADTLERYNRCTYGALEPGQTEIETQRNYQDYLKLKAKVEVLQHSQRHFLGEDLGDLGSEELEQLERQLDFSLKKIRSLKMEHMVEQLSKLERKEEMLLETNRNLRRKLDENASTLRSTWETGEQSVPCNLQHPRFLEPLQCTTSMQISYNVPADLTHENIATTTSAPSGFIPDWML

SEQ ID NO: 77902 - protein, 86 aa, Gossypium hirsutum
  Clone ID: GOSHI-09MAY01-C109013_1.pep
DQLFLLTIQAPHIVRISEQLEAAFDDEAEKLILRNRYCPSLSANSPVSLFLGHEHYVTLCVPSSYFNPFCPWTIFFLFLPNNWGLA

SEQ ID NO: 77903 - protein, 150 aa, Gossypium hirsutum
  unsure (1)..(150): unsure at all Xaa locations
  Clone ID: GOSHI-09MAY01-C9398_1.pep
MRKAGPRKDGNYTNPCLTMHQPWASLLVYGIKRIEGRSWPAPIRGRLWIHAAGKVPDESTIKAMEDFYREIYALNGITDIKFPEHYPISRLLGCVEXWLACLTCEEIGFNGRHLPEAVRLXEGPTDFCWLCEQPKKXLLVPFEMPGYQRI

SEQ ID NO: 77904 - protein, 145 aa, Gossypium hirsutum
  unsure (1)..(145): unsure at all Xaa locations
  Clone ID: GOSHI-09MAY01-C9378_1.pep
RNPATTLRFTVIFLFSGYFYPEPLTALAVTALATAPPSATGSFRTRRSTNGVSRFRMSVRSGSVSMAAAPMLTKLQQDCATPXLPVLRNVAASMSDDXRAGLAVDGGSDLKMILSYVDSLPTGDEKGLFYALDLGGTNFRVLRVE

SEQ ID NO: 77905 - protein, 85 aa, Gossypium hirsutum
  Clone ID: GOSHI-09MAY01-C9248_3.pep
NKEVQRHDLGSTHDLPVQRHLWTLHAGLGGALPFQHPFFCFSCLKRSNLSQDLHTSKVAEGFSWSSVPYQKSKSGHFFKPVTRLY

SEQ ID NO: 77906 - protein, 63 aa, Gossypium hirsutum
  Clone ID: GOSHI-09MAY01-C9248_2.pep
LVLGARDMNWAQRKIYLYNDTFGLYMLDWWERYLFNTLVIVLMWFIFYNSSRYVTEFYKRHLS

SEQ ID NO: 77907 - protein, 80 aa, Gossypium hirsutum
  Clone ID: GOSHI-09MAY01-C9248_1.pep
MQGLGSEGDLFLGVRDMNWVQRKIYLYNVTFGLYMLDWWERYLFNTLVIVLVWFVFYNSSAIRNGLFSRGIYPRVGRWLW

SEQ ID NO: 77908 - protein, 62 aa, Gossypium hirsutum
  unsure (1)..(62): unsure at all Xaa locations
  Clone ID: LIB3189-050-P1-K1-F12.pep
GVRDMNWVQRKIYLYNVTFGLYMLDWWERYLFXLNTLVIVLVWVDIYNSSRYVTEFYMRHLS

SEQ ID NO: 77909 - protein, 151 aa, Gossypium hirsutum
  Clone ID: GOSHI-09MAY01-C9208_1.pep
MRLPLNTPRDGCCPVRLNRRLCALRSGCGCKQGPIHGSFNCQSRVSSPLGRRDYAAVAGEVASMRENRESSYGGFTNRGLLGPPARKSIDVSGFYPSHQSLSHRNLQASQVQQLKQQQLMKQLKHQHQYQQNYSLVFQNKGRNSNNNRPLG

SEQ ID NO: 77910 - protein, 276 aa, Gossypium hirsutum
  unsure (1)..(276): unsure at all Xaa locations
  Clone ID: GOSHI-09MAY01-C4958_1.pep
TQPPPPPNYPPSISTETVVQKLIVEMDKIPPRGVHHRRAHSDTTFRFDDLLLFDPSDLDLSSLDLPASSSNPTPPPVVPVPPTRPDDSSSNGHHPRSSHSNPRQISSHLRSLSVDSDFFDGLGLTGPAISGGAGDEKFGGKGVAGEKIVHHRNSNSMDGTASFEVESLMAVDGVKKAIAPDRLAELALIDPKRAKRILANRQSAARSKERKIRYTSELERKVQTLQTEATNLSAQVTILQRDTTGLTTENKELKLRVQAMEQPSAARDXLNESVRE

SEQ ID NO: 77911 - protein, 164 aa, Gossypium hirsutum
  Clone ID: LIB3585-027-P1-K1-G10.pep
SDLDLSCLDLPDSSSNPSLPPVAPVPAESSDDSSCNGPPRSTLNNPRHIRSLSVDSDFFDGLGLTGPAISGGAGDEKFGGKRGAGEKRVHHRHSNSMDGSTTASFDVESLMAVDGVKKTMAPDRLAELALIDPKRAKRILANRQSAARSKERKIRYTNELEKRF

SEQ ID NO: 77912 - protein, 250 aa, Gossypium hirsutum
  Clone ID: GOSHI-09MAY01-C4948_2.pep
MDFSNESRVLHRCSAQIGNLLLRSLWHLVHFIISICNFTLDIANVLESYLISSALLGRYKSLHIAKLPSRPPARPSEGAYQTSKIIELLQWLEAVGVKHVCLYDKEGILKKSKDFILENLDGAILFQDAHENNVLLDQQHMTLEFVSFSDGKEAVAKAANVLFMKYSKSGVTDQNQKEKIFTESQMSEALKTVGSGGPEPDLILVYGPARCHLGFPAWRIKYTEIVHMGPLKSMNYGSLNYAIYKFTMVR

SEQ ID NO: 77913 - protein, 257 aa, Gossypium hirsutum
  unsure (1)..(257): unsure at all Xaa locations
  Clone ID: GOSHI-09MAY01-C4948_1.pep
MDFAKLKRMLCYWIHQIVNILLRLTWHLLHFTIHLFYFAINIANALESHLISKGLLRRYKSLHISKLQYLAIVIESEDCRTSNVIELLQWLADLGVKHVCLYDMEGILKKSKDFILEKFDGATLFQENDVLLDQPLMTLEFASLSDGKEAVAKAANVLFMKYLKSGSTSSYQGEQIFTESQMGEALKTVGGNGPEPDLLLVYGPARCHLGFPAWRIPYTEIHLMGPLRSMXYGPLFKAVYNSPLCAPNLRQLKGCIY

SEQ ID NO: 77914 - protein, 92 aa, Gossypium hirsutum
  unsure (1)..(92): unsure at all Xaa locations
  Clone ID: LIB3148-038-Q1-K1-G1.pep
TIEFASLSDGKEAVXKAANVLFMKYLKSGSTSSYQGEQIFTESQMGEALKTVGGNGPEPDLLLVYGPAKCHLXFPAWRIRYTEIQHMGPLSL

SEQ ID NO: 77915 - protein, 87 aa, Gossypium hirsutum
  Clone ID: LIB3272-050-P1-K1-D11.pep
MSDIVNILLRLMWHLLHVTIHLCYFAINIANALESHLISKGLLRRYKSLHISKLQYLAIVIESEDCRTSNVIELLQWLADLGVKHVC

SEQ ID NO: 77916 - protein, 103 aa, Gossypium hirsutum
  Clone ID: GOSHI-09MAY01-C4968_3.pep
SGYEWARVNKDTGSNPHGYLPTHYEKVQMLLSDRFLGFYMIPDNGPWNYNFMGVKHTVSMTYGVKLGTPKEYYNEEQGPTHFLEFSNLEEGDTAQGDREDTFT

SEQ ID NO: 77917 - protein, 610 aa, Gossypium hirsutum
  Clone ID: GOSHI-09MAY01-C4968_1.pep
RGRVGNKIMKSNPALYVLRERIRKGLQLYSSEPTEPYLSSQNYGEIFSNQIIWFVDDTNVYRVTIHKTFEGNLTTKPINGAIFIFNPRTGQLFLKVIHTSVWAGQKRLGQLAKWKTAEEVAALVRSLPVEEQPKQIIVTRKGMLDPLEVHLLDFPNIVIKGSELRLPFQACLKIEKFGDLILKATEPQMVLFNIYDDWLKSISSYTAFSRLILILRALHVNNEKAKMLLKPDKTIVTEPHHIWPSLTDDQWMKVEVALRDLILSDYAKKNNVNTSALTQSEIRDIILGAEITPPSQQRQQIAEIEKQAKEASQLTAVTTRTTNVHGDELIVTTTSPYEQAAFGSKTDWRVRAISATNLYLRVNHIYVNSEDIKETGYTYIMPKNILKKFICIADLRTQIAGYLYGISPPDNPQVKEIRCIAMPPQWGTHQQVNLPSALPEHDFLNDLEPLGWLHTQPNELPQLSPQDVTSHSRILENNKQWDGEKCIILTCSFTPGSCSLTAYKLTPSGYEWGRVNKDTGSNPHGYLPTHYEKVQMLLSDRFLGFYMIPDNGPWNYNFMGVKHTVSMKYGVKLGTPKEYYNEDHRPTHFLEFSNLEEGETAEGDREDTFT

SEQ ID NO: 77918 - protein, 125 aa, Gossypium hirsutum
  Clone ID: LIB3825-019-Q1-N6-H7.pep
CIILTCSFTPGSCSLTAYKLTPSGYEWGRVNKDTGSNPHGYLPTHYEKVQMLLSDRFLGFYMIPDNGPWNYNFMGVKHTVSMKYGVKLGTPKEYYNEEHRPTHFLEFSNLEEGETVEGDREDTFT

SEQ ID NO: 77919 - protein, 159 aa, Gossypium hirsutum
  Clone ID: GOSHI-09MAY01-C4938_1.pep
MTKDRQIGVAMDFSKGSKAALKWTIDNLVDKGDTLYLIHVKPNQSDESRNLLWSTSGSPLIPLSEFREKEVMKHYEVEPDPEVLDLVDTASRQKEVNIVTKIYWGDARDKICESVADLKLDCLVMGSRGLGTIQRVLIGSVSNHVMVNATCPVTIVKGS

SEQ ID NO: 77920 - protein, 65 aa, Gossypium hirsutum
  Clone ID: LIB3148-027-Q1-K1-A7.pep
TKIYWGDARDKICESVAELKLDCLVMGSIGLATFQRVLMGRGTTILLVIPPGQVPLVKDPSAHGF

SEQ ID NO: 77921 - protein, 195 aa, Gossypium hirsutum
  Clone ID: GOSHI-09MAY01-C4888_1.pep
HASAHASADACSPTVHRDVKGGVSYWSGDFAARVADFGVAKVVDAAGKVAKSMSVIAGSCGYIAPEYAYTLRVNEKSDIYSFGVVILELVTGRLPIDPEFGEKDLVKWVCTTLDQKGVDYVLDSKLNPCFKEEMCKVLNIGLLCTSPLPINRPSMRRVVKFLQEAGAENQLKAAKKDGKLTPYYYEDGSDQGSVA

SEQ ID NO: 77922 - protein, 145 aa, Gossypium hirsutum
  unsure (1)..(145): unsure at all Xaa locations
  Clone ID: uC-gsflmaxxa088e08b1.pep
FCRVGSCKSRWVGWPTRYXIIPDAAEGLSYLHHDCLPPIVHRDVKSNNILLDGDFGARVADFGVAKVVDAAGKVAKSMSVIAGSCGYIAPEYAYTLRVNEKSDIYSFGVVILELVTGRLPIDLEFGEKDLLKGVCTTLDQKVWTY

SEQ ID NO: 77923 - protein, 267 aa, Gossypium hirsutum
  unsure (1)..(267): unsure at all Xaa locations
  Clone ID: GOSHI-09MAY01-C4858_1.pep
MASSTVFTGVSLFKSKNSTKLITSTRFSDSKQQLSLNSVKCCSKTTAATTEEATGRLVTVKNGNDSLEICRVLNGMWQTSGGWGRIDRDAAVEAMLRYADAGLSTFDMADHYGPAEDLYGIFINRVRRERPPEYLEKVRGLTKWVPPPVKMTSGYVRENIDVSRKRMDVPSLDMLQFHWWDYSNPGYLDALKNLTDLEEEGXIKTGALTNFDTERLQIILENGIPVGSNXQVPHSIVDMRPXQQKMPGLCQLTGVKLITFSLSLSLY

SEQ ID NO: 77924 - protein, 191 aa, Gossypium hirsutum
  unsure (1)..(191): unsure at all Xaa locations
  Clone ID: LIB3583-058-P1-K1-B3.pep
GKWPHPLSSPVSASSSPKTPLNVVTSTRFSDSKQQLSLNSVKCCSKTTAATTEEATGRLVTVKNGNDSLEICRVLNGMWQTSGGWGRIDRDAAVEAMLRYADAGLSTFDMADHXFYGFADGPAEDLYGIFINRVRRERPPEYLEKVRGLTKWVPXPVKMTSGYVRENIDVSRKRMDVPSLDMLXFHWWDYS

SEQ ID NO: 77925 - protein, 123 aa, Gossypium hirsutum
  Clone ID: LIB3166-030-P1-K1-F1.pep
PTRPPTRPAGLTTFDMADMYGPAEDLYGIFINRVRRERPPEYLEKVRGLTKWVPPPVKMTSGYVRENIDVSRKRMDVPSLDMLQFHWWDYSNPGYLDALKNLTDLKEEGKIKTCALTNFDTER

SEQ ID NO: 77926 - protein, 257 aa, Gossypium hirsutum
  Clone ID: GOSHI-09MAY01-C4848_1.pep
MNLPKPGFVFIEYYNHACAEYSRQKMMKPTFKLDDNAPTVSWADPRSAESFSNTQVKALYVKNLPKDITQDCLRKLFEHHGKILKVVVPPAKVGKENSRYGFVHFAERSSAMKALKNTEKYEIGGHVLECSLAKPQADQKSGASGSQKSSLDSSFPPLLGYGLVGGAYGGLGAGFGPAGFGQPLIYGQGPTPAGMAMMPMLLPDGRIGYVLQQPGVQPHTPPPQPHSSRGGASGSSSSGGRRSSNDSSRGRRRYNPY

SEQ ID NO: 77927 - protein, 78 aa, Gossypium hirsutum
  Clone ID: GOSHI-09MAY01-C4868_1.pep
RTGVARVLPSAVVSRASLLFYPFCFPLFTSYTLRRTGWMHYPTSSSPTRNKLSKQLIFNHLQTSNPRYFLRIQNKILV

SEQ ID NO: 77928 - protein, 173 aa, Gossypium hirsutum
  unsure (1)..(173): unsure at all Xaa locations
  Clone ID: GOSHI-09MAY01-C104803_1.pep
GIGPKSTACLFKEAVCVGERTINNEDCFILRLETASNVLKEQSSXGTGIIHHTFWGYFSLXSGLLMKFVDRKLVMMNPPFRKDRVFWETSVESVVHDYERIGGVDVAHCGISMTTLYWYGESLTXWRKIAEPWWIGEGGFIICGLSDETFLPPAHLMQRAALIKLDFSFSFFG

SEQ ID NO: 77929 - protein, 120 aa, Gossypium hirsutum
  Clone ID: GOSHI-09MAY01-C104813_1.pep
MAAEEGQVIGGPTLDSWKEQLQKGGQSKKLVVVDFTASWCGPCRFISPFLAELAKKFPNVMFLKVDVDELKEVAAEWDVDAMPTFLFLKEGKAVEKVVGAKKEELQQAVTKHMATSRTSA

SEQ ID NO: 77930 - protein, 180 aa, Gossypium hirsutum
  Clone ID: GOSHI-09MAY01-C4588_1.pep
MASVTVAFSPITTAASAPYSSVSDRRISVRLPGFRGLKSKSTSASVVPLFRSVIREPLIRGRGGRVVCEAQETAVDVSAVKEDAWQSLVLDCELPVLVEFWAPWCGPCRMIHPVVDELSKDYAGKLKCYKVNTDECPNIATQYGIRSIPTGMIFKNGEKKDAVIGAVPKSTLITCIERFL

SEQ ID NO: 77931 - protein, 282 aa, Gossypium hirsutum
  Clone ID: GOSHI-09MAY01-C4558_1.pep
ARPFVTHHNELNMKLYMRIAPELYLKELAVGGLDRVYEIGKQFRNEGIDLTHNPEFTTCEFYMAFADYNDLMELTEKMLSGMVKELTGSYKIKYHANGLDSAPIEIDFTPPFRRLDMVEELEKMANLNIPKPFSSDETNKYLADACEKLEIKCPPPQTTARLLDKLVGHFLEETCVNPTFIINHPEIMSPLAKWHRSKPGLTERFELFINKHELCNAYTELNDPVVQRQRFAEQLKDRQSGDDEAMALDETFCTALEYGLPPTGGWGLGIDRLAMLLTDSQN

SEQ ID NO: 77932 - protein, 268 aa, Gossypium hirsutum
  unsure (1)..(268): unsure at all Xaa locations
  Clone ID: GOSHI-09MAY01-C4518_1.pep
QAASSQRKTFGDFEEAVAKDATKTAVLDGTVHPLTSYVINYVKFLFDYKTTLEQLFQEFEESDTEAQLKTLTTRIMDALQTNLDGKSKQYKDPALTQLFXMNNMHYIVRSVRRSEAKDLLGDDWVQIHRRIVQQHANQYKRIXWAKVLQCVTIQGVAPTGGGGILGGDSGSGISRAMVKDRFKNFNAQFEDLHMRQCQWNVPDSELRESLRLAVAEVLLPAYRSFHKRFGPMAESGKSPCKYIKYKPEDLERMLSEFFEGKTCVEQKR

SEQ ID NO: 77933 - protein, 453 aa, Gossypium hirsutum
  unsure (1)..(453): unsure at all Xaa locations
  Clone ID: GOSHI-09MAY01-C4498_1.pep
QRPPSVRIRVNVLCPEFVQTEXGEKAGAKYITLLGGYVQMENVVKGAFDLIMDESRAGSCLWITNRRGMEYWPGPAEEAKYLVLSSSSSRRKISFRAPLGAQLPQRSEKVVVHKLTHNFRDATHIVRTPLKLPIESGHVLLKIIYAGVNASDVNFSSGRYFLGNRKDLSSLLPFDAGFEAVGIIAAVGDSVSNLEVGTPAAIMVYGGYAEFMTVPSKHILPIGRPSSRXVAMLTSGFTASIALEKVGQMESGQLVLVTAAAGGTGQFAVQLAELAGNKVVATCGGKEKARLLKDLGVDRVIDYKTEDIKTVLKNEFPKGVDIVYESVGGDMFDLCLNALAIRGRLIVIGMISQYQGEHGWKPKNYPGLVEKLLTKSQSVAGFFLPQYXYLWKEHLARQFDLYSSGKLKGAIDPKRFLGLHSVPDAVEHLHSGKSSGKVVVCIDSTFEQQMAKL

SEQ ID NO: 77934 - protein, 156 aa, Gossypium hirsutum
  Clone ID: GOSHI-09MAY01-C4458_1.pep
MEVLMGPTFAIDVAASAAAYTRDRSKDTISSPCLFIKDDEACPGSDPRSPDLSSDSSSSIGSPGDSDVEEEDDGVVSSGESKGLSFDSLEDSLPIKRGLSNHYVGKSKSFANLSDINSVKELQTVESPFNKRRRLLLANKWSTRSRKSSLYSWQNP

SEQ ID NO: 77935 - protein, 117 aa, Gossypium hirsutum
  Clone ID: GOSHI-09MAY01-C4418_2.pep
MVLLDKMWDDVVAGPQPERGLGRLRKITTQPLSIKDEGEKKKYQRSLSLPNSPVSGPTPVTPTTPTARKENVWRSVFHPGSNLATKSIGSDVFDKPQPNSPTVYDWLYSGETRSKHR

SEQ ID NO: 77936 - protein, 156 aa, Gossypium hirsutum
  Clone ID: GOSHI-09MAY01-C4418_1.pep
MVLLDKMWDDVVAGPQPERGLGRLRKITTQPLSIKDEGEKKKYQRSLSLPNSPVSGPTPVTPTTPTARKENVWRSVFHPGSNLATKSIGSDVFDKPQPNSPTVYDWLYSGEVRIPRTMHAWILSGCYFFSHLVFWFLGFDHSLIYLFGCLRKLNFN

SEQ ID NO: 77937 - protein, 129 aa, Gossypium hirsutum
  Clone ID: LIB3083-027-Q1-L1-B7.pep
MVLLDKMWDDVLAGPEGWRGLGRLRKITTQPLSIKDEGEKKKYQRSLSLPNSPVSGPTPVTPTTPTARKENVWRSVFHPGSNLATKSIGSDVFDKPQPNSPTVYDCNQTEAQRQSMKENLAICLVAAWK

SEQ ID NO: 77938 - protein, 357 aa, Gossypium hirsutum
  Clone ID: GOSHI-09MAY01-C4758_1.pep
GDFLDWHFTPFQKLNFSVNDILTSLSDSNIIGKGCSGVVYRVETTTKQVVAVKKLWPIKNGEFPERDLFSAEVQTLGSIRHKNIVRLLGCCDNGKTRLLLFDYISNGSLAGLLHEKNMFLDWDARYKIILGAAQGLAYLHHDCIPPIVHRDIKSNNILVGPQFEAFLADFGLAKLIDVSESPRASNIIAGSYGYIAPEYGYNMRITEKSDVYSFGVVLLEVLTGMEPTDKSIPDGVHIITWINTDVREKRKDYTTIIDQMLLIRSSTQIQEMLQVLGVAFLCVNPCPEERPTMKDVTAMLKEIRNENDDSEKPNLLCKRITDAAKLQFNVLVSLDHLNLSLVHLHSLCALVSMVFAS

SEQ ID NO: 77939 - protein, 145 aa, Gossypium hirsutum
  Clone ID: GOSHI-09MAY01-C4778_2.pep
REKQSKLAQGKAIMGSGRRWAVDFSDNSTAPPSRDIPDPPGFTRASVDQDDSTVSRQKKDAESNGKAQKAWEVAQAPFKNLLMMGFMMWMAGNTVHLFSIGITFSALWQPISALQGVGKGKCPLTTKFSLILYYYLIFVSSYISP

SEQ ID NO: 77940 - protein, 179 aa, Gossypium hirsutum
  Clone ID: GOSHI-09MAY01-C4778_1.pep
MEKGKGVMGAGRRWAVDFSDNSTAPSSRDIPDPPGFTRASVDQDDSAVSRQKKDAEANWKAQKAWEVAQAPFKNLLMMGFMMWMAGSTVHLFSIGITFSALWQPISALQGVGKVFEPYKDNKVDLLGPKLLFIALNLGGLALGVWKLNTLGLLPTHASDWVSSLSPAQEVEYSGGGIPL

SEQ ID NO: 77941 - protein, 285 aa, Gossypium hirsutum
  unsure (1)..(285): unsure at all Xaa locations
  Clone ID: uC-gsronu33B156a08b1.pep
MEKGKGIMGSGRRWAVDFSDNSTAPSSRDIPDPPGFARASVDQDDSTVSRQKKDAESNWKAQKAWEVAQAPFKNLLMMGFMMWMAGNTVHLFSIGITFSALCQPISALKGLXKVFEPYYTLMLSFWSYFLFIVSILCVLLLVFCIFILWVFFSLYLICSFISFYFLFLYFFYLLPLFYLFILFYFTYFLYIFILYFLLYFYFFFYFILLSSFLYFLFFFYLFIFSLFILFFFILSSYFFLLFFSLFALFFLLFFHFFFIFFIIILFFFFFFFIFPPHTLLLFHFL

SEQ ID NO: 77942 - protein, 73 aa, Gossypium hirsutum
  Clone ID: LIB3148-043-Q1-K1-C3.pep
ALQGVGKVFEPYKDNKVDLLGPKLLFIALNLGGLALGVWKLNTLGLLPTHASDWVSSLPPAQEVEYSGGGIPL

SEQ ID NO: 77943 - protein, 135 aa, Gossypium hirsutum
  unsure (1)..(135): unsure at all Xaa locations
  Clone ID: GOSHI-09MAY01-C4718_3.pep
MHSNTTFTEEDAARILRIPLARTPHEDFLIWGGESSGEFTVRSAYKLLXNSDENLRAYALQTNYRKFYKKLWGLNLPTKIKITIWRLSWNFLPTKVNLQHRKLSASTSCPRCEARAETMDHLFRECPVTIEVWIV

SEQ ID NO: 77944 - protein, 142 aa, Gossypium hirsutum
  Clone ID: GOSHI-09MAY01-C4718_2.pep
MGVVKWISSCNTLTFTGEDAVRILRIPLARTPHEDFLIWGGELLGEFTVRSAYKLLQSSDKNPSAYALQFIYRKFYKKLWGLNLPTKIKITIWRISWNFLPTKVNLQHRQLSTSTSCPRCEARAETMDHLFRECPLRLRRKQ

SEQ ID NO: 77945 - protein, 133 aa, Gossypium hirsutum
  Clone ID: GOSHI-09MAY01-C4718_1.pep
DLKVNELIDSNKRLWKRELINNTFTEEDAARILQIPLARTPHEDFLIWGGESSGEFTVRSAYKLLQNSDENPRAYALQTNYRKFYKKLWSLNLPTKIKITIWRLSWNFLPTKVNLQHRKLSANTNCPRCGERA

SEQ ID NO: 77946 - protein, 49 aa, Gossypium hirsutum
  Clone ID: LIB3149-040-Q1-K1-G4.pep
NQLFDYHTNTTLPLSKQNFGSFSYLKGIQYLFPLSLKTNIPLRRGFLYV

SEQ ID NO: 77947 - protein, 399 aa, Gossypium hirsutum
  unsure (1)..(399): unsure at all Xaa locations
  Clone ID: GOSHI-09MAY01-C4738_2.pep
PKLETWDIGKPYEQAAKXEIPMVVRMFRRSPGWADKIHGFTVPADGQHHVQTLHEPYGVCGLIIPWNFPLLLYSWKVGPALACGNTVVLKTAEQTPLSAIYVSKLFHEAGLPPGVLNVVSGFGPTAGAALSSHMNVNKLSFTGSTATGKIVLALAAKSNLKPVTLELGGKSPFIVCKDADVDKAVELAHSALFFNQGQCCCAGSRTLVHESVYDEFVEKAKARALKRVVGDPFKTGIEQGPQIDNEQFKKILRYIRPAMEGGPPLDSGGEQFGSKGYYIQPTVFSNVQDDMLIAKDEIFGPVQSISKFKDLEEVVQRANASSYGLAAGVFTQNIETANTLTRALRVGTVWINCYDIFDAAVPFGGFKMSGQGREKGIYGLSSYLQVKAVVTPLKNPAWL

SEQ ID NO: 77948 - protein, 288 aa, Gossypium hirsutum
  Clone ID: GOSHI-09MAY01-C4738_1.pep
MAARRISSLLSSSATSLGRFSSWGRRINSFSTAAAAIDEPIHPSIQVDHTQLLINGQFIDAASGRTFPTVDPRTGDVIARVAEGDLEDVNRAVAAARKAFDEGPWPKMTAYERSRIMLRFADLLEKHTEEVAKLETWDNGKPYEQAAKIEIPMVVRMFRYYAGWADKIHGFTVPADGQHHVQTLHEPYGVCGLIIPWNFPLLLYSWKVGPALACGNTVGLKTAEQPPLSAIYVSKLFHEAGLPPGVLNVVSGFGPTAGAALSSHMNVNKVSLQVPLLRKMYSTPAKAT

SEQ ID NO: 77949 - protein, 95 aa, Gossypium hirsutum
  unsure (1)..(95): unsure at all Xaa locations
  Clone ID: LIB3584-055-P1-K2-G3.pep
DAWDDMLIAKDEIFGPVQSISKFKDLEEVVQRANASSYGLAAGVFTQNIETANTLTRALRVGTVWINCYDIFDAAVPXGGFKMSGQGREKGIYGL

SEQ ID NO: 77950 - protein, 75 aa, Gossypium hirsutum
  Clone ID: GOSHI-09MAY01-C4728_3.pep
SDDLLEEIIDKTFDDAHADKDGKINKEEWKAFVLRNPNLLRNMTLPHLKSVMNYYFQCITTFFPSFVYNTGVEDF

SEQ ID NO: 77951 - protein, 251 aa, Gossypium hirsutum
  Clone ID: GOSHI-09MAY01-C4728_1.pep
MDSTGKTQFFRSSSLTAGERICASAFLPVLIVIDFLIYATSNCFGCRPRPKKCIYEFTDLTRLAHESRFSVNEVEALYELFKKLSSSIIDDGLIHKEELQLALFQTPIGSNLFLDRVFDLFDEKRNGVIEFEEFVHALNVFHPCAPLEDKIDFAFRLYDLRQTGFIEREEVKQMMIAILMESEMNLSDDLLEEIIDKTFDDADADKDGKINKEEWKAFVLRNPNLLRNMTLPHLKSVKNSYFQYCTPNLVF

SEQ ID NO: 77952 - protein, 144 aa, Gossypium hirsutum
  unsure (1)..(144): unsure at all Xaa locations
  Clone ID: AI055655.1.pep
MDSTGKTQFFRSSSLTAGERICASAFLPVLIVIDFLIYATSNCFGCRPRPMICIYEFTDLTRLAHESRFSVNEIXHCTNLFSNLEYFIFHDGLIPHRSIFNYPFSLIPLVHQYLSLPCFHNLYSYKLSHVVYSFCMYIVSIPLT

SEQ ID NO: 77953 - protein, 201 aa, Gossypium hirsutum
  Clone ID: GOSHI-09MAY01-C4688_1.pep
KVLQHDLFTNDVLYSEVVFDMSSLKQELLPLVPLFCQSLLEMGTKDLTFVQLNQLIGRKTGGISVYPFTSSIRGKEDPSSHIIVRGKSMAGRADDLFNLINCVLQEVQFTDQQRFKQFVSQSKARMENRLRGGGHGIAAARMDAKLNVAGWISEQMGGVSYLEFLQALEEKVDNDWAGISSSLEEIRKSLLSKEGCLVNMT

SEQ ID NO: 77954 - protein, 134 aa, Gossypium hirsutum
  unsure (1)..(134): unsure at all Xaa locations
  Clone ID: LIB3584-054-P1-K2-F11.pep
TKLPCVFLPHEHCTLFQSKSIWSTYKTTDTCALVEXILHLEPIETFFPPLGCXLNIFQGITLPDAPKFGKVFGGQFXGQALAAASKTVDSLKIVHSLHSYFLMVGDFNIPIIXQVNRLRDGRNFATRRVDAIQE

SEQ ID NO: 77955 - protein, 110 aa, Gossypium hirsutum
  unsure (1)..(110): unsure at all Xaa locations
  Clone ID: LIB3585-018-P1-K1-G3.pep
VNPESVHVADIIALTKLTCLFLAHEHCTLLQSKSIWSTDKTTETCSLVESILHLEPIELNIFQGITLPDAPKFGKVFGGQFVGQALAAASNTVDLLIXHSLHFYFLMVGD

SEQ ID NO: 77956 - protein, 346 aa, Gossypium hirsutum
  Clone ID: GOSHI-09MAY01-C4678_1.pep
THASATQDLKGPFVRQFQGEEGGDAGGLSREWYQLLSRVIFDKGALLFTTVGSNATFQPNPNSVYQTEHLSYFKFVGRVVAKALFDGQLLDVYFTRSFYKHILGVKVTYHDIEAVDPDYYKNLKWMLENDVSDIPDLTFSMDADEEKHILYEKTEVTDYELKPGGRNTRVTEETKHEYVDLVADHILTNAIRPQINSFLEGFNELVPRELISIFNDKELELLISGLPEIDLDDLKANTEYTGYTAASPVIQWFWEVVKAFSKEDMARLLQFVTGTSKVPLEGFKALQGISGPQKFQIHKAFGAPERLPSAHTCFNQLDLPEYSSKEQLQERLLLAIHEASEGFGFG

SEQ ID NO: 77957 - protein, 101 aa, Gossypium hirsutum
  Clone ID: LIB3828-010-Q1-N6-H5.pep
GPKKRNIGSNFQELDKNFNNRRKNHHSINYKKISSFILFRVWLEYKLSTFQIIKGAQPTFPSIFTSFGACHIPLLTLLPSFHQPKSNEKASAHGIRKMNTF

SEQ ID NO: 77958 - protein, 168 aa, Gossypium hirsutum
  Clone ID: GOSHI-09MAY01-C4668_1.pep
MGEAVVAAHNVFVYGSLLADDVVRVLLNRVPTSSAALLNGFHRFSIKGRVYPAILPVRNRHVSGRVLMGITDPELHILDEFEDVEYQRTRVEVSLLESSDKLQAHAYVWSNASDPNLYGDWDFEEWKQVHKESFIKMTMGFMEEQELPGSKPRVATYESFYQQDVAEK

SEQ ID NO: 77959 - protein, 37 aa, Gossypium hirsutum
  Clone ID: LIB3083-111-Q1-L1-D9.pep
PPAFNMAVSEWYPPALNTSFLVKSMKAVDKSIEVSGD

SEQ ID NO: 77960 - protein, 402 aa, Gossypium hirsutum
  Clone ID: GOSHI-09MAY01-C4618_1.pep
HASADAWVTALRKICPMVSSEITSEASAAEVEGYGASKLTVDSAGKYLQLANKLFSQAELYHFWASILELVIPVYKSRRAYGQLAKCHTLLTNIYESILEQESSPIPFTDATYYRVGFYGERFGKLDRKEYVYREPRDVRLGDIMEKLSHIYESRMDGNHTLHIIPDSRQVKAEELQPGVCYLQITAVDPVMEDEDLGSRRERIFSLSTGTVRARVFDRFLFDTPFTKNGKTQGGLEDQWKRRTVLQTEGSFPALVNRLLVIKSESLEFSPVENAIGMIETRTAALRNELEEPRSSEGDQLPRLQSLQRILQGSVAVQVNSGVLSVCTAFLSGEPATRLRSQELQQLIAALLEFMAVCKRAIRVHFRLIGEEDQDFHTQLVNGFQSLTAELSHYIPAILSEL

SEQ ID NO: 77961 - protein, 254 aa, Gossypium hirsutum
  Clone ID: GOSHI-09MAY01-C4628_1.pep
MKLFDAHCHLQDPRILNKAPKLISTALDSGLLNFAVNGVSEKDWHLVKEMGDNYPSVIPCFGVHPWYVPQRSPNWFTTLKEFFETTPSAAVGEIGLDKGSKGREIDFNDQIEVFRQQLQLAKELKKPASVHCVRAFGDLLHIVKDIGPFPDGLLPHSYLGSAEMVPEFVKSGAYFSLPGYIMPWKVQKAKKMLETIPLERILLESDAPDALPHLELSSLFLVDEDPSFPQEICSWENCCLKCTLLDLRTYHAKL

SEQ ID NO: 77962 - protein, 247 aa, Gossypium hirsutum
  Clone ID: GOSHI-09MAY01-C4198_2.pep
PRVRPRVRLERNGFSMNGEAGMVNPASRQIYLTFPADSTFREEDVSNYFSTYGPVQDVRIPYQQKRMFGFVTFVYPETVKIILAKGNPHFVCDARVLVKPYKEKGKVPDKKQQQQQVERGEFSPCGTPTGLDSRDPFDLLLGSRMFYNTQDLLWRRKLEEQADLQQALELQNRRLMGLQLLNVKKHHHHRALSSGSPIPSPTHSPNPFSQSLVLTQFHFNQNHHSTVTCNHRQYYTYYHTKCVHKRQ

SEQ ID NO: 77963 - protein, 411 aa, Gossypium hirsutum
  Clone ID: GOSHI-09MAY01-C4198_1.pep
LMGSASFPYSPKGMNSFLQQQQNDTQRAAAAAALMMGDDMNKFNRSRLERNGFSMNGEAGMVNPASRQIYLTFPADSTFREEDVSNYFSTYGPVQDVRIPYQQKRMFGFVTFVYPETVKIILAKGNPHFVCDARVLVKPYKEKGKVPDKYRKQQQQQVERGEFSPCGTPTGLDSRDPFDLLLGSRMFYNTQDLLWRRKLEEQADLQQALQLQNRRLMGLQLLNVKKHHHHRALSSGSPIPSPTHSPNPFSQSLVLTQFHNSQEAPQENCSNPVLAVSATASEKQAASTTAVPKESASVEENGTSKESPNCEDANLPESLEHNLPDNPFASPTKASGEFLSAFSNAEADRDVSVSASSVNSNWVSSTLLPANNALEIASFNSFNCQMPRFSSGHGTIGMYAGTGGPTCPVGI

SEQ ID NO: 77964 - protein, 292 aa, Gossypium hirsutum
  unsure (1)..(292): unsure at all Xaa locations
  Clone ID: GOSHI-09MAY01-C4188_1.pep
VAVTGDGTNDAPALHEADIGLSMGIQGTEVAKESSDIVILXDDNFASVVKVVRWGRSVYANIQKFIQFQLTVNVAALVINVAAAISSGDVPLNSVQLLWVNLIMDTLGALALATEPPTDNLMHRSPVGRREPLITNIMWRNLLIQALYQVTVLLVLNFRGMTILQLEDDGNREHAYKVKNSLIFNAFVMCQIFNEFNARKPEEVNCFKGVTKNYLFMGIIGFTFILQIIIIEFLGKFTSTVRLDWQLWLVSLGIGIISWPLAIVGKLIPVPKTPVASYFIKPFQQCKRSRDA

SEQ ID NO: 77965 - protein, 112 aa, Gossypium hirsutum
  Clone ID: GOSHI-09MAY01-C4178_5.pep
MATKQPNTGLFVGLNKGHVVTKKELAPRPSNRKGKTSKRVHFVRNLIREVAGFAPYEKRITELLKVGKDKRALKVAKRKLGTHKRAKKKREEMSSVLRKMRAHHPGGGDKKK

SEQ ID NO: 77966 - protein, 111 aa, Gossypium hirsutum
  Clone ID: GOSHI-09MAY01-C4178_4.pep
MATKQPNTGLFVGLNKGHVVTKKELAPRPSNRKGKTSKRVHFVRNLIREVAGFAPYEKRITELLKVGKDKRALKVAKRKLGTHKRAKKKREEMSSVLRKMRAHGGGAEKKK

SEQ ID NO: 77967 - protein, 111 aa, Gossypium hirsutum
  Clone ID: GOSHI-09MAY01-C4178_3.pep
MATKQPNTGLFVGLNKGHVVTKKELAPRPSNRKGKTSKRVHFVRNLIREVAGFAPYEKRITELLKVGKDKRALKVAKRKLGTHKRAKKKREEMSSVLRKMRAHPGGGEKKK

SEQ ID NO: 77968 - protein, 358 aa, Gossypium hirsutum
  Clone ID: GOSHI-09MAY01-C4178_1.pep
HNNWNDGLTIAEKLVKSEKEGGDWWYAEVVIPDGALVLDWVFANGPPKAATLYDNNNRQDFHAIVQKSIPEEQFWVEEEHRIFEKLQKERNLREEAIHAKAEKTTQMKGEMKERTLKRFLLSQKNVVYTEPLDIHAGSMVTIFYNPANTVLNGKPEVWFRCSFNRWTHSIGPLPPQRILPVDNGFHVKATVKVPLDAYMMDFVFSEREDGGNFDNNGGRDYHIPVVGGIVKEPPMHVVHIAVEMAPIAKVGGLGDIVTSLSRAVQDLNHNVNIVFPKYDCLKFEHVTDFHYQRCYSWGGTEIEVWFGKVEGLSVYFLDPQNGFFSTGCVYGRGNDAQRFGFFCHAALEFLHQSGFHPD

SEQ ID NO: 77969 - protein, 50 aa, Gossypium hirsutum
  Clone ID: LIB3583-009-P1-K1-H2.pep
LVSSTVDDLSCDLSTAVLRLVGFLDDMILYRFFLFYFCLQAMVTSCYSAN

SEQ ID NO: 77970 - protein, 83 aa, Gossypium hirsutum
  Clone ID: uC-gsronu33B113e03b1.pep
YGPKPTKPNGPNHLSKTLTARAFSAASDATNSFFVTTWPLFSPTKRPVFGCLVAMPVETGISEAELKLGFCGRVGGRVGVRVG

SEQ ID NO: 77971 - protein, 141 aa, Gossypium hirsutum
  Clone ID: LIB3829-029-Q6-N6-E12.pep
RYKLHSFGKAETSSKFFPSFHLSFVLFFQPLHEWPPNTGLFVGLNKGHVVTKKELAPRPSNRKGKTSKRVHFVRNLIREVAGFAPYEKRITELLKVGKDKRALKVAKRKLGTHKRAKKKREEMSSVLRKMRAHPGGGEKKK

SEQ ID NO: 77972 - protein, 60 aa, Gossypium hirsutum
  unsure (1)..(60): unsure at all Xaa locations
  Clone ID: uC-gsronu33B143g08b1.pep
SRVRYEKRITGLFLEGRAXPAPKGAKRKLGTHKRAKKKREEMSSVLRKMRAHGGGAEKKK

SEQ ID NO: 77973 - protein, 57 aa, Gossypium hirsutum
  Clone ID: LIB3135-002-Q1-K1-F7.pep
MHHKRITELLKVGKDKRALKVAKRKLGTHKRAKKKREEMSSVLRKMRAHGGGAEKKK

SEQ ID NO: 77974 - protein, 58 aa, Gossypium hirsutum
  Clone ID: LIB3148-034-Q1-K1-C6.pep
PRVRPRVRPLVRPRVRPRVRPRVRPRVRPRVRPRVRREEMSSVLRKMRAHPGGGEKKK

SEQ ID NO: 77975 - protein, 63 aa, Gossypium hirsutum
  Clone ID: LIB3583-005-P1-K1-H12.pep
KWTLLLVFPFRLKGRLSHFLLGYTMSLVQSHKKASIGCLVAIPTESQAVDKSQLKSSTVEETS

SEQ ID NO: 77976 - protein, 243 aa, Gossypium hirsutum
  Clone ID: GOSHI-09MAY01-C4118_1.pep
MSHRKFEHPRHGSLGFLPRKRASRHRGKVKAFPKDDPTKPCRLTAFLGYKAGMTHIVREVEKPGSKLHKKETCEAVTIVETPPMVVVGVVGYVKTPRGLRTLGTVWAQHLSEEVKRRFYKHWCKSKKKAFTKYSKKFESEDGKKDIQSQLEKLKKYCTVIRVLAHTQIRKMKGLKQKKAHLMEIQVNGGTIAQKVDFAYGFFEKQIPIDAVCQKDEMIDIIGVTKRKRFYRSLKWICILLLIL

SEQ ID NO: 77977 - protein, 230 aa, Gossypium hirsutum
  Clone ID: GOSHI-09MAY01-C4108_2.pep
EQSNCRRGAIATETFNVAMAALNEVGKKVSVVKKTVAKLAPPDSLATGAAYDDKKSSTSAPDTAPSLWPQQDEITRHFNLNDTGTPAQSVSDLNLPRMAPVSLHRDDTHPDNMPVLPCLKSMRWLMENKNSKPENRLAVIILKLSRITLEPMLRSMAYISEQLSTPANRVAVINLKLQDTETSTGESEVKFQVSRDTLGAMLRSMAYIREQLSSVQCEPQAEPSPKKHRK

SEQ ID NO: 77978 - protein, 258 aa, Gossypium hirsutum
  unsure (1)..(258): unsure at all Xaa locations
  Clone ID: GOSHI-09MAY01-C4108_1.pep
SLASRYNSLCREAIKYAEDGAGAAETYNVAMAALNEVGKKVSVVKKTVAKLASTDSLATGAVYDDKKSSTSAPDTGPSLWPQQDETTRHFNLHDTGTPAQSVSDLNLPRMAPVSLHRDDTHPDNMPVLPCLKSMRWLMENKNSKPRNRLAVIILKLQDYSNSPSAEMDVKFQLSRITLEPMLRSMAYISEQLSTPANRVAVINLKLQDTETSTGESEVKFQXSRDTLXAMLRSMAYIREQLSSVCEPQAEPLPKKHRK

SEQ ID NO: 77979 - protein, 106 aa, Gossypium hirsutum
  unsure (1)..(106): unsure at all Xaa locations
  Clone ID: LIB3543-035-Q1-K1-D11.pep
LIQLQDYSNSPSAEMDVKFQLSRITLEPMLRSMAYISEQLSTPANRVAVINLKLHXTETSTGESEVKFQVSRDTLGAMLRSMAYIREQLSSVCEPQAEPLPKKHRK

SEQ ID NO: 77980 - protein, 75 aa, Gossypium hirsutum
  Clone ID: LIB3825-023-Q6-N6-F5.pep
SMAYISEQLSTPANRVAVINLKLQDSETTTGESEVKFQVSRDTLGAMLRSMAYIQEQLSNVNEAQAEPLPKKHRR

SEQ ID NO: 77981 - protein, 72 aa, Gossypium hirsutum
  unsure (1)..(72): unsure at all Xaa locations
  Clone ID: LIB3083-100-Q1-L1-H6.pep
ECYFACGHNLCINRFLVIFFPXSLCKFFXYNMFXYFMYCIXYXVQDIVYLRSTMYKSIVLVVEFVLRPRASG

SEQ ID NO: 77982 - protein, 146 aa, Gossypium hirsutum
  Clone ID: GOSHI-09MAY01-C4078_2.pep
GRVGAAPNDRILEDGDMALLDMGAEYSFYGSDITCTFPVNGKFTSDQSLIYNAVLDAHNAVIAAMKPGVSWVDMLKLAEKIILESLEKGNILVGNLDDMMVERVGAVFMPHGLGHLLRIDSHDPGGYPKGIERPNEPGLKSLRTAR

SEQ ID NO: 77983 - protein, 125 aa, Gossypium hirsutum
  Clone ID: GOSHI-09MAY01-C4078_1.pep
LQISIFHFTALGPGGLPQGIERPKEPGLKSLRAARQLLEGMVITVEPGCYFIDALLVPAMESANTSKFFNCEIVDKFKNFGGVRIESDVLVTANGSKNMTKVPRETWEIQAVMAGGPWSLNRASG

SEQ ID NO: 77984 - protein, 65 aa, Gossypium hirsutum
  Clone ID: GOSHI-09MAY01-C4028_2.pep
IMRKTQSSKASRPRGLESNGCSSNQTSPASQWFSSKAAKKDRSKWFRELVNTPLSLLNQLVKLFA

SEQ ID NO: 77985 - protein, 118 aa, Gossypium hirsutum
  unsure (1)..(118): unsure at all Xaa locations
  Clone ID: GOSHI-09MAY01-C4028_1.pep
FTPISLSYVIFTSWGLAGSSSNQTSPASQWFSSKSSKKNXISLSFVTSIIDGLKRLYLQKLKPLEVTYHFNDFVSPLMTNRDFDAKPMVMLWGQYSTGKTTFIKHLLKXSYLGAHIGP

SEQ ID NO: 77986 - protein, 372 aa, Gossypium hirsutum
  Clone ID: GOSHI-09MAY01-C4388_1.pep
MIGEAKVGNEDLNLCFEKLMMVAAGNSEGVKMNGVGITEWKDIPVELLLRIVSLLDDQTAIVASSVCSGWRDAVCLGLTQLCLSWCRKNMNNLVLSLAPKFTRLQTLILRQENPQLEDNAVETISKFCHDLQDLDLSKSFKLSDRSLYALARGCPNLKKLNISGCTSFSDEALAYLTNFCRKLKILNLCGCVKAATDHALQAIGRNCNMLQSLNLGWCDNVGDLGVMSLAYGCHDLRCLDLCGCVRITDDSVIALANECLHLRSLGLYYCRNITDRAMYSLAHSRVKNKGSTWESSMKGRYEDDGLKSLNISQCTALTPSAVQALCDTFPALHTCSGRHSLVMSGCLNLTSVHCACAVQAHRTFNTIKKTAH

SEQ ID NO: 77987 - protein, 263 aa, Gossypium hirsutum
  unsure (1)..(263): unsure at all Xaa locations
  Clone ID: GOSHI-09MAY01-C4348_1.pep
KRADEVSMALTSSIASEALHGDISQHQRERTLNGFRQGKFTVLVATDVASRGLDIPNVDLVIHYELPNDAETFVHRSXRSRSSRVGRVLQCLMYTNCQREXLVLSLERDVGCWFEFISPPSMEEVLESSAEQIIATLNGVHPESIKFFTPTAQSIIVELGSSALAAAIAHLSGFSSPPSSRSLISHVLGYVSLLLTRDSTYSRKVLTAKSVTGFLSDVYPAAADEVGNIHLIADEKVLGAVFDLPEEIARELLDXDTPPGNTI

SEQ ID NO: 77988 - protein, 95 aa, Gossypium hirsutum
  Clone ID: GOSHI-09MAY01-C4328_1.pep
SSKSTIVPCSNSDSCNALLGYNLYTDLKVAEVASLFQVDPISILTANAIDISYPDVENHILPSNLFLKIPILCSCVDGIRKSVSTKYKTRPQDTT

SEQ ID NO: 77989 - protein, 309 aa, Gossypium hirsutum
  Clone ID: GOSHI-09MAY01-C5998_1.pep
MALKKNGFIPSSAPEELKKVLVAVASVWGDTIEDMEEFHVFPLKGAMTNEVFQINWPTNHGDLHQKVLVRADAWAVAGVFNRDDEIRTFECMSELGQGPTLLGRFSDGRIEEFIHARTLSVADLRDPEISSLIAAKLREFNNLDMPGPKNVLLWERLRTWLSQAKRFCSPSTAKEFALDGLEEEISILEKELTQGYQEIGFCHNDLQYGNIMMDEETRVITLIDYEYASYNPVAYDLANHFCEMAANYHSETPHILDYSIYPDLEERQRFISAYLASSGNEYSDAEVEQLLSDAEKYTLANHLVWGLWG

SEQ ID NO: 77990 - protein, 122 aa, Gossypium hirsutum
  unsure (1)..(122): unsure at all Xaa locations
  Clone ID: LIB3831-002-Q1-K6-D9.pep
MALKKNGFIPSSAPEELKKVLVAVASVWGDTIEDMEEFHVFPLKGAMTNEVFQINWPTNHGDLHQKVLVRVYGKGVEVFFNRDDEIRTFECMSELGQGPRLLGRFSDGKDXEFIHARTLSVA

SEQ ID NO: 77991 - protein, 218 aa, Gossypium hirsutum
  unsure (1)..(218): unsure at all Xaa locations
  Clone ID: GOSHI-09MAY01-C5918_1.pep
PASAQRPEELRIYFLFFDRSGYGDSDPNPSRSVKSEXAYDVQELADKLQIGSKFYVIGISMGAYPVYSCLKYIPHRLAGASLVVPFVNYWWPCLPANLSNDAFSRLLAQDQWSFRVAHYTPLLFYWWMSQKWFPSLSILAGNMAIFSQSDLEILKKWSEAPSVGQEKIQQQGVYESLHRDIMVSYGKWEFDPMDLINPFPNNEGSVHIWQGYEDRIIP

SEQ ID NO: 77992 - protein, 176 aa, Gossypium hirsutum
  Clone ID: GOSHI-09MAY01-C5938_1.pep
PRVRSKLISLFEGLLGPNPAIRAVNTDGAQKIIYQVGQKRGRLTIDEEDDQPKKKVRLGVPATQWISVYNARLPMKQRYHYNVADARLAQHVEKGMADGLLISCVASCTNLWALIMDAGTGFTSQVYELSPSFLHKEWIMDQWEKNYYIRSIAGSNSGNSPGGMSKGTQYTQQSYK

SEQ ID NO: 77993 - protein, 191 aa, Gossypium hirsutum
  Clone ID: GOSHI-09MAY01-C5888_2.pep
ARGRTRGRTRGRTRGRTRGFLEDRLKPFYKSEPIPETNNGDVKVVVGNNFDEIVLDESKDVLLEIYAPWCGHCQALEPTYNKLAKHLRGIDSLVIAKMDGTTNEHPRAKSDGFPTILFFPAGNKSFDPITVDTDRTVVAFYKFLKKHASIPFKLQKPVSAPKAEAASTPETKVEESKESDKSSNGGLKDEL

SEQ ID NO: 77994 - protein, 585 aa, Gossypium hirsutum
  unsure (1)..(585): unsure at all Xaa locations
  Clone ID: GOSHI-09MAY01-C5888_1.pep
MASFRFLIAISLVSLILISTLTPSISKTAKNDDVELDDDEDLRFLEETEGKKDAAPSHSHYKEEDGGDDEYPDLDDEDFGNYHDFDDSDSDPYKEPEVDDKDVVVLKEGNFSDFIEKNKFVMVEFYAPWCGHCQALAPEYAAAATELKGEEVVLAKVDATEENELAQEYDVQGFPTVYFFVDGKHKPYPGARNKEAIVTWIKKKIGPGISNITTIDEAERILTSESKVALGYLNSLVGPESEEIAAASRLQDDVSFYQTVNPDVAKLFHLDPQVKRPALVLVKMEAEKINYFDGRFVKTAISEFVFSNKLPLITIFTRXESAPSIFESDIKKQILMFAASNISEKYLPSFQEAAKSFKGKLIFVYVQVDNEDFGRPVADYFGVSGDGPKLLAYTGNDDARKFVFDGEVTLDKIKAFGEDFLEDRLKPFYKSDPIPETNDGDVKVVVGNNFDEIVLDESKDVLLEIYAPWCGHCQALELTYNKLAKHLRGIDSLVIAKMDGTTNEHPRAKSDGFPTILFFPAGNKSFDPITVDTDRTVVAFYKFLKKHASIPFQLQKPVSAPQAEAASTPKPRGESSKETDQPLVV

SEQ ID NO: 77995 - protein, 156 aa, Gossypium hirsutum
  Clone ID: LIB3829-021-Q6-K6-F9.pep
RRRGSPFSNNLWVKKDAAPSGGGGNEEDDGDDEYPDLDDEEFGNYHDFDDSDSDPYKEPEIDDKDVVVLKEGNFSDFIEKNKFVMVEFYAPWCGHCQALAPEYAAAATELKGEEVVLAKVDATEENELAQEYDVQGFPTVYFFVDGEHKPYPGARN

SEQ ID NO: 77996 - protein, 51 aa, Gossypium hirsutum
  Clone ID: uC-gsronu33B027g07b1.pep
MAHCSLAIMPPHLNIFFPSLLPINFDSTLHSGAQLLFNTISNVMLNTSLLI

SEQ ID NO: 77997 - protein, 243 aa, Gossypium hirsutum
  Clone ID: GOSHI-09MAY01-C5878_1.pep
LSPFMFKSKGVPVYRCIQYPREFVLVFPGAYHSTFDCGFNVAEAVTFAPLDWLPHGQNAVALYQSQGRKTSISFDKLLIGAAREAVKAQWELILLKKNTIDNLRWKGYCGKNGILTETLKSRVKQEGMRREYLCSTFQTKRKDKNFNSTSKRECSICYFDLHLSAVHCSCSSHRYLCLNHAKRLCSCTWTEKIFLYKYEISELNMLREAVEGTLSAVHAWAREDLNLGLRHYTPKKNHSEKMK

SEQ ID NO: 77998 - protein, 179 aa, Gossypium hirsutum
  Clone ID: GOSHI-09MAY01-C5818_1.pep
MIDTSLSKKKDPDQPEISLPTLKSQRTKMGKSEDSEKKKKIKDVEISVPIVYGNAAFWLGKKASGFQSPRWTGFVRGATNEDLSVVVKRPVFQLHSSFNNPPRVVESAPFELSESGWGEFEIAITLFFHNDVCEKPLNLYHHLKLYPEDESGPMSTKKPVVVESYDEVVFTELSESFLA

SEQ ID NO: 77999 - protein, 78 aa, Gossypium hirsutum
  Clone ID: GOSHI-09MAY01-C5548_1.pep
MKNSNSNTKLILLHPYIQKQGSSSRLWLLAFISFFTIAFLLTLIYTRESVSGRTTAAVRTTVRGPGSSVSAFGGGGGG

SEQ ID NO: 78000 - protein, 170 aa, Gossypium hirsutum
  Clone ID: GOSHI-09MAY01-C5568_1.pep
MDQILNKVGSYWLGQKANKEIDSVGDDLNSLSTSIEGGAKWLVNKIKGKMQKPLPELLREYNLPIGIFPRDATNYEFNEETGKLTVFIPAICEVGYKDSSVLRFFTTVTGYLEKGKLADIEGMKTKVMIWVKVTSITCEGSKIYVTAGMKKSRNREAYEVSRDGVSVDKF

SEQ ID NO: 78001 - protein, 122 aa, Gossypium hirsutum
  Clone ID: uC-gsronu33B160b05b1.pep
PLVRPRVRPRVRGNLPIGIFPRDATNYEFNEETGKLTVFIPAICEVGYKDSSVLRFFTTVTGYLEKGKLADIEGMKTKVMIWVKVTSITCEGSKIYVTAGMKKSRNREAYEVSRDGVSVDKF

SEQ ID NO: 78002 - protein, 144 aa, Gossypium hirsutum
  unsure (1)..(144): unsure at all Xaa locations
  Clone ID: GOSHI-09MAY01-C5538_1.pep
MKEPLRKTKVVIRHLPPSVTEPSIISQIDDRFSDRYNWFSFRLGKSSHKQQSYSRAYINFNRPEDVFEFAEFFDGHIFVNEKGTQFKAVVEYAPSQRVPKPSSKKDGREGTIFKDPDYLEFLKLIAXPVENLPRAEIQLERKEA

SEQ ID NO: 78003 - protein, 207 aa, Gossypium hirsutum
  Clone ID: GOSHI-09MAY01-C5498_1.pep
MATLADSFLADLDELSDNEADVLEEENNDVANMEEDIDGDLADIETLNYDDLDSVSKLQKSQRYIDIMQKVEDALEKGSHISNQGMVLEDDPEYQLIVDCNGLSVDIENEIVIIHNFIRDKYRLKFPELESLVHHPIDYARVAKKIGNEMDLTLVDLEGLLPSAIIMVGSVTASTTKGKPLSEDVFQKTVDACDRALALDTCKKKGF

SEQ ID NO: 78004 - protein, 143 aa, Gossypium hirsutum
  Clone ID: LIB3585-014-P1-K1-C9.pep
SCSGSGYCKEDPEYQLIVDCNGLSVDIENEIVIIHNFIRDKYRLKFPELESLVHHPIDYARVVKKIGNEMDLTLVDLEGLLPSAIIMVVSVTASTTSGKPLPEDVLQKTVDACDRALALDTAKKKVLEFVESRMGYIAPNLST

SEQ ID NO: 78005 - protein, 173 aa, Gossypium hirsutum
  Clone ID: GOSHI-09MAY01-C5488_1.pep
MAVVVALAFVFLVMVPAPSLVRALSSNYYDHTCPHLESIVASAVKKAMSNDKTVPAALLRMHFHDCFIRGCDASVLLNSKGKNKAEKDGPPNISLHGFYVIDEAKKALETSCPGVVSCADILALAARDAVFLSGGPTWDVPKGRKDGRISLATETRQLPAPTFNISQLKQNFS

SEQ ID NO: 78006 - protein, 117 aa, Gossypium hirsutum
  unsure (1)..(117): unsure at all Xaa locations
  Clone ID: GOSHI-09MAY01-C5458_1.pep
MSKKFGGMGFWNPYSFNLAMLGKXRWCFVLNLDSLLCRIFKARYFPECRFLESVDGNNPLFVWRSIHAARLLLLKGIXEGFGTGHSIRVFSNPLLPNETNFYVELIRFCLMAWMIFG

SEQ ID NO: 78007 - protein, 121 aa, Gossypium hirsutum
  unsure (1)..(121): unsure at all Xaa locations
  Clone ID: GOSHI-09MAY01-C5448_3.pep
IFYIPLDFIKFFIRYALSGKAGELVIEQGIAFXQGRKDFGKEERELKWAHAQRTLHGLQPPDTKMFGDRTSYNELNQMAEEAKRRAEIARLRELTTLKGHVESVVRLKGLDIDTIQQAYTV

SEQ ID NO: 78008 - protein, 185 aa, Gossypium hirsutum
  unsure (1)..(185): unsure at all Xaa locations
  Clone ID: GOSHI-09MAY01-C5448_2.pep
FPPFMVLISAILNDGTIRTISMARVKPSPLPDSWKLAEIFATGIILGGYLAMMTVIFFWAAYKTDFFPSTFGVKSLQKTDRKDIKMLASAVYLQVSIISQALIFVTRARSWSFLERPGLLLVLAFVVAHLIATLIAVYANWGFAAIEGIGWGWARVIWLYNLIXYIPLDFIKFLSDRLSENWISS

SEQ ID NO: 78009 - protein, 202 aa, Gossypium hirsutum
  unsure (1)..(202): unsure at all Xaa locations
  Clone ID: GOSHI-09MAY01-C5448_1.pep
KDIKMLASAVYLQVSIISQALIFVTRARSWSFLERPGFLLVLAFVVALLSPARPPVRANWGFAAIEGIGWGWAGVIWLYNLIFYIPLDFIKFFIRYALSGKAWDLVIEQRIAFTRKKDFGKEERELKWAHAQRTLHGLQPPDTKMFGDRTSYNELNQMAEEAKRRAEIARLRELTTLKGHVESVXVDLKGLDIYHIQPAYTV

SEQ ID NO: 78010 - protein, 83 aa, Gossypium hirsutum
  Clone ID: GOSHI-09MAY01-C5478_2.pep
MGGGEHGGHGAEDFRTKVWSMSGGPYCRPKHWRRNTAIAMFGVFLICIPIAMKSAELEQRPHQPVRPIPSQLWCKNFGNKDYR

SEQ ID NO: 78011 - protein, 85 aa, Gossypium hirsutum
  Clone ID: GOSHI-09MAY01-C5478_1.pep
MGGGEHGHGHGHGVQDFREKVWSMSGGPYCRPKHWRRNTAIAMFGVFLICIPIAMKSTELEQRPHQPVRPIPSQLWCKNFGNKDY

SEQ ID NO: 78012 - protein, 181 aa, Gossypium hirsutum
  Clone ID: GOSHI-09MAY01-C5418_2.pep
WAPNVPTLLLARLLDGLGIGLAVTLIPIYISETAPPEIRGFLNTLPLFSGCLGMFLSYCMVFGMSLTTLPFWRLMLGALSIPSLVYLALTVFFLPESPRWLVRKGRMSEARKVLQRIRGTEDVSGEMALLVEGLGVGGETSIEEYLISPIRRDSKYPDTAGKDRIKLYGPERGLSWTAKPV

SEQ ID NO: 78013 - protein, 245 aa, Gossypium hirsutum
  unsure (1)..(245): unsure at all Xaa locations
  Clone ID: GOSHI-09MAY01-C5418_1.pep
FNGNVISYGMVLGMSMXPPWGLVLGVLSIPSLAYFGLTVFYLPESPRWLVSKGRMNEAKAVLQRLRGREDVAGEMALLVEGLGVGGETSIEEYIIGPANDDIEDEDISADKDRIKLYGPEAGQSWVARPVTGHGSSIGLASRHGSVVSQSAQRLVDPLVTLFGSIHEKVPEQGSTLFPHFGSMFSVGGNQPRHEEWDEEGGATMGGRLCTDGPGNESDDNLHSPLISRQXTSMDKDIVPNAHGSL

SEQ ID NO: 78014 - protein, 84 aa, Gossypium hirsutum
  Clone ID: GOSHI-09MAY01-C5408_4.pep
HASAHASAVFVDTYGTGKIPDKEILKIVKETFDFRPGMIAINLDLKRGGNSRFLKTAAYGHFGRDDQDFTWEVVKPLKWDKVQA

SEQ ID NO: 78015 - protein, 393 aa, Gossypium hirsutum
  Clone ID: GOSHI-09MAY01-C5408_1.pep
METFLFTSESVNEGHPDKLCDQISDAVLDACLAQDPESKVACETCSKTNMVMVFGEITTKADVDYEKIVRDTCRGIGFTSDDVGLDADNCKVLVNIEQQSPDIAQGVHGHLSKRPEEIGAGDQGHMFGYATDETPELMPLTHVLATRLGARLTEVRKNGTCPWLRPDGKTQVTVEYYNDKGAMVPVRVHTVLISTQHDETVTNDEIAADLKEHVIKPVIPEKYLDEKTIFHLNPSGRFVIGGPHGDAGLTGRKIIIDTYGGWGAHGGGAFSGKDPTKVDRSGAYIVRQAAKSIVANGLARRCIVQVSYAIGVPEPLSVFVDTYGTGKIPDKEILKIVKETFDFRPGMIAINLDLKRGGNSRFLKTAAYGHFGRDDQDFTWEVVKPLKWDKVQA

SEQ ID NO: 78016 - protein, 115 aa, Gossypium hirsutum
  Clone ID: LIB3149-001-P1-K1-G11.pep
KFVYKKKKKPVIPEKYLDEKTIFHLNPSGRFVIGGPHGDAGLTGRKIIIDTYGGWGAHGGGAFSGKDPTKVDRSGAYIVRQAAKSIVANGLARKCIVQVSYAIGVPEPLSVFVDT

SEQ ID NO: 78017 - protein, 198 aa, Gossypium hirsutum
  unsure (1)..(198): unsure at all Xaa locations
  Clone ID: LIB3585-045-Q6-K1-B2.pep
PGTAGPNQALRTLRDVGLDADNCKVLVNIEQQSPDIAQGVHGHLSKRPEEIGAGDQGHMFGYATDETPELMPLTHVLATRLGARLTEVRKNGTCPWLXPDGKTQVTVEYYNDKGAMVPVRVHTVLISTQHDETVTNDEIAADLKEHVIKPVIPEKYLDEKTIFHLNPSGRFVIGGPHGDAGLTGRKIIIDTYGGWGAH

SEQ ID NO: 78018 - protein, 239 aa, Gossypium hirsutum
  Clone ID: GOSHI-09MAY01-C5438_1.pep
SIDAYSAAVVKVGPCSLRGSRVGGFGSQVILPLAHTVEHEEFLEVIKLEGIAQSPEDALMPRDVFLLQLCSGMDENAVGTCAELIFAPIDASFADDAPLLPSGFRIIPLDSGKEASSPNRTLDLASALEIGPAGNKASNDYSAAGGCMRSVMTIAFEFAFESHLQEHVASMARQYVRSIISSVQRVALALSPSYSGSRAGLRTPLGTPEAQTLARWICQSYRVYMGVELLKSGTEGGES

SEQ ID NO: 78019 - protein, 154 aa, Gossypium hirsutum
  unsure (1)..(154): unsure at all Xaa locations
  Clone ID: AI055355.1.pep
MRCSYGLTAIPGTDARFFSPETSFLQLRRTFQPTRIKFGLFKIKAKIDEARKEMSFYELLGISERGTSLEIKQAYKQLARKYHPDVSPPDRVEEYTEPFIRVQEAYETLXDPKERALYDKDXSLGIHLAFSARRTYQYDEDLEDPSEWKIGISL

SEQ ID NO: 78020 - protein, 105 aa, Gossypium hirsutum
  Clone ID: LIB3585-045-Q6-K1-D12.pep
EILSSAGPKMRCSYGLTAIPGTDARFFSPETSFLKLRRTFQPTRIKFGSFKIKAKIDEARKEMSCYELLGISKTGTSLEIKQAYKQIDWRTGRDVSSNDLIKENT

SEQ ID NO: 78021 - protein, 304 aa, Gossypium hirsutum
  Clone ID: GOSHI-09MAY01-C5788_1.pep
MALRPIDNALPIVPDGLRPKKQAKVSIQPQKKASEISVNDENKAPLPQPIDASVDYVASEDLKPFQDPESNIQGFPSLVEGLDSDAWVKVCQSLNDARRFSLYHPGLLLPVLEKVMLVVVKSMKNPRSALCKTSIMAASDIFNAYGEKLLDSTDSSAFDQLLLQLLLKASQDKKFVCEEADKSLTAMVNSIAALPLLQKLRGFVNHGNLRVRAKAAVSISNSVYKMGSEEIKEFGSVTLLQMASDLLNDRLPEAREAARSIVLSVYEAFTENEKLDPVEDWQSFCQSNLSMIQAQLMIKVVSSQ

SEQ ID NO: 78022 - protein, 174 aa, Gossypium hirsutum
  Clone ID: GOSHI-09MAY01-C5188_2.pep
MVLEATMICIDNSEWMRNGDYSPSRFQAQADAVSLICGAKTQSNPENTVGILTMAGKGVRVLTTPTSDLGKILACMHGLEMGGEMNLAAGIEIAQLALKHRQNKLQHQRIIVFAGSPIKYEKKVLEMIGKKLKKNSVALDIVDFGEDEDGKPDKLEAFLASVNNNDSSHIVHVP

SEQ ID NO: 78023 - protein, 398 aa, Gossypium hirsutum
  unsure (1)..(398): unsure at all Xaa locations
  Clone ID: GOSHI-09MAY01-C5188_1.pep
MVLEATMICIDNSEWMRNGDYSPSRFQAQADAVSLICGAKTQSNPENTVGILTMAGKGVRVLATPTSDLGKILSCMHGLEMGGEMNLAAGIQIAQLALKHRQNKNQQQRIIVFAGSPIKHEKKALEMIGKKLKKNSVALDIVDFGEDEDGKPEKLEALLASVNNNDTSHIVHVPAGQNALSDVLISTPVFTXGDGEGGSGFAAAAAAAAAGGVSDFDFGVDPNIDPELALALRVSMEEERSRQEAAAKRAAEEATRQEKGEEAQPQSDSQNATMNATEKASDPMDEDDALLKQALALSMNIPGSDSSAGDAQMSEATNDDQEFALALQMSMQDGSKDSSAQSDVSKVLGDQSFMSSILSSLPGVDPNDPKVKDLLASLPSQSEPQEKKEEDEQPKDDK

SEQ ID NO: 78024 - protein, 215 aa, Gossypium hirsutum
  Clone ID: GOSHI-09MAY01-C5158_1.pep
IESTFSLDVNSKLDWESIGKILARGHSRIPVYAGNPKNIIGLLLVKSLLTVRPETETPVSAVSIRRMPRVPAHMPLYDILNEFQKGSSHMAAVVKVKGKTEDPQFFVDGQKFDKHKVTNGNSQLTAPLLTKHDSVLVDVEKSSAVKETMNTLQRFSEDTEDGEVIGIITLEDVFEELLQEEIVDETDVYVDVHKRIRVPAAACAASSVARSSIRS

SEQ ID NO: 78025 - protein, 160 aa, Gossypium hirsutum
  Clone ID: LIB3584-034-P1-K1-C1.pep
LLTVRPETETPVSAVSIRRMPRVRAHMPLYDILNEFQKGSSHMAAVVKVKGKTEDPQFFVDGQKFDKHKVTNGNSQLTTPLLTKYDTKPDSVVVDVEKPSRPTTFKATPVANGVTANSLQQFSEDTEDGEVIGIITLEDVFEELLQEEIVDETDVYIDVH

SEQ ID NO: 78026 - protein, 60 aa, Gossypium hirsutum
  unsure (1)..(60): unsure at all Xaa locations
  Clone ID: LIB3146-052-Q1-K1-D1.pep
HSSGSFLTTQSKGAILCILLSLXSIVNSQITLGILQLVHVVQSEKTRVVYCKNKNHGKFC

SEQ ID NO: 78027 - protein, 91 aa, Gossypium hirsutum
  Clone ID: GOSHI-09MAY01-C5178_4.pep
YVLLLLLLNSPGHFYTHYLDPCSVCGKSLHNSDIFMYRGNTPFCSKECRQEQMEIDEAREKKLKSGRSLRKSDSKSSTPNKTVRTGIVTVS

SEQ ID NO: 78028 - protein, 91 aa, Gossypium hirsutum
  Clone ID: GOSHI-09MAY01-C5178_3.pep
MSGYYYYDGQADQYEAHYLDACSLCRKSLRDSDIFMYRGNTPFCSKECRQEQMEMDEAREKNWKSGRSLRKSDAQNSTPNKAVRTGTVAVA

SEQ ID NO: 78029 - protein, 112 aa, Gossypium hirsutum
  Clone ID: GOSHI-09MAY01-C5178_2.pep
QRAQPSLPTFFSSGHSKQATNVSGYYYYSGCPDHYEAHYLDACSVCGKSLHNSDIFMYRGNTPFCSKECRQEQMEIDEAREKKLKSGRSLRKSDSKSSTPNKTVRTGIVTVS

SEQ ID NO: 78030 - protein, 91 aa, Gossypium hirsutum
  Clone ID: GOSHI-09MAY01-C5178_1.pep
MSGYYYYAGQADRYEAHYLDACSLCRKPLRDSDIFMYRGNTPFCSKECRQEQMEMDEAREKNWKSGRSLRKSDAQNSTPNKAVRTGTVAVA

SEQ ID NO: 78031 - protein, 91 aa, Gossypium hirsutum
  Clone ID: LIB3585-054-P1-K1-F7.pep
MSGYYYYSGCPDQYGAHYLDACSVCGESLHNSDIFMYRGNTPFCSTECRQEQMEMDEAREKKLKFGRSHRKSDSKTSTPNKTVRTGTITVS

SEQ ID NO: 78032 - protein, 111 aa, Gossypium hirsutum
  unsure (1)..(111): unsure at all Xaa locations
  Clone ID: GOSHI-09MAY01-C5128_1.pep
ISHIYHKTTSSKKQPSSTEAEYRTVACTVSELIWIEXLLVELGIEFXLWCENTSAVAMSSNPVLHGRSEHVELNXHFVRDHVADGKLEINYVPAEEPIAVCLSVFVTKQQL

SEQ ID NO: 78033 - protein, 98 aa, Gossypium hirsutum
  Clone ID: GOSHI-09MAY01-C5088_3.pep
DRLCIALCAELKEMQDRMANRRVYESSGRAYVLSGLSSHSWQRATARGDSTNSTSLVQAYQTPTMTDMVTRSQTMFFGNPPQRKLRQTQSFPAHPEAR

SEQ ID NO: 78034 - protein, 296 aa, Gossypium hirsutum
  Clone ID: GOSHI-09MAY01-C5088_2.pep
PRVRYPEVSAIPRATCHNNFAILIHLKAPHPSGGRNETMFSPTTQNSRAPVDLVTVLDVSGSMAGTKIALLKRAMGFVIQHLGPSDRLSVIAFSSTARRLFPLRRMTETGQQEALQAVNSLTSNGGTNIAEGLRKAAKVIGDRKWKNPVGSIISLSDGQDTYTVTSPSGAHSRTDYRSLLPAGPCIPVHAFGFGADHDASSMHSISDISGGTFSFIEAEGVIQDAFARCIGGLLSVVVQEACLKFQCTHPNLVINSIKAGSYRTSMAADAKTGSIDAGDLYAEEERDFLVTVNVPI

SEQ ID NO: 78035 - protein, 421 aa, Gossypium hirsutum
  Clone ID: GOSHI-09MAY01-C5088_1.pep
QHLGPSDRLSVIAFSSTARRLFPLRRMTETGRQEALQAVNSLTSNGGTNIAEGLRKGAKLIVDRKWKNPVGSIILLSDGQDTYTVSSPSGSHSRTDYKSLIPPSIQRNGGTGLRVPVHTFGFGADHDAASMHSISEISGGTFSFIEAEGVIQDAFAQCIGGLLSVVVQEACVKLECAHPNLLINSIKAGSYRTSVMADAKAGSIDVGDLYAEEERDFLVTVNVPVDESCDEMSLLKVRCIYRDPISKEMVSLEEDNEVKIQRPTVIGQPIVSMEVDRQRNRLRAAEAMAEARAAAEHGDLTAAVSLLESCRRALSETISARAGDRLCVALCAELKEMQERMANRRVYESSGRAYVLSGLSSHSWQRATARGDSTDSTSLVQAYQTPTMTDMVTRSQTMFFGNPPQRKLRQAQSFPARPHPR

SEQ ID NO: 78036 - protein, 251 aa, Gossypium hirsutum
  Clone ID: GOSHI-09MAY01-C5048_1.pep
MPIRNIAVGRPEEATQPDALKAALAEFISTLIFVFAGSGSGMAFNKLTDNGATTPAGLVAASIAHGLGLFVAVSVGANISGGHVNPAVTFGAFVGGNISLLRGILYWIAQLLGSTVACLLLKFATSDMTVPAFGLSSGVGVWNAVVFEIVMTFGLVYTVYATAIDPKKGDLGVIAPLAIGFIVGANILAGGAFDGASMNPAVSFGPALVSWSWDNHWIYWLGPLIGGGLAGLIYEFAFINQSHEQLPPTDY

SEQ ID NO: 78037 - protein, 157 aa, Gossypium hirsutum
  Clone ID: GOSHI-09MAY01-C5028_4.pep
MLLKAVPTFSSLNPQLENQGALFSSFSSSINHQLSSLRNGPGSLVVCAAKGANHKPLSGVVFQPFVEVKKELDLVPSVPQLSLARQKFTDDCEASINEQINVGYNVSYVYHAMFAYFDRDNVALKGLAKFFKESSLEEREHAEKFMEYQNKRSGKVK

SEQ ID NO: 78038 - protein, 393 aa, Gossypium hirsutum
  unsure (1)..(393): unsure at all Xaa locations
  Clone ID: GOSHI-09MAY01-C5028_2.pep
ITRSPHAFPVAGVSSSTVPAEXDVNKNEDLLWKPLSASNSQTARVWVAHLKIPSSDLLSTVEVSVGHSKGIISTRGFEYSHPSMFSFKVRVQPMERDFSQVSVAESISLREESFKIYGTQSEESIINSFNQLSIKYGHESTASNWRSEALAKEIECFRELLSLMDCKIGKLTLARLLMAYDVMSYPFANKLVHSEEVLELYSDLMKLDPTHYQFYKDEHSMVLLQKVTSSKESLLQHCFQYKDSVSSAICGPICLRLNNLSLSRMGAFEKLLWVQMLDLSHNELQSIEGLEAMQLLSCLSLRNNKLRSLTALEPLRKLTLLRVLDISYNQIGDHSIDTTRYLCSSPLSHSVGGESNKDETVTRDGALIDNWEGFYFFKDLNLDQLEVGGEHNC

SEQ ID NO: 78039 - protein, 250 aa, Gossypium hirsutum
  Clone ID: GOSHI-09MAY01-C5028_1.pep
MLLKASPAFSLLKNPQVETRVPLFSRNGSGVGSGAVVVCATKGANNKPLTGVIFEPFEEVKKELNLVPTVPQMSLARQKFADECEAAINEQINVEYNVSYVYHAMFAYFDRDNVALKGLAKFFKESSLEEREHAEKLMEYQNKRGGQVKLQSIIMPLSEFDHAEKGDALYAMELALSLEKLTNEKLLNLHNVAERNHDSQLTDFIEGEFLAEQVESIKKISEYVAQLRRVGKGHGVWHFDQMLLHEGAVA

SEQ ID NO: 78040 - protein, 108 aa, Gossypium hirsutum
  unsure (1)..(108): unsure at all Xaa locations
  Clone ID: LIB3584-030-P1-K1-C2.pep
PGVIFEXFEEVKKELNLVPTVPQMSLARQKFADECEAAINEQINVEYNVSYVYHAMFAYFDRDNVALKGLAKFFKESSLEEREHAEKLMEYQNKRGGQVKLQSIIMPL

SEQ ID NO: 78041 - protein, 110 aa, Gossypium hirsutum
  unsure (1)..(110): unsure at all Xaa locations
  Clone ID: LIB3582-009-P1-K1-H12.pep
MLLKAAPAFSSLNPQLENQGALFSPFSSSINHQLSSPRNGPGSLVVCAAKGANHKPLTGVVFQPFVEVKKELDLVPSVPQLSLARQKFTDXDCEASINEQIKWDLFFLDF

SEQ ID NO: 78042 - protein, 49 aa, Gossypium hirsutum
  unsure (1)..(49): unsure at all Xaa locations
  Clone ID: LIB3582-008-P1-K1-D2.pep
DFIEGEFLAEQVXESIKKISEYVAQLRRVGKGHGVWHFDQMLLHEGAVA

SEQ ID NO: 78043 - protein, 260 aa, Gossypium hirsutum
  Clone ID: GOSHI-09MAY01-C5348_1.pep
MSISSAPSFNLSTFSNGGANCTTTNKVIGTRAFACLKYINSIESRLKLTSPVSVHTLVLTFTNRDLSVRCVRPDSTGNTIRGSLEGEKGNFDDESRVAEIGSGDRQIDDFGGGGDNGGGGSFGGGDGGEGDSEDEREFGPILKFEDVMKEVEARGVELPPDMMEAAERNGIRKMVLFRYLDLQESVWPLGFLIKYCSMLRNRMLADASFFLKVGTEIVMDFGCATYAEMKKRGKDFWAEFELYFADLLVGIVVDIALVSM

SEQ ID NO: 78044 - protein, 119 aa, Gossypium hirsutum
  unsure (1)..(119): unsure at all Xaa locations
  Clone ID: GOSHI-09MAY01-C5298_3.pep
MDGRTLHEKIPIYVVYLADRNLSSSMWIDSSFLASVDVMDYSLLVGVDEERKELVLGIIDFMRQYTWDNHLETWGPASXGILGGPANASPTIFSPKQYKXRFQKAMSXFFLTIPDQWSS

SEQ ID NO: 78045 - protein, 190 aa, Gossypium hirsutum
  unsure (1)..(190): unsure at all Xaa locations
  Clone ID: GOSHI-09MAY01-C5298_2.pep
RPVQESPTCLAKXLGIYQVSXKHLKVAKNKMDLTVMENLFFRRSISTVYDLKGSIRSRYNPDTSGTNKVLLDMNLLETLRTEPIFLGSKAKRNLERAIWNDTSFLASVDVMDYSLLVGVDEERKELVLGIIDFMRQYTWDKRLGTSVKASGILGGPKNASPTIISPKQYKKRFRKAMTTYFLTIPDQWSS

SEQ ID NO: 78046 - protein, 211 aa, Gossypium hirsutum
  unsure (1)..(211): unsure at all Xaa locations
  Clone ID: AI055742.1.pep
DGVSSGSPTCLAKILGIYQVSVKHLKGGKETKMDLTVMENLFFRRSISTVYDLKGSIRSRYNPDTSGTNKVLLDMNLLETLRTEPIFLGSNAKRNLERAIWKDTFFSGIRPIPWPFSFSLGVIMSSLKPPFRIYSILLKHFIVVKPLEXWVSASGILXGPKNASQTFFFQHVINYPKGAIHIFYTIPHMGLQTCHNLSMLIIPLLNLIPPT

SEQ ID NO: 78047 - protein, 119 aa, Gossypium hirsutum
  Clone ID: GOSHI-09MAY01-C5268_1.pep
FWGLLSTKFNSKSKQLLSDPHFTPPPQINQIILRMQNSEGSCLSYMAAWLGSSVAQAFFASLERCSCINLSTSDDADDSEAHDLPLMFTNCSSISSSSVTSIPNNNNNTPSNDVVNLPV

SEQ ID NO: 78048 - protein, 82 aa, Gossypium hirsutum
  Clone ID: uC-gsronu33B106f11b2.pep
LLPLFFFLLLLQSLASTTACAAATSSDAGTLSFLLLFLFSSLFFFFPSSLHHQSPLSLTTTTTLLQTTSLISLFRSWIAYCF

SEQ ID NO: 78049 - protein, 311 aa, Gossypium hirsutum
  Clone ID: GOSHI-09MAY01-C6918_1.pep
MAKTQTPHIAILPSPGMGHLIPLVEFAKRFVQQHNFTVTFVIPTADSPSKAQISTLDSLPSSIDYVFLPPVDLSDLPQDAKIETVISLTVARSLSFLRDALKSLAAKTKLVGLVVDLFGTDAFDVPGEFNLSPYIFFPSTAMALSLFHYLPKLDQMVSCEYRDLPEVRIPGCIPIRGKEMLDPAQDRKNDAYKWLLHHAKRYRLAEGIMVNSFVELEAGATKALQEKEPDKPPVYPVGPLVNVDASNKGKADGTDCLKWLDKQPHGSVLYVSFGSGGTLSSNQLNELAVGLEMSEHRFLWVVRSPNDKVAN

SEQ ID NO: 78050 - protein, 361 aa, Gossypium hirsutum
  Clone ID: GOSHI-09MAY01-C6928_1.pep
EAKNYPREPAAHVAIRTVRRLLEKQKDKITAVVFCTSTSAGTEIYKRLLPLYLPRDKHEEAVAISKLPADVGDENGETINHERKIRIKPLPKKVIPKPSQSPAEVPASDVGLVQRNSSYLDTYLDPAFMSLMKDPDQRRQEQWEKTAQAQGGWNCAKMLGFGDIGGPPLSAAEEYSLHSRCLAKANSLNLSEIAEMKILYRGGVDSEGRPVMVVVGAHFLLRCLELERFVLYVVKEFEPLIQKPYTIVYFHSAASLQVQPDLGWMRRLQQILGRKHQRNLHAIYVLHPTFHLKAAIFALQVFADKVVWKKVVYVDRLLQLFRYVPREQLTIPDFVFQHDLKVNGGKGLIVDPRTKYVYQRP

SEQ ID NO: 78051 - protein, 164 aa, Gossypium hirsutum
  Clone ID: GOSHI-09MAY01-C6888_1.pep
MLNKLALPESSTFPGKPMPPTAECWFDDACILDMDYFVKTISGIKAKGVRPDLVGSIIAHYASKWLPDLSGNDTEKGPMSLQESSPESVTVSWMKKRFFVETLVGILPPERDSIPCNFLLRLLRTANMVGVEPSYRAELEKRISWQLDQASLKELMIPSFSHTC

SEQ ID NO: 78052 - protein, 297 aa, Gossypium hirsutum
  unsure (1)..(297): unsure at all Xaa locations
  Clone ID: GOSHI-09MAY01-C106593_1.pep
MEIWGWVFIGILFLADFVVKIEPFKLGRSQPTERISGSAGDVLEDNPVGRLKVFVYELPSKYNKKILQKDPRCLNHMFAAEIYMHRFLLSSPVRTLNPEEADWFYTPVYTTCDLTPNGLPLPFKSPRMMRSAIQLISSNWPYWNRTEGADHFFLVPHDFGACFHYQEEKAIERGILPLLQRATLVQTFGQRNHVCLKEGSITIPPYAPPQKMQTHLIPDKTPRSIFVYFRGLFYDVGNDPERGYYARGAKXIWENFKDNPLFDISTEHPTTYYEDMQRAVXCLCSLGWAPWSPKLVE

SEQ ID NO: 78053 - protein, 259 aa, Gossypium hirsutum
  Clone ID: GOSHI-09MAY01-C6548_1.pep
MAFVTSEELLATLVPIAVYWIYSGMYVMFESRFEKYKLHSKKEEEEKNLVSRKEVFKAVLCHQVMSIAINLFTYAVTREKDGEASPKKSLTLLLLAKQLVIAMVVIDTWSFFVHWYLHQNKFLYKHLHVPHHRLVVPYSFGGQYMHPIEGFLDTMGGTLAVLLFGMSPRTAMFFSSFTILKLVDDHCGMKLPGNPFYLFFNNNAAYHDVHHQLYGTKYNFSVYFDIWDRILGTYMPYSLEKRPDGGLEVRRADQEHKKD

SEQ ID NO: 78054 - protein, 145 aa, Gossypium hirsutum
  Clone ID: GOSHI-09MAY01-C6518_1.pep
MASTASLSTAVATTSFLRGHPAPKTLNSLPFNQSLFGLKPQRNGRLTMAAYKVTLLTPEGPQEFVCPDDVYIVDQAEEEGIDLPFSCRAGSCSSCAGVIKQGSVDQSDGNFLDDDQIAAGFVLTCVAYPQSDVVIETHKEEQLTA

SEQ ID NO: 78055 - protein, 116 aa, Gossypium hirsutum
  Clone ID: LIB3165-023-P1-K1-C2.pep
NFVFKGFLFRGGGNNFFLRGHPAPKTLRFLSFNQSFFGLKPQRNGRLNMAGYKGALVTPGGPQEFGGPDDVYIVDQAEEEGIDLPFSGRAGSWSSCAGMIKPGLRRSIPTGNFLDD

SEQ ID NO: 78056 - protein, 107 aa, Gossypium hirsutum
  unsure (1)..(107): unsure at all Xaa locations
  Clone ID: LIB3165-023-P1-K1-C3.pep
SPFLLTKFLFXLKPQQNAPLTIPSYKITLLTPXGPQKFLFPNILYILHQTYKXSIDLPFSCRAGGGYFCPGMINQGSVVQSDGNXLDDDQIVAGFVLTCVANPQSDV

SEQ ID NO: 78057 - protein, 172 aa, Gossypium hirsutum
  unsure (1)..(172): unsure at all Xaa locations
  Clone ID: GOSHI-09MAY01-C6508_1.pep
MTSSSSSTAGGYDVPWVEKYRPSKVSDIVGNEDAVSRLQVIARDGNMPNLILSGPPGTGKTTSILALAHELLGPVYKEAVLELNASDDRGIDVVRNKIKMFAQKKVTLPPGRHKIIILDEADSMTSGAQQXALRRTMEIYSNSTRFALACNTSSKIIEPIQSRCALVRFSRL

SEQ ID NO: 78058 - protein, 102 aa, Gossypium hirsutum
  unsure (1)..(102): unsure at all Xaa locations
  Clone ID: LIB3165-005-P1-K1-A4.pep
QALRRTMEIYSNSTRFALACNTSSKIIEPIQSRCALVRFSRLSDQEILGRLMVVVDAEQVPYVPEGLEAIIFTADGDMRQALNXNLQATYSGFRFVNQENVF

SEQ ID NO: 78059 - protein, 131 aa, Gossypium hirsutum
  Clone ID: GOSHI-09MAY01-C6538_1.pep
GIVLFRNQNQGRKRVSRQLNSLIAWILNVNTSTTDLFALPPPHRNASLVVAAVNNRSSRLPLLTVIITINNNLSLLDRPRGGRSRVEDRSRLWRTRVEEICGEKIILKTSHVKLYLKEGKRETLSLNRTRG

SEQ ID NO: 78060 - protein, 342 aa, Gossypium hirsutum
  unsure (1)..(342): unsure at all Xaa locations
  Clone ID: GOSHI-09MAY01-C6478_1.pep
MACATNAISLSLSSNPNSKLSSDFIPKLNKPVNVSLRASTSAELNPGRLFLSRPIGLSRRNCANATPVMDQSVGERSSSVPTIVEVDLGNRSYPIYIGSGLLDQHELLQKHVHGKKVLVVTNTTIAPLYLDKVVDALTKGNPNVSVENVILPDGEKYKNMETLMKVFDKAIESRLDRRCTFVALGGGVIGDMCGFAAAAFLRGVNFIQIPTTVMAQVDSSVGGKTGINHPLGKNLIGAFYQPQCVRIDTDTLNTLPDRELASGLAEVIKYGLIRDAEFFEWQDKNMEKLMARDPDAFAYAIKRSCENKAEVVSLDEKESGLGASXLTWGHPLGHAIEPGFWI

SEQ ID NO: 78061 - protein, 137 aa, Gossypium hirsutum
  Clone ID: LIB3543-022-Q1-K1-A4.pep
MACATNAISLSLSSNPNSKLSSDFIPKLNRPVNVSLRASTSAELDPGRLFLSRPIGLSRRICANATPVMDQSVGERSSSVPTIVEVDLGNRSYPIYIGSGLLDQHELLQKHVHGKKVLVVTNTTIAPLYLDKVVDAL

SEQ ID NO: 78062 - protein, 151 aa, Gossypium hirsutum
  Clone ID: GOSHI-09MAY01-C6468_1.pep
MAQAMASMTGLRGSSQAVLEGSLQLSGQTRLNVASTNRVAVARPGFTVRAQQVPAEPETGRRAVLGLVAAGLATGSFVQAVLADARSIKVGPPSPPSGGLPGTLNSDEPRDLDLAYKDRFFLQPLTPAQAAQRAKESAKDILGGKTLIDKK

SEQ ID NO: 78063 - protein, 123 aa, Gossypium hirsutum
  unsure (1)..(123): unsure at all Xaa locations
  Clone ID: LIB3120-004-Q1-K1-D6.pep
NTEAVLYGRVELNEQTRLNVASTNRVAVARPGFTVRAXHVPAEPETGRRAVLGLVAAGXATGSLVQAVLADARNIKVGPSSPPSGGLPXTLNFDEPRYLDLAYKDRFFLQPFTPSQACYKANE

SEQ ID NO: 78064 - protein, 84 aa, Gossypium hirsutum
  Clone ID: LIB3120-054-P1-K1-D7.pep
PRVRAQAMASMTGLRGSSQAGLEGILQLSGQTSLNVFSTNRLAVARPFLTVRAKQVLLLLLTEHIAFLGFVFFTFGLLFSFFKN

SEQ ID NO: 78065 - protein, 102 aa, Gossypium hirsutum
  unsure (1)..(102): unsure at all Xaa locations
  Clone ID: GOSHI-09MAY01-C6418_1.pep
MIVSLTISLFWCEELIMNPLISAASVIAXAGLAVGLASIGPGVGQGTAAGQAVEGIRETTLEAEGKNTTVPLFGLVWLLWNALTIYXGLVVALALLFANPFV

SEQ ID NO: 78066 - protein, 69 aa, Gossypium hirsutum
  unsure (1)..(69): unsure at all Xaa locations
  Clone ID: LIB3165-050-Q1-K1-A5.pep
MNPLISAAFXIAAGLAVGLASIGPGVGQGTAAGQAVKGWETTGRGKIQTYVAYDLHMLVTCLIESCYLN

SEQ ID NO: 78067 - protein, 191 aa, Gossypium hirsutum
  Clone ID: GOSHI-09MAY01-C6408_1.pep
MAEEPTPKRQREETQSSNEEHVEETKRHKSYNHILSLLEVEEDEPSQDLSPLITTLQQQLSSDSVLDAPFPLCEPATPSPSNPDKETATTVLSLEDCTSATCSLKEDDDDDDKVQVIRHLLEASDDELGIPNREDGDGDGSGGGSDVGFEVFELEEGFNNGGNGFALCDGLWELEDEAANYYTLLQSELFM

SEQ ID NO: 78068 - protein, 68 aa, Gossypium hirsutum
  Clone ID: LIB3148-043-Q1-K1-B12.pep
TKKQGESPDIFKEVGGFQNELVPKKIIAFIFHISPRTPFFSPSLIFTPTISFCFVVSPAMKLHEEFRL

SEQ ID NO: 78069 - protein, 268 aa, Gossypium hirsutum
  unsure (1)..(268): unsure at all Xaa locations
  Clone ID: GOSHI-09MAY01-C106693_1.pep
AFQRTKVLTDHLLQSPPSSSFQTPSLSSNACLNYSPPELSEKYAFDINDMRKLMDGHDLEERDRLFGMITQSKVFNPRVRGGKVFVSPDYNHSMEQQREMTWKRIEYLFERGVFQGWLTGEGEEVEMRRFACFEVLGLFHRSISITLGVHFFLWGGAVQFFXGTKHHHDKWLRDPENYLVHGGFAMTELGHGSNVPGMEAMTTFXTLTXGEFVSNTPCESAQKYWIGGAANHATHTIVFSQLNINGTNQGVHALIAQIRDADGNVCPN

SEQ ID NO: 78070 - protein, 71 aa, Gossypium hirsutum
  Clone ID: GOSHI-09MAY01-C6608_1.pep
KIQRFLSQPFHVAEVFTGAPGKYVELKESITSFQGVLDGTYDDLPEQSFYMVGGIEEVIAKADKIAKESAA

SEQ ID NO: 78071 - protein, 149 aa, Gossypium hirsutum
  Clone ID: GOSHI-09MAY01-C6198_1.pep
TDKKKKEFIYNIPFPFFSFHIFTVLCSYPFQMFFFFFLLSFVLSFLFLFFSFHYKKLHKQQQLQEEGNPQNDSALLNCCFPDIVDTRAQTRGNDSTHLPHTLLLQIMPSDSAKWAGLFTGENQQKGDASRVGSDRDRERCESGGEDQRT

SEQ ID NO: 78072 - protein, 58 aa, Gossypium hirsutum
  Clone ID: GOSHI-09MAY01-C6188_9.pep
STLTFQFLLSCSSMFAQRKGLMASNANLSQSFSPTFFLNFSMVCVWFFSSYDTITSLF

SEQ ID NO: 78073 - protein, 146 aa, Gossypium hirsutum
  Clone ID: GOSHI-09MAY01-C6188_7.pep
SRVRPRVRPRVRPRVRASMVLLLALNILFFSLVSACGSCSSPTPKPRPNPNPNTPTPTPSARGRCPRDALKLGVCANVLNLVNVTIGSPPVMPCCSLLNGLVDLEAAACLCTAIRANILGINLNIPVSLSLLLNVCSRNVPTGFQC

SEQ ID NO: 78074 - protein, 109 aa, Gossypium hirsutum
  unsure (1)..(109): unsure at all Xaa locations
  Clone ID: GOSHI-09MAY01-C6188_6.pep
NRSFGLDLRVRSNSNTPTPTPSARGTCPTDALKLGVCANVLNLVNVTVGSPPVMPCCSLXINGLGDLEAAACLCTAIRANILGINLNIPVSLSLLLNVCSRNVPTGFQC

SEQ ID NO: 78075 - protein, 64 aa, Gossypium hirsutum
  Clone ID: GOSHI-09MAY01-C6188_5.pep
NRRVDLDPTGHAEGLLDGLPPLEAAVCLCTAIKANILGINLNIPVSLSLLLNVCSKNVPSNFQC

SEQ ID NO: 78076 - protein, 134 aa, Gossypium hirsutum
  Clone ID: GOSHI-09MAY01-C6188_4.pep
MASKQSGSMALLLALNILFFSLVSATAPSPPTKPNHKPKANPNPSTPSSQGKCPRDALKLGVCANVLGLVKPVIGSPPVMPCCSLLDGLVDLEAAVCLCTAIKANILGINLDIPVSLSLLLNVCSKKVPYGFQC

SEQ ID NO: 78077 - protein, 131 aa, Gossypium hirsutum
  unsure (1)..(131): unsure at all Xaa locations
  Clone ID: GOSHI-09MAY01-C6188_3.pep
MDSKRSASTALLLALNILFFSLVSAXGSCSSSGSNPRPTPTPTPSARGRCPRDALKLGVCANVLNLVNVTVGSPPVMPCCSLLNGLVDLEAAACLCTAIRANILGINLNIPVSLSLLLNVCSRNVPTGFQC

SEQ ID NO: 78078 - protein, 136 aa, Gossypium hirsutum
  Clone ID: GOSHI-09MAY01-C6188_2.pep
MASKRSASMVLLLALNILFFSLVSACGSCSSPTPKPRPNPNPNTPTPTPSARGRCPRDALKLGVCANVLNLVNVTVGSPPVMPCCSLLNGLVDLEAAACLCTAIRANILGINLNIPVSLSLLLNVCSRNVPTGFQC

SEQ ID NO: 78079 - protein, 132 aa, Gossypium hirsutum
  Clone ID: GOSHI-09MAY01-C6188_1.pep
MDSKRSASTALLLALNILFFSLVSANCGSCSSSGSNPRPTPTPTPSARGRCPRDALKLGVCANVLNLVNVTVGSPPVMPCCSLLNGLVDLEAAACLCTAIRANILGINLNIPVSLSLLLNVCSRNVPTGFQC

SEQ ID NO: 78080 - protein, 102 aa, Gossypium hirsutum
  Clone ID: uC-gsflnu33B088a05b1.pep
EPTVTLTKLSTLAHTPNLRASLGHLPENEGVSELKIKYFDTIPVTSSMCVLKTGFLFAASEFGNHALYQFQAIGDDPDVESSSSTLMETEEGFQPVFFQPSE

SEQ ID NO: 78081 - protein, 131 aa, Gossypium hirsutum
  unsure (1)..(131): unsure at all Xaa locations
  Clone ID: uC-gsflnu33B036e02b1.pep
SSSMALFKALNRDFYSLVSAXGSRYTPTPKPKPNPKPQPXPPLYLHKAXCPTDAPNXGVCANVLGLTKPVIGSPPEMPCSTLFDGPADLXAAVCLSTAIKANILRINLNIPISLSLLLIACSKKVSSNLQC

SEQ ID NO: 78082 - protein, 74 aa, Gossypium hirsutum
  unsure (1)..(74): unsure at all Xaa locations
  Clone ID: LIB3149-051-Q1-K1-C2.pep
GECANGLNLVNXTIGSPPVMPCCSLLNGLVDLEAAACLCTAIRANILGINLNIPVSLSLLLNVCSRNVPTGFQC

SEQ ID NO: 78083 - protein, 107 aa, Gossypium hirsutum
  unsure (1)..(107): unsure at all Xaa locations
  Clone ID: LIB3585-048-Q6-K1-E11.pep
MDSKRSASTALLLALNILFFSLVSANCGSCSSSGSNPRPTPTPTPSARGRCPKDALNLCVXANVLNLINWTVHSPPMPPWCSLLNSIVFLAVAAYYIPGNMVMLPSI

SEQ ID NO: 78084 - protein, 65 aa, Gossypium hirsutum
  Clone ID: LIB3147-034-Q1-K1-E1.pep
DLMHQTLTFQIPLTCSSTLAQRMFLPTSNAKSSLFPIAFLDLTYRVWLSKVTDTHFFFKPLIFHL

SEQ ID NO: 78085 - protein, 127 aa, Gossypium hirsutum
  unsure (1)..(127): unsure at all Xaa locations
  Clone ID: LIB3272-035-P1-K1-E5.pep
RPHTFLLLFPKSVALVXLLGSSXPPVKRQGHNSNNXLTSPTSLPGYPHRVXRCXXRDAXLKLXXVWLPMVXXNXXSMVTXVGSXXPVXCHAXXPSQMGXXSTXXSCWACXFVPGXXRAXTSXRHXXX

SEQ ID NO: 78086 - protein, 96 aa, Gossypium hirsutum
  Clone ID: LIB3149-002-P1-K2-E1.pep
MASKQSASMALLLALNILFFSLVSATAPCPPTKPNHKPKPNPNPSTPSSQGKCPRDALKLGICANVLGLVKPVIGSPPVMPCCSLLDGLVDLETSV

SEQ ID NO: 78087 - protein, 76 aa, Gossypium hirsutum
  Clone ID: LIB3272-019-P1-K1-G8.pep
LKGINMGTCLEQNEVGVWVLGFGFGLGLGVGEEQKHQAQTREKKRMLSAKRRTMEADILEEILILTANVSGLLFWL

SEQ ID NO: 78088 - protein, 41 aa, Gossypium hirsutum
  Clone ID: LIB3147-008-Q1-K1-C12.pep
IGSHAKSISKWIEKQKQGNNTTLFHVFWRYKKPQKKNRTRG

SEQ ID NO: 78089 - protein, 355 aa, Gossypium hirsutum
  unsure (1)..(355): unsure at all Xaa locations
  Clone ID: GOSHI-09MAY01-C6148_1.pep
ACSLCQKVQQSLVSAASGHVLAKDDDSPVTIADWSVQATVSWLLSEFLEGWSVSIVAEEDVQTLSKPEAASLLSAVVNTVNECLAEAPKYGLQCPKKVLGTSQILEAISRCNSTGGPTGRHWVLDPVDGTLGFVRGDQYAVALGLIEDGKLVLGVLGCPNYPMRKELLTSTRPRTRGKPTSPPSSDIWQKGCVMYASRGTGQAWMQPLILGDTKFEWPNSATLLQASPVDDPSLATFCEPVEKANSNHLFTEGLANSIGLKNRPMRVHSMVKYAAIARGDAEVYIKFARSGYKEKIWDHAAGVVIVEEAGGVVTDAGGRPLDFSRGLYLEGLDRGXVACSGPILHDKIIGAGYAS

SEQ ID NO: 78090 - protein, 79 aa, Gossypium hirsutum
  Clone ID: GOSHI-09MAY01-C6168_1.pep
RSKHRGHQHQIRVYEGSQRAKAPILVQRDKRRRAPGVGHADEAREVCGARGKLGFPGLPKLAWVLGHRAIKNWVFRVWF

SEQ ID NO: 78091 - protein, 189 aa, Gossypium hirsutum
  Clone ID: GOSHI-09MAY01-C6108_2.pep
HASVFLDRVDKPLFFSFDIAGPLKRISRNWICKNKESKISDYTEKKIEKKDEAKREKYKREEKMRIEIAEAWDSLLLAQVIRGSVLITQSILRKYIILPSLIIVKNIARMLLFQFPEWSEDLTDWNREMHVKCTYNGVQLSETEFPKNWLTDGIQIKILFPFCLKPWHRFKLQPSHKDPMKKKKGQKND

SEQ ID NO: 78092 - protein, 201 aa, Gossypium hirsutum
  Clone ID: GOSHI-09MAY01-C6108_1.pep
VLRIVFYLAQVIRGSVLITQSILRKYIILPSLIIVKNIARMLLFQFPEWSEDLTDWNREMHVKCTYNGVQLSETEFPKNWLTDGIQIKILFPFCLKPWHRFKLQPSHKDPMKKKKGQKNDFCFLTVWGMETELPFGSPRKRRSFFEPIFKELKKKIKKGGPDAWAAASVLKEKTKLFRKASKETKKWITQSILFLKGIIKE

SEQ ID NO: 78093 - protein, 133 aa, Gossypium hirsutum
  Clone ID: LIB3135-026-Q1-K1-B8.pep
HASAHASAWHRFKLQPSHKDPMKKKKGQKNDFCFLTVWGMETELPFGSPRKRRSFFEPIFKELKKKIKKWKTKCFIALTILKEKTKLFRKASKETKKWITQSILFLKGIIKELLKINPIPFFGLRRPYELGET

SEQ ID NO: 78094 - protein, 119 aa, Gossypium hirsutum
  Clone ID: GOSHI-09MAY01-C6098_1.pep
MAQRSHVPKFGNWEGEEDVPYTAYFDKARKGRTGGKIVNPNDPQENPDLRRDYVAPNKAPPASRTNPEANELVGDGPVRRGHECGKSRDEVDFKQYADSPVRHDNGNRRALGDSTPTRY

SEQ ID NO: 78095 - protein, 323 aa, Gossypium hirsutum
  Clone ID: GOSHI-09MAY01-C6088_1.pep
MVSMAAIGDLRLPSTASFNASSVCSSRKSSAPRSLSFSASALSGDKLVFKIATGCSRTERTASIVSPKAVSDSKNSQTCLDPDASRSVLGIILGGGAGTRLYPLTKKRAKPAVPLGANYRLIDIPVSNCLNSNISKIYVLTQFNSASLNRHLSRAYASNMGGYKNEGFVEVLAAQQSPENPNWFQGTADAVRQYLWLFEEHNVLEFLVLAGDHLYRMDYERFIQAHRETDADITVAALPMDEKRATAFGLMKIDEEGRIIEFAEKPKGDQLKAMKVDTTILGLDDVRAKEMPYIASMGIYVVSKNVMLDLLRENASGANDFGS

SEQ ID NO: 78096 - protein, 197 aa, Gossypium hirsutum
  Clone ID: LIB3543-044-Q6-K6-B12.pep
MITTTKSSSSSNAASISPSSGIFLAPRTLSFSASALSGDKLVSKTVTSSRQMKRTPFIISPKAVSDSQNSQTCLDPDASRSVLGIILGGGAGARLYPLTKKRAKPAVPLGANYRLIDIPVSNCLNSNVSKIYVLTQFNSASLNRHLSRAYASNMGGYKNEGFVEVLAAQQSPENPNWFQGTADAVRQYLWLFEEHNV

SEQ ID NO: 78097 - protein, 107 aa, Gossypium hirsutum
  unsure (1)..(107): unsure at all Xaa locations
  Clone ID: LIB3585-047-Q6-K1-C8.pep
SQIYLINHRTPHKHFASRQSPLSKDKLIFKIATDCSPTERTASIVSPKAVSDSKNSHTCFDPYSSLTVXXIILGGGAITMLYLLTNKIAKPSVLIKTYYRIKVIHFK

SEQ ID NO: 78098 - protein, 215 aa, Gossypium hirsutum
  unsure (1)..(215): unsure at all Xaa locations
  Clone ID: GOSHI-09MAY01-C106003_1.pep
MVRIIPMASSSIRPSLSPFRCSGGVSSSRFGVSLSPVHLHRHLGFSNLGSVVPQSQFFGFKASKMSRTEETKLGKPLVGNVVRASTAAAQETEALQWVEKDKRRMLHVVYRVGDLDRTIKFYTECLGMKLLRKRDIPEERYTNAFLGYGPXEDSHFVIELTYNYGVDKYDIGTAFGHFGIAVEDVAKTVELVKAKGGKVTREPGPVKGGSTVIAF

SEQ ID NO: 78099 - protein, 175 aa, Gossypium hirsutum
  Clone ID: GOSHI-09MAY01-C6038_1.pep
WTRGRKDSQERANKSWLERSAESLELVVENYDSEEERVKNFKQKKASSNHLKKLQQELNGLLSRPLRPKTFSHRYPTAAGVTQLRQHQFEELANQNGDDNLVLGENKRRKMVVIGQDCVEPLQALRSAGREVHMDVKERVEKRRNAESLRRKRKEEKKRLRDQRRKQKKQSQGRE

SEQ ID NO: 78100 - protein, 84 aa, Gossypium hirsutum
  Clone ID: GOSHI-09MAY01-C6338_1.pep
MVSLQILNPVFSSISISQSSCPGKSDFRKKILNFNSCRSFRSLHRQRSRIYCATQEGDNKSNGEEPPESLVMKELKRKGMTPTS

SEQ ID NO: 78101 - protein, 108 aa, Gossypium hirsutum
  Clone ID: GOSHI-09MAY01-C6328_1.pep
MAASFSSTTLFRPNLNPPKSFLTHSDCAQEGFGRVKCHFINVSAHSWSSAANYASIRHVAVKSSGKRVVVKHLLRKRVGLVKCATIEEIQAQKSSIVKDGKERMEETI

SEQ ID NO: 78102 - protein, 172 aa, Gossypium hirsutum
  Clone ID: GOSHI-09MAY01-C6298_2.pep
MESHDETGCQAPEGPILCINNCGFFGSAATMNMCSKCHKAMILKQEQAQLAASSIGSIVNGSSTGNGKEPAVATALDVQSGNADTKMVSTELPIDPSGTTSCGMKMKEGPNRCTKCCKRVGLTGFNCRCRTLFCAAHRYSDKHDCPFDYRAAARNAIAKANPLVRAEKLDKI

SEQ ID NO: 78103 - protein, 172 aa, Gossypium hirsutum
  Clone ID: GOSHI-09MAY01-C6298_1.pep
MESHDETGCQAPEGPILCINNCGFFGSAATMNMCSKCHKAMILKQEQAQLAASSIGSIVNGSSTGNGKEPAVATALDVQSGNADTKMVSTELPIDPSGTTSCGMKMKEGPNRCTKCCKRVGLTGFNCRCGNLFCAAHRYSDKHDCPFDYRAAARDAIAKANPVVRAEKLDKI

SEQ ID NO: 78104 - protein, 347 aa, Gossypium hirsutum
  Clone ID: GOSHI-09MAY01-C6248_1.pep
LDSTLLDELVGNIATLACVYHKPPDGFVTRAKTATQKTEDDDYPDGNETRYSETLSNAANGGASPPSSSSVPHAAARQPAPAPAAPAPAAVPDLLSDLIGLDNNQIVPADQPATSSGPPLPILLPAGSGQGLQISAQLVRQDAQIFYSLLFENNTQITLDGFMIQFNKNSFGLAAAGPLQVPPLAPGASARTLLPMVLFQNTSTGPPNTLLQVAVKNSQQPVWYFNDKILLHVFFTEDGRMERTSFLETWRSLPDSNEVLKEFPGIMVTSAEATLDRLAASNMFFIAKRKHANQDVFYFSAKIPRGLPVVIELTTIIGNPGVMCAIKTPNPEMAPLFFEAIETLLKA

SEQ ID NO: 78105 - protein, 249 aa, Gossypium hirsutum
  Clone ID: GOSHI-09MAY01-C6278_1.pep
MAALASSSSSSLLFSSPPTKFPSPSLYPPLRLSLPTSSFLSSSLSLSPSFHAYPTSSRRYSASSFTIRASAAEKKKVLIVNTNSGGHAVIGFYFAKELLGSGHEVTIFTVGEEGSDKMKKPPFNRFSEITSAGGKTVWGDPADVGKVVAGATFDVVLDNNGKDLDTVRPVVDWAKSSGVKQFLFISSAGIYKPTDEPPHVEGDVVKADAGHVGVEKYVAEVFSSWAVFRPQYMIGSGNNKDCEEWFFDR

SEQ ID NO: 78106 - protein, 186 aa, Gossypium hirsutum
  Clone ID: GOSHI-09MAY01-C6268_1.pep
ISATVLVGFCYCFEEYDPRTVFARNLSRRRSFRCGIDRDDKGWTMLHIGARKGDLIQVKQLLNEGVDVNVAAWGPKSQGVTPLHLAAEGGHLEVMDELLERGANIDARTKGACGWTPLHTAAKERKREAVKFLIENGAFLPDDINDCRFNPPLHYCPGLEWAYEEMKRLQRDGSSSAGETSYSSEN

SEQ ID NO: 78107 - protein, 282 aa, Gossypium hirsutum
  Clone ID: GOSHI-09MAY01-C6208_1.pep
MPRSRGSDMPQRQSPRGTHQVRSSISDSDPLHHRSITDRSSPKLGDRRSPRGAPQSDPLNQKKLGTRIADLESQLGQAQGELKNLKDQLASAEAAKKEAQQELENKTKKPKAREAVEVNEKVSPKRTRDSKKSDCSIREEVSEDNQQETDVFEVTVEKTAIEPKVETEEVDQGDEKTNAIEISSAPPAESKLEKQFFQDLALKNDEINMLKSKLEEKEKELGVFTQENKDLKKQLNEANLNISSAKVKEEEMALKLGQVGEELEASKTNTTQLKEKLQSVEE

SEQ ID NO: 78108 - protein, 199 aa, Gossypium hirsutum
  Clone ID: GOSHI-09MAY01-C6238_1.pep
MTSSSATLSFSSFSSTSALSLSKVRFKFPSFSRTSSLSSRAKPFTASSSTTTHNISGEIRHCSLSRRRGLAFTATLPVLLPLHEFVDSVAAKAVESGSGQSEYMRIKEEIIKVVTKGKAAGVLRLVFHDAGTYEMDENSGGMNGSIVYELERPENAGLKKSLKVLEKAKKEIEAIQSVSWADMIAVGGAEAVSVCEVRK

SEQ ID NO: 78109 - protein, 104 aa, Gossypium hirsutum
  Clone ID: LIB3165-023-P1-K1-H6.pep
MDLCICFSPPFIMSRNLPVEETRELCCSAASALVTKLSYAIFIFLFAVVGATLGALTGAFVGTKTKMGCLHGAMVGAIKGSFFSINLFKISLKICSSEIRVSKS

SEQ ID NO: 78110 - protein, 72 aa, Gossypium hirsutum
  Clone ID: LIB3165-023-P1-K1-H7.pep
TSSALVTKLCYAIFMCLFAVVGATLGALTGAFVGTKTKMGCLHGAMVGAIKGSFFSINLFKISLRICSFEIR

SEQ ID NO: 78111 - protein, 115 aa, Gossypium hirsutum
  Clone ID: GOSHI-09MAY01-C107963_1.pep
GVGDLMWELALPIGVGRDHESCNPTTTKGTNLMEKVAAVGWKVLVTGCDGDPLIDRQVELVKSMEEKGVKVVSHFRMGDHHGVDFMQPDKANALFLVLKDFIASATSVTINANVE

SEQ ID NO: 78112 - protein, 151 aa, Gossypium hirsutum
  Clone ID: GOSHI-09MAY01-C7938_1.pep
SRYFPHSQSSSTPHLTFLLRCMATSAAAGPINPSNTRLGWIGTGVMGRSMCAHLINAGYSLTVFNRTLSKAQPLVDMGARLAQTPHDLAAQSDVVFSIVGYPSDVLQVLLDPFNGALSGLRPGGILVDMTTSEPSLAVEISTAASSKNCSS

SEQ ID NO: 78113 - protein, 361 aa, Gossypium hirsutum
  Clone ID: GOSHI-09MAY01-C7868_1.pep
MKALILVGGFGTRLRPLTLSVPKPLVEFANKPMILHQIEALKAVGVSEVVLAINYQPEVMLNFLKEFETKLGITITCSQETEPLGTAGPLALARDKLVDESGEPFFVLNSDVISEYPFKEMIEFHKAHGGEASIMVTKVDEPSKYGVVVMEESTGQVDKFVEKPKLFVGNKINAGIYLLNPSVLDRIELRPTSIEKEVFPKIAAEKKLYAMVLPGFWMDIGQPRDYITGLRLYLDSLRKKASPKLASGPNIVGNVLVHETAKIGEGCLIGPDVAIGPGCVVESGVRLSRCTVMRGVRIKKHACISSSIIGWHSTIGQWARVENMTILGEDVHVCDEIYSNGGVVLPHKEIKSSILKPEIVM

SEQ ID NO: 78114 - protein, 147 aa, Gossypium hirsutum
  unsure (1)..(147): unsure at all Xaa locations
  Clone ID: LIB3146-018-Q1-K1-B8.pep
NNLYATALPWFWMDIGQPRGYFTGLKLSLDSVIKKAXPKWATGTNVERNVLVHETDKIGXRCLVXPHVAIGPSCGAKTGVPLSRCTMMPGLRIKKHACIFSSIIGRHYTDAQWAIVENMTILGEDGHVCDEIYSNGGVVLPHKEIKS

SEQ ID NO: 78115 - protein, 111 aa, Gossypium hirsutum
  Clone ID: LIB3272-034-P1-K1-H5.pep
TVSVPKPLVEFANKPMILHQIEALKAVGVTEVVLAINYQPEVMLNFLKEFETKLGITITCSQETEPLGTAGPLALARDKLVDESGEPFFVLNSDVISEYPIKEMIEFHKAH

SEQ ID NO: 78116 - protein, 175 aa, Gossypium hirsutum
  Clone ID: GOSHI-09MAY01-C7818_1.pep
VLVPDLFRGYFWEKGQPKPMFEQWLASQDLQRVANDIATSTKWMVDEFRAAGISKKLGIIGFCFGGGRVIDVLAADQGACFSTAVSFYGTRMDPTPASKIKVPVLFISGDDDPLCPIGVLSKFEKIIGNGSRVVIFKGRGHAFAHRPGSTEEDADAEQAFTLMRNWLHDGLLVNS

SEQ ID NO: 78117 - protein, 115 aa, Gossypium hirsutum
  unsure (1)..(115): unsure at all Xaa locations
  Clone ID: GOSHI-09MAY01-C7598_1.pep
SCVEXLSAALLICGEEETARSLLCKFKWGHPFLSLNRELLKAYSECENSADIISVQNSWLSQQRQVPKVPPDAAEGASNDSEDEEGSSNDSEDGLPPLERNMNHLSLQESDDESE

SEQ ID NO: 78118 - protein, 66 aa, Gossypium hirsutum
  Clone ID: GOSHI-09MAY01-C7578_1.pep
RETFISSYNLRAFFNILSFFDSRTQQDPFLSIYSIYSIIDRNLNQIMSSHIKYFHIDTYDTFVLPM

SEQ ID NO: 78119 - protein, 200 aa, Gossypium hirsutum
  Clone ID: GOSHI-09MAY01-C7508_1.pep
MVPPPSTPPPDPQQIQQFLSSVLSQRGPSALPYSEDSKWLIRQHLLSLTSRYPSLQPKTATFTHNDGRSVNLLQADGTIPMPFQGVTYNIPIIIWLIESYPRYPPVVYVNPTRDMIIKRPHPHVSPSGLVSIPYLQNWIYPSSNFVDLVINLGSAFSHDPPLYSQRRSNPNPNPPNYGQQQQPPPLKVAAAGYPPSPYGR

SEQ ID NO: 78120 - protein, 138 aa, Gossypium hirsutum
  Clone ID: GOSHI-09MAY01-C7448_3.pep
MSGEEVAVAPTEVAAAIGEPMDINAALPLVIRKSKAHGGLARGLHEAAKAIEKHNAHLCVLADDCDQPDYVKLVKALCADHNVKVLRAPSAKTLGEWAGLCKIDSEGKARKVVGCSCVVVKDYGEQHEAVEVVQQHKD

SEQ ID NO: 78121 - protein, 138 aa, Gossypium hirsutum
  Clone ID: GOSHI-09MAY01-C7448_2.pep
MSGEEVAVAQPEAPATLGEPMDINTALPLVVRKSQAHGGLARGLHEAAKAIEKHNAHLCVLADDCDQPDFVKLVKALCADHNVKVLRAPSAKALGEWAGLCKIDSEGKARKVVGCSCVVVKDYGEQHEGVEVVQQHKD

SEQ ID NO: 78122 - protein, 138 aa, Gossypium hirsutum
  Clone ID: GOSHI-09MAY01-C7448_1.pep
MSGEEVAVAQPEAAPALGEPMDINTALPLVVRKSRAHGGLARGLHEAAKAIEKHNAHLCVIADDCDQPDYVKLVKALCADHNVKVLRAPSAKSLGEWAGLCKIDSEGKARKVVGCSCVVVKDYGEQHEAVEVVQQHKD

SEQ ID NO: 78123 - protein, 86 aa, Gossypium hirsutum
  Clone ID: LIB3829-036-Q1-N6-B7.pep
LFFWAIYICLIVNCGLICLRISFSFSEVVAMLNCSVFLKYARHFFPLLNYVFSRSKPFGNPTILSDVLSSIYEKPVQVCVVNGART

SEQ ID NO: 78124 - protein, 113 aa, Gossypium hirsutum
  Clone ID: LIB3272-052-P1-K1-G11.pep
MSGDEVAAAQPEAAPALGEPMDINTALPLVVRKSRAHGGLARGLHEAAKAIEKHNAHLCVIADDCDQPDYVKLVKALCADHNVKVLRAPSAKTLREWAGLCKIDSEGKARKVV

SEQ ID NO: 78125 - protein, 92 aa, Gossypium hirsutum
  Clone ID: uC-gsflnu33B140c09b1.pep
MSGEEGAGAQPEAAPALGEPMDINTDLLLVVRKSRAHGGLARGLHEAAKVIELHNAHIWVIADDCDQADYAKLDKALSADHNVKVLRAKSAK

SEQ ID NO: 78126 - protein, 224 aa, Gossypium hirsutum
  Clone ID: GOSHI-09MAY01-C7418_1.pep
VFHPPFICHRFNIQTQTPPQKHHHQRKKKERMLLRSSSTPVLGSLVSSIAADSPSNNNHYYETSSPFRHYPSSSFHGHTHHNRLSFHSSPGSVHLSTVVSCGSSPVSPSVDQFSDFELTGFRRAQSEGNLEGLAHAACDGNDEFYKRNQPKKFSARHNKKCLMLQTIPSFSFYKSGARCEEEDDEEEGSDFEEEEEVLNENEERVMAVSGSHGFNPISMENILL

SEQ ID NO: 78127 - protein, 157 aa, Gossypium hirsutum
  Clone ID: GOSHI-09MAY01-C7798_1.pep
MAQITFLAAVCALLLSHSFISGVQGTSFTIVNKCNYVVWPGVLSNAGVSTISTTGFTLRRGESKTISAPASWGGRFWGRTHCSLDSAGKFSCLTGDCASGKLECSGNGAAPPATLAESTLDGAGGLDFFDVSLVDGYNVPMLVVPQGGTGQYCTYTG

SEQ ID NO: 78128 - protein, 78 aa, Gossypium hirsutum
  Clone ID: GOSHI-09MAY01-C7768_1.pep
YISFILFLLFIVFFLIFPSDEYKTKKLQRLFFHFTGREIHFESFSIYFMYIRKRFEVPIFQSNTIFNNIKLNNSPRVR

SEQ ID NO: 78129 - protein, 114 aa, Gossypium hirsutum
  Clone ID: GOSHI-09MAY01-C7648_2.pep
HASAQTERSFPIPMSRLPPQVAQSIQAGAARPGKVVGSVLRYNNCGAVAAGEALEQRRMARNPSVPTQYTATNCSYPRRNPVCKDDEENELQPKPQYMARKVAAAQGGSRSQWY

SEQ ID NO: 78130 - protein, 356 aa, Gossypium hirsutum
  unsure (1)..(356): unsure at all Xaa locations
  Clone ID: GOSHI-09MAY01-C7648_1.pep
FDPRHYQFFLYQLLRGLKXIHTANVFHRDLKPKNILANADCKLKICDFGLARVAFNDTPTAIFWTDYVATRWYRAPELCGSFFSKYTPAIDIWSIGCIFAELLTGKPLFPGKNVVHQLDLMTDLLGTPSAEAIARVRNEKARRYLSSMRKKKPIPLSHKFPNADPLAVRLLERMLAFEPKDRPSAEEALADPYFKGLAKVEREPSAQPVTKMEFEFERRRITKEDVRELIYREILEYHPKMLKEYLEGSEPTGFMYPSAVDHFKKQFAFLEEHYGNGTTAAPLERQHASLPRPCVLYSDYSVQNSTDVTDNLSKCSIRETEKPQTERSFPIPMSRXPPQVPQSIQGXAARPGKVVG

SEQ ID NO: 78131 - protein, 139 aa, Gossypium hirsutum
  Clone ID: GOSHI-09MAY01-C7668_1.pep
MLRLNVYCSLNIPIPEHIKLGSSDGSGLPKFRGGPKLPRRVSVRALKDEMDGGMSGGFQGRSWEPGLEIEVPFEQRPVNEYSSLKDGPLYSWGELGPGQFFLRLGGLWLVTFTVLGVPIAAAGFNPSREPLRFVLAAGT

SEQ ID NO: 78132 - protein, 130 aa, Gossypium hirsutum
  unsure (1)..(130): unsure at all Xaa locations
  Clone ID: GOSHI-09MAY01-C7638_1.pep
KPGKVTISGYALSGGGRGIERVDISIDGGKTWLEASLFSEXGAPYIAERVSSGRWAWVLFEVTVDIPYSTEIVAKAVDSAANVQPENVQDFWNLRGILNTSWHRVQVRVGHSNMLMEQLNNLISNAEICG

SEQ ID NO: 78133 - protein, 63 aa, Gossypium hirsutum
  Clone ID: GOSHI-09MAY01-C7198_3.pep
MADKCGNCDCSDKSQCVKKGNALVIETEKSYISTVVVEAVAENDGKCKCGTSCSCTNCTCGNH

SEQ ID NO: 78134 - protein, 63 aa, Gossypium hirsutum
  Clone ID: GOSHI-09MAY01-C7198_2.pep
MSDKCGNCDCSDKSQCVKKGNSLVIETEKSYISTVVVEAVAENDGKCKCGDSCSCTDCTCGTH

SEQ ID NO: 78135 - protein, 63 aa, Gossypium hirsutum
  Clone ID: GOSHI-09MAY01-C7198_1.pep
MADKCGNCDCADKSQCVKKGNSLVIETEESYISTVVVEPLAENDGKCKCGTSCSCTNCTCGSH

SEQ ID NO: 78136 - protein, 67 aa, Gossypium hirsutum
  unsure (1)..(67): unsure at all Xaa locations
  Clone ID: uC-gsflnu33B035d02b1.pep
MADMCGNCHCADWSLGVKNGDSVVTETEESYISTVDVXPLAKNDGTCKCGTSCSCTNCTCGSHYEDI

SEQ ID NO: 78137 - protein, 73 aa, Gossypium hirsutum
  Clone ID: LIB3166-024-P1-K1-D1.pep
DHHAVFVVHVHFTTYMSPLSWTKAFSKAFMNPCFLKDVTQYASVGYRYVSTGGSYSYTLARISDTSIANLVTT

SEQ ID NO: 78138 - protein, 55 aa, Gossypium hirsutum
  Clone ID: uC-gsflmaxxa039a04b1.pep
SSIHDGACQKKGNALVIETEKSYISTVVVEAMAENDGKCKCGASCSCTNCTCGNH

SEQ ID NO: 78139 - protein, 403 aa, Gossypium hirsutum
  Clone ID: GOSHI-09MAY01-C7188_2.pep
MAVRLLSHELSDLCLGKPALRSLSVTSTIAEALEVLKTSDDNFVSVWSCDHKAKTSSGFESAAGFCDNYDDDDCRCVGKVCMVDVICYLCKDENLVSPSVALKEPVSVLLPKIPGLVLHVEPSCSLLEAIDLILEGAQNLVVPIKTKLSNKRKQHQKPSPTVTVHKGREFCWLTQEDVIRFLLSSIGLFSPVPAFSIDTLGIISSEILTIEYHSPASAAIGAISRTLVDQTSVAVVDSEGCLIGEISPFTLACCDETVAAAVKTLSSGDLMAYIDCGGPPEDLVRVVSSRLKERNLNGMLEHFSMSMSCGGFSSSSSDEESMAASPLPRSGRYSRSMSYSARMVRTAEAIVCHPKSSLVAVMIQAISHRVNYVWVIEDDCRLVGIVTFSDMLKGFREHLETIA

SEQ ID NO: 78140 - protein, 187 aa, Gossypium hirsutum
  Clone ID: GOSHI-09MAY01-C7188_1.pep
MAVSLLSHELSDLCLGKPALRSLSITSTIAEALEVLKTSDDNFVSIWNCDDVECCSRCVGKVCIVDVICYLCKDENLVSPSIALKQPVSVLLPKIPGLIIHVEPSCSLLEAIDLILEGAQNLVVPIKTKVFNNKRSKQQQKPFCWLTQEDIIRFLLSSIGLFSPISSFSIDTLNIISPNTLTIEYHS

SEQ ID NO: 78141 - protein, 74 aa, Gossypium hirsutum
  Clone ID: LIB3493-021-P1-M1-A10.pep
IDCGGPPEDLVRVVSSRLKERNLNGMLEHFSMSMSCGGFSSSSSDEESMAASPLPRSGRYSRSMSYSARMVRTA

SEQ ID NO: 78142 - protein, 113 aa, Gossypium hirsutum
  Clone ID: LIB3829-019-Q6-K6-D6.pep
MAVSLLSHELSDLCLGKPALRSLSITSTIAEALEVLKTSDDNFVSIWNCDDVECCSRCVGKVCIVDVICYLCKDENLVSPSIALKQPVSVLLPKIPGLIIHVEPSCRYIYIHT

SEQ ID NO: 78143 - protein, 111 aa, Gossypium hirsutum
  Clone ID: LIB3493-021-P1-M1-B10.pep
LIIIISLFVFSLLEAIDLILEGAQNLVVPIKTKLSNKRKQHQKPSPTVTVHKGREFCWLTQEDVIRFLLSSIGLFSPVPAFSIDTLGIISSEILTIEYHFPASAAIGAISR

SEQ ID NO: 78144 - protein, 52 aa, Gossypium hirsutum
  Clone ID: LIB3197-022-Q1-M1-G4.pep
MAVSLLSHELSDLCLGKPALRSLSITSTIAEALEVLKTSDDNFLNIWNWDDV

SEQ ID NO: 78145 - protein, 132 aa, Gossypium hirsutum
  Clone ID: GOSHI-09MAY01-C7118_1.pep
PTRPIRPTSAIKICYPKSVMILISNSISLLVFSFLLVHINLSTKEPTMFVDLNGCEVAVDQVFFIIYLNHYVFFFVHFVAFELDPIVLDVSQIIFLVALTFVIFRFGHSTFAADDVFVSLLVGTYRCYDVDD

SEQ ID NO: 78146 - protein, 152 aa, Gossypium hirsutum
  Clone ID: GOSHI-09MAY01-C7128_1.pep
MDVLKASPTIVYSPYIPTTTRNKTQFSKPIFHNLNLQLPCFTRNGSKSRLFTTLSSSPISTTESIEPPMPEVEAEVGKERFDWYSQWYPVMPVCDLDKRVPHGKKVLGLDLVVWWDKNENEWKVFDDTCPHRLAPLSDGRIDQWGRLQCVYH

SEQ ID NO: 78147 - protein, 232 aa, Gossypium hirsutum
  Clone ID: GOSHI-09MAY01-C7088_1.pep
METSVTCYARGIVLPGVSSKHSSALVSPPSISPSFSSKSLKTSSLFGESLRVVPRSSLKVSKAKNTTSLVTKCEIGESLEEFLTKATTDKALIRIMMCMGEALRTIAFKVRTASCGGTACVNSFGDEQLAVDLLANKLLFEALTYSHFCKYACSEEIPELQDMGGPAEGGFSVAFDPLDGSSIVDTNFTVSTIFGVWPGDKLTGVSGRDQVAAPMTIFGSNTTYVLALKDIL

SEQ ID NO: 78148 - protein, 107 aa, Gossypium hirsutum
  unsure (1)..(107): unsure at all Xaa locations
  Clone ID: LIB3120-044-P1-K1-D12.pep
VEFRAPLRRWISPRPHGAYCTCYARGSVVPGVSYKHSSPLVSPPSISPSXSSSKSLKTSSLFGESXRVVPRSSLKVPKAKNTTSLETNRETGETLEEFLPKAPPDKA

SEQ ID NO: 78149 - protein, 96 aa, Gossypium hirsutum
  unsure (1)..(96): unsure at all Xaa locations
  Clone ID: LIB3120-021-Q1-K1-H2.pep
MVTSVTCYARGIRNAVASIKQLSFLIYPPSTYSSLIFISLNTNALFSESYKEVPRNXWSHAKGEYTTSLVTKCEIGESLEEFLTKATTDXALIRLM

SEQ ID NO: 78150 - protein, 67 aa, Gossypium hirsutum
  unsure (1)..(67): unsure at all Xaa locations
  Clone ID: LIB3120-021-Q1-K1-H4.pep
METSVTCYGSWIVLPGVSSKHSSALVSPPSTSPSFSSKSLKTRSLFXESLRPCARSSLNVSKAKHTT

SEQ ID NO: 78151 - protein, 136 aa, Gossypium hirsutum
  unsure (1)..(136): unsure at all Xaa locations
  Clone ID: GOSHI-09MAY01-C7058_1.pep
MAEHPRTHSEESKARFASSDEVYALGRHICMSAHKARRIIDQIRGRSYEETLMILELMPYRACFPILKXLVFPAAANARHNRGFNEASLIISQVAVNEGTTLKRLKPRARGRSYLIKRPTCHITIALKDLEFEPLD

SEQ ID NO: 78152 - protein, 126 aa, Gossypium hirsutum
  Clone ID: LIB3120-010-Q1-K1-G5.pep
MIKIKKHRRNPYTTSDEVYALGQHICMSAHKARRIIDQIRGRSYEETLMILELMPYRACYPILKLVYSAAANARHNRGFNEASLIISQVAVNEGTTLKRLKPRARGLSYLIKRPTCHITIALKDLE

SEQ ID NO: 78153 - protein, 112 aa, Gossypium hirsutum
  Clone ID: GOSHI-09MAY01-C7008_2.pep
FLNFHSISKMSGRGKGGKGLGKGGAKRHRKVLRDNIQGITKPAIRRLARRGGVKRISGLIYEETRGVLKIFLENVIRDAVTYTEHARRKTVTAMDVVYALKRQGRTLYGFGG

SEQ ID NO: 78154 - protein, 123 aa, Gossypium hirsutum
  Clone ID: GOSHI-09MAY01-C7008_1.pep
SNFRFYHPNRSSLNFGWISKMSGRGKGGKGLGKGGAKRHRKVLRDNIQGITKPAIRRLARRGGVKRISGLIYEETRGVLKIFLENVIRDAVTYTEHARRKTVTAMDVVYALKRQGRTLYGFGG

SEQ ID NO: 78155 - protein, 165 aa, Gossypium hirsutum
  Clone ID: LIB3543-040-Q1-K6-B10.pep
MSVLLKSFLILSFRARALPVFPSILTPKSLPRNRRTRTLSSISAGAGESPPPSISPETPTRIPPLSDSLHWVSCTACCGDLSNQDVGFRVRLCGWVALHRVHGGLTFFNLRDHTGIVQRKRKREYTLFVQRGILGFVLFFLRIWSKNLEETIKVMVFSKFHAMGA

SEQ ID NO: 78156 - protein, 60 aa, Gossypium hirsutum
  Clone ID: AI727907.1.pep
SFGRSKTFILLHLHFAGNYKSNGFLKVSCNGGLNQMRAAVYVFPLAHLFLVLLFNIMLLI

SEQ ID NO: 78157 - protein, 110 aa, Gossypium hirsutum
  Clone ID: LIB3165-013-P1-K1-E7.pep
TQASSRLTPSYSENQITMNASAASLSACIAITSTNEELFIGLNKLTSGSPLPCNVIEVNPYSFKPEYLPDGMWFLTSSNDNTDMEHGLWKVKEEAREVFSNSDIIGWRTT

SEQ ID NO: 78158 - protein, 61 aa, Gossypium hirsutum
  Clone ID: LIB3272-040-P1-K1-F3.pep
TQASSRPTPSYSENQIIMIASAASLSACIAITSTNEELFIGLDKLTRGSSLPCNVIEVNPY

SEQ ID NO: 78159 - protein, 182 aa, Gossypium hirsutum
  Clone ID: GOSHI-09MAY01-C7218_1.pep
ALAPVVIGVSMASLTELSFNWAGLINAMISNISFTYRSIYSKKAMTDMDSTNVYAYISIIALFVCIPPALIFEGPQLLKHGFNDAIAKVGMTKFISHLFWVGMFYHLYNQLATNTLERVAPLTHAVGNVLKRVFVIGFSIIVFGNKISTQTGIGTVIAIAGVAAYSFIKAKMEEEKRQMKAA

SEQ ID NO: 78160 - protein, 96 aa, Gossypium hirsutum
  unsure (1)..(96): unsure at all Xaa locations
  Clone ID: GOSHI-09MAY01-C7228_1.pep
MCLVFVCDEDERVIXRQSAPGACPXYCGGMVQAMDVESQWRFCFLPLYFKTRGGSSAAFAGAWLFIDFKFCLLSSCPISPLLYTYLFPSSLVHVKF

SEQ ID NO: 78161 - protein, 52 aa, Gossypium hirsutum
  Clone ID: LIB3165-012-P1-K1-G12.pep
MCLVFVCDEDERVISRQPAPGACPYCGGMVQAMDVESQWRFCFLPLYFKTKR

SEQ ID NO: 78162 - protein, 96 aa, Gossypium hirsutum
  Clone ID: GOSHI-09MAY01-C100503_1.pep
LQFPAFMTQFPSTMTIPSSLLLPSQWPQPHNEELLLAMEESNLEDKLNEISDTNRNLVVIGKTTADNDKEDDNDADDDDADNAEESEGEEFEQETG

SEQ ID NO: 78163 - protein, 236 aa, Gossypium hirsutum
  Clone ID: GOSHI-09MAY01-C100493_1.pep
RIRVRGVTDEVDCHLCKEAPEDTNHLLWSYGILQSVWASLQIRIAPIDSTLNCKNHFVNTFFAADEQNKQLIAIFLWALWYRRNKLIHEGVKFSLQDLLGFIRGYGQEISLCQELGVSCRSLPKEFWSPPDLGFIKLNFNTTFQSDSRTFTTTILAIGSKGEIVGAATYLFEDVVHAFVAEARACERALLFAFRMGFRCLVVERDSLFVPRLVNRAAHTLAIEGRRRQSSSICARV

SEQ ID NO: 78164 - protein, 157 aa, Gossypium hirsutum
  Clone ID: GOSHI-09MAY01-C100763_1.pep
HHLQLPLNLVTVNNCLRALRLFYLSKIKKQKLTDKEAEIDNLVGLAEDLEKKLEDLEQLISDPTLIIAEIQGMASGKARGGENNASPAAVNSSHMSPANSNVDHFDSPTVSTAHTNGAAAVTHLGIVGRGVKCVLMSAGAVELSSIKKPAIHPCFWN

SEQ ID NO: 78165 - protein, 44 aa, Gossypium hirsutum
  Clone ID: GOSHI-09MAY01-C100723_1.pep
KNIKIAYPREIGASPIFSSETLNTLIMIGKHLDLPEMIIDMCSL

SEQ ID NO: 78166 - protein, 99 aa, Gossypium hirsutum
  Clone ID: GOSHI-09MAY01-C100073_1.pep
FVNWSLVTKGVTDEQKKMNATYIISIARKLGCSIFLLPEDITEVNQKMILTLTASIMYWFLKQPVEAVPPPTADGENGSQVETISNSTTDDSASESSVE

SEQ ID NO: 78167 - protein, 114 aa, Gossypium hirsutum
  Clone ID: uC-gsflnu33B018b06b1.pep
WTRGFLELLSAVQPRSVNWSLVTEGVTDEQKKMNATYIISIARKLGCSIFLLPEDIIEVNQKMILTLTASIMYWFLKQPVEEKPAATSDSENGSQLETLSNSTTDDSASESSVE

SEQ ID NO: 78168 - protein, 198 aa, Gossypium hirsutum
  Clone ID: GOSHI-09MAY01-C100363_1.pep
GDKKVIEQLVSAYNQDFNASIPEGVNPIDVAALAKYYIASLPEPLTTFELYDEIKSARSSIHAMRNVLKMLPSVNYMTLEFITALLLRVSQKSVLNKMDARSLALEMAPVIMWQKDRKPESYRKYWSHPLKSPSKGSMDSTPTYSAWDMLEDGEDMDASSHIPLDDGIPVDFGAIEVIQCLIEQHNPIFTDANETVWR

SEQ ID NO: 78169 - protein, 40 aa, Gossypium hirsutum
  Clone ID: GOSHI-09MAY01-C100343_1.pep
LSYQRTQAKGKSITSLRLNNKFRPSNSLSMSFAHVLLVLC

SEQ ID NO: 78170 - protein, 189 aa, Gossypium hirsutum
  Clone ID: GOSHI-09MAY01-C100253_1.pep
TNKPKLVISQTGLEAPNTHTTWKQEAATQEPCQAKLVTDSNVDEGGLETTQTIKPSEENAASVSNRPKSVKLRAGQEPPNTYSTQKQDSAALESSQGKSVTESSVNDSSSQSVNPHECGNPGSKVNDTCNKPTSSGNISSDKLEDETKDGSQFQQKTMSVMRGGEMVQVSYQVYIPKRAPALARRQLKR

SEQ ID NO: 78171 - protein, 200 aa, Gossypium hirsutum
  Clone ID: LIB3828-030-Q6-K6-G7.pep
KLGLSSYLWNALPFMAMITVECTDVGISVISKAALSKGMSNVVSVTYFNALGTLILLPYFIFCRSSGQIIFLTGVKFSSPTLSSALVNLIPIFTFLLAVIFRMEKLEMRKSSSQAKLLGAIVAVTGAFVVTLYKGPLVLMSSSHPFDSKQSKWIIGGLSEQSKWIIGGFLLLLVCLSSATWNVLQAATVKEYTDKMTIVF

SEQ ID NO: 78172 - protein, 88 aa, Gossypium hirsutum
  Clone ID: uC-gsronu33B158b07b2.pep
MGLSSYLWNALPFMATITVECTDVGISVISKAALSKGMSNVVSVTYFNALGTLILLPYYIFFRDKQAPLTFSLLWRFFLLGLIGFNFI

SEQ ID NO: 78173 - protein, 200 aa, Gossypium hirsutum
  unsure (1)..(200): unsure at all Xaa locations
  Clone ID: GOSHI-09MAY01-C1958_1.pep
MGASAKWVKSLIGLKKTVKDDKEKMSGKSKKWKLWRSSSGDGIGSSWKGSKGKFKADYEGSDSSPRSEAVSAAMAAGGRAPPKDFRVVRQEWAAIRIQTAFRGFLARRALRALKGIVRIQAFVRGRQVRKQAAVTLRCMQALVRVQARVRARRVRMSXEGQAVQKILDEHRSKAELLKQAVEGWRDSKGTLVDVKNKLQL

SEQ ID NO: 78174 - protein, 140 aa, Gossypium hirsutum
  Clone ID: GOSHI-09MAY01-C1908_1.pep
TSLFTSPKSLYPDLLFFRQTNARFVDLFLVYLPLNQWDNDKFCNHYRPGQLDTKSYGEQYASKGEGAGLALLPEQTPFYKDLAAVAIQAGVCVDIFAVTNEYTDLASLKFISIESGGSLFLYANTDDSTLSQDMLYYKFL

SEQ ID NO: 78175 - protein, 115 aa, Gossypium hirsutum
  Clone ID: LIB3147-051-Q1-K1-C7.pep
FCNHYGPGQLDTRRYGEQYASKGEDVDCALLPEQTPFYKDLAAVAIQASVCVDIFAVTNEYTDLASLKFLSIESGGSLFLYANTDDSTIPQDMYRMLSRPYAFTCVLRLKTSTEF

SEQ ID NO: 78176 - protein, 105 aa, Gossypium hirsutum
  unsure (1)..(105): unsure at all Xaa locations
  Clone ID: GOSHI-09MAY01-C101893_1.pep
STFLQQVEADTWQSGGWPQKFTDYAVSKLAVNLYSMLMAKQLSERPEGEKIYINCYCPGWVXTAMTSWSGNVSAEHAADTGVWLALLPNEAVTGKLFAERRELKV

SEQ ID NO: 78177 - protein, 198 aa, Gossypium hirsutum
  Clone ID: GOSHI-09MAY01-C1858_1.pep
PSQPALVYPWLVGKRPRSDYVVSGGHELSGYYSRDDDKRTMRATRDSDSIGESYDRYLRSTQLSSYSRSQSGRPMSGGMPGCAVDDPRMVGIGGLDPGQTIKDRTIGFGSGRPEPRLPPDASSTLFVEGLPPDCTRREASHIFRPFVGYKEVRLVTKEPRYAGGDPIKLCFVDFLSPSHAATSMDALQGTISTEVRPL

SEQ ID NO: 78178 - protein, 184 aa, Gossypium hirsutum
  Clone ID: GOSHI-09MAY01-C1818_1.pep
HASAELFGSDFGSCFSPAGQGSPMSPNKNMLRFKTEHSGPNSPYSPSILGHDSGFSSEASTPPKPPRKVPKTPHKVLDAPSLQDDFYLNLVDWSSQNVLAVGLGTCVYLWTASNSKVTKLCDLGPNDSVCAVQWTREGSYISIGTNLGQVQVWDGTQCKKVRTMGGHQTRTGVLAWNFAILSSG

SEQ ID NO: 78179 - protein, 414 aa, Gossypium hirsutum
  unsure (1)..(414): unsure at all Xaa locations
  Clone ID: GOSHI-09MAY01-C1808_2.pep
LKTHDINFSYRPAMEVPRVYTYDFTNIAFAPYGNYWRYLRKLCNTELLTASRVQSFRSIREAEVLNLVKTIHESKGEAVNLSDMIFSMTYGIVARAAFGKKCKDQQTYIDSITELTKLLSGFSLSDFYPSIKPLQLFSGMKTKVEKMHKENDKIIANIIAEHRERRAREKSGQAEAEQEDLVDVLLRIQEENEFPLADKNIKSVIVDVFGAGSETSSTXVEWALSEMIKNPWVMKEAQAEVRRVFGPKGNVDETGLHELKYLKAVIRETFRIRPSGPLLLPRECHQACEINGYXVPEKTRVLINAWALGRDPNYGNEPDKFNPERFLNGSVDYTGTDYEFIPFGAGRRMCPGITCATPNLELPVAHLVFHSDWKLPNGMKGEDLDMSEVFGMTVKRKTELVLIPTPYHGSKIVH

SEQ ID NO: 78180 - protein, 227 aa, Gossypium hirsutum
  unsure (1)..(227): unsure at all Xaa locations
  Clone ID: GOSHI-09MAY01-C1808_1.pep
MELQLPSFQVLLSILLVSFFIFRSLKKSKPKNPDLKPIPGPRKYPVIGNLHQIASPSPHKTLRDLALKHGPLMHLQLGEISTVIVSSPEVAKEVTKTHDINFSYRPAMEVPRVYTYDFTNIAFAPYGNYWRYLRKLCNTDLLTASRVQSFRXRRPKVLILGKPILRTXGEAGNLIDMNFSMTYGIYSKEGLWKKCQEQQTYIDSINELTKMLSGVRLSEIYTSIIPV

SEQ ID NO: 78181 - protein, 54 aa, Gossypium hirsutum
  Clone ID: uC-gsronu33B103b03b1.pep
VCHYLSRGKLTWFLFQLHIMDLKLFIRTTKIIWLVSSQYHINSTCSCHVFGKTQ

SEQ ID NO: 78182 - protein, 77 aa, Gossypium hirsutum
  Clone ID: GOSHI-09MAY01-C1838_2.pep
FLHFNAGIEYIISDRLFEALPQEEQKLWHSHAYEIKSGLWVNPRIPETIGKPELENLAKTYGKFWCTWQVDRGIYTS

SEQ ID NO: 78183 - protein, 246 aa, Gossypium hirsutum
  Clone ID: GOSHI-09MAY01-C1838_1.pep
MSSSDKFPAPTPAKGAEATPPGQPMSMGQHVVDKGASMLQALTPVKQISQHVCTFALYSHDMHRQIETHHYVSRLNQDFLQCPVYDSDDSNARLIGIEYIISDSFFEALPQEEQKLWHSHAYEIKSGLWVNPRTPEMIGKPELENLAKTYGKFWCTWQVDRGDRLPLGAPALMMSPQGVNLGKIEPELVKKRDDKYSISTEAIMQSRVEIEEPEWINPQADYWKQHAKGFAIDIEKTEMKLRAPIP

SEQ ID NO: 78184 - protein, 58 aa, Gossypium hirsutum
  Clone ID: LIB3582-037-P1-K1-C3.pep
VKKRDDKSSISTEAIMQSRVEIEDPEWINLQADYWNQHAKGFAIDIEKTEMKLRPPIL

SEQ ID NO: 78185 - protein, 200 aa, Gossypium hirsutum
  Clone ID: GOSHI-09MAY01-C1588_1.pep
MRRDSHAIWLFAFLFALFSILISLYTLPPPSQATISMKFETSFLKKVVSQSGEFISLLTRMVSGHHHHRRHRRRHHHHHHRRGREHKCDHIKWRSSLSTSNLIYQYKVSLVLTVDLEGCGNFSNAQKAIDAVPDSSPSKTLIIIYSGTYREKVVVHASKSNLIIQGEGFLNTVIEWNDTANSTGGTVYSSSVAIFASNFT

SEQ ID NO: 78186 - protein, 153 aa, Gossypium hirsutum
  Clone ID: GOSHI-09MAY01-C1518_11.pep
ANTKVADQLTDDHISEFKAAFSLFYKAGDGCITTKVLGTVMRSLWLNPTEAELQDMINEGDADGNGTIDFAEFLNLMAGKMKDTDSEEELKEASKVLDKDQSGFIYAPELPHVMPNLGEKLTNKEVPKITPKPNFYGYGQINSEEFVKVMMAK

SEQ ID NO: 78187 - protein, 150 aa, Gossypium hirsutum
  unsure (1)..(150): unsure at all Xaa locations
  Clone ID: GOSHI-09MAY01-C1518_10.pep
AKEGGDQLTDDQISEFKEAFSLFFFFFXWCILLLGGGGYHTSNPTEAEKKDMINEVDADGNGTIDFPEFLNLLARKMKDTDSEEELKEAFTAFVFVQYGFISAAELRPVLTNLGARLTDEEVDEMIREADVDGDGQINYEEFVKVNDGQV

SEQ ID NO: 78188 - protein, 96 aa, Gossypium hirsutum
  unsure (1)..(96): unsure at all Xaa locations
  Clone ID: GOSHI-09MAY01-C1518_9.pep
VFSSAHASAHASAEFLNLMARKMKDTDSEEELKEAFRVFDKDQNGFISAAELRHVMTNLGEKLTDEEVDEMIREAXDVDGDGQINYEEFVKVMMAK

SEQ ID NO: 78189 - protein, 129 aa, Gossypium hirsutum
  Clone ID: GOSHI-09MAY01-C1518_8.pep
IHRCFPLAHRKPVYHPLHFLFGCLSLSELSFNVKSYCYVAQIFSFFLEVSMSGAHILTHMCTWVCGYDLLLIPSWPNVVSGVGCLPISQYSFVAFILILAAGCITTKELGTVMRSLGQNPTEAELQDMI

SEQ ID NO: 78190 - protein, 96 aa, Gossypium hirsutum
  Clone ID: GOSHI-09MAY01-C1518_7.pep
MEVDADGNGTIDVPEFLNLMARKMKDTDSEEELKEAFRVFDKDQNGFISAAELRHVMTNLGEKLTDEEVDEMIREADVDGDGQINYDEFVKVMMAK

SEQ ID NO: 78191 - protein, 149 aa, Gossypium hirsutum
  Clone ID: GOSHI-09MAY01-C1518_6.pep
MADQLTDDQISEFKEAFSLFDKDGDGCITTKELGTVMRSLGQNPTEAELQGRTYGAVAGGTGTIDFPEFLNLMARKMKDTDSEEELKEAFRVFDKDQNGFISAAELRHVMTYLGEKLTDEEVDEMIREADVDGDGQINYEEFVKVMMAK

SEQ ID NO: 78192 - protein, 185 aa, Gossypium hirsutum
  unsure (1)..(185): unsure at all Xaa locations
  Clone ID: GOSHI-09MAY01-C1518_5.pep
MADQLTDDQISEFKEAFSLFDKDGDGCITTKELGTVMRSLGQNPTEAELQDMINEVDADGNGSIDFPEFLNLMARKMKDTDSEEELKEAFRVFDKDQNGFISAAELRHVMTNLGEKLTDEEVDEMIREAXDVDGDGQINYEEFVKVMMAKWRELHSHKPSSPKLEKKKRKAKRRKRDRVRDCVFL

SEQ ID NO: 78193 - protein, 149 aa, Gossypium hirsutum
  Clone ID: GOSHI-09MAY01-C1518_4.pep
MADQLTDDQISEFKEAFSLFDKDGDGCITTKELGTVMRSLGQNPTEAELQDMINEVDADGNGTIDFPEFLNLMARKMKDTDSEEELKEAFRVFDKDQNGFISAAELRHVMTNLGEKLTDEEVDEMIREADVDGDGQINYDEFVKVMMAK

SEQ ID NO: 78194 - protein, 149 aa, Gossypium hirsutum
  Clone ID: GOSHI-09MAY01-C1518_3.pep
MADQLTDDQISEFKEAFSLFDKDGDGCITTKELGTVMRSLGQNPTEAELQDMINEVDADGNGTIDFPEFLNLMARKMKDTDSEEELKEAFRVFDKDQNGFISAAELRHVMTNLGEKLTDEEVDEMIREADVDGDGQINYEEFVKVMMAK

SEQ ID NO: 78195 - protein, 149 aa, Gossypium hirsutum; identical to SEQ ID NO: 78194
  Clone ID: GOSHI-09MAY01-C1518_2.pep

SEQ ID NO: 78196 - protein, 149 aa, Gossypium hirsutum; identical to SEQ ID NO: 78194
  Clone ID: GOSHI-09MAY01-C1518_1.pep

SEQ ID NO: 78197 - protein, 103 aa, Gossypium hirsutum
  unsure (1)..(103): unsure at all Xaa locations
  Clone ID: LIB3083-116-Q1-L1-D8.pep
PVRQGWRWLHYYHGVGNCYSITFSYSYLFIIFLFYYFFFFLLNNFFFLYFFFFXFFYDYFFFFLLIFFFFFLIYFIIFYFFILLIXIFFFFLYFIFFFIIFFF

SEQ ID NO: 78198 - protein, 84 aa, Gossypium hirsutum
  Clone ID: uC-gsronu33B139f05b1.pep
MADQLTDEQISEFKEAFSLFDKDGYGCITTKELGTVMRSLGQNPTEAELQDMINEVDADGNGTIYLPELFNLMDRKMKDTGSDK

SEQ ID NO: 78199 - protein, 117 aa, Gossypium hirsutum
  Clone ID: LIB3147-028-Q1-K1-D10.pep
MADQLTDEQISEFKEAFSLFDKDGDGCITTKELGTVMRSLGQNPTEAELQDMINEVDADGNGTIDFPEFLNLMARKMKDTDSEEELKEAFKVFDKDQNGFISAAELRHVMTNFGEKP

SEQ ID NO: 78200 - protein, 72 aa, Gossypium hirsutum
  unsure (1)..(72): unsure at all Xaa locations
  Clone ID: LIB3146-036-P1-K1-G8.pep
MVDQLTDDQMYAVKEAFSLFDTDGDGCITTKELGTVIXILAENPILGILKVLRIDVHANGNGDIINTESLIL

SEQ ID NO: 78201 - protein, 58 aa, Gossypium hirsutum
  Clone ID: LIB3148-039-Q1-K1-B3.pep
RESIFVLCKIVYFTFFFQFRLRLFFLFYTNWLFNKVADIYIIALIVKCKVLNGINIFV

SEQ ID NO: 78202 - protein, 42 aa, Gossypium hirsutum
  Clone ID: LIB3148-045-Q1-K1-D4.pep
FKIGVYKKRKKGTGRMSLLRYLLMNRTSMFLCYKLLQDGFFI

SEQ ID NO: 78203 - protein, 169 aa, Gossypium hirsutum
  Clone ID: GOSHI-09MAY01-C1508_1.pep
MAKKNTERKVNVSGKPKHSLDVNRSDGKNNSRTAATVRRLKMYNTRPKRNAKGKILSHEFQSKDLPNTRIQPDRRWFGNTRVVNQKELEFFREELQSRMSSNYNVILKEKKLPLSLLKDHAKQARAHLLDTEPFENAFGPKTKRKRPKLLAVDYESLLKKADGSQDAFE

SEQ ID NO: 78204 - protein, 102 aa, Gossypium hirsutum
  Clone ID: GOSHI-09MAY01-C101503_1.pep
FSYVFCIITRPSKKTNENSWPFIAIFTSVSSPLVAGMANVVRSARMWGGQYASQGVVCGACVGGCWWLRRKANRTLELAISENDLGHWACVIKYWAIAKFWA

SEQ ID NO: 78205 - protein, 358 aa, Gossypium hirsutum
  unsure (1)..(358): unsure at all Xaa locations
  Clone ID: GOSHI-09MAY01-C1488_1.pep
MSCSSSSGSEEDDEGIDSYRKGGYHAVRIGDPFAAGRYIAQRKLGWGQFSTVWLAYDTQSSKYVALKIQKSAQQFAQAALHEIDVLSSIADGDPSNSKCVVRLIDHFKHSGPNGQHLCMVLEFLGDSLLQLIRFNRYKGLELNKVREICKCILIALDYLHREVGIIHTDLKPENILLFSTIDPAKDPVRSRLTPILERPEGGTXNGGSTMNIIEKKLKRRARRAVANIGVRRDSMGVEAPKPARCLDGIDMRCKVVDFGNACWADKRFAEEIQTRQYRAPEVILLSGYTFSVDMWSFACIAFELATGDMMFAPKTGQGFSEDEDHLALMMELLGKMPRKIAVGGARSKDFFDRHGDLK

SEQ ID NO: 78206 - protein, 90 aa, Gossypium hirsutum
  Clone ID: GOSHI-09MAY01-C1458_6.pep
MSYYNQQQPPVGVPPPQGYPPEGYPPKDAYPPPGYPPQGYPQGYPQQGYPPQGYPPQYAQPPPPQQKQSSGFVEGCLAALCCCCLLDACF

SEQ ID NO: 78207 - protein, 88 aa, Gossypium hirsutum
  Clone ID: GOSHI-09MAY01-C1458_5.pep
MSYYNQQQPPVGVPPPQGYPPEGYPKDAYPPPGYPPQGYPQGYPPQGYPPPYAPQYPAQPPPQQQQSTGFLEGCLAALCCCCLLDACF

SEQ ID NO: 78208 - protein, 102 aa, Gossypium hirsutum
  Clone ID: GOSHI-09MAY01-C1458_4.pep
PLSRMLYKAPSDGKWGEHELDYLLFIVRDVNVHPNPDEVAEAKYVNRDQLKELLRKADAGEDGLKLSPWFRLVVDNFLFKWWDHVEKGTLKEVSDMETIHKL

SEQ ID NO: 78209 - protein, 356 aa, Gossypium hirsutum
  Clone ID: GOSHI-09MAY01-C1458_3.pep
MSLLTDLVNLNLSDCTDKIIAEYIWIGGSGMDLRSKARTLSGPVSDPSKLPKWNYDGSSTGQAPGEDSEVILYPQAIFKDPFRRGNNILVMCDAYTPAGEPIPTNKRCNAAKIFSHPDVAAEEPWYGIEQEYTLLQKDVKWPIGWPLGGYPGPQGPYYCGVGVDKAYGRDIVDSHYKACLYAGINISGINGEVMPGQWEFQVGPAVGISAGDELWVARYILERITEIAGVVLSFDPKPIQGDWNGAGAHTNYSTKSMRSDGGYEVIKKAIAKLGLRHKEHIAAYGEGNERRLTGRHETADINTFLWGVANRGASIRVGRDTEKAGKGYFEDRRPASNMDPYVVTSMIAETTILWKP

SEQ ID NO: 78210 - protein, 301 aa, Gossypium hirsutum
  Clone ID: GOSHI-09MAY01-C1458_1.pep
MLMLLNTPYALSLSRSLASSSFPSPPTRRLLSLSSTFALPPPRFPHSSLVSSRVSPSFRTQASAATATMGDAPDVGMDAVQRRLMFEDECILVDESDNVVGHESKYNCHLWEKILTGKMLHRAFSVFLFNTKYELLLQQRSATKVTFPRVWTNTCCSHPLYRESELISENHLGVRNAAQRKLLDELGIPPEDVPVDQFVPLSRMLYKAPSDGKWGEHELDYLLFIVRDVNVHPNPDEVAEAKYVNRDQLKELLRKADAGEDGLKLSPWFRLVVDNFLFKWWDHVEKGTLKEVSDMETIHKL

SEQ ID NO: 78211 - protein, 160 aa, Gossypium hirsutum
  unsure (1)..(160): unsure at all Xaa locations
  Clone ID: AI054551.1.pep
MLMLLNTPYALSLSRSLASSSFPSPPTRRLLSISSTFALPPPRFPHSSLVSSRVSPSFRTQASAATATMGDAPDVGMDAVQRRLMFEDECILLDESDNVVGHESKYNCHLWEKILTGKMLHRAFSVFLFNTKFELLPQQRSATKXTFLVXDNTCCTILIS

SEQ ID NO: 78212 - protein, 112 aa, Gossypium hirsutum
  Clone ID: uC-gsflnu33B128h09b1.pep
MSYYNQQQPPVGVPPTQGYPPEGYPKDAYPPPGYPPQGYPQGYPPQGYPPPYAPQYPAQPPPQQQQSTGCLLLRIQLCQMPQMLKNQMFLLSRLLNFFCLWSLKNKIDPCLE

SEQ ID NO: 78213 - protein, 60 aa, Gossypium hirsutum
  Clone ID: LIB3166-013-P1-K1-F1.pep
LVLQLCIDFLAHQLALWILHDPVHYAVDYLLFIVRDVNVHPNSDEVAEAKYVNRDQLKEY

SEQ ID NO: 78214 - protein, 116 aa, Gossypium hirsutum
  Clone ID: uC-gsronu33B130d11b1.pep
IQLPFSNFNFKCSSFSSSLFFFIIIEPFIGFELLMTYTVILGSFFFVLYIYGFLLFLKEEANTKKSQKRVFRRQEASIEHGSIRCHIHDCKNHHPVETMKGSPCGGCCYHGERKER

SEQ ID NO: 78215 - protein, 47 aa, Gossypium hirsutum
  Clone ID: LIB3146-003-P1-K1-H10.pep
FLVFICIYICSKVSHLDSDWYLLLCLVNEYLNYLFKKKYLKILDFMK

SEQ ID NO: 78216 - protein, 100 aa, Gossypium hirsutum
  Clone ID: uC-gsflnu33B075b03b1.pep
STRPGGYEFIKKAIEKLGARHTQHITAYGEGNERRLTGRHETADINTFIWGVANRGASIRVGRDTEKAGKGYFEDRRPASNMDPYVITSMIAETTILWKP

SEQ ID NO: 78217 - protein, 144 aa, Gossypium hirsutum
  Clone ID: uC-gsronu33B038d03b1.pep
MSLLTDHVNLNLSDCTDKIIAEYIWVGGSGIDLRSKARTLSGPVSDPSKLPKWNYDGSSTGQASGEDSEVILYPQAIFKDPFRRGNNILVMCDAYTPAGDPIPTNKRRAAAKIFSHPDVVAEEPWYGIEQEYTLLQKDVKWPIG

SEQ ID NO: 78218 - protein, 80 aa, Gossypium hirsutum
  Clone ID: uC-gsronu33B117b08b1.pep
HKINRNCKKAVETTLSTSNPSKGNHDLITKCNEMSVSHWRGQNKHFGSFLSFYHGNSIPNMGFPSWFPQDGGFGRVGGRM

SEQ ID NO: 78219 - protein, 249 aa, Gossypium hirsutum
  Clone ID: GOSHI-09MAY01-C1478_1.pep
MLNFARGRSQTRSTRSMPFAGMEYHDPKRKSNFVGKILMAAALTAVCIIMLKQSPTFGTPSQFSRHEEGVTHVLVTGGAGYIGSHAALRLLKESYRVTIVDNLSRGNIGAVKVLQELFPEPGRLQFIYADLGDAKAVNKIFSENAFDAVIHFAAVAYVGESTLDPLKYYHNITSNTLVVLEAMAAHGVNTLIYSSTCATYGEPEKMPITEETPQVPINPYGQAKKMAEDIILDYSKNSDMAVMILRYFN

SEQ ID NO: 78220 - protein, 105 aa, Gossypium hirsutum
  unsure (1)..(105): unsure at all Xaa locations
  Clone ID: LIB3585-040-P1-K1-F2.pep
MLNFARGRSQTRSTRSMPFAGMEYHDPKRKSNFVGKILMAAALTAVCIIMLKQSPTFGTPSQFSRHEEGVTHVLVTGGAGYIGSHAAXRXLKESYRVTIVDNLSR

SEQ ID NO: 78221 - protein, 104 aa, Gossypium hirsutum
  unsure (1)..(104): unsure at all Xaa locations
  Clone ID: uC-gsflmaxxa096h03b1.pep
MLNFARGRSQPRPTRSMPLSGMEYPDPKRKSNFVGKILMAATLTALCIIMLKQSPNFNTLSRXSEHEEGVTHVLVTGGAGYIGSHAAXRLLKESYRVTIVDNLS

SEQ ID NO: 78222 - protein, 128 aa, Gossypium hirsutum
  Clone ID: GOSHI-09MAY01-C1408_1.pep
FENSHCYFWGFSRLKSGGGPKESCWRTGAASPVWCLQALVRKKGSGLTCTMGSAHGNSPNPMVVRKPSCRSYLLMIPRVTIIILMLLLHKTQVTFSCQVLMTNPVTIVSDLILPRIQTLLLSTTAPLV

SEQ ID NO: 78223 - protein, 216 aa, Gossypium hirsutum
  Clone ID: GOSHI-09MAY01-C1428_1.pep
MAAYRADDDYDYLFKLVLIGDSGVGKSNLLSRFTKNEFNLESKSTIGVEFATRSIRVDDKVVKAQIWDTAGQERYRAITSAYYRGAVGALLVYDVTRHITFENVERWLKELRDHTDSNIVIMLVGNKADLRHLRAVSTEEAKAFAEREKTYFMETSALESLNVENAFTEVLTRIYHVVSRKALEVGDDPAALPKGQTINVGKDDVSALKKIGCCSA

SEQ ID NO: 78224 - protein, 133 aa, Gossypium hirsutum
  unsure (1)..(133): unsure at all Xaa locations
  Clone ID: GOSHI-09MAY01-C1788_1.pep
MEKGCSKNGETCPQLLDLIPQEREWQYPKRKEERSHVASEEKKLELRLGPPGDEEDNWSIKATGKNDNRDRDEPLISLGYLSSMKKTVPPNTSQKRTAPWPVVGWPPIRSFRXNIANSSSSKLASESSPSVLP

SEQ ID NO: 78225 - protein, 223 aa, Gossypium hirsutum
  Clone ID: GOSHI-09MAY01-C1778_1.pep
PRVRPRVRERGGFHGYRKLPDNTCGLKVAEMNMRMGEANHTNSHSNSDDNECTVREQDRFMPIANVIRIMRKILPPHAKISDDAKETIQECVSEYISFITGEANEHCQREQRKTITAEDVLWAMSKLGFDDYIEPLTVYLHRYRELEGERGSIRGEPVVKRVVDYGTLGVAAFAPAFHMGHHHHHGHGFFGSGAMGGYLKDESSAGSSQAAVANGEPYAQQHK

SEQ ID NO: 78226 - protein, 90 aa, Gossypium hirsutum
  Clone ID: GOSHI-09MAY01-C1718_1.pep
MAEESDFADKVPPSFYEMGNKIIYETEAKGLNPGLIVLLVVLGLLLIFLVGNYVLYSYAQKTLPPRKKKPVSKKKMKRERLKQGVSAPGE

SEQ ID NO: 78227 - protein, 60 aa, Gossypium hirsutum
  Clone ID: LIB3583-010-P1-K1-C12.pep
IKTKHIIRVNTTRSKLDTEQEVANSLTWGAEEIRPRSPTLLVLRLLASASLFSSSSWILA

SEQ ID NO: 78228 - protein, 90 aa, Gossypium hirsutum
  Clone ID: GOSHI-09MAY01-C101703_1.pep
IPFCCQSNWTEEKKQAAADVLFQYSKFAMACIGNQVRPCDMRLHLMKEISGLPTSLKRVSSQAAASPDSMGESSSSGTARLDKKADKVDK

SEQ ID NO: 78229 - protein, 204 aa, Gossypium hirsutum
  Clone ID: GOSHI-09MAY01-C101713_1.pep
GAWADAWDEIDVTDDIGMADAILASASEIKQNPWIRGVAKFHKLPMFVIKSNTMAQMVKAVRMILERESYASRSRLLDRDSSDIEIEDDAPKRKPTLEEIDALEEVRLAIEYIVIPGGEPVELLPRRSEIIARQLELVKSYQLDAENSGTELNPRLQILPHRLNKKVSSKSLKATSNLRNETGSKPLTDSCGGTSVTRLPFLPE

SEQ ID NO: 78230 - protein, 141 aa, Gossypium hirsutum
  Clone ID: GOSHI-09MAY01-C1728_8.pep
LYTADIPDYRRVHACVQSSVLKISCFTVASTAMALSSPSFAGKAVKFSPSTPEIRGTGRVSMRKTTKPVPSGSPWYGPDRAGDYGWDTAGLSADPETFARNRELEVIHCRWAMLGALGCVFPELLARNGVKFGEAVWFKAG

SEQ ID NO: 78231 - protein, 122 aa, Gossypium hirsutum
  unsure (1)..(122): unsure at all Xaa locations
  Clone ID: GOSHI-09MAY01-C1728_3.pep
MASTTMALSSPSFAGKAVKFSPSTPEIRGTGRVSMRKTTKPVPSGSPWYGPDRVLYLGPLSGEPPSYLTGEFPGDYGWDTAGLXQIFSEGGLDYLGNPSLIHAQSILAIWACQVILMGAVEG

SEQ ID NO: 78232 - protein, 166 aa, Gossypium hirsutum
  Clone ID: GOSHI-09MAY01-C1728_2.pep
MASTTMALSSPSFAGKAVKFSPSIPGDYGWDTAGLSADPETFARNRELEVIHCRWAMLGALGCVFPELLARNGGKFGEAVWFKAGSQIFTEGGLDYLGYPSLIHAQSILAIWARQVILMGAVVGYRIACGPLTLFSDQIFSFCIFYPLGAWFFTLFTFFSFSTIIF

SEQ ID NO: 78233 - protein, 264 aa, Gossypium hirsutum
  Clone ID: GOSHI-09MAY01-C1728_1.pep
MASTTMALSSPSFAGKAVKFSPSTPEIRGTGRVSMRKTTKPVPSGSPWYGPDRVLYLGPLSGEPPSYLTGEFPGDYGWDTAGLSADPETFARNRELEVIHCRWAMLGALGCVFPELLARNGVKFGEAVWFKAGSQIFSEGGLDYLGNPSLIHAQSILAIWACQVILMGAVEGYRIAGGPLGEVTDPLYPGGSFDPLGLADDPEAFAELKVKEIKNGRLAMFSMFGFFVQAIVTGKGPLENLADHLADPVNNNAWAYATNFVPGK

SEQ ID NO: 78234 - protein, 129 aa, Gossypium hirsutum
  Clone ID: LIB3120-015-Q1-K1-H12.pep
MTSTEKTYTTNSHHPRSSFPFRMAAATMALSSPSFAGKAVKLSPSAPKIQGNGRVSMRKTATKAAPSGSPWYGPDRVLYLGPLSGEPPSYLTGEFPGDYGWDTAGLSADPETFARNRELEVIHCRWAML

SEQ ID NO: 78235 - protein, 55 aa, Gossypium hirsutum
  Clone ID: LIB3148-059-Q1-K1-E11.pep
PRVRKNGRLAMFSMFGFFVQAIVTGKGPLENLADHLADPVNNNAWAYATNFVPGK

SEQ ID NO: 78236 - protein, 84 aa, Gossypium hirsutum
  Clone ID: LIB3166-016-P1-K1-D4.pep
MAAATMALSSPSFAGKAVKLSPSAPKIQGNGRVSMRKTATKAAPSGSPWYGPDRVLYLGPLSGEPPSYLTGEFPGDYGWDTAGL

SEQ ID NO: 78237 - protein, 115 aa, Gossypium hirsutum
  Clone ID: LIB3146-011-Q1-K1-H3.pep
FPDPLADPLAGPVGKTVTKAAPSGSPWYGPDRVLYLGPLSGEPPSYLTGEFPGDYGWDTAGLSADPETFARNRELEVIHCRWAMLGALGCVFPELLARNGVKFGEAVWFKAGSQI

SEQ ID NO: 78238 - protein, 67 aa, Gossypium hirsutum
  Clone ID: LIB3120-039-P1-K1-A4.pep
GVYGYWINPILIHAQSILVIWACQVILMGAVEGYRIAGGPLGEVTDPLYPGGSFYPLGLADDPQAFA

SEQ ID NO: 78239 - protein, 64 aa, Gossypium hirsutum
  Clone ID: LIB3582-036-P1-K1-G10.pep
RFNCQIQNLPFVSYKDPFISMFITIYRECTEYKFIVCNVLIHCFFTIISISLSFFSYHDSTLVF

SEQ ID NO: 78240 - protein, 64 aa, Gossypium hirsutum
  Clone ID: LIB3582-044-P1-K1-C11.pep
TNVCTKTLTYVAFYHWNHVALEFFHIHMPPKLYIMILRFNCQIQNLPFVSYKEPFISMLITIYR

SEQ ID NO: 78241 - protein, 202 aa, Gossypium hirsutum
  Clone ID: GOSHI-09MAY01-C1648_2.pep
SNITGDGGGSFSSETHHQEQQVGNFHGGSNSLLSTNSNGGSTAPPPAKKKRNLPGTPDPNAEVIALSPKTLLATNRFVCEICNKGFQRDQNLQLHRRGHNLPWKLKQRTSTEIRKRVYVCPEPSCVHHNPARALGDLTGIKKQFCRKHGVKKWKCDKCYEKYAVQSDWKAHSNTCGTKEYKCDCGTIFSRFYIYSTISFMHY

SEQ ID NO: 78242 - protein, 195 aa, Gossypium hirsutum
  Clone ID: GOSHI-09MAY01-C1648_1.pep
GTPDPNAEVIALSPNPRVPPRRRPRVRCNKGFQRDQNLQLHRRGHNLPWKLKQRTSTEIRKRVYVCPEPSCVHHNPARALGDLTGIKKHFCRKHGEKKWKCDKCSKKYAVQSDWKAHSKTCGTKEYKCDCGTIFSRRDSFITHRAFCDALTEENNKASRGLINVGSNLQGQVVAADQLISAIPVNNNPNTSAINI

SEQ ID NO: 78243 - protein, 250 aa, Gossypium hirsutum
  Clone ID: GOSHI-09MAY01-C1668_6.pep
CPRCGEEAETMNHLFRDWALEQLNPNQSRLFCCALWAIWGDRARNRNIHEGKVSKGIEVATFVSNYIIELTGLEQRSSEIMKGNKRWTHPQWESIKINFDGAYNQIQNRSASSVVARDSEGKILLSCSEIHDGVPSAFAAEAIACRKAVQVGVDKGWQSLIFEGDSLAIIKKCSTKGQDRSMVGAYIYDIQQKIHGLNNIRFQHTPRSANNLAHILATETLRRREEIYLEMGVPEYAEDQTRYDGVSEPD

SEQ ID NO: 78244 - protein, 129 aa, Gossypium hirsutum
  Clone ID: GOSHI-09MAY01-C1668_5.pep
NNESSFWCLSCWVLEKLNLYHSRLLCCALGGKIRWKRPQGGFIKINFGGAFNKSQNRSASGVVVRDSEGKILLSCTEIHENILSAFAAEAIASRKAVQIGAGKGWQFLDMGGAAHAEEQGRYEMRKEPD

SEQ ID NO: 78245 - protein, 163 aa, Gossypium hirsutum
  unsure (1)..(163): unsure at all Xaa locations
  Clone ID: GOSHI-09MAY01-C1668_4.pep
LPVPFREEDATKILRIPLAQTHREDFLIWGGERAGEFTGRSAYQLLQILTKXLRTYALQTIYRNFYKKLWSLNLLTKIKVTIWKLSWNYLPTKVNLQHRKLAVNPSYPRCGEGAETMNHLFRECRVTMEVWRALSFQNILMNQCEDFLQWITWVVEELSLYQS

SEQ ID NO: 78246 - protein, 151 aa, Gossypium hirsutum
  unsure (1)..(151): unsure at all Xaa locations
  Clone ID: GOSHI-09MAY01-C1668_3.pep
MVSKTVYTFTEADAERILRIPLARSPHEDFLIWGGENSGEFTVRSAYQLLQRSTDNPRAYAVXNLYRKFYKTLWSLNIPTKIKITIWRLSWNYLPTKVNLQHRKLTVNQSCPRCGEEVETMNHLFRDCPTGCWRSLTFITVDSSIVHSGEK

SEQ ID NO: 78247 - protein, 133 aa, Gossypium hirsutum
  Clone ID: GOSHI-09MAY01-C1668_2.pep
QSIQAVPDVEKELGSRGAQPLSKLNILLCTLGGENQRWSYPQESFININFDGAYDKSQNRSASGIVARDSERNILFSCSEIHSNISSAFAAEAITCWRAVQIGTGKGWQFLILEGDSLAIIKNAIQRVKTDRW

SEQ ID NO: 78248 - protein, 129 aa, Gossypium hirsutum
  Clone ID: GOSHI-09MAY01-C1668_1.pep
LYRNCTFTEEDAARILRIPLAQTPHEDFLFWGGEMSGEFTVRSAYKLLQRSTDNPRAYALQNLYRKFYKTLWSLNIPTKIKITIWRLSWNYLPTKVNLQHRKLAVNTRCPRCGEGAETMNHLFRDCAGR

SEQ ID NO: 78249 - protein, 139 aa, Gossypium hirsutum
  Clone ID: LIB3583-030-Q6-K1-D12.pep
QSIQAVPDVEKELGSRGAQPLSKLNILLCTLGGENQRWSYPQESFININFDGAYDKSQNRSASGIVARDSERNILFSCSEIHSNISSAFAAEAITCWRAVQIGTGKGWQFLILEGDSLDRGVPEYAMDQARYDRRRGPD

SEQ ID NO: 78250 - protein, 71 aa, Gossypium hirsutum
  Clone ID: LIB3146-018-Q1-K1-D8.pep
LYRNCSFTEGDAARILRIPVAQTPHEDFLFWEGYMSGEFTVISAHKLLQRSIDNPRAYALQPINRNFYKKL

SEQ ID NO: 78251 - protein, 79 aa, Gossypium hirsutum
  Clone ID: LIB3148-029-Q1-K1-D1.pep
EESKMVLGWHQLLQIFSEDDATKILRIPLAQTPHEDFLIWGGERSGEFTVRSAYQLLQILTKSLRTYALQTIYRNFYKK

SEQ ID NO: 78252 - protein, 108 aa, Gossypium hirsutum
  Clone ID: LIB3196-017-P1-M1-D2.pep
IACRKAVQIGTGKGWQFLIFEGDSLAVIKKCNIKGQDRSMIGTYIYDIQQQIYGLDKIRFQHAPRSANSLAHILATETLRRGEEIYLDMGVPEYAEEQGRYEMRKEPD

SEQ ID NO: 78253 - protein, 83 aa, Gossypium hirsutum
  Clone ID: GOSHI-09MAY01-C101623_1.pep
YKAMFEFCRFGECIGVCLCVFPLLLDVRSAILNHQKPTSLSCVYIYSPSNFFSSFFDLFGFITPFLSPLSSLYIYIYCPQVSF

SEQ ID NO: 78254 - protein, 258 aa, Gossypium hirsutum
  Clone ID: GOSHI-09MAY01-C1638_1.pep
MDFSKERERFVYIAKLAEQAERFDDMVTSMKKLAELDVELTVEERNLLSVGYKNVIGARRASWRILSSIEQKEESKGNEQNVKKIKTSRQKVESELSNICKDIMGVINEHLIPSCSGGESTGFYYKMKGDYYRYLAEFKMGDERKEAADQSMKAYQSATTTAEAELPPTHPIRLGLALNFSVFYYVILDSPGRACHLAKQAFDEAISELDTLSEESYKDSTLIMQLLRDNLTLWTSDIPEDGEEAAKLGAAKVGEGDE

SEQ ID NO: 78255 - protein, 129 aa, Gossypium hirsutum
  unsure (1)..(129): unsure at all Xaa locations
  Clone ID: LIB3829-021-Q6-K6-B3.pep
LPFFFIDTCCITGGGERNLLSVEYKNVIGAQTTSCRILSXIDQNEESKCNEQNVKKIKTSTHKVXSELSNICKDIMGVINDHLIPSCSVGDSTGFYYKMKRDYYWYLAEFYMGDXRKDAADQSMKAYQS

SEQ ID NO: 78256 - protein, 68 aa, Gossypium hirsutum
  unsure (1)..(68): unsure at all Xaa locations
  Clone ID: LIB3148-024-Q1-K1-A3.pep
MAFYVFVCLFLKKKKKKKKKKKKKKKKKKKKKKKKKKKKKKKKKKNPKKKKKNKKKKKKNKKKKKTKX

SEQ ID NO: 78257 - protein, 198 aa, Gossypium hirsutum
  Clone ID: GOSHI-09MAY01-C1188_3.pep
GDCIVVAVILPFGSPLAERRVNLSSIRCPKMGNPRRDEKPTAYAREAREFLRTRLVGKQVSVQMEYSRKVPMADGAPAASADSRVMDFGSVFLLSSIKGDGDEVSAANASAAGSQQPGLNVAELVVGRGFGTVIRHRDFEERSNYYDALLAAESRAISGKKGIHSAKDPPVMHIQDLTMASAKKARDFLPFLNRGRIP

SEQ ID NO: 78258 - protein, 574 aa, Gossypium hirsutum
  Clone ID: GOSHI-09MAY01-C1188_1.pep
EKPSAYAREAREFVRTRLIGEPGVRGRVAVEMEYSRKVPMADGAIAAAAPADSRVMDFGSVFLMSPAKGDGDDAPAALPSTAGSQPPGLNVAELVVGRGFGSVIRHRDFEERSNYYDALLAAELRAISGKKGIHSAKDPPVTHIQDLTMAPAKKARDFLHFLLRGRIPAIVEYVLSGHRFKLLIPKETCSIAFSFSGVRCPGREEPYSDEAIALMRRKIMQRDVVVEVETVDRTGTFLGSLWESKTNVAVTLLEAGLAKLQTSFGSDRIPDAHLLEQAELSAKRKKLKIWENYVEGEEVSNGPATVENKQKELLQVVVTEILGGGKFYVQTVGDQRVSAIQKQLASLTIQEAPVIGAFNPKKGDIVLAQFSMDNSWNRAMIVNAPRGGVQSPTDNFEVFYIDYGNQEEVPYSQLRPLDPSLSASPGLAQLCSLAFLKVPSLDDEFGTEAAQFLSEQTMGSSLQFTAMIEERDVSGGKVKGKGTGTVLIVTLVAEKSDLSINAAMLQEGLARLEKRKRWESKDRKSVIDNLENFQKEAKTGRRGIWQYGDVDSDDDEDLPTLAAAAAKKTGAGRR

SEQ ID NO: 78259 - protein, 128 aa, Gossypium hirsutum
  unsure (1)..(128): unsure at all Xaa locations
  Clone ID: AW187626.1.pep
LEGVDKFSNLIGSVYYPEGETVKDLTLELVENVVEVVXGDCIVVADDSTPYGSPLAEHRVNLLSIKCPKIGNPRKDEKPAAYAREAREFLRTLLIAKXVTVEMEYSMKVPMVDGTDCQCTSKMSSVFK

SEQ ID NO: 78260 - protein, 162 aa, Gossypium hirsutum
  unsure (1)..(162): unsure at all Xaa locations
  Clone ID: LIB3829-016-Q1-K6-D5.pep
IAFSFSGVXSPGRDEPYSDEAIAVMRRKIMQRDVEIEVETVDRTGTFLGSLWESRTNMAVTLVEAGLAKLQTSFGADWIPDAHLLEQAEQSAKRQKLKIWENYVEGEEVSNGSAPVENKQKELLEVVITEVLNGGKFYVQTVGDQRVSSIQKQLASLNIQEA

SEQ ID NO: 78261 - protein, 137 aa, Gossypium hirsutum
  unsure (1)..(137): unsure at all Xaa locations
  Clone ID: LIB3048-037-Q1-L1-A12.pep
DEVSAAGAREAREVLITRLIGKQVTVEMEYSRKVPMAYGAIAAAAPADSRVMDFGSDFLMSPAKGDGDDAPAALPSTAGSQPPGLNVAXLVVGRGFGSVITHKDFEERSNYYDALLAAELRAISGKKGIHSAKDPTV

SEQ ID NO: 78262 - protein, 153 aa, Gossypium hirsutum
  Clone ID: GOSHI-09MAY01-C1158_4.pep
MASQIVGTKKACVVGGSGFVASLLVKLLLEKGYAVNTTVRDPDNQKKISHLVTLQELGDLKIFQADLTDEGSFDAPIAGCDLVFHVATPVNFGFEDPENDMIKPATQGVVNVLKACAKAKTVKRVVLTSSAAAVSINTLNGTDLVMTEKDWTD

SEQ ID NO: 78263 - protein, 227 aa, Gossypium hirsutum
  unsure (1)..(227): unsure at all Xaa locations
  Clone ID: GOSHI-09MAY01-C1158_3.pep
MASQLVGTKRACVVGGRGFVASLLVKLLLEKGYAVNTTVRDPDNQKRISHLVTLQELGDLKIFQADLTDEGSFDAPIAGCDLVFHVATPVNFASEDPENDMIKPATQGVVIVLKACAKAKTVKRVVLTSSAAAVSINTLDGTDLVMTEKDWTDIEFLSSAKPPTWGYPASKTLAEKAAWKFAEEXNIDLITVIPSLMTGPSLTPIVPSSIGLATSLISGNEFLINAL

SEQ ID NO: 78264 - protein, 336 aa, Gossypium hirsutum
  Clone ID: GOSHI-09MAY01-C1158_1.pep
MASQLVGTKRACVVGGSGFVASLLVKLLLEKGYAVNTTVRDPDNQKKISHLVTLQELGDLKIFQADLTDEGSFDAPIAGCDLVFHVATPVNFASEDPENDMIKPATQGVVNVLKACAKAKTVKRVVLTSSAAAVSINTLDGTDLVMTEKDWTDIEFLSSAKPPTWGYPASKTLAEKAAWKFAEENNIDLITVIPSLMTGPSLTPIVPSSIGLATSLISGNEFLINALKGMQMLSGSISITHVEDECRAHVFLAEKESASGRYICSAVNTSVPELAKFLNKRYPDFKVPTDFGDFPSKPKLIISSEKLISEGFSFKYGIEEIYDQTVEYLKSKGLLK

SEQ ID NO: 78265 - protein, 199 aa, Gossypium hirsutum
  unsure (1)..(199): unsure at all Xaa locations
  Clone ID: LIB3543-030-Q1-K6-A12.pep
LLRVTPLAGGGGGPDNQKKISHLVTLQELGDLKIFQADLTDEGSFDAPIAGCDLVFHVGTAXNFASEDPENDMIKPATQGVVNVLKACAKAKTVKRVVLTSSAAAVSINTLDGTDLVMTEKDWTDIEFLSSAKPPTWGYPASKTLAEKAAWKFAEENNIDLITVIPSLMTGPSLTPIVPSSIGLATSLISGNEFLINAL

SEQ ID NO: 78266 - protein, 62 aa, Gossypium hirsutum
  unsure (1)..(62): unsure at all Xaa locations
  Clone ID: LIB3146-022-Q1-K1-C3.pep
RGRPWADAVGRTSWAGRRWGIIGRXGPLLNPKWWITLPSXRSXXLXERDSRVYSIGNRREIY

SEQ ID NO: 78267 - protein, 105 aa, Gossypium hirsutum
  Clone ID: LIB3048-018-Q1-L1-C10.pep
MASQLVGTKRACVVGGSGFVASLLVKLLLEKGYAVNTTVRDPDNQKKISHLVTLQELGDLKIFQADLTDEGSFDAPIAGCDLVFHVATPVNFASEDPENDMIKPA

SEQ ID NO: 78268 - protein, 387 aa, Gossypium hirsutum
  Clone ID: GOSHI-09MAY01-C1178_1.pep
MTTLVTGVFLLLLSVAGVVSAARYITGDVLRLPSEASRFFRWRSDDDEVGGTRWAVLIAGSNGYWNYRHQADVCHAYQLLRNGGLREENIIVFMYDDIAFNVENPRPGVIINNPHGDDVYKGVPKDYTGEDVNVHNFFAALLGNKSAITGGSGKVVDSGPDDHIFLYYTDHGGPGVLGMPTFPYLYADDLIDVLKKKHASGTYKSMVFYLEACESGSIFEGLLPQGLNIYATTASNAEESSWGTYCPGEYPSPPPEYETCLGDLYSVAWMEDSDMHNLRTETLHQQYELVKKRTINGNSAYGSHVMQYGDVGLSKDSLFAYLGTNPANDNFTFVDENSLVPPTKAVNQRDADLVHFWYKYRKAPEGSVRKTEAQKQFVEAMSHRMHI

SEQ ID NO: 78269 - protein, 125 aa, Gossypium hirsutum
  unsure (1)..(125): unsure at all Xaa locations
  Clone ID: LIB3120-016-Q1-K1-A3.pep
RTRPPTRPPTRPPTRPASGNYKSMVFYLEACESGSIFEGLLPQGLNIYATTASNAEESSWGTYCPGEYPSPPPEYETCLGDLYSVAWMEDSDMHNLRTETXAPAYELVKXRTINGHLXYGSHVMH

SEQ ID NO: 78270 - protein, 134 aa, Gossypium hirsutum
  Clone ID: GOSHI-09MAY01-C101153_1.pep
LAHKLIWGGIGCSMGKKDEAGVIEGSGFKPDSRAVVAVQGLSAAMASGVSALITMPLDTIKTRFQVLDGEGNGVRRPMTVLQTIRNLVKEGGLSACYRGLGPRWASMSMSATPMITTYEFLKRLSAKSQDSLSS

SEQ ID NO: 78271 - protein, 161 aa, Gossypium hirsutum
  unsure (1)..(161): unsure at all Xaa locations
  Clone ID: GOSHI-09MAY01-C1168_2.pep
PCVRNPFGNYLMQKLLEVCNEQQRMQILLVATEEPGXQLVRISLNTHGTRVGQKLIETLKTRQQISLGGSALGPGFLSLIKDLDGHHVVQRCLQCLSCEDNKFIFVAAAKYCVDIATHQHGCCVLQRCISHSTGEYRDKLVEEYSXNWALLEQDAYGNFVG

SEQ ID NO: 78272 - protein, 403 aa, Gossypium hirsutum
  unsure (1)..(403): unsure at all Xaa locations
  Clone ID: GOSHI-09MAY01-C1168_1.pep
MLNQGLPLSNGLARPRAHSSVGAFSNEDSFIIQGDGLNYVMINKGLDCSRGLNKAKDIGASKHREGRLQLDSWSQFAPACGNSKNAAKLCTSFSLPPKYNSMAEARGYIYLIVKDQHGCRFLQRLFDEGTREDVEIIFKEIIDHVVELMMNPFGNYLMQKLLEVCNEQQRMQILLVATEEPGXLVRISLNTHGTRVVQKLIETLKTRQQISLVISVLEPGFLSLIKDLNGNHVVQRCLQCLSSEDNKFIFVAAAKYCVDIATHQHGCCVLQRCISHSTGEYREKLVEEISTNGLLLAQDAYGNYVVQFILELKIPSATSTLVSQFQGNYVHLSXQKFSSHVVEKCLAVLNDESRSRIIRELLSATHFERLLQDPHANYVVQTALRVSEGTLHNSLIEAIQSRI

SEQ ID NO: 78273 - protein, 261 aa, Gossypium hirsutum
  unsure (1)..(261): unsure at all Xaa locations
  Clone ID: GOSHI-09MAY01-C1108_1.pep
QELAKFWKQHPALVEAELLIQAQLTRESKALTPALLRDFRRMLELSPRLLEELVKMALLPRTAQGHGWLRPAIGVVELSQNIIQAVPLSARKVAGGSSEGVAPFLQLPHFSEAIVXKIARKKVRTFQELRDMTLEDRVELLTQVAGLSSTETKDVEMVLEMMPSLTVDITCETEGEEGIQEGDVVTMHVWITLKRGSGLVAALPHAPYYPFFKEESFWLLLADPVSNDVWISQKVSFMEEAVAITAASKAIQELKEVSRAS

SEQ ID NO: 78274 - protein, 51 aa, Gossypium hirsutum
  unsure (1)..(51): unsure at all Xaa locations
  Clone ID: LIB3585-019-P1-K1-H12.pep
AFSEYHSXMPINSLGGIFEKKFGAFLVNDFMVPYYVTSIYAFICKISKGKC

SEQ ID NO: 78275 - protein, 51 aa, Gossypium hirsutum
  Clone ID: GOSHI-09MAY01-C101103_1.pep
LVLFLKSIQVAIRAHQWSVKYKRLKIQRRDISMSSSSLRQGGCKFEGRREN

SEQ ID NO: 78276 - protein, 89 aa, Gossypium hirsutum
  Clone ID: GOSHI-09MAY01-C101113_1.pep
ITFGSPFIVGYHHHNDEEKPSMLVNHHNISGKNQSQWHVTDRMSSAAMAQIPSSMAASSSSFSNDDFFPEAHWDELKSVVEFALEPFPM

SEQ ID NO: 78277 - protein, 60 aa, Gossypium hirsutum
  Clone ID: GOSHI-09MAY01-C1128_7.pep
AHSFVHASAHASGSSDSSPGVINMKIAKAVGDWYYERSLIKKLVCPYPCNPTCPKVDSDS

SEQ ID NO: 78278 - protein, 107 aa, Gossypium hirsutum
  Clone ID: GOSHI-09MAY01-C1128_6.pep
AILWGCSAGGLASILHCDRFRALLPASTKVKCISDAGFFLHAQDVSGGKHIEEFYGKVARLHGSVKNLPASCTSRMGARPELVCVAIFCMTNHSPFLINYSCACLLH

SEQ ID NO: 78279 - protein, 323 aa, Gossypium hirsutum
  Clone ID: GOSHI-09MAY01-C1128_2.pep
MLLENSQEELEPQNDNVDAEEVSGTDDIIKKLDLKYPLKEKKEDNNVNVEGNKTPRRNSDAVDRANNLFFKGNSIWEFIIADLLAKGMRNAKNAILSGCSAGGLASILHCDRFRALLPASTKVKCISDAGFFLHAQDGSGGKHIEEFYGKVARLHGSVKNLPASCTSRMGARPELCFFPQYVVQTMQTPIFFVNSAYDSWQIKNILAPSAADKSKAWKSCKLDLKKCTAAQLKTIQDFRTQFLSALNRAGVVNSPSKGMFIDSCYAHCQVGKQIQWSSDSSPVVSNMKIAKAVGDWYYERSPIKKLDCPYPCNPTCPKVDSDS

SEQ ID NO: 78280 - protein, 331 aa, Gossypium hirsutum
  Clone ID: GOSHI-09MAY01-C1128_1.pep
MIIGRLRQWLSLLVCVLAVILLKSEGASVGITYLQDAVAKGAVCLDGSPPAYHFDKGSGAGLDNWIVHMEGGGWCEDVPTCLSRKNTDLGSSKQMVKQFGFSGLLSGQQKSNPDFYNWNRIKVRYCDGSSFTGDAVDRANNLFFKGNSIWEFIIADLLAKGMRNAKNAILSGCSAGGLASILHCDRFRALLPASTKVKCISDAGFFLHAQDVSGGKHIEEFYGKVARLHGSVKNLPASCTSRMGARPELCFFPQYVVQTMQTPIFFVNSAYDSWQIKNILAPSAADKSKEWKSCKLDLKKCTAAAAQNHPRFHDALPGTLSFRCHNLLATQ

SEQ ID NO: 78281 - protein, 78 aa, Gossypium hirsutum
  Clone ID: LIB3166-021-P1-K1-G7.pep
AILSGCSAGGLASILHCDRFRALLPASTKVKCISDAGFFLHAQDVSGGKHIEEFYGKVARLHVLSLSILYLNFIEDFF

SEQ ID NO: 78282 - protein, 61 aa, Gossypium hirsutum
  Clone ID: uC-gsflnu33B013h12b1.pep
IKMPLQSSGNDTRNELSSKINTLLSSDEIKANSFQLKGVARKSVAEGGSSFKNFKGFIDQI

SEQ ID NO: 78283 - protein, 46 aa, Gossypium hirsutum
  Clone ID: LIB3272-010-P1-K1-B1.pep
SQDEDNKRLCFLTTRSFQFFLFRRFTSGAVSSPPILRDRLLNLEEK

SEQ ID NO: 78284 - protein, 184 aa, Gossypium hirsutum
  Clone ID: GOSHI-09MAY01-C1088_1.pep
PRVRITLTMASFKPLLFLFLSSLLLHASLAEIICEDLPKDVCAFSIATSGKRCLLETSVKKDGYECRTSEVVVASLADYIESDECVRACGVDRTSTGFSSDSLLEPQFTAKLCSPACYQYCPNIVDLYFNLAAGEGVLLADLCEAQRTDPRRTLMELLSSGAAPGPVSSESGSLFGVTPASASL

SEQ ID NO: 78285 - protein, 389 aa, Gossypium hirsutum
  Clone ID: GOSHI-09MAY01-C1058_1.pep
GLEIQRQVLGETDPRVGETCRYVAEAHVQALQFDEAERLCQIALDIHRENAAPASIEEAADRRLMGLICDSKGDYESALEHYVLASMAMAANGRELDVASIDCSIGPACLALARPARPVLAYQKALTVFKSAKGENHPTVASVFVRLADLYNKVGKLRDSRTYCENALRIYGKPNPGIPSEEIASGLIDVAAICQSMNELDQALKLLKKALSIFSEAPGKQSTIAGIEAQMGVMYYMMGSYADSYSTFKSAISKFRASGDKKSALFGIALNQMGLACVQRYSINEAADLFEEARSILEKEYGPYHPDTLGVYSNLAGTYDAMGRLGDAIEILDYVVDMREEKLGTANPDVIDEKRRLSELLKEARKVRSRKSRALVTLLDTTTQIINDD

SEQ ID NO: 78286 - protein, 80 aa, Gossypium hirsutum
  Clone ID: GOSHI-09MAY01-C1078_11.pep
MLASEGIKRVELGRDELEKRVWEWKEKFRPRILIDVSKIDMTTTVLGFKISMPIMIAPTTMQKMAHPEDSSLETCGIQEV

SEQ ID NO: 78287 - protein, 80 aa, Gossypium hirsutum
  Clone ID: GOSHI-09MAY01-C1078_4.pep
MLASEGIKGIELGRDEFEKRVWEWKEKFRPRILIDVNKIDMTTTVLGFKISMPIMIAPTAMQKMAHPEDSSLETCGIQEV

SEQ ID NO: 78288 - protein, 274 aa, Gossypium hirsutum
  unsure (1)..(274): unsure at all Xaa locations
  Clone ID: GOSHI-09MAY01-C1078_3.pep
MGKGNKEGTSKQFKWTKPMEHLFLEILAEEASXGNKPSNTLKAISINRVADAISERFQVQCDAKHVENHLRTVKNQWQIICIIRGESGFGWDDNMKMITCDRATYDAAVMAHKKYEPFLNKSIDHYDEMALVVGKDMATGSFARTFADIDLDDGNQDSVPVDCDNEEAEEVRTNVSSSGTSKRKRKSVQESVVDEQIKFVGEQLGKIANALEQFTADKTPHLYEQVMSMEEEGFDDDFLCSVFDYLVSHESEAKAFLVKSKKHKKIWLQKFSQS

SEQ ID NO: 78289 - protein, 370 aa, Gossypium hirsutum
  unsure (1)..(370): unsure at all Xaa locations
  Clone ID: GOSHI-09MAY01-C1078_2.pep
MEITNVSEYQEIAKQKLPKMVYDYYASGAEDQWTLHENRFAFTKILFRPRILIDVSKIDMTTTVLGFKISMPIMIAPTAMQKMAHPEGEYATARAASAAGTIMTLSSWATSSVEEVASTGPGIRFFQLYVYKDRNVVAQLVRRAERAGFKAIALTXVDTPRLGRREADIKNRFTLPPFLTLKNFEGLDLGKMDKADDSGLASYVAGQIDRSLSWKDVKWLQTITTLPILVKGVLTAEDARIAVEAGASGIIVFNHGARQLDYVPATIMALEEVVKAAQGRVPVFLDGGVRRGTDVFKALALGASGIFIGRPVVFSLAAEGEAGVRKVLSMLRDEFELTMALSGCRSLKEITRDHIVTEWDSPHPRPAPRL

SEQ ID NO: 78290 - protein, 394 aa, Gossypium hirsutum
  unsure (1)..(394): unsure at all Xaa locations
  Clone ID: GOSHI-09MAY01-C1078_1.pep
MFCPLAAASSYPKITLRLQKLSVRKKMEITNVTEYEAIAKKKLPKMVYDYYASGAEDQWTLKENRNAFSRILFRPRILIDVSKIDMTTTVLGFKISMPIMIAPTAMQKMAHPEGEYATARAASAAGTIMTLSSWATSSVEEVASTGPGIRFFQLYVYKDRNVVAQLVRRAERAGFKAIALTVDTPRLGRREADIKNRFTLPPFLTLKNFEGLNLGKMDKTDDSGLASYVAGQIDRSLSWKDVKWLQTITSLPILVKGVLTAEDARLAIQAGAAGIIVSNHGARQLDYVPATIMALEXEVVKAAQGRVPVFLDEGVRGGTDVFKALALGASGIFIGRPVVFSLAAEGEVGVRKVLQMLRDEFELTMALSGCRSLKEITRNHIVADWDEPRVVPRL

SEQ ID NO: 78291 - protein, 123 aa, Gossypium hirsutum
  unsure (1)..(123): unsure at all Xaa locations
  Clone ID: LIB3583-052-P1-K6-D5.pep
XTLIQSAEELTINFQLPDIEFSQGCSLCLTSCSAGNEAXYFEVRQAAHREKSHDNFVYCPNVMQLEDNSIQHFQTHWMRGEPVIVRNVLELGSDYLYVLHFLLALDLSILLLLGYDKQVDIKI

SEQ ID NO: 78292 - protein, 151 aa, Gossypium hirsutum
  Clone ID: LIB3585-020-P1-K1-G10.pep
ANFLRHPHLRSSPPLPSPSVISVDRRPCFYFEETLKNWQAQLRKENPEAVVLSLSSTDSMLVNCDSEEAEEVRTNVSSSGTSKRKRKSVQESFVDEQIKFVGEQLGKIANALEKFTADKTSQLYEQVMSMEEEGFDDDFLCSVFDYLVSHE

SEQ ID NO: 78293 - protein, 109 aa, Gossypium hirsutum
  Clone ID: uC-gsflnu33B126f04b1.pep
MDITNVTEYEAIAKKKLPKMVYDYYASGAEDQWTLKENRNAFSRILFRPRILIDVSKIDMTTTVLGFKISMPIMIAPTAMQKMAHPEGEYATARAASAAGTIMTLSSWA

SEQ ID NO: 78294 - protein, 73 aa, Gossypium hirsutum
  Clone ID: uC-gsflnu33B070a09b1.pep
SVVDDKIKFVGEQLGKIANALEQFTADKTPHLYEEVMPMEEEGFDDDFLCSVFDYLDSHESEAKSFLVLKVEA

SEQ ID NO: 78295 - protein, 100 aa, Gossypium hirsutum
  unsure (1)..(100): unsure at all Xaa locations
  Clone ID: AI055577.1.pep
DIFLKLSGILLPKLPSSILLPSLFLQISVIESFILGQTGNRCWXCCNSIFIFRRLLRLFFISFWLLCSVYFSFLFGCYCRCHFCXQMMGKXSSSLIFVGL

SEQ ID NO: 78296 - protein, 83 aa, Gossypium hirsutum
  Clone ID: LIB3828-009-Q1-K6-C6.pep
PYFQVFWQSFFFVHYIVVLVLSFHLIIMVHLFYDRFRPRILIDVNKIDMTTTVLGFKISMPIMIAPTAMQKMAHPEGMNVLVF

SEQ ID NO: 78297 - protein, 95 aa, Gossypium hirsutum
  Clone ID: LIB3585-019-P1-K1-E4.pep
MEITNITEYEAIAKEKLPKMVYDYYASGAEDQWTLKENRNAFSRILFRPRILIDVSKIDMTTTVLGFKISMPIMIAPTAMQKMAHPEGEYATARA

SEQ ID NO: 78298 - protein, 81 aa, Gossypium hirsutum
  Clone ID: LIB3543-052-Q1-K1-F2.pep
KNWVLNSPLVKNWGSSGVGKKRMSFHPSSDFWKIQQKTTNFIKNLKLLGDSPTDLWSRKMEKEDEAERQRWRGRDEERRKL

SEQ ID NO: 78299 - protein, 81 aa, Gossypium hirsutum
  unsure (1)..(81): unsure at all Xaa locations
  Clone ID: LIB3825-002-Q1-K6-A11.pep
VNFVYCXDVMQLXDNSIQHFQTHWMRGEPVIVRNVLEKXSGLSWEPLVMWRAFXVXKKILKEEANRXKSIDCLDWCEVLFD

SEQ ID NO: 78300 - protein, 70 aa, Gossypium hirsutum
  Clone ID: LIB3829-021-Q6-N6-G1.pep
IIKHRTQDVIIKSFFLHRHHLFVKPWCLISSASSLSQSTGTESWLLSSKSMSANVLAKLPVAISLPTTKA

SEQ ID NO: 78301 - protein, 91 aa, Gossypium hirsutum
  unsure (1)..(91): unsure at all Xaa locations
  Clone ID: LIB3165-016-P1-K1-H2.pep
RFHAEHHRPRLQEPDVFKAXRLGASGIFIGRPVVFSLAAEGEAGVRKVLSMLREEFELTMALSGCRSLKEITRDHIMTEWDSPHPRPAPRL

SEQ ID NO: 78302 - protein, 114 aa, Gossypium hirsutum
  Clone ID: LIB3272-030-P1-K1-G11.pep
TIISNPFHFIFSPPISISLSIVGRSHDYLAIAKIICEEKTEITNITEYEAIAKEKLPKMVYDYYASGAEDQWTLKENRNAFSRILVRPHILIDASKIDMTTTGLGSMISMPIMI

SEQ ID NO: 78303 - protein, 106 aa, Gossypium hirsutum
  unsure (1)..(106): unsure at all Xaa locations
  Clone ID: LIB3829-021-Q6-K6-G1.pep
WXXAXFWGGGRVAKTFADIDLDDSNGGGVPVDCDNEEAEEIRHHGFFFFFVXGGRRCGGGGXXSXFXYLVSHECEAKAFLVKSKKHKKMGVEKWGXGGRYGCVDGG

SEQ ID NO: 78304 - protein, 43 aa, Gossypium hirsutum
  Clone ID: LIB3165-032-P1-K1-H1.pep
MEITNVSEYQEIAKQKLPKMVYDYYASGAEDQWTLHENRFAFT

SEQ ID NO: 78305 - protein, 49 aa, Gossypium hirsutum
  Clone ID: LIB3165-058-P1-K1-C1.pep
HPHCIYGIKLLCFFSVGTCFCFIELKGYVMIMLATAAFSLYILFLKTIC

SEQ ID NO: 78306 - protein, 225 aa, Gossypium hirsutum
  Clone ID: GOSHI-09MAY01-C1068_2.pep
MQMLSKASSAMASFPCSRVRSGLCVWPGLRQFCIRKGLEYGLRLLSMPLKTLRGASRSLRVAEFCSVTNVSSSLQIELVPCLRDNYAYLLHDVDTGTVGVVDPSIAMPIIDALSRKNWNLTYILNTHHHHDHTGGNAELKARYGAKVIGSGIDKDRIPGIDIVLNDGDKWMFAGHEVHVIETPGHTRGHISFYFPGSPAIFTGDTLFGLSCEPAFRLHFNAVGRW

SEQ ID NO: 78307 - protein, 265 aa, Gossypium hirsutum
  unsure (1)..(265): unsure at all Xaa locations
  Clone ID: GOSHI-09MAY01-C1068_1.pep
MLSKTSPDMASFPCSRVSCLGDNYAYLLHDVDTGTVGVVDPSEAVPIIDALSRRNWNLTYILNTHHHHDHTGGNAELKARYGAQVIGSGIDKDRIPGIDIVLNDGEKWMFAGHEVHVMETPGYTRGHISFYFPGSRAIFTGDTLFSLSCGKLLEGTPEQMLSSLQRIMSLPDDTNIYCGHEYTLSNSKFALSIDPKNDALQSYAAHVTHLRNKGLPTIPTTLKKEKACNPFLRTSSSEIRQALNIPXNANAAEALGVIRQAKDNF

SEQ ID NO: 78308 - protein, 165 aa, Gossypium hirsutum
  Clone ID: LIB3583-030-Q6-K1-H6.pep
MQMLCKASSAVASFPCSRVRSGQCLWPGMRQLCLRKGLVYGFMRLLSTPFKTLRGASRSLRVAEFCSVSNMSSSLQIELVPCLRDNYAYLLHDAETGTVGVVDPSEAVPIIDTLSRKNWNLTYILNTHHHHDHTGGNAELKARYGAKVIGSGIDKDRIPGIDIVL

SEQ ID NO: 78309 - protein, 134 aa, Gossypium hirsutum
  Clone ID: uC-gsronu33B168a07b1.pep
MLSKTSPDMASFPCSRVRSGLCVWPGNRQLCIRKGLVYGFMHLLSIPFKTLCGASRSLRVAEFCSVSNMSSSLQIELVSCLGDNYAYLLHDVDTGTVGVVDPSEAVPIIDALSRRNWNLTYILNTHHHHDHTGG

SEQ ID NO: 78310 - protein, 49 aa, Gossypium hirsutum
  Clone ID: LIB3146-037-P1-K1-E6.pep
TVPSTLKMEKECNPFLRTSNAEIRKALKIPVTANEAEALGIIRRAKDNF

SEQ ID NO: 78311 - protein, 77 aa, Gossypium hirsutum
  Clone ID: GOSHI-09MAY01-C1028_2.pep
SVFTNEKRIQQRLALYQGVCPIYMEFSDDAEETFKTALALLQKQGMAKEGQEAALVQSGRQPIWRFQSTHNIQVRKV

SEQ ID NO: 78312 - protein, 578 aa, Gossypium hirsutum
  unsure (1)..(578): unsure at all Xaa locations
  Clone ID: GOSHI-09MAY01-C1028_1.pep
MAQVVATTSIHGSFLCQGTGSVQERAVKLKPASFGSKVLALDEKKNKRVVLGKNSRITAKRAVRAEPEIIPVSPEDVPEREEQYEQLRGIQQVGDTSVAMWSKPVVRRKTKIVCTIGPSTNTREMIWKLAETGMNVARLNMSHGDHASHQKVIDLVKEYNAQSKDNTIAIMLDTKGPEVRSGDLPQPGTLTTGQEFTFTIRRGVGTPDCVSVNYDDFVNDVEVGDMLLVDGGMMSLVVKSKTEDSVRSRGVDGGELKSRRHLNVRGKSATLPSITEKDWDDIKFGVDNKVDFYAVSFVKDAQVVHELKNYLQSCDADIHVIVKIESADSIPNLHSIITASDGAMVARGDLGAELPIEEVPLLQEEIIRTCRSMGKAVIVATNMLESMIVHPTPTRAEVSDIAIAVREGADAVMLSGETAHGKFPLKAVKVMHTVALRTEATISGGEMPPNLGQAFKNHMSEMFAYHATMMSNTLGISTVVFTRTGFMAILLSHYRPSGTIFAFTNEKRIQQRLALYQGVCPIYMEFSDXDAEEPFKIALDLLQKQGMVKKGEEVALVQSGRQPIWRFQSTHNIQVCKV

SEQ ID NO: 78313 - protein, 128 aa, Gossypium hirsutum
  Clone ID: GOSHI-09MAY01-C1398_2.pep
MSSIIQSFQKNSSLPVSQTESKDHFPPPGGPGLLRRRLSSLSLKLQPTSSPATSWTFPRSKSLSSMGEYAGSSIRKWWDWGWSWVLSKKPSFAKDIEMNEEETRILGCHNKGSWRHVFYKVRSEIRNP

SEQ ID NO: 78314 - protein, 157 aa, Gossypium hirsutum
  Clone ID: GOSHI-09MAY01-C1398_1.pep
MSSIMQSFQKSRSLPLSQTQSKEQAPLPALRRRLSSLSLKLHPSISSPSAPSWAFPRSKSLSSMGDYAGSSIRKWWDWGWSWVLSRKPMFAQDLEMNEEETRVLGCHNKGSWRHVFYKLRSEIKKRMGSDKVGLPQTCRYDSLSYSKNFGVGNQIYR

SEQ ID NO: 78315 - protein, 79 aa, Gossypium hirsutum
  Clone ID: uC-gsronu33B055g03b1.pep
RGGKEGEGMGQSRRFMMRRQAYSARKDKVLDLGDVHDVAGEEVGCSFRDRDESLLRSRPGPAGGGKWSFDSVWETERVG

SEQ ID NO: 78316 - protein, 158 aa, Gossypium hirsutum
  Clone ID: GOSHI-09MAY01-C1388_2.pep
MDLQSLCKVILVSALISLVCHPCSVTAGDIVHDDDSAPKKPGCENDFVLVKVQTWVNGIEDAEFVGVGARFGTAIVSKEKNANQRRLVLSDPRDCCSHPKNKLDNDVIMVDRGHCKFTTKANNAQAANASALLIINNQKELYKMVCDPDETDLDIHIP

SEQ ID NO: 78317 - protein, 291 aa, Gossypium hirsutum
  unsure (1)..(291): unsure at all Xaa locations
  Clone ID: GOSHI-09MAY01-C1388_1.pep
MDLQFFCRVFLITALISLVCQVCSVTAGDIVHDDDLAPKKPGCENDFVLVKVQTWVDGIEDAEFVGVGARFGTTIVSKEKNANQRRLILSDPRDCCSAPKNKLANDVIMVDRGHCKFTTKANHAQAAHASAILIINNQKELYKMVCEPDETDLDIHIPAVMLPQDAGAKLXKMLISNSSVSVQLYSPTRPLVDIAEVFLWLMAVGTILCASYWSAWSARETAIEQDKLLKDALDEIPNTKTVSSGGIVDINTTSTILIVVVASCFLVMLYXLMSYWVVELLVVXFCISGVE

SEQ ID NO: 78318 - protein, 240 aa, Gossypium hirsutum
  Clone ID: GOSHI-09MAY01-C1348_2.pep
TGVLALNRTLAKPCLSDIEQVLEGQGASDDLKQVCLIHPSNLTEASCPVKDVDEFENTVNSSELLASPARPPPRPECCDQVCQGAISDAATRIALKSSDPLSMDGTHVLPEYSTRVNDCKTVVLRWLASKLNPYRAKEVLRGLTNCNVNKVCPLVFPNMRHVANSCGNGISSQTACCDAMDSYVSHLQKQTLITNLQALDCATALGLKLQTYNITKNVYSLCHISLKDFSLQVGSQVSGC

SEQ ID NO: 78319 - protein, 397 aa, Gossypium hirsutum
  unsure (1)..(397): unsure at all Xaa locations
  Clone ID: GOSHI-09MAY01-C1348_1.pep
MNAGVSLEHNFSMLLLKLFVVLACFHECLSDPQVHHKGYMLTGRATGDFVPKITPTASPQPFLPLLAPSPLSTFTNSTSPKLSGLCMLNFTAAQSLISITSIDWWAAFAPLLANVICCPQLHATLVILVGQLSKETGVLALNRTLAKPCLSDIEQVLAGQGAGDGLNQVCSIHSSNLTEASCPVKDVDEFENMVNSSELLASCEKIDPVKECCDQVCQGAISDAATRLALKASDPLSMDGPHVLPQHTTRINDCKTVVLRWLASKLDPYHAKEVLRGLTNCNVNKVCPLVFPNMKHVANSCGNGISDQTACCDAMNSYVSHLQKQTLITNLQALDCATSLGLKLQTYNITKDVYSLCHISLMDFSLQGGRQVSGCLLPSLPSDATFDKXSGIRFICD

SEQ ID NO: 78320 - protein, 102 aa, Gossypium hirsutum
  Clone ID: LIB3166-025-P1-K1-E1.pep
TYLLRFGFLSIPASPLVCPNMKHVANSCGNGISDQTACCDAMNSYVSHLQKQTLITNLQALDCATSLGLKLQKYNITKDVYSLCHISLKDFSLQVGSQESGC

SEQ ID NO: 78321 - protein, 120 aa, Gossypium hirsutum
  Clone ID: GOSHI-09MAY01-C1368_3.pep
MATDSSNGEQKTTSKPPPLPSPLRFSKFYQSNMRILVTGGAGFIGSHLVDKLMENEKNEVIVADNYFTGSKDNLRKWIGHPRFELIRHDVTQPLLVEVDQIYHLACPASPIFYKYNPVKT

SEQ ID NO: 78322 - protein, 153 aa, Gossypium hirsutum
  Clone ID: GOSHI-09MAY01-C1368_2.pep
PRVRPRVRGRVGFTGSKDNLGRGIGHPRFELIRHDVTQPLLVEVDQIYHLACPASPIFYKYNPVKTIKTNVIGTLNMLGLAKRVGARILLTSTSEVYGDPLIHPQPETYWGNVNPIGVRSCYDEGKRVAETLMFDYHRQHGIKIPIAIIFNTY

SEQ ID NO: 78323 - protein, 256 aa, Gossypium hirsutum
  Clone ID: GOSHI-09MAY01-C1368_1.pep
MAANSSNGEQQTPSKPPPLPSPLRFSKFFQSNMRILVTGGAGFIGSHLVDKLMENEKNEVIVVDNYFTGSKDNLRKWIGHPRFELIRHDVTEPLLVEVDQIYHLACPASPIFYKHNPVKTIKTNVIGTLNMLGLAKRVGARILLTSTSEVYGDPLIHPQPETYWGNVNPIGVRSCYDEGKRVAETLMFDYHRQHGIEIRIARIFNTYGPRMNIDDGRVVSNFIAQALRGEPLTVQKPGTQTRSFCFVSDMVDGLIR

SEQ ID NO: 78324 - protein, 102 aa, Gossypium hirsutum
  Clone ID: LIB3585-040-P1-K1-H7.pep
ATAANSSNGEQQTPSKPPPLPSPLRFSKFFQSNMRISVTGRAGFIGSHLVDTFIENEKNEVLAADNYYTGSKDNLRKWISHPRFELIRHDVTEPLLVEFNQI

SEQ ID NO: 78325 - protein, 200 aa, Gossypium hirsutum
  Clone ID: GOSHI-09MAY01-C101323_1.pep
QAMDLVLAEIHRACIYTVPKHISYTKSAFESKEAYWKVIGYKEDDGKIESTTDYLVRLESYMKLYGALVQTEVAGCQNVHGLKEGWAWLARFLNALPANMYTAVALYAFLQMAGFALFGKYRSQFMKMLNFISENFLNALRSQDDPDLRPITSKIQCYLEDKLFLQEPEGRTLQSSLLSNNMAPESDYHGPYHQQSRHFY

SEQ ID NO: 78326 - protein, 62 aa, Gossypium hirsutum
  Clone ID: GOSHI-09MAY01-C1318_1.pep
MDLDDFRSVLETAGVDVWTFIDTAILVASLDYGQELKQRTDGIVERLYATSMVTKCQSCDFG

SEQ ID NO: 78327 - protein, 239 aa, Gossypium hirsutum
  Clone ID: GOSHI-09MAY01-C1328_1.pep
MCTLEKRGNLFILTFTGEDQHRFNPNVIGSLLSLLSQVKAEATRGSALITQAQGKFFSNGFDLDWAQAAGSEQGAAERLHHMVDLFRPVIAALLSLPMPTVAAITGHAAAGGFALALSHDYLIMRKDRGVLYMSEVDIALTIPDYFNALFREKIGDASVRRDFLLRGLKMKGDEAEKRGVVEAAYGGEAEVREASVRLAENLGKRKWNGEVYAEIRKGLYPQLSAILGLTHKAYTIARL

SEQ ID NO: 78328 - protein, 144 aa, Gossypium hirsutum
  unsure (1)..(144): unsure at all Xaa locations
  Clone ID: LIB3272-035-P1-K1-F2.pep
QVKAEATRGSTFITQAQGKVFSNGFYLYWAQTAGSQHGAAERVHHILALCKPPTAGLLCLSIRTASAIXTGHACRCIFLLAVSHDHLLMRRDRGSLHMSEVHIALTIPDHYNALLREKIGHASVRPDLLLRGLKMKGDEADKRG

SEQ ID NO: 78329 - protein, 160 aa, Gossypium hirsutum
  Clone ID: GOSHI-09MAY01-C1288_1.pep
MHNYIHQMITNASIPQPSTSEINGQDGQNDRQCHGFWYDAVLVVPAFLFVVYLAVNAKKNVEKLRNGRSYVVISYYALLWLASGLNLAWCSLQTWQCANGKEVAWNLLSLFTTSGLLCLEISLVGFLLQESYTSGREALARIFTISGIIAGDDMLLKAIY

SEQ ID NO: 78330 - protein, 92 aa, Gossypium hirsutum
  unsure (1)..(92): unsure at all Xaa locations
  Clone ID: GOSHI-09MAY01-C1248_5.pep
ASLTLYWRYCSRLCRLVVKECKPQTKIVDICEKGDAFITEQTGCMCKNAKRKIERGVAFPTCLSVNNIVCHFSXPLASDTFELQEGDPGKSD

SEQ ID NO: 78331 - protein, 132 aa, Gossypium hirsutum
  Clone ID: GOSHI-09MAY01-C1248_3.pep
IFSEINQRFPILPFTTRALEEKRARLGLVECVNHDLLQPYPVLYEKPGDHVAHIKFTVLLMPNGSDRITSHPLQELQSTKTIDDPEIKAWLALGTKTKKKGGGKKKKGKKGDKAEGGAEGEAMDASTNGGAS

SEQ ID NO: 78332 - protein, 199 aa, Gossypium hirsutum
  unsure (1)..(199): unsure at all Xaa locations
  Clone ID: GOSHI-09MAY01-C1248_2.pep
MSDDEREEKELDLSSSEVVTKYKGAAEIVNKALQLVVKECKPKAKIVDICEKGDAFIREQTGNMYKNSKKKIERGVAFPTCLSVNNTVCHFSPLASDTSELEEGDMVKIDMGCHIDGFIAVVAHTHVVQSGPITGKQADVVAAANTAAEVALRLVRPGKKNKMYLMQXQKVAAAYDCKXVEGVLSHQLKQFVIDGNKSY

SEQ ID NO: 78333 - protein, 392 aa, Gossypium hirsutum
  Clone ID: GOSHI-09MAY01-C1248_1.pep
MSDDEREEKELDLTSPEVVTKYKSAAEIVNKALQLVVKECKPKTKIVDICEKGDAFIREQTGNMYKNAKRKIERGVAFPTCLSVNNTVCHFSPLASDTSELQEGDMVKIDMGCHIDGFIAVVAHTHVVQEGLVNDRKADVIAAANTAAEVALRLVRPGKKNKDVTDAIQKVAAAYDCKIVEGVLSHQLKQFVIDGNKVILSVSNPDTRVDDAEFEENEVYAVDIVASTGEGKPKLLDEKQTTIYKRAVDKNYHLKMKASRFIFSEINQRFPILPFTARALEEKRARLGLVECVNHDLLQPYPVLYEKPGDYVAHIKFTVLLMPNGSDRITPHPLQELQPTKTIDDPEIKAWLALGTKTKKKGGGKKKKGKKNEGDKADAEPMDASKTDAAAS

SEQ ID NO: 78334 - protein, 67 aa, Gossypium hirsutum
  Clone ID: LIB3135-024-Q1-K1-G3.pep
KKTTPKIKEKDPPLFIEEEKKIILKIRSFFKLVFNFFFLREMKKIEFPIKLHITHKHKTPSGCHAIK

SEQ ID NO: 78335 - protein, 186 aa, Gossypium hirsutum
  unsure (1)..(186): unsure at all Xaa locations
  Clone ID: GOSHI-09MAY01-C1268_1.pep
MADEIRFFELNTGAKIPSVGLGTYAVTRNTVATAVKVGYRHLDCASIYGNEKEIGFALKELFDDGVVKREDLFITSKLWCTHHLPEDVPEALNKTLEDLQLDYVDLYLIHWPASLKKGSVEVLPENLTQPDISGTWRAMEALYDSGKARAVGVSNFSAKXLGDLLEVAHVVPAVNQVELHPVWQQP

SEQ ID NO: 78336 - protein, 132 aa, Gossypium hirsutum
  Clone ID: GOSHI-09MAY01-C1238_1.pep
MSSPDIASILENSRELDRLRKEQEEVLVEINKLHKKLQATPEVVEKPGDSSLSRLKSLYIQARDLSEREVTMSNLLLSQLDAFLPSGPPGQQRRKMDGNDQKRKRVKSDSDISRLSPSMRSHIEAFVSLKDE

SEQ ID NO: 78337 - protein, 189 aa, Gossypium hirsutum
  unsure (1)..(189): unsure at all Xaa locations
  Clone ID: GOSHI-09MAY01-C1228_1.pep
MASDLETKAKEAFIDDHFELALHLYSQAIQLNPKHAELYADRAQANIKLNNLTEAVADANKAIELDPSMSKAYLRKATACMKLEEYQTAKSALETGAALAPAESRFSKLIKECEERIAEETGDVSMQTPEALAKNDVPAKEIELDKDQPNLEXEAAPPQPAYRAEFXYRNQRELVVSIFAKGTPPRLCS

SEQ ID NO: 78338 - protein, 107 aa, Gossypium hirsutum
  Clone ID: LIB3145-057-Q1-K1-E12.pep
MASDLETKAKEAFIDDHFELALDLYSQAIQLNPKNAELYADRAQANIKLNNLTEAVADANKAIELDPSMSKAYLRKATACMKLEEYQTAKAALETGATLAPGELRFS

SEQ ID NO: 78339 - protein, 61 aa, Gossypium hirsutum
  Clone ID: LIB3166-025-P1-K1-A7.pep
MASDLETKAKEAFIDDHFELALDLYSQAIQLNPKNAELYADRAQANIKLNNLTGISSFFPT

SEQ ID NO: 78340 - protein, 75 aa, Gossypium hirsutum
  Clone ID: LIB3189-022-P1-K1-B8.pep
PTKASEWETLAKEGGIDNHFELALHLYSQAIQLNPKHAVLYADRAQANIKLNNLTDAVADANKAIVLDPFMSKAY

SEQ ID NO: 78341 - protein, 139 aa, Gossypium hirsutum
  Clone ID: GOSHI-09MAY01-C2998_1.pep
AVSRAFGDTRFKTKKNEMLKKGVEEKRWSEKFISRVVFNDDLVIASPDTFKVALGSDAEFVLLASDGLWDYINSSDAVAFVRNQLREHGDVQVACDALAQAALDKGSEDNVSIIIADFGYAAFPTSNNCCYAFVEFKLS

SEQ ID NO: 78342 - protein, 129 aa, Gossypium hirsutum
  Clone ID: LIB3120-046-P1-K1-H12.pep
AFGDTRFKTKKNEMLKKGVGEKRWSEKFISRVAFNDDLVIASSDTFKVAIGSDAEFVLLASDGLWDYINSSDAVAFVRNQLREHGDVHVACDALAQAALDKGSQDNVSIIIADFGHTEWQKLPVEQQNF

SEQ ID NO: 78343 - protein, 138 aa, Gossypium hirsutum
  Clone ID: GOSHI-09MAY01-C2948_1.pep
MSAIVSGKRSFFEELSAPPPVAKRIRCSSRFASSSSFSPSSPPPLFVTDQLIAIFPEMDKQVLERVLEECGDDLDSAIRRLNELRLGSAGRNAAIAADDKTGVELKELQAQGVAANGDVAKEPTGAEAMDGFYWVDLS

SEQ ID NO: 78344 - protein, 350 aa, Gossypium hirsutum
  Clone ID: GOSHI-09MAY01-C2978_1.pep
MRTERKPHLIKKPALAKRQRVDESLGPGLKDEATEVEHLLVEPKSEHVSVDRVFCFGKENIEKHLKMEDFSCAFDYGWKIGSGGLDSIHGQGGDDLKLEVLDGLLDEVDEVDDIQAAHDLSSACEDFLLDIEFPEKFSELDCGLYEGSNLRNSSSESHSPGGSSNSVGGMSESSIVTVQESNSKNGVLGKMVNCDKHHTIRSECGCQAPVMETICPSKEHGQDFVESDDEKPLVSFIVSNKKVKSSVKVTKGGTLLRQKRLRKPTKRYIEEFSRNSTTSGKNKCLKVRSQEEFSQIPSESQPRRGRPKKIMPKMEFESDCELSASESEDECREPKDPKRLCDRRKHQKMW

SEQ ID NO: 78345 - protein, 59 aa, Gossypium hirsutum
  unsure (1)..(59): unsure at all Xaa locations
  Clone ID: LIB3543-050-Q6-K6-D9.pep
KXIFTCTGEIMCCLNIIHFIQQSIKNFKLQIISSLTVDRIQPTLSSRKVLTASEEQLRK

SEQ ID NO: 78346 - protein, 90 aa, Gossypium hirsutum
  Clone ID: LIB3825-018-Q1-K6-A9.pep
GYKMRTERKPHLIKKPADAKRQSVDESLGPGLKDEATEVEHLLVEPKSERVSVDRVFCFGKENIEKHLKMEDFSCAFDYGWKIGSGHESL

SEQ ID NO: 78347 - protein, 87 aa, Gossypium hirsutum
  Clone ID: GOSHI-09MAY01-C102953_1.pep
AAWVSFQEELFLPYYMQGCNSYSLMDHKNGYYGCHQIIKEKLYTILSPLKIVNKPNIKSWRKLEIKEGATENSNARAQLVGKIKKKT

SEQ ID NO: 78348 - protein, 135 aa, Gossypium hirsutum
  Clone ID: GOSHI-09MAY01-C2938_2.pep
FEDFQMKWAFKTLKRYRERFCMFNDDVQGTAGVALAGLLGTVRAQGRSLDDFPNHKIVAVGAGSAGLGVLSMAVQAVVRMTGNADTAAQNFLLDKDVPFCTSFLAFFILFVPSLLCSFRYVMSFLLCNEDVDFMN

SEQ ID NO: 78349 - protein, 122 aa, Gossypium hirsutum
  unsure (1)..(122): unsure at all Xaa locations
  Clone ID: GOSHI-09MAY01-C2938_1.pep
MQDLGLRQPRIEGEEYLSIIDEFIEAVLTRWPEAIVQFEDSQMKWAFTTLKRYRERSRMFNDDVHGTAGVALAGLLGTVRAQRPSLADFPNHKIVVXGAGSAGLGVLSMAVHPICAKPFMFF

SEQ ID NO: 78350 - protein, 113 aa, Gossypium hirsutum
  unsure (1)..(113): unsure at all Xaa locations
  Clone ID: LIB3166-029-P1-K1-B4.pep
PRVREAVFTRWPKAIVQFEDFQMKWAFETLDRYRKKFCMFNDDIQGTAGVALAGLLGTVRAQGRTLADFPDQKIVVVGAGSAGLGVLSMAVQAGAGVSGKNXKLLHKNFFLLD

SEQ ID NO: 78351 - protein, 53 aa, Gossypium hirsutum
  unsure (1)..(53): unsure at all Xaa locations
  Clone ID: LIB3120-039-P1-K1-B7.pep
SIIDVVIETDLKHFAAEVLDTVEDFQMKXAFKTLKRYRERVCLFNDDVQGTAG

SEQ ID NO: 78352 - protein, 172 aa, Gossypium hirsutum
  Clone ID: GOSHI-09MAY01-C2898_2.pep
ARPTRPGKPSEDLTSKPKYLVTFTVGYDQRKNMDAAVKKFSGNFTILLFHYDGRTTEWDEFEWSKQAIHVSVRRQTKWWYAKRFLHPDIVAPYDYIFIWDEDLGVEHFNAEEYIKLVRKHGLEISQPGLEPNKGLTWQMTKRRGDREGHKGTEEKPGWCNHPHVPPCAAFVE

SEQ ID NO: 78353 - protein, 166 aa, Gossypium hirsutum
  unsure (1)..(166): unsure at all Xaa locations
  Clone ID: LIB3584-013-P1-K1-E9.pep
LSWAPQLNRVSHPVGNNGSCANVTLKKSWVPSNPRGAERLPPGIVRAESDLYLRRLWGKPSEDLTSKPKYLVTFTVGYDQRKNIDAAVKKXNFTVLLFHYDGRTTEWDEFEWSKKAIHXWYAKRFLHPDIVATYDYIFIWDEDLGVEHFNAEEYIKLVRKHGLEIS

SEQ ID NO: 78354 - protein, 220 aa, Gossypium hirsutum
  unsure (1)..(220): unsure at all Xaa locations
  Clone ID: GOSHI-09MAY01-C2848_1.pep
IDANCANLDQAVYIANAVSCIDSENIPWRLQKAQLYRLSNADATAACSPIMVXVVLITGQDSDPSSVIVNELGLHXTIDKSRVSCFLVVFLVGKWHFSNGFFSDEELREGLKWLADKSPLQPVLSSVKMRELVMSHLSPVLEELDKMGDYEVGPNHCISVFNEALDWSFGEITAAIKANPTNWPCPEAMLLKDFSDEFLAAKMFLPSVGWSSPAKTAPLE

SEQ ID NO: 78355 - protein, 137 aa, Gossypium hirsutum
  Clone ID: GOSHI-09MAY01-C2878_1.pep
MEENKEGSTKLEARDETRKRPSIFIIGCPNVGKRTLISRLATVEFEEEEEEDSSQVVVRRWTINTKYYTADVSLCMAHLQDGFSARTLPIFNHSTALVMVFDMSNLSTLSALRDWVSYTDIQNFEILLCIGNKIDRI

SEQ ID NO: 78356 - protein, 123 aa, Gossypium hirsutum
  Clone ID: LIB3585-033-P1-K1-E5.pep
MEENKEGSTKLKAQDETRNRPSIFVIGCPNVGKSTLISRLASVEFEEEDSSQVVVHGWTINTKYYTADVSLCMAHLQDGFSAQTLPIFNHSTRLGIVFDMSHLPTFSALQDWISYTDIQNLEI

SEQ ID NO: 78357 - protein, 51 aa, Gossypium hirsutum
  Clone ID: GOSHI-09MAY01-C2838_5.pep
METKGGKKKSSSSKSLFYEAPLGYSIEDVRPNGGIKKFRSAAYSNCARKPS

SEQ ID NO: 78358 - protein, 51 aa, Gossypium hirsutum
  Clone ID: GOSHI-09MAY01-C2838_4.pep
METKGGRKKSSSSKSLFYEAPLGYSIEDVRPNGGIKKFRSAAYSNCARKPS

SEQ ID NO: 78359 - protein, 293 aa, Gossypium hirsutum
  unsure (1)..(293): unsure at all Xaa locations
  Clone ID: GOSHI-09MAY01-C2838_3.pep
DARVNCWNLSQAAMRHETETCFVYADQLKQRCVXQFKEGTLGIEQLAAVDGLCDLVSKVVDASEPARTYHVNLSIFTSIPDFWSIGQIFPIVPIHRLDERPEVRGILSDLTCDSDGKIDKFIGGETSLPLHGLEGNGGGSSGGANGRYYLGMFLGGAYQESLGGVHNLFGGPSVVSVSQSDGPYSFAVTRAAPGPSCGDVLRVMQHEPELMFETLKHRAEEFCGQDHGNEGTHAALVSTIARSFHNMPYLVVASPCSLTAMNNNGFYYCNEEDYNAAVDSGASEDEQWSYCYA

SEQ ID NO: 78360 - protein, 337 aa, Gossypium hirsutum
  unsure (1)..(337): unsure at all Xaa locations
  Clone ID: GOSHI-09MAY01-C2838_2.pep
IFLALLARELAXSTLCLFLRPTRAVDLVIEISKKLYVRPVIGVRAKLRTKHSGHFGSTSGEKGKFGLTTIQILRVVKKLQDSGMLDCLQLLHFHIGSQIPSTALLQAGVVEAAQIYSELARLGADMKVIDIGGGLGIDYDGSKSGNSDLSVSYGLQEYASAVVNAVRFVCDRKSIKHPIICSESGRAIVSHHSILIFEAISATAPTTPAMNQVDLPFILEGLSEDARVNCWNLSQAAMRHETETCFVYADQLKQRCVEQFKEGTLGIEQLAAVDGLCDLVSKVVDASEPARTYHVNLSIFTSIPDFWSIGQIFPIVPIHRLDERPEVRGXLSDLTRT

SEQ ID NO: 78361 - protein, 357 aa, Gossypium hirsutum
  Clone ID: GOSHI-09MAY01-C2838_1.pep
ITMAVSAIGFEGYEKRLEISFFEPGIFADPEGKGLRALTKAQLDEILGPAECTIVSSLSNKQVDSYVLSESSLFVYPYKIIIKTCGTTKLLLAIPPILKLAGSLSLAVKSVRYTRGSFIFPGAQPFPHRNFSEEVAVLDNYFGKLGAGSKACVMGGLDKQKWHVYSASAEPVTATGPVYTLEMCLTGLDRDKASVFYKDQSGSAAVMTINSGIRKILPESEICDFEFGPCGYSMNAIEGAAISTIHVTPEDGFSYASFEAVGYNLKDKNLKQLVGRVLKCFKPSDFSVAVHVDVGGGQSLEQSCLLDVKEYCCGEMGIEGLASGGSMMYQKFKSTGGCGSPRSTLKCCWKEEEEEEE

SEQ ID NO: 78362 - protein, 107 aa, Gossypium hirsutum
  Clone ID: AI729247.1.pep
WSLKVGKRSPVVVSLYSTKLLSVTALKTFDQTVESRSSYLLLTPTALASHPDILTSVPSDHYYWLIKLLFALLVIFRLFPRPTSSSSLFVAGFFTLRSPDLATLLFG

SEQ ID NO: 78363 - protein, 182 aa, Gossypium hirsutum
  unsure (1)..(182): unsure at all Xaa locations
  Clone ID: AI055661.1.pep
RVNCWNLSQAAMRHETETCFVYADQLKQRCVEQFKEGTLGIEQLAAVDGLCDLVSKVVDASEPARTYHVNLSIFTSIPDFWSIGQIFPIVPIHRLDERPEVRGILSDLTCDSDGKIDKFIGRXNSLPLHGLERXNGGGTIGGANGPSFWGMFWVGAXQESLGGINNFFGGQNVVSVSKWMDL

SEQ ID NO: 78364 - protein, 64 aa, Gossypium hirsutum
  Clone ID: LIB3083-086-Q1-L1-F1.pep
METKGGKKKSSRSKSLFYEAPLRYSIEDVRPNGGIKKFRSGGYYNCARKHILIFVTQVPPSDHW

SEQ ID NO: 78365 - protein, 59 aa, Gossypium hirsutum
  Clone ID: uC-gsflnu33B028h09b1.pep
DFWSIGQIFPIVPIHRLDERPEVRGILSDLTCDSDGKIDKLIGGETSLPLHGLEGNGWW

SEQ ID NO: 78366 - protein, 88 aa, Gossypium hirsutum
  unsure (1)..(88): unsure at all Xaa locations
  Clone ID: uC-gsflnu33B083a11b1.pep
SCTPAXPVLHCRPKRPVTFPETSLPLHGLEGNGGGSSGGAYGRTYSRMFWAGHHNHPSEAFTTFLVNQMMIAKNIVMIHIAMLRHKQR

SEQ ID NO: 78367 - protein, 252 aa, Gossypium hirsutum
  Clone ID: GOSHI-09MAY01-C2828_1.pep
MKVEMNLDNDSNNLVQAPTNGDSEKLSPSTLSSLLGSKDRDYLLCSTAAAAETDHVKISDLEGKVIGIYFSANWYPPCRNFNRVLIGVYEQLKSNGSNFEIVFVSSDEDLDAFNSYRENMPWLSIPFSDLETKKALNRKYDVESIPCLVILQPDNTKDDDTYYDGVELIYRSGVDAFPFTKEKLDELRREEKRKHDSQTVTNLLTNPERDYLLDQTITRKVPVDSLKGKTVGLYLSVQWCMPCVEFTPKLIS

SEQ ID NO: 78368 - protein, 141 aa, Gossypium hirsutum
  Clone ID: GOSHI-09MAY01-C2588_1.pep
MPSQGDLDRQIEHLMECKPLSEAEVKALCEQARAILVEEWNVQPVKCPVTVCGDIHGQFYDLIELFPIRGNAPDTNYLFLGDYVDRGSYSVETVTLLVALKVRYRDRITILRGNHESRPITPVYGFYDECLRTYGNANVWN

SEQ ID NO: 78369 - protein, 152 aa, Gossypium hirsutum
  Clone ID: GOSHI-09MAY01-C2558_1.pep
MGRWSQFVVAVTILAVGLLSASATARPCKTFFVASYSFSFENPNDPSSSTGFVTVFTEIGQLNVVPPRPKPSDVLSSLRERSKDILSVVVALLFGVGSGALTAATLYLVWTLFSARSDYHRACLEDDESDGELSPKKIGYVTIPTVNVKEVN

SEQ ID NO: 78370 - protein, 80 aa, Gossypium hirsutum
  Clone ID: LIB3493-047-P1-M1-D11.pep
IAVKEEWEGGVNSWLRDYSERWALLSASATARPCKTFFVASYSFSFENPNDLSSSTGFVAVFTEIGQLNVVPPRPKPSDV

SEQ ID NO: 78371 - protein, 120 aa, Gossypium hirsutum
  Clone ID: GOSHI-09MAY01-C2548_2.pep
MDRLSNAFSLLDIDVDDHHPPPASSSASKPSGKSKNNGKGPTELKPALLSENYKLPLVWIDLEMTGLNIETDRILEIACIITDGYLTKSLEGPGLVFHQSKECLDRMGEWCQNHHAASGL

SEQ ID NO: 78372 - protein, 178 aa, Gossypium hirsutum
  unsure (1)..(178): unsure at all Xaa locations
  Clone ID: GOSHI-09MAY01-C2548_1.pep
MDGLSNAFSVLEIDVDDHLPLSTASTISGSATLLSFNDPGKSKSNEKGSIEDKQSEADSSLLSENYKLPLVWIDMEMTGLDIEVDRILEIACIITDGKLTKSVEGPDLVIHQSKECLDRMGEWCQNHHGASGLTQKVLESTVSEREAEKQVIEXFVKRNVGTYRPHIAGNSIYMDFFS

SEQ ID NO: 78373 - protein, 206 aa, Gossypium hirsutum
  unsure (1)..(206): unsure at all Xaa locations
  Clone ID: GOSHI-09MAY01-C2508_1.pep
SLRQATEGNLIRGVKVSRNGPQISHLLFTDDCILFXRSHRERSYCVEEYLKDYELSSGQCVNYNKSTIFFKYKXQEEEKRVIVRMLGVRSSNNPERYLGLPNLVGRGKKAAFQSPPARLKQRIDNWSVKYPSQGGKEVFIKAVLQSIPTYSMACFLLPKSLCXRLAGIIARILVGENQGKKGIHWCAWKDVCVSKEAGGIGLRKLD

SEQ ID NO: 78374 - protein, 228 aa, Gossypium hirsutum
  unsure (1)..(228): unsure at all Xaa locations
  Clone ID: GOSHI-09MAY01-C2538_1.pep
IHPLSFLFQSQFTNFPLNFDFVEPFRTRWNQAYRKIDDAEAGARPLYPMMLEPPEMRWAFIRKIYSIVAIQLLATIAVAATVVTVHPIALFFVSTGTGFALYIVLIITPFITLCPLYYYHQRHPVNYLLLGVFTVSLAFAVGLTCAFTSGKVILESVVLTAVVVVALTLYTFWAAXRGHDFHFLGPFLFGAVLXLMVFSFFPXVFPSAPLSAPVLWGAYPRSFFCGFF

SEQ ID NO: 78375 - protein, 119 aa, Gossypium hirsutum
  Clone ID: GOSHI-09MAY01-C2498_1.pep
TPSLVIQSHEAQMAQKTSATLVPQPPGAVQPPALLRTTPPATTPSLHKPAWLPYTRQRAPVPARRQTKTTTSANKRNLLYFYLFSLIFPLSFSAIKPDLNLVIGYTRLGMNTQYAIHAY

SEQ ID NO: 78376 - protein, 249 aa, Gossypium hirsutum
  Clone ID: GOSHI-09MAY01-C2488_1.pep
MKFNIANPTTGCQKKLEIDDDQKLRAFFDKRISQEVAGDALGEEFKGYVFKIMGGCDKQGFPMKQGVLTPGRVRLLLHRGTPCFRGYGRRNGERRRKSVRGCIVSQDLSVLNLVIVKKGENDLPGLTDTEKPRMRGPKRASKIRKLFNLSKEDDVRKYVNTYRRTFTTKSGKKVSKAPKIQRLVTPLTLQRKRARIADKKKRMAKAKSEAAEYQKLLATRLKEQRERRTESLAKRRSKLSAASKPSVSA

SEQ ID NO: 78377 - protein, 173 aa, Gossypium hirsutum
  Clone ID: LIB3584-010-P1-K1-H10.pep
SYIANPTTGCQKKLEIDDDQKLRAFFDKRISQEVAGDALGEGGGGFFFKIMGGCDKQGFPMKQGVLTPGRVRLLLHRGTPCFRGYGRRNGERRRKSVRGCIVSQDLSVLNLVIVKKGENDLPGLTDTEKPRMRGPKRASKIRKLFNLSKEDDVRKYVNTYRRTFTTKSGQKVS

SEQ ID NO: 78378 - protein, 44 aa, Gossypium hirsutum
  Clone ID: LIB3272-057-P1-N1-C3.pep
TKRDLGQYPVFCSAICCHNLLLSIQFGNVIFPSTMLGHLFDNYH

SEQ ID NO: 78379 - protein, 40 aa, Gossypium hirsutum
  Clone ID: LIB3135-013-Q1-K1-C10.pep
LFYIFNYYIFFFIIFFFFFFFFFFFFFFFFFFFFSKIACI

SEQ ID NO: 78380 - protein, 250 aa, Gossypium hirsutum
  unsure (1)..(250): unsure at all Xaa locations
  Clone ID: GOSHI-09MAY01-C2478_2.pep
RIAVSTQTHASAYACAQVNIAEYAFTALANLVSNFVCSKDLFDNSMPEGRQMKERFWELIKVIGTPNFSDLIPFVKPFDPQGLKRKINKIFGQLDAFYEKLIEERFAEKGKAQLDGTIPYKRKMDMLDVLLSYESNDKQNGLDSLPKSIVKGMLSEMFIAGTETTSSTVEWGMAEILRKPSVVKKLLLELDQVVGKDRFVVESDIPKLTYLQAVVKEVFRLHPGVPLIIPRPPTMHARXAGYHIPKHYIL

SEQ ID NO: 78381 - protein, 527 aa, Gossypium hirsutum
  Clone ID: GOSHI-09MAY01-C2478_1.pep
MALLHSYFLSAGECVSGSMVLAVAMSIASYFLIPMVFGGRHKNWKNAPPGPVGWPILGSLPHLSNRLHEDFFHMAKIYGPLFSLNLGIKPAIVVSSPEMAAQVLKEKEGMFSSRTITETIRVISYDAHSIIFSPYGPRWKVLRRILITELLSPKAFEQFEPLRTSQVHGLLKYLYLVSKSNTQVNIAEYAFTALANLVSNFVCSKDLFDNSMPEGRKMKERFWELIKVIGTPNFSDLIPIVKPFDPQGLKRKINKIFGQLDAFYEKLIEERLTEKGKAQLDGTIPYKRKMDMLDVLLSYESNDKENGLDRLPKSIVKGMLSEMFIAGTETTSSTVEWGMAEILRKPSVLKKLLLELDQVVGKDRFVVESDIPKLAYLQAVVKEVFRLHPGVPLIIPRRTNEACEVAGYHIPKHCIVYVNVWGMARDPNVWEDPLEFKPERFIGSSVDVKGQDFNLLPFGTGRRSCVGWPLAHRMVHYYLAALLHAFQWESPPDVLNDLGERVGLTIQKGKSLLSTPKPRLPASVYER

SEQ ID NO: 78382 - protein, 194 aa, Gossypium hirsutum
  Clone ID: LIB3543-036-Q1-K1-F10.pep
PASAQRPPSVRPRVRPRVRPRVRGRVGAGEYVSGSTVLAVAMSIASYFLIPMVFGGRHKNWKNAPPGPVGWPILGSLPHLSNRLHEDFFDMAKIYGPLFSLNLGIKPAIVVSSPEMAAQVLKEKEGMFSSRTITETIRVISYDAHSIIFSPYGPRWKVLRRILITELLSPKAFEQFEPLRTSQVHGLLKYLYLV

SEQ ID NO: 78383 - protein, 146 aa, Gossypium hirsutum
  unsure (1)..(146): unsure at all Xaa locations
  Clone ID: LIB3584-003-P1-K1-F1.pep
MDMLDVLLSYESNDKENGLDRLPKSIVKGMLSEMFIAGTETTSSTVEWGMAEILRKPSVLKKLLLELDQVVGKDRFVVESDIPKLAYLQAVVKEVFRLHPGVPLIIPRRTNEACEVAGYHIXKHCIVYVNVWGMARDPNVWEDPLE

SEQ ID NO: 78384 - protein, 101 aa, Gossypium hirsutum
  unsure (1)..(101): unsure at all Xaa locations
  Clone ID: LIB3543-007-Q1-K6-A5.pep
GRVGEDPLEFKPXRFIGSSVDVKGQDFNLLPFGTGRRSCVGWPLAHRMVHYYLAALLHAFQWESPPDVLNDLGERVGLTIQKGKSLLSTPKPRLPASVYER

SEQ ID NO: 78385 - protein, 134 aa, Gossypium hirsutum
  Clone ID: GOSHI-09MAY01-C2418_3.pep
ISRQSLFTTTAPVSALALLFSPSPISSALASTLSFLRGIASKTSYSAVSQQQQQQQQQKLRKELLLKELEETETLAQKIGKAIRHPGFPSKSRVYADVNVIRPKEYWDYESLIVQWGEQDDYRVVRKSGRGKYS

SEQ ID NO: 78386 - protein, 402 aa, Gossypium hirsutum
  Clone ID: GOSHI-09MAY01-C2418_2.pep
PLSPFLLNFRSLSSLSLSSPWNRLQNLILSLLSTTTATQKGLCLELLLKELKEAETLAQKIGKAIRRPGAPSKSRVYADVNVIRPKEYWDYELLTVQWGEQDDYEVVRKVGRGKYSEVFEGVHCTDNEKCIIKILKPVKKKKIKREIKILQNLCGGPNIVKLLDIVRDQQSKTPSLIFEYVNNTDFKVLYPTLSDYDIRYYIYELLKALDYCHSQGIMHRDVKPHNVMIDHELRKLRLIDWGLAEFYHPGTEYNVRVASRYFKGPELLVDLQDYDYSLDLWSLGCMFAGMIFREEPFFYGRDNYDQLAKIAKVLGTDELNAYLNKYRIELDPPLAALVGRHSRKPWTKFISAENQHLALPEAIDFLDKLLRYDHQERPTAKEAMAHPYFNPVRNAESSRTRP

SEQ ID NO: 78387 - protein, 203 aa, Gossypium hirsutum
  Clone ID: GOSHI-09MAY01-C2418_1.pep
VFIFELLKALDYCHSHGIMHRDVKPHNVMIDHEQRKLRLIDWGLAEFYHPGKEYNVRVASRYFKGPELLVDLQDYDYSLDLWSLGCMFAGMIFRKEPFFYGHDNYDQLVKIAKVLGTDELNAYLNKYGIELDPHLLFLVGRHSRKPWTKFINAENQHLALPEAIDFLDKLLRYDHLERLTAKEAMAHPYFYPIRNAESSRTRT

SEQ ID NO: 78388 - protein, 126 aa, Gossypium hirsutum
  unsure (1)..(126): unsure at all Xaa locations
  Clone ID: LIB3543-052-Q1-K1-H7.pep
LRQELLSLELKETATLAHEIGIAIRRPGVPSKSRVHADVNVIRPKEYWDYXSLTIQWGEQDDYDVVRKAGRGNYSEVFXGVHCTDNEKCIIKILKPVKKKKIKREIKILQNLCGGPNIVKLLDIVR

SEQ ID NO: 78389 - protein, 138 aa, Gossypium hirsutum
  unsure (1)..(138): unsure at all Xaa locations
  Clone ID: LIB3135-026-Q1-K1-E4.pep
QHKKGLCLKELKEAETLAQKIGKSNMRPVAPSKSMVYADVNVILPKNYWNYNLLTVQWAEQDDYXVVRKVGRGKYSXVFEGVHITDNEKCVIKILKPVNKNKIKRVIKILHNLFXWPNIVKLLYIVCDHHSKTPILIF

SEQ ID NO: 78390 - protein, 70 aa, Gossypium hirsutum
  unsure (1)..(70): unsure at all Xaa locations
  Clone ID: LIB3148-022-Q1-K1-E6.pep
PTLYYFCLHRHKPWTELSYADNQHLALXXXIDFLDKVLRYDHLERLTAXEAMAHPYFYPIRNAESSRTRT

SEQ ID NO: 78391 - protein, 65 aa, Gossypium hirsutum
  Clone ID: GOSHI-09MAY01-C2438_2.pep
IPNKKSWVFCSFFQWILFSNVKAIKGQNGSFSFFRFYFLNYDLNEKQRGKNPDQIMWCKLKKMNN

SEQ ID NO: 78392 - protein, 113 aa, Gossypium hirsutum
  Clone ID: GOSHI-09MAY01-C2438_1.pep
MRRGRGKVKKQAVVVSSHEDPESGDDEIIEELKVEKTEEDSGDVKGSVPIKEMKNQAVTENGRKRKRSMQAKENGITTKLSTNDSIKPVGYRQNGSRRKNKPQRAAEAIVECK

SEQ ID NO: 78393 - protein, 184 aa, Gossypium hirsutum
  Clone ID: GOSHI-09MAY01-C2428_2.pep
MAAALQLQTHPCFHGTCQLSPPPRPSVSFPSSSRSFPSSRRSLSAHVKAAASSLSTTTLQEGIAEFYDESSGIWEDIWGDHMHHGYYEPGSDISGSDHRAAQIRMVEESLRFAGISEDPANRPKRIVDVGCGIGGSSRYLARKYGAKCQGITLSPVQAGRANALANAQGLAEQVCCEVADALNQ

SEQ ID NO: 78394 - protein, 345 aa, Gossypium hirsutum
  Clone ID: GOSHI-09MAY01-C2428_1.pep
MAAALQLQTHPCFHGSCQLSPPPRPSVSFPSSSRSFPSSRRSLSAHVKAAASSLSTTTLQEGIAVVPRVPPRVREDIWGDHMHHGYYDPGSDVSGSDHRAAQIRMIEESLRFAGISDDPANRPKRIVDVGCGIGGSSRYLARKYGAKCQGITLSPVQAGRANALANAQVLADQVCFEVADALNQPFPDDQFDLVWSMESGEHMPDKPKFVEELVRVAAPGGTIIVVTWCHRDLGPSEESLQPWEQKLLNRICDAYYLPEWCSTSDYVKLFQSLSLQDIKAGDWTENVAPFWPAVIRSALTWKGFTSLLRSGLKTIKGALVMPLMIEGFQKGVIKFAIIACRKPAE

SEQ ID NO: 78395 - protein, 115 aa, Gossypium hirsutum
  Clone ID: LIB3584-003-P1K1-A12-F19g.p
WAANVAPFWPAVVRSALTWKGFTSLLRSGLKTIKGALVMPLMIDCFQKGVIKWGGIACRMPAAITQILISTIHPLKSVSVTILYYIALNIPYGVRENEQIKLSAKLMPLYVWSFE

SEQ ID NO: 78396 - protein, 182 aa, Gossypium hirsutum
  Clone ID: GOSHI-09MAY01-C2798_1.pep
RIQNAFRAHSLKIRTKAIESSTPEDEARSIVAAMKIQHAFRNFETKRKMAAAARIQYRFRTWKIRKEFLNLRHQATKIQAAFRGLLVRRQYRKITWSVGVLEKAILRWRLKRRGLRGLQINTVDTVTEQRPESDTEEDFYRTSRRQAEQRVEKAVVRVQAMFRSKKAQEDYRRMKLACDQAM

SEQ ID NO: 78397 - protein, 251 aa, Gossypium hirsutum
  Clone ID: GOSHI-09MAY01-C2768_2.pep
MPSHHHHHRSTPLLSATAASSSGSQSFVSKLLLLLTLLPLSLAALAFVLQWRGGGVSDPTIATSAAYSRWAPRGSHHEIFPGMETFSSLSPKSHSSSDCINLGRTSSHSLPYYGDWKFGFEANLKPKICITTSTSAGLEQILPWMFYHRVLGVTNFFLFVEGHAASPNVSKVLESLPGVKVVYRTKELEEQQAKSRIWNETWLSSFFYKPCNYELFVKQSLNMEMAIVMARDAGMEWILHLDTDELIHPAG

SEQ ID NO: 78398 - protein, 346 aa, Gossypium hirsutum
  Clone ID: GOSHI-09MAY01-C2768_1.pep
SVRIWNETWLSSFFYKPCNYELFVKQSLNMEMAIVPPGRPRVRWILHLDTDELIHPAGASEYSLRQLLLNVPSNVDMVIFPNYESSVERDDIKDPFTEVSMFKRNYDHLPKDTYFGMYKESTRGNPNYFLTYGNGKAAARIQDHLRPNGAHRWHNYMKTPNEIKLEEAAVLHYTYAKFSDLTSRRDRCGCKPTKDDVKRCFMLEFDRAAFIIASTQTEEEMLNWYRERVVWGDKDLRLKLLRKGILTRIYAPMAIIQGLRESGVFSSVIANAPTTISKDKFLASIDSSNSSRVVSPTTHASRKIGRSRQQQTSARKVLEIETNATDEAAAVPPLSPPAWTMTTFEQ

SEQ ID NO: 78399 - protein, 235 aa, Gossypium hirsutum
  unsure (1)..(235): unsure at all Xaa locations
  Clone ID: GOSHI-09MAY01-C2718_1.pep
VVFLGLCSSRVAVLTPQNLKVPTMAEMVDMWKKKHNMFGILYSWFLAKVASRLEVFPGSEFRVAGRVAMKYGGEXVLGDRPVQVTLRRTWGKMPLWHKIKLLYSLLFQAVFLPSPEELNKMLKGARDDVDMLTLVIQEMSKEFPTLMETLVHERDQFMSSTLLRTASEHSSVVAVVGKGHLQGIKKYWKQPVLIDDLMTVPSKKPTVPTGKILVSLGIAAAGVAIASGIYLAGKK

SEQ ID NO: 78400 - protein, 260 aa, Gossypium hirsutum
  unsure (1)..(260): unsure at all Xaa locations
  Clone ID: GOSHI-09MAY01-C2738_1.pep
MKVLVLETALIPPAAAPPFTHDHTLPLSHLDNDHSLNVTFRYLRAYVNSDTTGRDPFQVISSAISAALHHYYPLAGSLGRSSNGRYELFCRLDQSLPLVSASVDCTLESVNHLDDPDMNSVEQLVPDPSPEETLVNPCTLQLTVFKCGGFTLGAAIHNALCDGLGATQLFCMAADFARGVDEVEYQPVXRSTLLGPRNPPIVDAPVLEFLSLEKXFNPYKQDIGLVNXECSYVLDXFLGPLKALFFXKGLGLTTFEILGA

SEQ ID NO: 78401 - protein, 248 aa, Gossypium hirsutum
  Clone ID: GOSHI-09MAY01-C2698_1.pep
PARPSRPPARPEEEKEEDDFPEIILKVDMHCEACARKVARTLKGFEGVGDVATDSKANKVVVKGKTANPVKVHERLLKKYGRKVELVSPLPEPPPPEENKEENKEAKPKEEEQKQEPPAVITVVLKVGMHCEACAQALRKRIRKIQGVETVETDVGNDKVTVKGTVDPTKLVDYVYKRTGKQASIVKGEEKKEEQQLQEAEKKPAEEANKETKPEEEDDRKSDDVIKRSEYLQSKYFLGAGISSSVFQ

SEQ ID NO: 78402 - protein, 128 aa, Gossypium hirsutum
  unsure (1)..(128): unsure at all Xaa locations
  Clone ID: GOSHI-09MAY01-C2688_18.pep
ADPRVRFFSIKVQFTVVKPTEGKQQGVILGANKFSQRHXIGTAAQSQDDIDYTVPPPAPFFEPSELTSWSFYRAGIAEFVATFLFLYISVLDXIGVDXGNCNGTTIGRQGIAWKGVGLSVKLVYYKGF

SEQ ID NO: 78403 - protein, 50 aa, Gossypium hirsutum
  Clone ID: GOSHI-09MAY01-C2688_9.pep
PARSLGAAIIFNKDKGWDDHWIFWVGPFIGAALAALYHLLVIRAIPFKSK

SEQ ID NO: 78404 - protein, 207 aa, Gossypium hirsutum
  Clone ID: GOSHI-09MAY01-C2688_7.pep
AKCPTVGIQGIAWAFGGMIFALVYCTAGISGGHINPAVTFGLFLARKLSLTRAIFYMVMQCLGAICGAGVVKGFMGKTHYGMLGGGANSVAHGYTKGDGLGAEIVGTFVLVYTGFSATDAKRSARDSHVPILAPLPIGFAVFLVHLATIPITGTGINPARSLGAAIIFNKDKGWDDHWIFWVGPFIGAALAALYHVVVIRAIPFKSK

SEQ ID NO: 78405 - protein, 78 aa, Gossypium hirsutum
  unsure (1)..(78): unsure at all Xaa locations
  Clone ID: GOSHI-09MAY01-C2688_6.pep
ILAPLPIGFPGFLVHLATXIPITGTGINPARSLGAAIIFNKDKGWDDHWIFWVAPFIGAALAALYHVVVIRAIPFKSK

SEQ ID NO: 78406 - protein, 52 aa, Gossypium hirsutum
  Clone ID: GOSHI-09MAY01-C2688_4.pep
INPARSLGAAIIFNKDKGWDDHWIFWVGPFIGAALAALYHVVVIRAIPFKSK

SEQ ID NO: 78407 - protein, 135 aa, Gossypium hirsutum
  Clone ID: GOSHI-09MAY01-C2688_3.pep
LSFSFLYFFHLSVCSFFIFLFFFSFFFIIFFSLFHIFILFFFLSIFFSYILLSLFYLVFFFQFFSSPTFHLFFILFSLFYTHFSIFFFLFTTLFFFFYFSFLNPFNFSSILYLSFFFFFFLLSYIHSFLFSSLIS

SEQ ID NO: 78408 - protein, 177 aa, Gossypium hirsutum
  Clone ID: GOSHI-09MAY01-C2688_2.pep
MEGKEEDVRLGANKFTERQPIGTAAQSQDDGKDYTEPPPAPFFEPGELTSWSFYRAGIAEFVATFLFLYITILTVMGVVKEKTKCPTVGIQGIAWAFGGMIFALVYCTAGISGGHINPAVTFGLFLARKLSLTRAIFYMVMQCLGAICGAGVVKGFMGKTQYGMLGGELTRWSWYTK

SEQ ID NO: 78409 - protein, 288 aa, Gossypium hirsutum
  Clone ID: GOSHI-09MAY01-C2688_1.pep
MEGKEEDVRLGANKFSERQPIGTAAQSQDDKDYTEPPPAPLFEPSELTSWSFYRAGIAEFVATFLFLYISVLTVMGVLKDKTKCTTVGIQGIAWAFGGMIFALVYCTAGISGGHINPAVTFGLFLGRKLSLTRAIYYMVMQCLGAICGAGVVKGFMGKTRYGALGGGANSVNHGYTKGDGLGAEIVGTFVLVYTVFSATDAKRSARDSHVPILAPLPIGFAVFLVHLATIPITGTGINPARSLGAAIIFNKDKGWDDHWIFWVGPFIGAALAALYHVVVIRAIPFKSK

SEQ ID NO: 78410 - protein, 83 aa, Gossypium hirsutum
  Clone ID: uC-gsronu33B037g11b1.pep
LNYYHIIISLSHLSAANIIQGTQKSCQVKSIIYNKKPLKVGIGRCYYENDMFFFTNHSHTNYKWVQYLPSAPSPFFSLKKKSK

SEQ ID NO: 78411 - protein, 113 aa, Gossypium hirsutum
  Clone ID: LIB3825-001-Q1-N6-B5.pep
TQEPQQQSEPIAVRRQRREIQKPARFTDMVAYALPVVDNIPSTYTEAIQSLENNRWLGAMEEEMQSLEKNKTWKLAQLPKGKKAIGCKFEDTIEVSVMRRCSKMWNIAKVEIC

SEQ ID NO: 78412 - protein, 73 aa, Gossypium hirsutum
  unsure (1)..(73): unsure at all Xaa locations
  Clone ID: LIB3272-009-P1-K1-B1.pep
MEGKEEDVRLGANKFSERQPIGTAAQSQDDMDYTXPPSAPLFEPSELTSWSFYRAGIDDFASTFLLLYIFFLA

SEQ ID NO: 78413 - protein, 56 aa, Gossypium hirsutum
  Clone ID: uC-gsronu33B127g06b1.pep
FVYLPFDPFVFVYVRMCVIYIIYFNGGRAFVSFFYLLFFFKLNKGEGADGKYWTHL

SEQ ID NO: 78414 - protein, 98 aa, Gossypium hirsutum
  unsure (1)..(98): unsure at all Xaa locations
  Clone ID: LIB3543-013-Q1-K6-D5.pep
PRVRDQVPXRQSGWDWPEGLLPTTGLVKSSSTVPKISITSHVANPIGSSQALSSLLDVADGRRMECAFSKSSTMSTFGGRDSANGCQSVSTWIDSILC

SEQ ID NO: 78415 - protein, 79 aa, Gossypium hirsutum
  Clone ID: LIB3146-012-Q1-K1-E8.pep
GHENDISHSQIIAIQIRMPTYFLDGSLLITNPPFSSLINKKQRHMIVSSLHTKTQAYKQKKNTKKLKRVVGFLLFFFFV

SEQ ID NO: 78416 - protein, 35 aa, Gossypium hirsutum
  Clone ID: uC-gsronu33B137b08b1.pep
GWDDHWIFWVGPFIGAALAALYHVVVIRAIPFKSK

SEQ ID NO: 78417 - protein, 71 aa, Gossypium hirsutum
  unsure (1)..(71): unsure at all Xaa locations
  Clone ID: uC-gsronu33B157d05b1.pep
HVXAGISGGHINPAVTFGLFLGRKLSLTRAIYYMVMQCLGAICGAGVVKGFMGKTRYGAFAYLSTYLYIYV

SEQ ID NO: 78418 - protein, 103 aa, Gossypium hirsutum
  Clone ID: uC-gsflnu33B023a01b1.pep
MEGKEEDVRLGANKFSERQPIGTAAQSQDDKDYTEPPPAPLFEPSELTSWSFYRAGIAEFVATFLFLYISVLTVMGVLKDKTQCSTDGIPKDWLGPFGGNKLC

SEQ ID NO: 78419 - protein, 57 aa, Gossypium hirsutum
  unsure (1)..(57): unsure at all Xaa locations
  Clone ID: LIB3166-028-P1-K1-G9.pep
MFTVRQPIGTAAQSQDDGKDYTEPPPAPFFEPGELTLWSFYRAGIAXFVATLLLLYI

SEQ ID NO: 78420 - protein, 67 aa, Gossypium hirsutum
  unsure (1)..(67): unsure at all Xaa locations
  Clone ID: LIB3147-005-Q1-K1-A7.pep
YGAMGGGANSTNHGYTIGDGRGAEIDXTFVLVYTVFSDTDAKRSARDFHVHILAPLPIGFSVFLEHL

SEQ ID NO: 78421 - protein, 39 aa, Gossypium hirsutum
  Clone ID: LIB3493-042-P1-M1-E6.pep
CRYRAPIPNSTHASRCELTCSHRGHQMGPQVMTQGDSQH

SEQ ID NO: 78422 - protein, 310 aa, Gossypium hirsutum
  unsure (1)..(310): unsure at all Xaa locations
  Clone ID: GOSHI-09MAY01-C2658_1.pep
DFMVITIDDPPENCLDFSVLSEANENEIPQVTIHPDDPVALPFSSGTTGLPKGVVLTHKSLITSVAQQVDGENPNLYLTHEDVVLCVLPLFHIYSLNSVLLCSLRAGAAVLLMQKFEIGTLLELIQRHKVSVAAVVPPLVLLLAKNPVVAQFDLSSIRVVLSGAAPLGKELEEALRGRVPQAVLGQGYGMTEAGPVLSMCLGFAKQPFPTKSGSCGTVVRNAELKVIDPETGCSLGYNQPGEICIRGSQIMKGYLNDSVATAATIDVEGWLHTGDIGYVDEDDEIFIVDRXKEIIKFKGFHVPPAELVSL

SEQ ID NO: 78423 - protein, 171 aa, Gossypium hirsutum
  Clone ID: GOSHI-09MAY01-C2648_1.pep
NLFLVLLFSKPFFYNQELANTKDSILEETNKSQQVVLVLYEAINTRDVQTVHQILAPDLEWWFHGPPAHQFMMRLLTGASSDQTFIFDVDPLSVTTFGSTVIVEGCDHKRSISWVHAWTVSTDGIITEVREYFNTSLTVTRLITPVHCFSVWESSFSNRVGKSVPGLVLAI

SEQ ID NO: 78424 - protein, 51 aa, Gossypium hirsutum
  Clone ID: LIB3493-020-P1-M1-E7.pep
IYQKSIYSLKYLLKTTFLANLTSNIIIYTIIITDHNKFFLFILYCPTFGCT

SEQ ID NO: 78425 - protein, 279 aa, Gossypium hirsutum
  unsure (1)..(279): unsure at all Xaa locations
  Clone ID: GOSHI-09MAY01-C2678_1.pep
FTQVLLHQVLCNFFPSLDSXSSEFIPLEKXCFEDLKLYLAKNSDCMRLRASMEGYLDAYNPKTCVTPAGIFVSRVEEIGFECVPTSLMEQVINFLNDVREDLRCSMAKDIVTIKNESLNMAAGSGSTEEVSSACEEKLELPKDAHLDFQKKITFSKHEKPDLGSSSLLCKGEVYTQLLVMEKEDDLLAQLWKSRSLALERVRGNRQHIILVASLIDRIPNLAGLARTCEVFKTQGLAVADAKIVQDKQFQLISVTAEKWVPIIEVPVNSVKQFLEKKKR

SEQ ID NO: 78426 - protein, 367 aa, Gossypium hirsutum
  unsure (1)..(367): unsure at all Xaa locations
  Clone ID: GOSHI-09MAY01-C2618_1.pep
MALTTQTCFLQNPFLPSPSLSQPSAFPAPAALPSRKLRPISVQCSLASAPSVAVTASKECKVKSVKARQIIDSRGNPTVEVDLITDGLYRSAVPSGASTGIYEALELRDGDKSVYGGKGVLFAVQNINEILGPKLIGIDVRNQADVDAVMLEIDGTPNKSKLGANAILGVSLSVCRAGAGAKGMPLYKHIQELSRTKELVMPVPAFNVINGGSHAGNNLAMQEFMILPVGAASFAEALRMGSEVYHTLGGIIKAKYGQDACNVGDEGGFAPNVQDNREGLVLLMDAIEKAGYTGMIKIGMDVAASEFYTKDGKYDLNFKKQPNDGAHVRSPQSLGELYQEFVKDFPFVSFEGPFXQEGWGSWALLQS

SEQ ID NO: 78427 - protein, 181 aa, Gossypium hirsutum
  unsure (1)..(181): unsure at all Xaa locations
  Clone ID: GOSHI-09MAY01-C2608_1.pep
MAKLRHSRLQAKKLSTVTLVLSMLFMLTVVLLMLLGLGIFSLPINGDDSPPNDLTSYRRMASERGKGLGKRGEQWTEVLSWEPRAFLYHNFLSREECEYLINLAKPYMKKSTVVDSKTGQSKDSRVRTSSGMFLRRGQDKIIMDIEKRIADYTFIPXENGEGLQVLHFESXQKFDAHFACF

SEQ ID NO: 78428 - protein, 444 aa, Gossypium hirsutum
  Clone ID: GOSHI-09MAY01-C2638_1.pep
MREILHVQAGQCGNQIGGKFWEVVSDEHGIDPKGNYVGTSRVQLERVNVYYNEASGGRYVPRAVLMDLEPGTMDSLRTGPHGQLFRPDNFIFGQNGAGNNWAKGHYTEGAELIDSVLDVVRKEAENCACLQGFQICHSLGGGTGSGMGTLLISKIKEEYPDRMMLTFSVFPSPKVSDTVVEPYNATLSVHQLVENGDECMVLDNEALYDICFRTLKLTNPSFGDLNHLISTTMSGATCCLRFPGQLNSDLRKLAVNLIPFPRLHFFMVGFAPLTSRSSQQYRALTIPELTQQMWDARNMMCAADPRHGRYLTASAMFRGKMSTKEVDEQMINVQNKNSSYFVEWIPNNVKSSVCDIPPTGLTMSSTFMGNSTSIQEMFRRVSEQFTVMFRRKAFLHWYTGEGMDEMEFTEAESNMNDLVSEYQQYQDAVADDNDEDYEDEAMEN

SEQ ID NO: 78429 - protein, 74 aa, Gossypium hirsutum
  unsure (1)..(74): unsure at all Xaa locations
  Clone ID: LIB3083-018-Q1-L1-E3.pep
IQEMLRSVCEELRVMLSRKEFLNWYTGEGMDEMEFTEGEXSNMNDLVXEYQQYEDGVADDIDRDYEDETMDQLR

SEQ ID NO: 78430 - protein, 70 aa, Gossypium hirsutum
  unsure (1)..(70): unsure at all Xaa locations
  Clone ID: LIB3083-015-Q1-L1-B9.pep
QKMFRGVSEKFPVMFRKKGFLHWXTGEGMDKMEFTEAESNMNDLVSEYQQYQNAVANANDEDYENEAMEN

SEQ ID NO: 78431 - protein, 244 aa, Gossypium hirsutum
  Clone ID: GOSHI-09MAY01-C2628_3.pep
PRVRPRVRPRVRPRVREDAQIAENIEQCLTNTLWPQGNISFSKTLASFTQLASELQKKILKMILESFGLEKYMDELIDAVSYELRIMKYEKPKTNDSTHVLAAHCDSNTMTLLYQNEVNGLQIQSKDGEWINMKPSPNSFIVLIGESLSVWLNGRLPSPSHRVIMKGNEDRYSWGLFTRPREGYVVKVPNELVDDNKPILFKPHDYEEYLKFYYSEITQAAVKSGGSAVQSEGYITRLKAYCSV

SEQ ID NO: 78432 - protein, 230 aa, Gossypium hirsutum
  unsure (1)..(230): unsure at all Xaa locations
  Clone ID: GOSHI-09MAY01-C2628_1.pep
RQRVRHAYGRARGPAFSSTTPAMVPVIDFSNQNLKPGSPEWDLVKSQVREALGEYGCFEALFDPILELRKAVFGALQETFDLPLQTKKLCVSDKPFRGYFNPSSGPFQSLAMEDAQIAENIEQCLTNTLWPQGNISFSKTLASFTQLASELQKKILKMILESFGLEKYMDELIDAVSYELRIMKYEKPKTNDSTHVLAAHCDSNTMTLLYQNEVNGLQIXSKDGEWINMK

SEQ ID NO: 78433 - protein, 185 aa, Gossypium hirsutum
  Clone ID: LIB3584-005-P1-K1-F12.pep
MEGGGGNMKSQKRNDSTHVLAAHCDSNTMTLLYQNEVNGLQIQSKDGEWINMDRSGNSFIVLIGESLSVWLNGRLPSPSHRVIMKGNEDRYSLGLFTRPREGYVVKVPNELVDDNKPILFKPHDYEEYLKFYYSELTQAAVKSGGSAVQSGGSLTRLIAFCCVLYLVLLSFFFVSLCLGSFFVFG

SEQ ID NO: 78434 - protein, 76 aa, Gossypium hirsutum
  Clone ID: LIB3583-025-P1-K1-C1.pep
MSSKYQILDNRPIDQWKVTELKEELKRRKLTIRGLKEELVRRLDEALRLERENAETEEDNGFNSDPQPTDEGGIEK

SEQ ID NO: 78435 - protein, 90 aa, Gossypium hirsutum
  Clone ID: LIB3197-049-Q1-M1-H9.pep
MPSFPTQLHPSNQAYIFGKPLQPHFPYRRIENQKYPNFNRQNPPLAQTLVLYRKQGKIRRKNKIKKSKWKIENAFYERVVDEQLILFSLF

SEQ ID NO: 78436 - protein, 190 aa, Gossypium hirsutum
  Clone ID: GOSHI-09MAY01-C102123_1.pep
MADPIEPSTSSSDPNSIPRPAAILHPRREPFEHGLLTIQKLIFNDPVQALTPLKQKFASPSTQRVDSAALAELLQISFDHSRLVLETLASVLHSEPDPLVTALPDDVDSIGADLRDLILFLYIQSYKRLLPRSHKDSAAVADVWPSMSAFDGYLSALSPLQLVRSNSRRFMPSQADEEVHQLSYLQKHLA

SEQ ID NO: 78437 - protein, 66 aa, Gossypium hirsutum
  Clone ID: LIB3583-022-P1-K1-D9.pep
TKIIAVKKLILGRKSSLTQPSIKETLNQLQVWWLRTVRGNFWHQKLYYTQMFHRLSQLKPMQDYRL

SEQ ID NO: 78438 - protein, 66 aa, Gossypium hirsutum; identical to SEQ ID NO: 78437
  Clone ID: LIB3585-028-P1-K1-E8.pep

SEQ ID NO: 78439 - protein, 183 aa, Gossypium hirsutum
  Clone ID: GOSHI-09MAY01-C102113_1.pep
YKHHYENQGVGGSSEGTALEENLLESVLSTLISKDEVMCGRAFLEANNSLEPCQKMLKLGGRLRPSTRKILSLAVEVKTLEKDKEHLRMNLCKAEDEVKVLFEENNILDEANKRLLRQYHKEKNLHGSDGKHSGSASTKTNKRKSSPKICSPIEKKIDFTDPDSARKPLSPLRHNSPDLRMHK

SEQ ID NO: 78440 - protein, 369 aa, Gossypium hirsutum
  unsure (1)..(369): unsure at all Xaa locations
  Clone ID: GOSHI-09MAY01-C2128_1.pep
MAGKISAASARAHTRKSKQNTSFKLLSGIFTKTLLVLFVGALAWAYQAIQPPPPKTCGSPDGPPVTASRIKLRDGRHLAYKEHGVPLGAAKYKIVKVHGFDSCRLDAVPLSPELVERLGIYFVSFDRPGYGESDPNPKRTVKSMALDIEELADQLRLGSKFYVIGISMGGQVIWSCLKYIPHRLAGATLVAPAVNYWWSGFPTNLSNQAYQQMLPQDQWVLRVSHYAPWLTYWWNTQXWFPSSSVIANSIDIFSSEDRKLLMKISSTRNQAAQVRQQGEYESLHRDLIVGFGAWEFSPLELDNPFPNNEGSVHVWHGDEDRFVPITLQRYIAEQLPWIRYHELPGAGHLFMVADGMWDNIVKTLLVGEK

SEQ ID NO: 78441 - protein, 124 aa, Gossypium hirsutum
  unsure (1)..(124): unsure at all Xaa locations
  Clone ID: uC-gsronu33B141e08b1.pep
HLAYKEHGVPLEAAKYKIVKVHGFDSCRLDAVPLSPELVERLGIYGASFDRPRYXESDPTPKRTVMSMAIDIEERADLSRLGSKNDATLHLMLRQESWCCLMVMTLRGAGATLVAERLDSCGSV

SEQ ID NO: 78442 - protein, 206 aa, Gossypium hirsutum
  unsure (1)..(206): unsure at all Xaa locations
  Clone ID: GOSHI-09MAY01-C2088_3.pep
MYRNNSFAEVDAARILQIPLARTPHEDFLIWGGEPSGEFTVRRAYKQLXEWMKILERMLYKPSKQXFYKQLWSLNLPSKVNATIWRLSWNYLPTKVNLQHRKLAANTSCPQCGQRAETMNHVFRECAGRKSGWADARVRFSTAHFGRGSLSRSTLTVHIKKPKIGQLQVLWVEIRKEMPFYPTKKFTMTFRLLLLLKPWHVGPQSK

SEQ ID NO: 78443 - protein, 274 aa, Gossypium hirsutum
  unsure (1)..(274): unsure at all Xaa locations
  Clone ID: GOSHI-09MAY01-C2088_2.pep
INDAWIPDSVDFKISSELTSMSVSKVSELIDSNERRWKKELIMSTFAEVDAARILXIPLARTPHEDFLIWGGEPSGDFTVRSAYKLLQRMVENPRAYALQTIYKKFYKQLWSLNLPSKVKVTIWRLLWNYLPTKVNLQHRKLAANTSCPRCGQRAEKMNHVFRECPVTVDIWRALSFQNILTNQCEDFVQWLTWAVEQLNPRQGQIFYYTLWATEGVCQDQRWQVHIKKPRTGQLQALWVEIRKERPFYLTQKFRMAFRLLLLLKPWHAGPQSK

SEQ ID NO: 78444 - protein, 172 aa, Gossypium hirsutum
  unsure (1)..(172): unsure at all Xaa locations
  Clone ID: GOSHI-09MAY01-C2088_1.pep
YKKNERKIKEKIEKNKENKRXKEKKKDNREKINREYKIREEKIKIKKIEMKRSKIKGKENIREKKKKMKKRYKKEIKLKKTKKKIKKKKINKKKNKEEKKKMKKSKGKIRRRNXLKDKKERKTRKNKEGSKRKKKTRNGQLQALWFEIRKKRSFYLTQKFTMVFRLLLLLKP

SEQ ID NO: 78445 - protein, 140 aa, Gossypium hirsutum
  Clone ID: LIB3828-033-Q6-N6-C3.pep
REQWLLRLGMKESGGNDGFGGDEISLLAEELIQLSVKSSMLEPKGKTSLICSTFCFECGRAGHGLHECTEIIPSQKLMQHEYSKFLWHGHLMKIFLFGEASRRVISQSEVLINYYREWMKILELMLYKPSIQNFTNNSGV

SEQ ID NO: 78446 - protein, 68 aa, Gossypium hirsutum
  Clone ID: LIB3148-052-Q1-K1-F12.pep
IPLARTPHEDFLIWGGEPSGDFTVRSAYKLLQRMVENPRAYALQTIYKKFYKQLWSLNLPSKVKRTRG

SEQ ID NO: 78447 - protein, 92 aa, Gossypium hirsutum
  Clone ID: LIB3145-042-Q1-K1-A10.pep
SSSTLVKVRFSTTHFGPQREFVKINFDSAYKETQNRSASGIVVRDSEGKVLLSYSKIHDGVSSPFAAEAIACWTAVKIGIDNGWQSLIFEGD

SEQ ID NO: 78448 - protein, 82 aa, Gossypium hirsutum
  Clone ID: LIB3145-054-Q1-K1-B6.pep
MDENPRAYALQTIYTKFYKQLWSLNLPSKVNATIWRLSWNYLPTKVNLQHRKLAANTSCPQCGQRAETMNHVFRECPVTGRV

SEQ ID NO: 78449 - protein, 220 aa, Gossypium hirsutum
  Clone ID: GOSHI-09MAY01-C102083_2.pep
VGSVRVSGPARNMPDGPPPAATIGPGYSGGFESFRGGGAHVYDYEPQNFSVPPAAARYLNMNCAVEAKVPETVSSSAVGTRGSTVFISSEVSRAILKLDDPQTGGFEEFPRSSEHTSAQSIFQSFMASSGQSMNAQQDSYPNTNIHQSSYQKMSAQYSPYQNVSAQQNYSNRQAHQGPYHNLTVQQIPYPLNSQQGPYANFNAPPSAYHNYSAQQGSNPY

SEQ ID NO: 78450 - protein, 76 aa, Gossypium hirsutum
  unsure (1)..(76): unsure at all Xaa locations
  Clone ID: AI055313.1.pep
GYWNLIILLKQLDLFSIHIDIVKIVTXVILFFVSFPRLKIGIAFVPCQIGKKVNNGKIPSKTDIAYMLWHWEKRKG

SEQ ID NO: 78451 - protein, 281 aa, Gossypium hirsutum
  unsure (1)..(281): unsure at all Xaa locations
  Clone ID: GOSHI-09MAY01-C2058_1.pep
MTLGFSFSLPVMVVVSAIAFVYFCTVFVFIDRWFGLMTSPGIMNAVAFTGVAVMCVLNYVFAIFMDPGRVPSNFLPDIEDSKVPIHEIKRKGGDLRYCQKCSHFKPPRAHHCRVCKICVLRMDHHCTWINNCVGHANYKVFFVCVVYAVIACIYSLVLLVGSLTNDSQNDKQQSADSFRILYVISGLLLVPLSMALSGLLGWHIYLILQNKTTIEGXRATWLQERAGNVYKHPYDLGAYDNLTTVLGSNIICWICPTSRHIGNGLRFRTAYDGLPVASTSK

SEQ ID NO: 78452 - protein, 100 aa, Gossypium hirsutum
  Clone ID: GOSHI-09MAY01-C102073_1.pep
GLVGGRVGKKIYSKRHFTQKNRRQRRNQKSRSPNFGYSEIRRSIGSMAQLEEIDESKNKNNKQQKRNHGSTMFFVMVDYLFLLIFFGFLVFILFKILHFF

SEQ ID NO: 78453 - protein, 42 aa, Gossypium hirsutum
  Clone ID: GOSHI-09MAY01-C2048_7.pep
GLAITFVSSTSDSDVLNQVQERFEVDIKELPEQIDTSTYMPS

SEQ ID NO: 78454 - protein, 134 aa, Gossypium hirsutum
  unsure (1)..(134): unsure at all Xaa locations
  Clone ID: GOSHI-09MAY01-C2048_6.pep
DLTFSGADALSDPSSRTSILSLKVWRQMGETRDNDAYEEELLDYEEEEEKAPDSGTAKVNGEAGKKGYVGIHSSGFRDFLLKPELLRXIVDSGFEHPSEVQHECIPQAILDLDVICQAKSGMGKTAVFVLSSLQ

SEQ ID NO: 78455 - protein, 96 aa, Gossypium hirsutum
  Clone ID: GOSHI-09MAY01-C2048_5.pep
PRVREGHKIILVATDLVGGGIDIERVFLPSNSDRPDSAETYRPRVGRAGRFGTKGLAITFVSSASDSDVLNQVQERFEVDIKELPEQIDTSTYMPS

SEQ ID NO: 78456 - protein, 274 aa, Gossypium hirsutum
  unsure (1)..(274): unsure at all Xaa locations
  Clone ID: GOSHI-09MAY01-C2048_4.pep
MGETRDNDAYEEELLDYEEEEEKAPDSVTAKVNGEGGKKGYVGIHSSRFRDFLLKPELLRAMVDSGFEHPSEVQHECIPQAILGMDVICQAKSGMGKTAVFVLSTLQQIEPSPGQVIALVLCHTRELAYQICHEFERVSTYLPDIKVVVFYGKCNIKVHKDLLKNECPHIVVGTPGRVXLALARDKDLSLKNVRHFILDECDKMLESLDMRRDVQEIFKMTPHDKQVMMFSATLSKEIRPVCKKFMQDVIFRGQYYLNLESIFLIHSQLSTRVM

SEQ ID NO: 78457 - protein, 88 aa, Gossypium hirsutum
  Clone ID: GOSHI-09MAY01-C2048_3.pep
RILVATDLVGRGIDIERGWFVINYDMPDSADTYLHRVGRAGRFGTKGLAITFVSSASDSDVLNQVQERFEVDIKELPEQIDTSTYMPS

SEQ ID NO: 78458 - protein, 93 aa, Gossypium hirsutum
  unsure (1)..(93): unsure at all Xaa locations
  Clone ID: GOSHI-09MAY01-C2048_2.pep
FKEGHKRILVATDLVGRGIDIERXIVINYDMPDSADTYLHRVGRAGRFGTKGLAITFVSSASDSDVLNQVQERFEVDIKELPEQIDTSTYMPS

SEQ ID NO: 78459 - protein, 444 aa, Gossypium hirsutum
  Clone ID: GOSHI-09MAY01-C2048_1.pep
LNLTPNSLLFQLTSQKKGETRDNDAYEEELLDYEEEEEKAPDSVTAKVNGEAGKKGYVGIHSSGFRDFLLKPELLRAIVDSGFEHPSEVQHECIPQAILGMDVICQAKSGMGKTAVFVLSTLQQIEPTPGQVIALVLCHTRELAYQICHEFERFSTYLPDIKVAVFYGGVNIKVHKDLLKNECPHIVVGTPGRILALTRDKDLSLKNVRHFILDECDKMLESLDMRRDVQEIFKMTPHDKQVMMFSATLSKEIRPVCKKFMQDPMEIYVDDEAKLTLHGLVQHYIKLSELEKNRKLNDLLDALDFNQVVIFVKSVNRAAELNKLLVECNFPSICIHSGMSQEERLTRYKGFKEGHKRILVATDLVGRGIDIERVNIVINYDMPDSADTYLHRVGRAGRFGTKGLAITFVSSASDSDVLNQVQERFEVDIKELPEQIDTSTYMPS

SEQ ID NO: 78460 - protein, 56 aa, Gossypium hirsutum
  Clone ID: LIB3146-018-Q1-K1-E5.pep
QIGHDVDRWSTYIANINVVVCFQEVNNQGPNVSPNHESPCIEKLAPIMRWAIAWII

SEQ ID NO: 78461 - protein, 157 aa, Gossypium hirsutum
  Clone ID: uC-gsflnu33B061d07b1.pep
PYKPTSSAPLLINFSEKMGETRDNDAYEEELLDYEEEEEKAPDSVTAKVNGDAGKKGYVGIHSSGFRDFLLKPELLRAIVDSGFEHPSEVQHECIPQAILGWDVICQAKSGMGKTAVFVLSTLQQIEPTPGQVVALVLCHTRELAYQICHEFERFST

SEQ ID NO: 78462 - protein, 93 aa, Gossypium hirsutum
  Clone ID: LIB3196-028-P1-M1-G12.pep
LLRMGETRDNDAYEEELLDYEEEEEKAPDSVTAKVNGEAGKKGYVGIHSSGFRDFLLKPELLRAIVDSGFEHPSEVQHECIPQAILGMDVICQ

SEQ ID NO: 78463 - protein, 52 aa, Gossypium hirsutum
  Clone ID: LIB3166-024-P1-K1-B4.pep
MTYCHICSFQPMEIYVDDEAKLTLHGLVQHYIKLSELEKNRKLNDLLDALDF

SEQ ID NO: 78464 - protein, 45 aa, Gossypium hirsutum
  Clone ID: uC-gsflmaxxa028c05b1.pep
QLETIRVLGFSNKKNRDIWEVYFRERIEVLELGSESASANEKVRS

SEQ ID NO: 78465 - protein, 139 aa, Gossypium hirsutum
  Clone ID: GOSHI-09MAY01-C2398_1.pep
MWVFYLISLPLTLGMVVFTLRYFAGPDVPRYVLFTVGYAWFCSLSIIILVPADIWTTISKPGNYNENGGISFFWSWSYWGTFLLTWAVVPLIQGFEDAGDFSVTERLKTSVHVNLVFYSVVGSIGLWGLILLITMNRNW

SEQ ID NO: 78466 - protein, 177 aa, Gossypium hirsutum
  unsure (1)..(177): unsure at all Xaa locations
  Clone ID: LIB3583-061-P1-K1-F6.pep
PRVRPRVRISNPDNDIENGGISFFXSWSYWGTFLLTWXFEDAGDFSVTERLKTSVRVNLVFYSVVCSIGLVGLILLILMNRNWXAQATSNQMSKRDPLRPYMDVIDNMLAQMFREDLSFKPQGGLLGENDMDYDSDEKSMATLRRHLRLAREEYYWYKSEYMTYVIEALQLEDTVKN

SEQ ID NO: 78467 - protein, 181 aa, Gossypium hirsutum
  Clone ID: GOSHI-09MAY01-C2388_1.pep
GLVDRCCFICIDAALPVLDQYVEHRVDCMIDAGLLDEVYDIYNPNANYTLGLRQAIGVREFENFLQAYFSDSLDDETSDSSDGTLLKLSTRIDDKLFKENTRGILISSCDNPQKVMLEEAIDKVKANTRRLVRRQKRRVNQLQTLFGWNISYVDATEYISKKSDECWAVQVVGSAVKNDRS

SEQ ID NO: 78468 - protein, 228 aa, Gossypium hirsutum
  unsure (1)..(228): unsure at all Xaa locations
  Clone ID: GOSHI-09MAY01-C2358_1.pep
MPNNKSKPRPSRMSVYLYIPNIIGYIRILLNCYAFAIWFSSKRLFAALYFLSFVCDAVDGWCARKFNQASTFGAVLDMVTDRISTACLLVILSQVYRPSLVFLSLLALDIASHWLQMYSSFLVGKASHKDVKDSSNWLFKLYYGNRMFMGYCCVACEVLYIALFLISSKHTENLMXVVVTTLKQGSPLSLLVAISLLGCSIKQVINIIQMKTAADACVLYDTEKKQKR

SEQ ID NO: 78469 - protein, 66 aa, Gossypium hirsutum
  unsure (1)..(66): unsure at all Xaa locations
  Clone ID: LIB3166-047-P1-K1-C10.pep
MPNNKSKPGPSRMSVYLYIPNIXGYIRILLNCYAFALCFSSXSLFAALYFLSFVCDALDGWSSSQI

SEQ ID NO: 78470 - protein, 121 aa, Gossypium hirsutum
  Clone ID: GOSHI-09MAY01-C2348_1.pep
MGATEHVVVEGENKEGRKEDGKERVDEVVEHEKEGEKLDLEKGPVGAVVVEDSKGLERFEDERDHFHVSMLQRLHPTNPLRIVSNGGTRVATPSPSQSSRVQPTPSSLVLSLVRHRPHNHQ

SEQ ID NO: 78471 - protein, 118 aa, Gossypium hirsutum
  Clone ID: GOSHI-09MAY01-C102313_1.pep
PSSIQSGHSTISSPLKLVDDAEAPLISLKSKLMACFHSEIPISNSDFNEGNKDLVGASRFDRTEERGEARVKEAVRGTAHGTPDPLVLFWHIPEVSWLLSFFGFCWVSDLAIRIGSGY

SEQ ID NO: 78472 - protein, 169 aa, Gossypium hirsutum
  unsure (1)..(169): unsure at all Xaa locations
  Clone ID: GOSHI-09MAY01-C2328_2.pep
DAWDLIVDVPVFGRLTLPLEKTGEXPIPYKPDIDMEKIHFERFSWEETIAVLHLKLENMNDFDLGLNALDYVGRPSALASGSAELEKSAKIGKNGISYIEIPISFRPKDFGSALWDMIRGKGTGYSMKGHINVDTPFGAMKLPISKEGGTTRLKKNREDGGDDDDDDED

SEQ ID NO: 78473 - protein, 317 aa, Gossypium hirsutum
  Clone ID: GOSHI-09MAY01-C2328_1.pep
MSSSDKPELVERDVKDKVDDKEDNSGFIDKVKGFIHDIGEKIEETIGFGKPTADVAEIHLPCINLEKAEIVVDVLIKNPNPVPIPLVDIDYLIESDGRKLLSGLIPDAGTIHAHGEETVKIPVTLIYDDIKSTYDDIKPGSIIPYRLKVDLIVDVPVFGRLTLPLEKTGEIPIPYKPDIDMEKIHFERFSWEETIAVLHLKLENMNDFDLGLNALDYEVWLSEVSIGSAELEKSAKIGKNGISYIEIPISFRPKDFGSALWDMIRGKGTGYSMKGHINVDTPFGAMKLPISKEGGTTRLKKNREDGGDDDDDDDEVC

SEQ ID NO: 78474 - protein, 137 aa, Gossypium hirsutum
  unsure (1)..(137): unsure at all Xaa locations
  Clone ID: uC-gsflmaxxa097d11b1.pep
MSWGLKPELVERDVKDKVDDKEDNSGFIDKVKGFIHDIGEKIEETIGFGKPTADVAEIHLPCINLEKAEIVVDVLIKNPNPGPIPLVDIDYLIERDGRKLLSGLIPYAXTIHAHGEETGKIPVTLIYDDIKRPFYDI

SEQ ID NO: 78475 - protein, 129 aa, Gossypium hirsutum
  unsure (1)..(129): unsure at all Xaa locations
  Clone ID: LIB3149-015-Q1-K1-D2.pep
MSSSDKPELVERDVKDKVDDKEDNSGFIDKVKGFIHDIGEKIEETIGFGKPTADVAEIHLPCINLEKAEIVVDVLIKNPNPVPIPLVDIDYLIESDGRKLLSGLIPDAGTIHAHGEETVKIPXTLIYDD

SEQ ID NO: 78476 - protein, 177 aa, Gossypium hirsutum
  Clone ID: GOSHI-09MAY01-C2288_1.pep
MRVLQVLAVSKILTSHLSRTHRPSASRQMSTAASSLKKSPIFRTLGLIGGKWIDAYDAKTIQVNNPSTGEIIAEVPFMGTLETNDAISSASDAFNSWSKLTAAERSKYLRKWYDLIMAHMEELGLLITFEQGRPSKEALGEVNYGASSIEFFADEANRIYGDIIPATLGDRRLFVLK

SEQ ID NO: 78477 - protein, 49 aa, Gossypium hirsutum
  Clone ID: GOSHI-09MAY01-C2268_3.pep
YPLRPYGFWTFERHNAQLRWDPQISQVPGRRDPYDDLLQDSYASSTKRN

SEQ ID NO: 78478 - protein, 94 aa, Gossypium hirsutum
  Clone ID: GOSHI-09MAY01-C2268_2.pep
MGFIMEFAENLVLRLMEDPKERDRKFREHVYSMKDRCAKTKEMWSYPLRPYGFWTFERHNAQLRWDPQISQVPGRRDPYDDLLQDSYASSSKRN

SEQ ID NO: 78479 - protein, 99 aa, Gossypium hirsutum
  Clone ID: GOSHI-09MAY01-C2268_1.pep
PRPSGRVQIMEFAENLVLRLMEDPKERDRKFREHVYSMKDRCAKTKEMWSYPLRPYGFWTFERHNAQLRWDPQISQVPGRRDPYDDLLQDSYASSSKRN

SEQ ID NO: 78480 - protein, 51 aa, Gossypium hirsutum
  Clone ID: LIB3189-034-P1-K1-A9.pep
NKREKRKKGKEININTRFSANSIMNPILFLFHDLKWRLTEPRSSICRKQRL

SEQ ID NO: 78481 - protein, 303 aa, Gossypium hirsutum
  Clone ID: GOSHI-09MAY01-C2228_1.pep
HASGAQSENPLAQSVPNFSDLRKENTKPSSGAGKVTSHFQARNYARSKSNNEEIALGKDEQSRRSQSHRKSFAGPVDVSDVPALNSDDIGLAPLKFDKEQMGQSFNDKSLKNEEAKPFLWKGNGVGPGAGVKTAKFKASETFATPNGEESDEPEFEADDSMDMANEDEEDELETMAVDDSADMENGRSRLSQESDKLDNSGSEICDSLRSPSQVDPASVAELPAPMLTTFHTAVSLQESPGESPVSWNSRMHNTYSYPQETSDIDASMDSPVGSPASWNSHPLAQTGMDAARMRKKWGSAQKP

SEQ ID NO: 78482 - protein, 213 aa, Gossypium hirsutum
  unsure (1)..(213): unsure at all Xaa locations
  Clone ID: GOSHI-09MAY01-C3948_3.pep
HVVGWYSTGPLLRENDLDIHRLFHNYVPNPVLVIIDVQPKELGIPTKAYYDVEEVKENATQKSQKIFVHVPSEIAAHEVEEIGVEHLLRDVKDTTISTLATEVTGKLTALKGLDARLKEIRSYLDLCIDEKLPLNHEILYHLQDVFNLLPNLNVNDLIKAFAVKTNDMMLVIYLSSLIRSVIALHNLINNKMLNKEHEKAXEDAKPTTVQATS

SEQ ID NO: 78483 - protein, 308 aa, Gossypium hirsutum
  Clone ID: GOSHI-09MAY01-C3948_1.pep
MDVIKTQQISSRPIEKVIVHPLVLLSIVDNYNRVAKDTRKRVVGVLLGSSFKGTVDVSNSYAVPFEEDEKDPSIWFLDHNYHESMFSMFKRINAKEHVVGWYSTGPKLRENDLDIHRLFHNYVPNPVLVIIDVQPKELGIPTKAYYDVEEVKENATQKSQKIFVHVPSEIAAHEVEEIGVEHLLRDVKDTTIITLATEVTGKLTALKGLDARLKEIRSPRVRPRVRKLPLNHEILYHLQDVFNLLPNLNVNDLIKAFAVKTNDMMLVIYLSSLIRSVIALHNLINNKMLNKEHEKAEDAKPTTVQATS

SEQ ID NO: 78484 - protein, 89 aa, Gossypium hirsutum
  Clone ID: uC-gsronu33B147b09b1.pep
ARQKGGLYNLFFVINHKLPLNHEILYHLQDVFNLLPNLNVNDLIKAFAVKTNDMMPVIYLSSLIRSVIALHNLINNKMLNKEHEKAEDA

SEQ ID NO: 78485 - protein, 127 aa, Gossypium hirsutum
  unsure (1)..(127): unsure at all Xaa locations
  Clone ID: GOSHI-09MAY01-C3908_1.pep
SQVAKEMTGGGADYCFECVGLASLVQEAYASCRKXWGKTIVLGVQKPGSQLSLSSFEVLHSGKTLTGPLCGGVKAKSDLPLLLKRYTDNELQVDEFVTHEVKFQDINRAFELLMGGKCIRCVIWMDK

SEQ ID NO: 78486 - protein, 96 aa, Gossypium hirsutum
  Clone ID: GOSHI-09MAY01-C3898_6.pep
LYAWADAWADAWADAWADAWGRSISWVHAWTVRDGIITPVAGDFNTSLTVTRLGDSPPSACSSSTAGIAPVHCPYGWERCLSNRVGKSGPGLGLAI

SEQ ID NO: 78487 - protein, 168 aa, Gossypium hirsutum
  Clone ID: GOSHI-09MAY01-C3898_3.pep
ELANAQQKTVEETNKNQAVVLALYEALNTRDVNTVHQILAPDLEWWFHGPPTHQFLMRLLTGASSDDPFRFEVDPVSVTTFGSTVIVEGCDNSRSISWVHAWTVRDGIITQVREYFNTSLTVTRLRDSPPSACSSSTAEIAPVYCPYVWESSLSNRVGKSVPGLVLAI

SEQ ID NO: 78488 - protein, 170 aa, Gossypium hirsutum
  unsure (1)..(170): unsure at all Xaa locations
  Clone ID: GOSHI-09MAY01-C3898_2.pep
MKSSLLVSVVISLVIVASAANFNQDIDVTWGDGRGKILENGNLLTLTLDKFSGSGFQSKNQYLFGKIDMNIKLVPGNSAGTVTTYYLRSEGSTWDEIDFEFLGNLSGDPYIVHTNVYTQGXGDKEQQFYLWFDPTKDFHNLLLLWNLHVLCTSSFTIPFSKTFQFDMFIC

SEQ ID NO: 78489 - protein, 280 aa, Gossypium hirsutum
  unsure (1)..(280): unsure at all Xaa locations
  Clone ID: GOSHI-09MAY01-C3898_1.pep
MTTSLLLSVLISFVILASAANFNQDIDVTWGDGRGKILENGNLLTLTLDKFSGSGFQSKNQYLFGKIDMNIKLVPGNSAGTVTTYYLRSEGSTWDEIDFEFLGNLSGDPYIVHTNVYTQGKGDKEQQFYLWFDPTKDFHTYSLLWNPQRIIFXVDGTPIREFKNLESMGVAFPKSQPMRVYSSLWNADNWATRGGVVKTDWSKAPFTAAYRNYKADACVWASGKSSCSSTSPSQNSWLSQELDITSQQRLKWVQKNYMIYNYCTDTKRFPQGLPKECSVH

SEQ ID NO: 78490 - protein, 135 aa, Gossypium hirsutum
  Clone ID: uC-gsronu33B110a12b1.pep
MHLVRLVILASAANFNQDIEVTWGDGRGKILENGNLLTLTLDKFSGSGFQSKNQYLFGKIDMNIKLVPGNSAGTVTTYYLRSEGSTWDEIDFEFLGNLSGDPYIVHTNVYTQGKGDKEQQFYLWFDPTIDFHTYS

SEQ ID NO: 78491 - protein, 112 aa, Gossypium hirsutum
  Clone ID: LIB3166-011-P1-K1-B1.pep
AANFNQDIEVPWGDGRAKILETGNLLTLTLDKFSGSGFQSKNQYLFGKIDMNIKLVPGNSAGTVTTYYLRSEGSTWDEIDFEFLGNLSGDPYIVHTNVYTQGKGDKEQQFYL

SEQ ID NO: 78492 - protein, 119 aa, Gossypium hirsutum
  unsure (1)..(119): unsure at all Xaa locations
  Clone ID: LIB3585-067-P1-K1-F12.pep
LTHSKKSWRKPTRTKRCVLALYEALNTRYVNTVXHQILAADLECGFQVPPTHQPXMRLLTGSTSDNPFXYRYCLKYTPHFGFIAIALGCDHSRSIWXVHSWTVLDGTITQVREYLNTYV

SEQ ID NO: 78493 - protein, 65 aa, Gossypium hirsutum
  Clone ID: LIB3145-020-Q1-K1-H4.pep
MLNGSPSHQFLMRLLTGASSDDPFLFEVNPVLVTAFGSTDIVEGCDNSQSISWVHAWTVRDGTIT

SEQ ID NO: 78494 - protein, 64 aa, Gossypium hirsutum
  Clone ID: GOSHI-09MAY01-C3848_5.pep
RFLDLRDDARVRPRVRPRVRFPLTVPVEREADVGEGCDSLLRICCSLLLLLQYAWNFFFKQSLV

SEQ ID NO: 78495 - protein, 150 aa, Gossypium hirsutum
  Clone ID: GOSHI-09MAY01-C3848_4.pep
MSRRKVREPKEENANLGPADAEGEHVLGVAHIFASFNDTFIHVTDLSGRETMVRITGGMKVKADRDESSPYAAMLAAQDVSHRCKELGITALHIKLRATGGNKTRTPGPGAQSALRARARSGMFGGRIQDVTPIPTDSTRRKGGRRGRRL

SEQ ID NO: 78496 - protein, 150 aa, Gossypium hirsutum
  Clone ID: GOSHI-09MAY01-C3848_3.pep
MSRRKVREPKEENTNLGPAVREGEHVFGVAHIFASFNDTFIHVTDLSGRETMVRITGGMKVKADRDESSPYAAMLAAQDVSQRCKELGITALHIKLRATGGNKTKTPGPGAQSALRALARSGMKIGRIEDVTPIPTDSTRRKGGRRGRRL

SEQ ID NO: 78497 - protein, 150 aa, Gossypium hirsutum
  Clone ID: GOSHI-09MAY01-C3848_2.pep
MSRRKVREPKEENTTLGPAVRDGEHVFGVAHIFASFNDTFIHVTDLSGRETMVRITGGMKVKADRDESSPYAAMLAAQDVSQRCKELGITALHIKLRATGGNKTKTPGPGAQSALRALARSGMKIGRIEDVTPIPTDSTRRKGGRRGRRL

SEQ ID NO: 78498 - protein, 150 aa, Gossypium hirsutum; identical to SEQ ID NO: 78496
  Clone ID: GOSHI-09MAY01-C3848_1.pep

SEQ ID NO: 78499 - protein, 94 aa, Gossypium hirsutum
  unsure (1)..(94): unsure at all Xaa locations
  Clone ID: LIB3135-014-Q1-K1-A10.pep
RKAREPKGDNANRGPDAREGEHVKGVAHIFATFNDXIHVTDLCGRETMDRITGGMKVKADRDEAFPYASMLADHDVSHRCKETAITALYIKHRA

SEQ ID NO: 78500 - protein, 49 aa, Gossypium hirsutum
  Clone ID: LIB3828-030-Q6-K6-C8.pep
FNLAVPYTIWFFFCFFFFFFFFFFFFFFFFFFFFFFFFFFFFFFFFSTC

SEQ ID NO: 78501 - protein, 354 aa, Gossypium hirsutum
  Clone ID: GOSHI-09MAY01-C3868_1.pep
NENDVILSKLLKVSVMNLGMASLARSPSAMSITRIPQGHSKILQLLKASKVPYVLPFRRVHIRRSPVCCTKFPQWEPSPATYALTEKAGDKFLDKSSELFETLRSESSDSKDEASITKAEDRTDTTNQPVAQLQFLKWPLWLLGPSVLLGTGMVPTLWLPISTIFIGPNVVSLLSLIGLDCIFNLGCTLFLLMADYCAKSKNLGQASKSKPPVSYQFWNLVATLTGLAIPLMMLFGSQKGYLQPQLPFIPYAVLLGPYILLLSVQMLTEMLTWHWESPIWLVTPVVYEAYRVLQLMRGLKLGVELSAPAWMMHTIRGLVCWWVLILGVQLMRVAWFAGFTARAQRQQSSASADA

SEQ ID NO: 78502 - protein, 62 aa, Gossypium hirsutum
  Clone ID: LIB3135-046-Q1-K1-G8.pep
MLLVLSIGRSRRLLTEMLTWHWESPIWLVTPVVYEAYRVLQLMMGLKLGDALSAPSWMMHTI

SEQ ID NO: 78503 - protein, 247 aa, Gossypium hirsutum
  Clone ID: GOSHI-09MAY01-C3808_1.pep
APFGSVSEQFYGSQDTSPAGDNRYRVVRPLQHDKWSKGKDGFLITDIWGVDAGRSDVTTPIVWLQHTEERMYLCAYQYKSLTLILLIPLSSILNGEQGVSTVKQQLLENASLKILKVEEKLSKGWGGENAYHVSGYRYLIVDGNRDISRASPPAKVTTLTKESFLALNRLREEVDAEKSRSKWDNPGRDKDLEVSIRAKNNAWAIARIIGGKELYMVLEKANETLLYASDAVEKFSNRYCSGAFSLD

SEQ ID NO: 78504 - protein, 146 aa, Gossypium hirsutum
  Clone ID: AI054857.1.pep
FLITDIWGVDVGGSDVTTPIVWLQHTEERMYLCAYQYKSLTLILLIPLSSILNGEQGVSAVKQQLLENASLKILKVEEKLSKGWGGENAYHVSGYRYLIVDGNIDISSASPPSKVTTFTKESLLALNRLRDKVNLKRVHSNGIIQS

SEQ ID NO: 78505 - protein, 66 aa, Gossypium hirsutum
  unsure (1)..(66): unsure at all Xaa locations
  Clone ID: LIB3146-022-Q1-K1-H6.pep
HASAHAXAHSFGNNEIFMCCINVFFTSFGNPSRCYKVCSVFTTDFCGKKYKNKANHLSVACKKCNW

SEQ ID NO: 78506 - protein, 137 aa, Gossypium hirsutum
  unsure (1)..(137): unsure at all Xaa locations
  Clone ID: GOSHI-09MAY01-C3508_1.pep
MESKLQRPQSFRLNRRGDRNNQRPFAKDDESGLFSSMRLPQDNPIKIVWKQGFIRLVLVAGILWMLLILIVLLFHVWSCQSSISFLSAMCNKEGKVFIAMDLLGLAPKPEHRCPIPVADDPDKXVIPEGRTPDAIVK

SEQ ID NO: 78507 - protein, 186 aa, Gossypium hirsutum
  unsure (1)..(186): unsure at all Xaa locations
  Clone ID: GOSHI-09MAY01-C3538_1.pep
MYVLSGDWSIISSPSPKPYPHKPPKCSNCAPLFMKTTAVLVRHHGIYVWGDSWISAKTQAECYHYLFDAAAIKLHHLGLDWSTPDHGPIQNVKGFSSINSVIKRVATKAGTVDSDFKLQPYPRCVVLDIEGTTTPISFVTDVLFPYARDIVGRHLSPTYDSAXLQEVFKLLRSQVEDDLKQGVLCA

SEQ ID NO: 78508 - protein, 141 aa, Gossypium hirsutum
  Clone ID: GOSHI-09MAY01-C3478_2.pep
DSAAQLNGSGNGASHANGTATQSDIFNSQSLVTLSRTGIENLARLENRKEPWLVVLYAPWCRFCQAMEESYVELAEKLAGSGVKVAKFTADGEQKEYAKTELQLGSFPTILFFPKHSSKPIKYASEKRDVDSLMAFINALR

SEQ ID NO: 78509 - protein, 473 aa, Gossypium hirsutum
  Clone ID: GOSHI-09MAY01-C3478_1.pep
ENKDYLFFFFGGLRMAFAVTSSSSSTAISGSSFPRSSASPDPKVPQIGAVRFADRHATVNLSRRRCAVKPVNAEPKRNDSIVPLAATIAAPEISEKIEAEDFEQLAKELDNASSLEIMDKALEKFGNDIAIAFSGAEDVALIEYAKLTGRPFRVFSLDTGRLNPETYRFFDEVEKHYGIRMEYMFPDAVEVQALVRSKGLFSFYEDGHQECCRVRKVRPLRRALKGLRAWITGQRKDQSPGTRSEVPVVQVDPVFEGLDGGYGSLLKWNPVANVDGKDIWNFLRAMNVPVNSLHAQGFVSIGCEPCTRPVLPGQHEREGRWWWEDAKAKECGLHKGNLKEDGAAQVNGNGATTESDIFNSQSLVTLSRTGIENLAKLESRKESWIVVLYAPWCPFCQAMEASYVELAEKLAGSGVKVAKFRADGEQKEYSKNELQLGSFPTILFFPKHSAKPIKYASEKRDVDSLMAFVNALR

SEQ ID NO: 78510 - protein, 160 aa, Gossypium hirsutum
  unsure (1)..(160): unsure at all Xaa locations
  Clone ID: GOSHI-09MAY01-C3418_1.pep
MEAVLKTTGLLSLPPNPTRARSLLNPSQGLKQRLFASKPLGLNGLSVSYKRVPSVVAKPNGLFPEQKSFICKAEAAAAGDGQPLIGETEKKPKFLGIELVTLKKIIPLGLMFFCILFNYTILTDTKDVLVVTAKGSSAEIIPFLKXWVNLPMAVGFMLLY

SEQ ID NO: 78511 - protein, 115 aa, Gossypium hirsutum
  Clone ID: uC-gsronu33B158b04b2.pep
MEAVLQTRGLLSLPPHPTRVRSLLNPSQGLKHRLFASKPLGLNGLSLSYKRVPSVVAKPNGLSPKEKSFICKAEAAAAADGQPLFGEIPTPKFLGTELVTLKKIIPLGLMSFCIP

SEQ ID NO: 78512 - protein, 119 aa, Gossypium hirsutum
  unsure (1)..(119): unsure at all Xaa locations
  Clone ID: uC-gsflmaxxa006c10b1.pep
KERKEEKKKRKKKKREEEKGSRRXKEEKSRRENESKKERKRWIRREKRGRGVRERYEGRKEEEXRRKKERGVREEGERRRRREGEEGREENKGREEEERGRGERKGTNPPQYAVKIFRT

SEQ ID NO: 78513 - protein, 285 aa, Gossypium hirsutum
  Clone ID: GOSHI-09MAY01-C3438_1.pep
VGSPRKFDFPVKDHLQLGKELNLFDFDAAAEVSGSKFYYLKNEAVMLEMALVNWTLTEVMKRGFTPLTTPEGVRSSVVEKCGFQPRGENTQVYSIEDSDQCLIGTAEIPVGGIHMDSIVAESALPLKYVAFSHCFRTEAGAAGTATRGLYRVHQFSKVEMFILCRQEESDMYHEELIKIEEDLFSSLGLHFKILDMATGDLGAPAYRKFDVEAWMPGLERYGEISSASNCTDYQSRRLGIRYRPSESPSTTSKKGKTNVAATKIVHTLNATACAVPRMLVCLLEN

SEQ ID NO: 78514 - protein, 59 aa, Gossypium hirsutum
  Clone ID: GOSHI-09MAY01-C3428_2.pep
PRRPKKSWTRPPIQMEFQVPMFTASGLRVRFLKVWEKSGYNTVEWVRYITKAGSYEIRC

SEQ ID NO: 78515 - protein, 438 aa, Gossypium hirsutum
  Clone ID: GOSHI-09MAY01-C3428_1.pep
MPVAASAIYFLNLRGDVLINRLYRDDVGGNMVDAFRMHIMQTKELGTCPVRQIGGCSFFYMRISNVYIVIVVSSNANVACAFKFVVEAVALFKSYFGGAFDEDAIRNNFVLIYELLDEIMDFGYPQNLSPEIVKLYITQEGVRSPFSSKPSDKPVPNATLQVTGAVGWRREGLVYKKNEVFLDIVESVNLLMSSKGSVLRCDVTGKILMKCFLSGMPDLKLGLNDKIGLEKESQLKSRPAKSGKTIELDDVTFHQCVNLTRFNSEKTVSFVPPDGEFELMKYRITEGVNLPFRVLPTIKELGRTRMEVNVKVKSVFGAKMFALGVVVKIPVPKQTAKTSFQVTSGRAKYNAAIDCLVWKIRKFPGQTEPTLSAEVELISTMAEKKSWTKPPIQMEFQVPMFTASGLRVRFLKVWEKSGYNTVEWVRYITKAGSYEIRC

SEQ ID NO: 78516 - protein, 124 aa, Gossypium hirsutum
  Clone ID: GOSHI-09MAY01-C3798_1.pep
MGEMSSFQLGVIGALFLSVASSVSIVICNKALMSNLGFPFATTLTSWHLMVTFCTLHAAQRFNLFENKSIDIKTVMLFGILNGVSIGFLNLSLGFNSIGFYQMTKLAIIPFTVLLETVFLKKQF

SEQ ID NO: 78517 - protein, 252 aa, Gossypium hirsutum
  Clone ID: GOSHI-09MAY01-C3788_1.pep
MDLAPEELQFLSLTDILRESVAIPKRSPKTFYLITLALIFPLSFAILAHSLFTHPILNQLASDPLADPSQTRHEWTLLLTFQFCYLIFLFAFSLLSTAAVVFTVASLYTSKPVSFTSTISAIPKVFKRLFITFTWVSLLMFVYNALLIGFLVLFVIAVDSRNAFLSFFSFMVILVLFLGVHVYITALWHLASVVSVLEPIYGLAAMKKSYELLKGRAKMAFILVFGYLAICGVIGGIFGSVVVHGRVRYGVL

SEQ ID NO: 78518 - protein, 185 aa, Gossypium hirsutum
  unsure (1)..(185): unsure at all Xaa locations
  Clone ID: GOSHI-09MAY01-C3748_1.pep
GWDFSRTGLRSHLSEQWLVFTEGHQGKDKQKGRHHGLSQQKRQEIKEAFELFDTDGSGTIDAKELNVAMRALGFEMTEEQINQMIADVDKDGSGAIDFDEFVHMMTAKIGERDTKEELMKAFQIIDQDNNGKISADDVKRIAKELGEHFSEKXIQDMIEEADRDHDGEVSIEEFMRMMKKTTYGY

SEQ ID NO: 78519 - protein, 131 aa, Gossypium hirsutum
  Clone ID: LIB3584-038-P1-K1-F7.pep
NLCPTHFWIRILASLYRGASRKDKQKGRHHGLSQQKRQEIKEAFELFDTDGSGTIDAKELNVAMRALGFEMTEEQINQMIADVDKDGSGAIDFDEFVHMMTAKIGERDTKEELMKAFQIIDQDNNGKISAD

SEQ ID NO: 78520 - protein, 66 aa, Gossypium hirsutum
  unsure (1)..(66): unsure at all Xaa locations
  Clone ID: LIB3166-030-P1-K1-A12.pep
MASRYRGASRKDKXKGRHHGLSQQKRQEIKEAFELFDTDGSGTIDAKELNVAMRYEYLCVIFLVFK

SEQ ID NO: 78521 - protein, 199 aa, Gossypium hirsutum
  unsure (1)..(199): unsure at all Xaa locations
  Clone ID: GOSHI-09MAY01-C3778_1.pep
FFPLKSVSSKHPKSPPSVALFNKETLQQQRLRCLGVSCFPGAGGRGVAALRPISKGELLLRFPKSALITTDSLLSRDETLSLAHKSHPSHSSTQVCFCVSVFDICFNLRFNXQNDWTKAICLFSFXKAVDYAIWAAQKAVTKAKYEWEQAFTLMKELKLKPPLLTFRAWIWATGTVSSQCLCFSGFFFFRFYLCWTAST

SEQ ID NO: 78522 - protein, 101 aa, Gossypium hirsutum
  Clone ID: GOSHI-09MAY01-C3738_3.pep
GRCNFFFKRRLFFFFSFLVFLGFRFCSFHCPLARRPVELFTRLGAFGGFFLIFKAFCFRSMEVILSLLAMDSGIYVKVPSYARFLLGISHRLQSGSTILRV

SEQ ID NO: 78523 - protein, 146 aa, Gossypium hirsutum
  Clone ID: GOSHI-09MAY01-C3738_2.pep
MEVYGKTMAVAPANVIYLSTILGRDGPIPVHKCDWKCQNEHVCGNMYRCKLTGITHICDKNCNQRILYDNHSSLCRASGQVFPLTQVEEQAVRGVRRKFDADNSSSSDSCGFKRRRDAQFHPSPFERSFSAVSPIFSQVGDGMDTS

SEQ ID NO: 78524 - protein, 87 aa, Gossypium hirsutum
  Clone ID: GOSHI-09MAY01-C3738_1.pep
MEVYGKTMAVAPANVIYLSTILGRDGPIPVHKCDWKCQNEHVCGNMYRCKLTGITHICDKNCNQRILYDNHSSLCRANGQVFPLTPF

SEQ ID NO: 78525 - protein, 69 aa, Gossypium hirsutum
  Clone ID: LIB3148-019-Q1-K1-F8.pep
LHLIIFFLVFIFLFIYFFFIFLFFYFIYFFFYICFFFFLFFIFLFFMISYFFFSYFFYIINFNLLFFFF

SEQ ID NO: 78526 - protein, 94 aa, Gossypium hirsutum
  Clone ID: LIB3135-058-Q1-K1-A1.pep
TKLPIIVSQTNKLSGKQYLILTESITGHLSSSWFWATINSICSYKCLLPLRKSTSLTHFCNQPNRRMFTIGFSPPSKLQEHGNSHASACTSASP

SEQ ID NO: 78527 - protein, 384 aa, Gossypium hirsutum
  Clone ID: GOSHI-09MAY01-C3728_1.pep
FSAILPLLKLLSLTVIGLFLAHPKTQIIPRATFKLLSKLVFALFLPCLIFTELGESITIDSIARWWFIPVNVLISTFVGCLPHASAHASGRPPPEYKRFTIVMTGFGNTGNLCLAIVGSVCHTSNSPFGPHCHSRGVAYVSFAQWVAVILVYTLVYHMMEPPLQFYEVLEEGTEIEEQRPVNDISRPLLIQAEWPGIEDKETEHSKTPFIARIFNSISSRSTSTFPDIDINGDTSGSSPMSIRCLAEPRVVRKIRIVAEQTPIQHILQPPTIASLLAIIVGTVPQLKSYVFGYDAPLSFITDSLQIVAGAMVPSVMLILGGMLAEGPNDSKLGLRTTIGIIVARLLVLPLLGIGIVTLASKLDLLVADDAMYRFVLLLQYTTPS

SEQ ID NO: 78528 - protein, 116 aa, Gossypium hirsutum
  unsure (1)..(116): unsure at all Xaa locations
  Clone ID: LIB3583-015-P1-K1-A2.pep
LNFIKIDMKSNRVDLFSAILPLLLLLSLTVIRLFLAHPKTQIIPRATFKLLSKLVFALFLPCLIFTELGDSITIDSIARRWFIPVNVLISTFVGCLLGLXVVIICRPPPEYKRFTI

SEQ ID NO: 78529 - protein, 199 aa, Gossypium hirsutum
  Clone ID: GOSHI-09MAY01-C3658_1.pep
QHDSLLRYQLIRVQARGFGENCKWLEMFEDVGMVIFCVSLSDYDQYSADGTNKMLLSKKFFETIVTHPTFEQMDFLLILNKFDIFEEKVERVPLTRCEWFDDFHPLISRHRTNTNSNSINNNPTLGQLAFHYVAVKFKRLYSSLTGRKLYVSHVKGLEPNSVDAALKFAREILKWDEERINFSLSEHSFYSTEASSFSH

SEQ ID NO: 78530 - protein, 231 aa, Gossypium hirsutum
  unsure (1)..(231): unsure at all Xaa locations
  Clone ID: GOSHI-09MAY01-C3648_1.pep
AKLMFAQFSEXLVNDFYNNGLPSNLSGGPNPSLDYGFKGXAEIAMASYCSELQHLANPVTNHVQSAEQHNQDVNSLGLISSRKTAEAVDILKLMSSTYLVALCQAIDLRHLEENLKNTVKNIVSQVAKKTLTTGPNGELHPSRVCEKDLLKAVDHEYVFSYIDDPCSATYPLMQKLRQVLVDHALSNGNNENNASTSIFQKIAAFRKIEDLLRRSQNLVHQNGTHIPTDPN

SEQ ID NO: 78531 - protein, 301 aa, Gossypium hirsutum
  unsure (1)..(301): unsure at all Xaa locations
  Clone ID: GOSHI-09MAY01-C3678_1.pep
LTFNPRSPVSALRATALMSNEVKPEQFAVLVRDLPNATSGQTRKQQVDTYFKSIYPETFYRSMVVTNNKEVDKIWGELEGFKKKLARAEAIYALSQGNGQGTRPTNRTGFLGLCGKKVDSIEYYNEKIKELTQKLEAEQKVTLREKQQGSALVFFTSRVTAALAAQSLHAQMVDNWTVTEAPEPRQLIWSNLTIKFYNRIIRQYVVYIVVFLTIVFYMIPIAFISAVTTLKNLRKLLPFLKPIVDIAALKTVLEAYLPQLALIIFLALLPKFLFFLSKTEGIPMXSHVIRAASGKYFYFIV

SEQ ID NO: 78532 - protein, 156 aa, Gossypium hirsutum
  Clone ID: GOSHI-09MAY01-C103603_1.pep
MNTKTMRLPPRRVFMPSNNVKRKERDDFDLQHLHLRPPPAKLPKPAAPLAASQKAARPVLSNQLLAGHAADEFLTRETLFGQPWDPAQLQQPATDSRRGIKEDAEPSDRSRAGDFESKPREDNHQRYVEVASLLKTDGAHIPGIVNPTQLARFLQM

SEQ ID NO: 78533 - protein, 223 aa, Gossypium hirsutum
  Clone ID: GOSHI-09MAY01-C3188_1.pep
MQAKITVTETWLRKHRHLYDGATRHPFIRSIRDGNIDISAFKTWLGQDYIFVRAFVPFVASVLTKAYKGSDDGNGDVEVILGGVAALHDEISWFKKEAFKWGVQLSSIVPQKANQEYCRFLESLISPEVEYTVAAVAFWAIETIYQESFAHCLEDDSKTPPELKETCQRWGNESFGEYCNSLRNIVDRQLEKASDDVITKAEATLLRVLEHEVDFWNMSHRRT

SEQ ID NO: 78534 - protein, 119 aa, Gossypium hirsutum
  Clone ID: LIB3583-016-P1-K1-C2.pep
MQAKITVTETWLRKHRHLYDGATRHPFIRSIRDGNIDISAFKTWLGQDYIFVRAFVPFVASVLTKAYKGSDDGNGDVEVILGGVAALHDEISWFKKEAFKWGVQLSSIVPQKANQEYCR

SEQ ID NO: 78535 - protein, 207 aa, Gossypium hirsutum
  Clone ID: GOSHI-09MAY01-C3148_1.pep
MDGNGRVHPDCPNAANPYHECGGLCLEKIAEGKGPKAKETKKSLSSKFLDASRSFGRKKKGSDSLLRSPKALETTPAIGAVYPGGPRSPRSHFSRKKMEAENGESYSSSEQHSGEIYSQDQSFEKAPIQYSQPLHMSGKITPPADTPTKFTQTEKVKDSPKMSSDANMNDEKVNAISSAFSFLIGQDHEESDDEAAEVDPYLDQCIV

SEQ ID NO: 78536 - protein, 136 aa, Gossypium hirsutum
  Clone ID: LIB3583-014-P1-K1-D8.pep
QHLGLSKRDTLPSIKAVTFHMSSTFTVDVQYSDVSDLQAHSNISTHTIGPFPTIRSERPKLKVKVRLNLHGIVSVESATLLEEEEVEVPVSKEPEKDNSKMETDEAPGGTAAPSANETDVNMQDAKGTADATGADN

SEQ ID NO: 78537 - protein, 61 aa, Gossypium hirsutum
  Clone ID: LIB3583-014-P1-K1-D7.pep
PYYKLLILGNPFFTVCSTLKRNKALSEESNSTTSLACVVESTFLLHVVISMFPSVRNGILL

SEQ ID NO: 78538 - protein, 50 aa, Gossypium hirsutum
  Clone ID: LIB3583-014-P1-K1-D2.pep
HQYTLYRAYSDLILGNPFFTVCSTLKRNKALSEESNTTTSLACVVESTFL

SEQ ID NO: 78539 - protein, 226 aa, Gossypium hirsutum
  Clone ID: GOSHI-09MAY01-C3078_2.pep
PRVRYKDTGQHFNGEFSMAVGQANNLLEDQSQLESGCLSSHECGPYGTFVGVYDGHGGPETSRYINDHLFQHLKRFTSEQQTMSVDVIQKAYQATEEGFLSLVTRQWPMNPQIAAVGSCCLAGVICGGTLYVANLGDSRAVLGRAVKATGKVLAVQLSAEHNACIESVRQELQSLHPDDSQIVVLKHNVWRVKGLIQISKSIGDVYLKKAEFNREPLYPRFRLREP

SEQ ID NO: 78540 - protein, 242 aa, Gossypium hirsutum
  Clone ID: GOSHI-09MAY01-C3078_1.pep
HASGGTNLYVANLGDSRAVLGRAIKETEEHLAIQLSAEHNACIESVRQELQLLHPDDSQIVVLKHNVWRVKGLIQISRSIGDVYLKKAEFNREPLYPKFRLREPFKKPILSADPSISVHKLLPHDKFAIFASDGLWEHLTNQEAVDIVQKHSRTGSARRLVKTALQEAAKKREMRYSDLKKIDRGVRRHFHDDITVIVLFLDSNLISKASSVKGPNISVRGGGINFPSNTLAPCTTPTETTG

SEQ ID NO: 78541 - protein, 168 aa, Gossypium hirsutum
  unsure (1)..(168): unsure at all Xaa locations
  Clone ID: GOSHI-09MAY01-C3008_6.pep
EGSQLQRGGQHSALERQPSEAGAQTDKDYKEPTPAPTDEPGEHEARHTTEPRIADYXATYSFLYITDKTVMGVSQSKTKCTTEGEQGTEWASGGKIFAHAQWSAGISGGQINPAVTFGLLLARKLALTRAVFYMIMQCLGAICGAGVVKGFQGDNRYEMLGGVFLVYT

SEQ ID NO: 78542 - protein, 287 aa, Gossypium hirsutum
  Clone ID: GOSHI-09MAY01-C3008_2.pep
MEGKEEDVKLGANKFSERQPIGTSAQTDKDYKEPPAAPFFEPGELKSWSFYRAGIAEFVATFLFLYITVLTVMGVSQSKTKCATVGIQGIAWAFGGMIFALVYCTAGISGGHINPAVTFGLFLARKLSLTRALFYMIMQCLGAICGAGVVKGFQGDNRYEMLGGGANVVNHGYTKGDGLGAEIIGTFVLVYTVFSATDAKRNARDSHVPILAPLPIGFAVFLVHLATIPITGTGINPARSLGAAIIYNKDHAWDDHWIFWVGPFIGAALAAIYHQIIIRAIPFKTRA

SEQ ID NO: 78543 - protein, 287 aa, Gossypium hirsutum
  Clone ID: GOSHI-09MAY01-C3008_1.pep
MEGKEEDVKLGANKFSERQPIGTSAQTDKDYKEPPPAPLFEPGELKSWSFYRAGIAEFVATFLFLYITVLTVMGVSQSKTKCTTVGIQGIAWAFGGMIFALVYCTAGISGGHINPAVTFGLLLARKLSLTRAVFYMIMQCLGAICGAGVVKGFEGDSRYEMLGGGANVVNHGYTKGDGLGAEIIGTFVLVYTVFSATDAKRNARDSHVPILAPLPIGFAVFLVHLATIPITGTGINPARSLGAAIIYNKDHAWDDHWVFWVGPFIGAALAAVYHQIIIRAIPFKTRD

SEQ ID NO: 78544 - protein, 104 aa, Gossypium hirsutum
  Clone ID: AI728189.1.pep
MEGKEEDVKLGANKFSERQPIGTSAQTDKDYKEPPAAPFFEPGELKSWSFYRAGIAEFVATFLFLYITVLTVMGDNYFMNMLIIIIIIAINFYVCHVDIHIFEY

SEQ ID NO: 78545 - protein, 59 aa, Gossypium hirsutum
  Clone ID: LIB3584-033-P1-K1-F8.pep
DAWVGGGANVVNHGYTKGDGLGAEIIGTFVLVYTVFSATDAKRNARDSHVPVCTIFYLP

SEQ ID NO: 78546 - protein, 87 aa, Gossypium hirsutum
  unsure (1)..(87): unsure at all Xaa locations
  Clone ID: LIB3146-003-P1-K1-G7.pep
LTYSVSDIPGXDSTPSRVFFCLLMPKSKCSETSHXFLSVARTSALGFARVLRFTLATTSHHLEPGINPSIGSLGACHHILIKDHALG

SEQ ID NO: 78547 - protein, 149 aa, Gossypium hirsutum
  Clone ID: LIB3197-054-Q1-M1-D3.pep
HASAHASAHASAHASGANKFSERQPIGTSAQTDKDYKEPPAAPFFEPGELKSWSFYRAGIAEFVATFLFLYITVLTVMGVSQSKTKCATVGIQGIAWAFGGMIFALVYCTAGISGGHINPAVTFGLFLARKLSLTRALFYMIMQCLGAI

SEQ ID NO: 78548 - protein, 81 aa, Gossypium hirsutum
  Clone ID: LIB3120-043-P1-K1-C3.pep
FEPGELKSWSLYLIPKMTHRAAFLFLYITVLTVMGVSQSKTKCATVGIQGIAWAFGGMIFALVYCTAGISGGHINPAVTFG

SEQ ID NO: 78549 - protein, 51 aa, Gossypium hirsutum
  Clone ID: uC-gsronu33B074b09b1.pep
NETHTHTDLIISISGLEWNSSNDYLVVNCSKCSSNEGSKKRGRAPPPITRI

SEQ ID NO: 78550 - protein, 143 aa, Gossypium hirsutum
  Clone ID: GOSHI-09MAY01-C3028_2.pep
MSSHHLSELDSTTDSVASSPRSEHHAPHDARVRFMCSFGGKILPRPHDNQLRYAGGDTRIVAVHRSTSFAAILTKLSKLSGIANVSVKYQLPNEDLDALISVMTDEDLENMMEEYDRLAQNHNPRLRIVLFSKGDDSRTSSIS

SEQ ID NO: 78551 - protein, 419 aa, Gossypium hirsutum
  unsure (1)..(419): unsure at all Xaa locations
  Clone ID: GOSHI-09MAY01-C3028_1.pep
MSSHHLSELDSTTDSVASSPRSEHHAPHDARVRFMCSFGGKILPRPHDNQLRYAGGDTRIVAVHRSTSFAAILTKLSKLSGIANVSVKYQLPNEDLDALISVTTDEDLENMMEEYDRLAQNHNSRLARLRIFLFSKGDDSRTSSISSLLDGSVNREHWFLDALNSGANASGLERGRSEVSSFVSEVPDYLFGLDNSDEAQPRGPNLSTRQLLHENVSVSDPGSPAPVVSSSPFCSTSSAPVVVPSMPDLPPVKTKPDNPEPGFESKQNQTESLVEQPVLQPTTYSGSPMWHYIPGSHYSVPPAQQIPVYYVPGPVXPGNPQVQPVQIRPQYVQQYPMSTGQIPVGYHRPVAGVGQGYRPVTHVDPYDPALRVAPDGVKQPIYYGVRNAGAVPVYSGIVVPGGEELGRSGSDSTRGRVSQ

SEQ ID NO: 78552 - protein, 60 aa, Gossypium hirsutum
  unsure (1)..(60): unsure at all Xaa locations
  Clone ID: LIB3148-054-Q1-K1-G10.pep
KGAPPXFFILFSIIFVFAQRKHYYIYIFRENLLTFYTFCFKIRSHSQLHTREYLHFASIP

SEQ ID NO: 78553 - protein, 425 aa, Gossypium hirsutum
  unsure (1)..(425): unsure at all Xaa locations
  Clone ID: GOSHI-09MAY01-C3348_1.pep
MLRYDSTSSSAGSSSGSLSSSSSSSKPPQQDIDGLLAGAGYKVRSSELRQVAQRLERLETAMGNSPADFSQLASDAILYNPSDLACWVDSLLTEFAEPPPTCSSDFIVDPVNNQTVVNSAWTTAEPHTPQVHQNITYDEQQSLDNQLTVVTAMEEDSGIRLVHMLMTCAECVQSGDLSLATSLIGDMQGLLTHVNTVCGIGXVAGHFIDALSRRIFQGRAVALSTVARLXENEILHHHFYEACPYLKFAHFTANQAILEAFDGHDCVHVVDFNLMHGLQWPALIQALALRPGGPPLLRLTGIGPPSPDGRDSLREIGLRLAELARSVNVRFAFRGVAASRLEDVKPWMLQVNPKEAVAVNSIMQLHRLLGSDPNRNSPIETVLSWIRSLNPKIMTVVEQEANHNQPGFLDRFTEALHYYSTMFDS

SEQ ID NO: 78554 - protein, 134 aa, Gossypium hirsutum
  Clone ID: GOSHI-09MAY01-C3378_2.pep
LIGGYRVVGSGEMDKTAQEKEPKTLPASSSQEPSSTTNSAGPANADWSGFQQAYSPIPPHGFLASSPQAPPYMWGVQHIMPPYGTPPHPYVAMYPHGGIYAHPSIPPGSYPFSPFAMPSPNGIVEASGNTPGNM

SEQ ID NO: 78555 - protein, 131 aa, Gossypium hirsutum
  Clone ID: LIB3583-050-P1-K6-D10.pep
MGSSEMDKAAKEKEPKTPPAITAQESSSTTNSGSVNAEWSGFQAYSPIPPHGFLASSPQAPPYMWGVQHIMPPYGTPPHPYVAMYPHGGIYAHPSLPPGSYPFSPFAMPSPNGIAEASGNTPGCLELYGKP

SEQ ID NO: 78556 - protein, 121 aa, Gossypium hirsutum
  Clone ID: GOSHI-09MAY01-C103323_1.pep
QTLVPEPLRATASAEEFMKQLPEFDKDLAKERQDAEESGEVLRYVGVVDAINQKGVVELRRYSKSHPFAQLSGSDNIIAFTTKRYKEQPLIVRGPGAGAQVTAGGIFSDILRLASYLGAPS

SEQ ID NO: 78557 - protein, 208 aa, Gossypium hirsutum
  Clone ID: GOSHI-09MAY01-C3338_1.pep
MASRDATVEPITSSVSDTMLPSETGETKLPVKKIPGDYGLPFIGPIKDRLDYFYNQGRDKFFKSKIQKYQSTVIRTNMPPGPFIASNPKVIALLDGKSFPILFDVSKVEKENLFTGTYMPSTNLTGGYRILSYLDPSEPTHTMLKQLLFFLLKSSSNRVFPEFEACYTELFKTVENELNEKGQSSFEKPNEQAAFNFLGRAYFGSKPG

SEQ ID NO: 78558 - protein, 86 aa, Gossypium hirsutum
  Clone ID: GOSHI-09MAY01-C3298_7.pep
NLDKVPHSTILTIPSIKQAQKQSKRITSIYHYYKHQAYCFWKRFHTTLILVILLFNCSQPLQEVVVDALLYRRSQEELATIRVAPK

SEQ ID NO: 78559 - protein, 131 aa, Gossypium hirsutum
  Clone ID: GOSHI-09MAY01-C3298_5.pep
MSWQTYVDDHLLCDIEGNHLSAAAIIGQDGSVWAQSSNFPQFKQEEINGIMNDFSEPGSLAPTGLYLGGTKYMVIQGEPGAVIRGKKGPGGVTVKKTNQALIIGIYDEPMTPGQCNMVVERLGDYLIDQGL

SEQ ID NO: 78560 - protein, 131 aa, Gossypium hirsutum
  Clone ID: GOSHI-09MAY01-C3298_4.pep
MSWQAYVDDHLMCEIEGNHLSAAAIIAHDGSVWAQSASFPQLKPEEISAIMNDFNEPGSLAPTGLHLGGTKYMVIQGEPGAVIRGKKGPGGVTVKKTNMALIIGIYDEPMTPGQCNMIVERLGDYLLEQGL

SEQ ID NO: 78561 - protein, 131 aa, Gossypium hirsutum
  Clone ID: GOSHI-09MAY01-C3298_3.pep
MSWQTYVDEHLMCEIDGNHLSSAAIVGHDGSIWAQSSNFPQFKQEEINAIMNDFAEPGSLAPTGLYLGGTKYMVIQGEPGYVIRGKKGSGGITIKKSNMALLIGIYDEPMAPGQCNMVVERLGDYLIDQGF

SEQ ID NO: 78562 - protein, 131 aa, Gossypium hirsutum
  Clone ID: GOSHI-09MAY01-C3298_2.pep
MSWQAYVDDHLMCEIEGNHLSAAAIIGQDGSVWAQSASFPQLKPEEISAIMNDFNEPGSLAPTGLHLGGTKYMVIQGEPGAVIRGKKGPGGVTVKKTNMALIIGIYDEPMTPGQCNMIVERLGDYLLDQGY

SEQ ID NO: 78563 - protein, 131 aa, Gossypium hirsutum
  Clone ID: GOSHI-09MAY01-C3298_1.pep
MSWQAYVDDHLMCDIEGNHLSAAAIIGQDGSVWAQSSNFPQFKPEEITGIMNDFAEPGSLAPTGLYLGGTKYMVIQGEPGAVIRGKKGPGGVTVKKTNLALIIGIYDEPMTPGQCNMIVERLGDYLIDQGL

SEQ ID NO: 78564 - protein, 131 aa, Gossypium hirsutum
  Clone ID: LIB3584-016-P1-K1-G9.pep
MSWQAYVDDHLMCDIEGNHLSAAAIIGQDGSVWAQSSNFPQFKPEEITGIMNDFAEPGSLAPTGLYLGGTKYMVIQGEPGAVIRGKKGPGGVTVKKTNLALIIGIYDEPMTPGQGNMIGERLGDYLIDQGL

SEQ ID NO: 78565 - protein, 124 aa, Gossypium hirsutum
  unsure (1)..(124): unsure at all Xaa locations
  Clone ID: LIB3585-038-P1-K1-A1.pep
MSWQAYVDDHLMCDIEGNHLSAAAIIGQDGSVWAQSSNFPQFKPEEITGIMNDFAEPGSLAPTGLYLGGTKYMVIQGEPGAVIRGKKGPGGVTVKKTNLALIIXIYDEPMTPGQCNMIVERLGD

SEQ ID NO: 78566 - protein, 119 aa, Gossypium hirsutum
  unsure (1)..(119): unsure at all Xaa locations
  Clone ID: LIB3584-010-P1-K1-B12.pep
MSWQTYVNNHGGGGVXSFHXSXXXIIXQDGSVWAQSSNFPQFKQEEINGIMNDFSEPGSLAPTGLYLGGPEYMVIQGEPGAVIXGXEGPGGVTVKKTNQALVIGIFDEPLTPGPCNLVV

SEQ ID NO: 78567 - protein, 107 aa, Gossypium hirsutum
  unsure (1)..(107): unsure at all Xaa locations
  Clone ID: uC-gsronu33B002h02b1.pep
MSGQAAVNDHCVSDFGDNHLSAVXYIGHDGSVWAHSVQSXPHFKPEEITGIMNDFAEPGSLAPTGLYLGGTKYMVIQGEPGADIRGKKGPGGGTGQKTNLGLIIGIY

SEQ ID NO: 78568 - protein, 76 aa, Gossypium hirsutum
  Clone ID: uC-gsflnu33B064e03b1.pep
MSWQAYVDDHLMCEIEGNHLSAVAIIGQDGSVWAQSASFPQLKPEEMRAIMNDFNEPLSLITTEVYDEGALYMVIQ

SEQ ID NO: 78569 - protein, 467 aa, Gossypium hirsutum
  unsure (1)..(467): unsure at all Xaa locations
  Clone ID: GOSHI-09MAY01-C3288_1.pep
MNEKASVTKELNARHRKIIESLLKLPENRECADCKAKGPRWASVNLGIFICMQCSGIHRSLGVHISKVRSATLDTWLPEQVAFIQSMGNEKANSYWEAELPPNYDRVGIENFIRAKYEEKRWVPRDGKSKSPSRRLDERAPSHWQRPTETXGHGHLSNSENSFEERRNKQALGQKENLPATRVSLPVPPKGPDQVPPVQKPEPVVAPAEATKPAVETAPVAIAPKVDPAPPLFNMLSLDDGPSENGSEATSTDDWAGFQSAAGGASTTDEPNPPKPAESNTKSTSGIEDLFSDLPPLTTNQVPEKPQKDVKNDIMSLFEKSNMVSPFAMHQQQLAMLAQQQSLLMAAAAKSAPGNAQQPPSNGTNIPSQAWPNIGYQFPGMMMPVAGQADLQKLMQAMNMGQTQTANSSAYPSSSFYGLGQVAPSNAVATTGASKPQSASPAPSPNPSQTGNDYDFSSLTQGMFTKH

SEQ ID NO: 78570 - protein, 50 aa, Gossypium hirsutum
  unsure (1)..(50): unsure at all Xaa locations
  Clone ID: LIB3135-003-Q1-K1-F8.pep
RKPIQPKLSFIKVLAYKSTHTSLKYEKXGXXPQLKLHLHMVYNQIPCRGP

SEQ ID NO: 78571 - protein, 261 aa, Gossypium hirsutum
  Clone ID: GOSHI-09MAY01-C3248_1.pep
MDGSKPVMEETETEGQVPMEAETGAAEVKDQVQVEEDVRLEADQLVGDNPDSVAQQAIEDTSKALIVVGAQNEEKMKPEESVGVEDKSLAETDTGMGVVDHDDEGGDGGVGGGPIHSHDNGLYGSPNSDMKPQDDDHGIDNGEQLKDLSTEREMNMQLATELGDKNPNLCFDNSGSDTEEEQAAFVKEVEAFYKEKNLEFKHPKFYKEDLNLLKLWRAVIKLGGYEQVTSCKLWRQVGESFNPPKTCTTVSWTFRIFYEKA

SEQ ID NO: 78572 - protein, 65 aa, Gossypium hirsutum
  Clone ID: GOSHI-09MAY01-C3268_1.pep
AELILRIPLAMEPQTDFLAWNREHSGDFSVRSAYKLLQSGDPRAYIVQNVYRDFYKKTLVHRSTY

SEQ ID NO: 78573 - protein, 82 aa, Gossypium hirsutum
  Clone ID: LIB3825-013-Q1-K6-B3.pep
GHCFMLMDLWVGSQNALLWVPDSKRRASGGVQGWWYTHSQKHLFVMCVYSLSQRGGFFLCRSSHRVSKGLMIFTRWSPEPQS

SEQ ID NO: 78574 - protein, 424 aa, Gossypium hirsutum
  Clone ID: GOSHI-09MAY01-C3218_1.pep
FLDNLTNIYVRFNRKRLKGRTGEEDCRMALSTLYNVLLPSCKVMAPFTPFFTEVLYQNMRKICDGAEESIHYCSFPQEEGKRGERIEESVARMMKIIDLARNIRERHNKPLKTPLREMVVVHPDEDFLGDIVGKLREYVLEELNIRSLVTCKDTLKYASIRAEPDFSVLGKRLGKAMGAVAKEIKAMSQEDILALTKAGEVTIATHCLKLTEIKLVREFKHPDGMTDKEMDAAGDGDVLVVLDIRPDESLFEAGVAREVVNRIQKSRKKAGLEPTDMVEVYFESLDEDKSVIQQVLNSQENYIKDAIGSPLLSSDIMPLHAVVLSEEIFHGIYNMSFKISLVRPALVFKANSILALYAGNSKFAQGLQIYLLSRDHSCLKSEFQLGRGKIKVDCIENLPAVEVKLGEHVFLTVGDYYLTERKSH

SEQ ID NO: 78575 - protein, 60 aa, Gossypium hirsutum
  Clone ID: LIB3147-031-Q1-K1-D7.pep
MPKRLLVFLKYETFSSHNNLIGKYHICPALDSLIFCKLDLILCAQSEAQNINTYNRWLFR

SEQ ID NO: 78576 - protein, 182 aa, Gossypium hirsutum
  Clone ID: LIB3582-032-P1-K1-G4.pep
TSLLSFSVCLLVLFHGCCAQIDLVTNHHQDPPWGQPQQPQPRHQSQCQLQNLNALQPKHRFRSEAGETEFWDQNEDQFQCAGVAFLRHKIQRKGLLLPAGVAHWIFNNGRSQLVLVALVDVGNDANQLDENFRKFFLAGSPQGGVVRGGQSRDRNQRQSRTQRGEREEEESQESGGNNVLSG

SEQ ID NO: 78577 - protein, 178 aa, Gossypium hirsutum
  unsure (1)..(178): unsure at all Xaa locations
  Clone ID: LIB3583-015-P1-K1-E11.pep
PRRAXSSLLSFSVCXLVLFQGRGALIDLVSFLLLVPPRGLPLLPLPRLLSLSLLLXLVCSSAFAPVLVCELGVSVFWVLFSGSFPXAGVAFLRHXFLRXSLLLPSFTCAPMLFYVVLGEGIHGAVFPGCPETYQSQSLHYIHDWPLRDLLHKLRRLXEGDVVALPAGVAHWIFNNGRS

SEQ ID NO: 78578 - protein, 102 aa, Gossypium hirsutum
  unsure (1)..(102): unsure at all Xaa locations
  Clone ID: LIB3583-015-P1-K1-C11.pep
SEAGVSVFWVLLVVLFLSAGVAFLRHMILRLGLLLPSFTCAPMLFYVVLGEGILGAVFPGCPESYLSLSHLFILVRPLRVLHLXLSRLXEGVEVALPAGVAH

SEQ ID NO: 78579 - protein, 163 aa, Gossypium hirsutum
  unsure (1)..(163): unsure at all Xaa locations
  Clone ID: LIB3583-015-P1-K1-D1.pep
LVLFQGCXALIDLVSIHLLDPPRGLPLQPQPRLLSLSHLQFXYALQPMHRFXSEXLGVTEFWVLXVDLFLRAGVAFLRHKILRLGLLLPSFTRAPMLFYVVQGEGIHGAVFPGCPETYQSQSLLYILDRPHRVLHQXLRRLXEGDVVALPAGVAHWIFNNGRS

SEQ ID NO: 78580 - protein, 135 aa, Gossypium hirsutum
  unsure (1)..(135): unsure at all Xaa locations
  Clone ID: LIB3583-015-P1-K1-H10.pep
LVLFQGCXALIVLVTKHLLVPPWGLPLLPLPRLLSLSLLLILYALLPMLRFXSVAGVSVFWVLXVVLFLCAGVAFLRHMFLRLGLLLPSFSXAPMLFYVDLGEGFLGAVFPGCPETYLSLSLLFFLDRPLRDLLL

SEQ ID NO: 78581 - protein, 159 aa, Gossypium hirsutum
  unsure (1)..(159): unsure at all Xaa locations
  Clone ID: LIB3583-026-P1-K1-H6.pep
ALIGLVSNHHQDPPXRELPLLPLPRHQSQSLLQXRIALLPMLRFXVCELSVSVFXNHKEVLFLSAESTFLRHKIQRLSLLLPSFTNAPMLVYVDQREGIHGTVFPGSPETYLSQSQLNILNKPQRDQHQKLXRLNKGDVVALPAGVAHWIFYNGRSQLV

SEQ ID NO: 78582 - protein, 70 aa, Gossypium hirsutum
  Clone ID: GOSHI-09MAY01-C18_7.pep
QIRVPTHSTKHVYLVFQNKRNNTTSLSLNRSELSILAKPRLYLVLYCWWVCLFPKITSLHFLCFFQMDVF

SEQ ID NO: 78583 - protein, 54 aa, Gossypium hirsutum
  unsure (1)..(54): unsure at all Xaa locations
  Clone ID: GOSHI-09MAY01-C18_8.pep
AHGHELPRYGLEVGLTNYAAADCVGLLLARRTLKXLEMDAEYEGNVGVCICPGF

SEQ ID NO: 78584 - protein, 200 aa, Gossypium hirsutum
  Clone ID: GOSHI-09MAY01-C18_9.pep
LRLPPHLLHLPVDEAIKSELETLFLDKVIAKLGLCISVYDIRSIKGGFIFPGDGASTYTVEFRLIVFRPFIGEIIVAKLKESDASGLRLSLGFFDDIYIPVHLLPTPSRFEAIPNTRNQGRWIWDFGDAEEAQSEEPRFVIDGSDPIKFRVDSVIYPSIPLEQPENSKPFAPMVITGTINYDGLGPVSWWEEAEMIQEDE

SEQ ID NO: 78585 - protein, 224 aa, Gossypium hirsutum
  unsure (1)..(224): unsure at all Xaa locations
  Clone ID: GOSHI-09MAY01-C18_10.pep
MTLAACASHKTRLLKKARVKAMPFVKAQKTKAYFKRYQVKFKRRREGKMDYQAKSRLINQDKNKYNTPKYCLVARFTNKDIIAQIIHASISGDIVLAAAYGHELPHYGLEVGLTNYAAAYCVGLLLARRTLKQLEMDAEYEGNVEATGEDYSVEPRESRRPFRSLLNVGLVRTTTGNRVFGCVQGXPLDGGIDIPHIEKKFAGFNKDSKQLDPEVHRKYIYGGH

SEQ ID NO: 78586 - protein, 282 aa, Gossypium hirsutum
  unsure (1)..(282): unsure at all Xaa locations
  Clone ID: GOSHI-09MAY01-C18_11.pep
SVRLSENFKKFFLXGSPQXSVVRGSQSXVRNQRAKXSLRGVREVVESLEIGGYNVLXGFRDNLLAQAFGIDTWLARDATFRKRFLGCHCLNGAWIREAQRVEAESREGVVVRVPLRXERLDSLDEGSEVVVRVVRGXVSVESSFSLDETFCSMXCNSXSPASSADVFNPRRGRITTVNSFNLPILQYLQLSAERRVLYNNAIYAPHWNMYAHCIVFISRGYGXILIVSVYGEALFVVLVERGLVISVPQYHAVVFLASKRGFEWIAFXTNANAKICQIAGRV

SEQ ID NO: 78587 - protein, 193 aa, Gossypium hirsutum
  unsure (1)..(193): unsure at all Xaa locations
  Clone ID: GOSHI-09MAY01-C18_12.pep
LVLFHGCXAQIDLVSNHHQDPPRGXPLQPQPRLQSQSLLQNLKALQPKHRFKSEXAGETEFWDQXEDLFLXAGVAFLRHMIQRKGLLLPSFTRAPMLFYVEQREGFHGAVFPSCPETYQSLSQLNIHDWPQRDLHQKLRRLXEGDVVALPAGVAHWIFNNGRSQLELVALVDVGNDANQLDENFKKFFLAGSP

SEQ ID NO: 78588 - protein, 181 aa, Gossypium hirsutum
  Clone ID: GOSHI-09MAY01-C18_13.pep
MVKICCIGAGYVGGPTMAVIALKCPEIQVAVVDISVPRISAWNSDTLPIYEPGLDEVVKKCRGKNLLFSSDVEKYVSEADIVFVSVNTPTKTQGLGAGKAADLTYWESAARMIADVSKSNKIVVEKSTVPVKTAEAIEKILTHNSKGINFQILSNPEFLAEGTAIQDLFEPDRVLIGGRET

SEQ ID NO: 78589 - protein, 56 aa, Gossypium hirsutum
  Clone ID: GOSHI-09MAY01-C18_14.pep
MHTRLAADAIGWFDCGMFMLKYIDFYSRGLSLCFEQEHMPYFRLRTAKKILKLKAD

SEQ ID NO: 78590 - protein, 301 aa, Gossypium hirsutum
  unsure (1)..(301): unsure at all Xaa locations
  Clone ID: GOSHI-09MAY01-C18_15.pep
MPYVKAQKSKAYFKRYQVKFKRRREGKTDYRARNRLINQDKSKYNTPKYRFVARFTNKDIVAQIIHASISGDIVLAAAYAHELPRYGLEVGLTNYAAAYCVGLLLARRTLKQLEMDAEYEGNVEATGEDFTVEPAETRRPFRALLDVGLIRTTTGNRVFGVLKGALDGGIDIPHGDKRFAGFNKDSKQLDPEVHRKYIYGGHVAAYMRTLMEDEPEKYQSHFSEYIKRSIEPDTIEGMYKKVHTAIRASPEAKKSKKXPPKEHKRYNLKKLSYEERKAKLIDRLKALNSAAGVDNDSDEDD

SEQ ID NO: 78591 - protein, 213 aa, Gossypium hirsutum
  Clone ID: GOSHI-09MAY01-C18_16.pep
LLTTKDAGDAVTLLQSLASSTFDSSQLVLSACMGYENVNEQVLLELREKHRSVVKAAVDERLRGLQIWRESQGRASKLYGFKHDSMSALRKTSKTGELVDSKTNGDLSRSKSESMNEDENLLCLTGDAKSDSVPDLQQQVVGLKVELCRLLEEKRSAVLRSDELETALMEMVKQDNRRQLCARVEQLEQEVGELRKALFEKTEQETAMLQILM

SEQ ID NO: 78592 - protein, 506 aa, Gossypium hirsutum
  unsure (1)..(506): unsure at all Xaa locations
  Clone ID: GOSHI-09MAY01-C18_17.pep
MVKICCIGAGYVGGPTMAVIALKCPEIEVAVVDISVSRITAWNSDTLPIYEPGLDEVVKKCRGKNLFFSSDVEKHVSEADIVFVSVNTPTKTQGLGAGKAADLTYWESAARMIADVSKSNKIVVEKSTVPVKTAEAIEKILTHNSKGIDFQILSNPEFLAEGTAIQDLFNPDRVLIGGRETPEGQKAIAALRDVYAHWVPVDRIICSNLWSAELSKLAANAFLXAQRISSVNAMSALCEATGADVSQVAHAVGKDTRIGPKFLNASVGFGGSCFQKDILNLVYICECNGLPEVANYWKQVIKINDYQKTRFVNRIVSSMFNTVSGKKIAILGFAFKKDTGDTRETPAIDVCKGLLGDKALLSIYDPQVNEEQIQRDLAMKKFDWDHPVHLQPMSPTSIKQVNVVWDAYAATKDAHGXVCILTEWDEFKTLDYQRIYDNMRKPAFIFDGRNVVDEAKLRAIGFIVYSIGKPLDQWXLKDMPAVAYEHHFERRIIRLHSFHCITFYFF

SEQ ID NO: 78593 - protein, 528 aa, Gossypium hirsutum
  unsure (1)..(528): unsure at all Xaa locations
  Clone ID: GOSHI-09MAY01-C18_18.pep
MAYTSLLSFSVCLLVLFHGCCAXIDLVTNHHQDPPWGQPQQPQPRHQSQCQLQNLNALQPKXHRFRSEAGETEFWDQNEDQFQCAGVAFLRHKIQRKGLLLPSFTRAPMLFYVEQGEGIHGAVFPGCPETYQSQSQQNIQDRXPQRDQHQKLRRLKEGDVVAXLPAGVAHWIFNNGRSQLVLXVALVDVGNDANQLDENFXRKFFLAGSPQGGVVRGGQSRDRNQRQSRTHRGXEREEEESQESGXGNNVLSGFRDNLLAQAFGIDTRLARKLQNERDNRGAIVRMEHGFEWXPEEGQRRQGREEEGEEEREPKWQRRQESQEEGSEEEEREERGRGRRRSGNGLEETFCSMRLXKHRTPASSADVFNPRGGRITXTVNSFNLPILQYLQLSAREGESLYNNAIYAPHWNMNAHSIVYITRGNGRIQIVSENGEAIFDEQVERGQVITVPQNHAVVKKXAGRRGFEWIAFKTNANAKISQIAGRVSIMRGLPVDVLANSFGISREEAMRLKHNRQEVSVFSPRQGSQQ

SEQ ID NO: 78594 - protein, 91 aa, Gossypium hirsutum
  Clone ID: GOSHI-09MAY01-C98_3.pep
VRERKLWIFKKDNPIFYLFNIIIFYFIFLYNIIYNYFFFFFLFIFFFFFYFIFFFFFFFFFFIVRILHYPDKAHKHSHYIIVPDPKVNCQI

SEQ ID NO: 78595 - protein, 88 aa, Gossypium hirsutum
  Clone ID: GOSHI-09MAY01-C98_2.pep
GPSGIPVATRLRSCGLSKNFPHSPCRGTCGNCDCADRSQCTKKGNSNTMIVETEKSYINNVEMDAPAENDGKCNCGTGCSCTDCTCGH

SEQ ID NO: 78596 - protein, 64 aa, Gossypium hirsutum
  Clone ID: GOSHI-09MAY01-C98_1.pep
MSGTCGNCDCADRSQCTKKGNSNTMIVETEKSYINTAEMDAPAENDGKCNCGTGCSCTDCTCGH

SEQ ID NO: 78597 - protein, 58 aa, Gossypium hirsutum
  Clone ID: uC-gsflnu33B094f05b1.pep
SSRGAGGNCDCADRSQCTKKGNSNTMIGETEKSYINNVEMDAPPENQGECQCRTGWSC

SEQ ID NO: 78598 - protein, 51 aa, Gossypium hirsutum
  Clone ID: uC-gsronu33B061h02b1.pep
NNRHILPCRVGAATETCLPCSLCTKGNSETMIIETEKSYINTAVMDASPEN

SEQ ID NO: 78599 - protein, 105 aa, Gossypium hirsutum
  Clone ID: GOSHI-09MAY01-C88_1.pep
MASRLQSTTLLFIFFITLILIPTRHAIPFIVLHGIGDKCSNRGISEFTEVLSDWSKSQGYCVEIGDGSWDSWTMPLSEQTSIVCEKVKKMSELSNGYNIFGLSQG

SEQ ID NO: 78600 - protein, 82 aa, Gossypium hirsutum
  Clone ID: AF056204.pep
GISEFTEVLSDWSKSQGYCVEIGDGSWDSWTIPLSEQVKKMSELSNGYNIVGLSQGNLIGRGVIEFCDGGPPVKNFISLGDP

SEQ ID NO: 78601 - protein, 136 aa, Gossypium hirsutum
  Clone ID: GOSHI-09MAY01-C48_1.pep
MASIAGSSISMQPRPFAKGSVSGLKLGSFMNQGRSTLSFTMRPMPARLQICCAAKQETVDKVCEVVKRQLALDNDKPITGESTFLDLGADSLDTVEIVMGLEEEFGITVEEDNAQSITTVQDAAELIEKLCSEKSA

SEQ ID NO: 78602 - protein, 75 aa, Gossypium hirsutum
  Clone ID: LIB3146-022-Q1-K1-D12.pep
GDIKMVFCSRPPPLINFVFLILTPLFFFFFFFFFFFFFFFFFFFFKLRIPTTLLRNFLHIQHNKSSHMISPKFAV

SEQ ID NO: 78603 - protein, 50 aa, Gossypium hirsutum
  Clone ID: GOSHI-09MAY01-C68_2.pep
NVRTSLLFFRFYYIIYYFFFIFFFFFFFFFFFFLLFFFFFFFFFFFFNFF

SEQ ID NO: 78604 - protein, 408 aa, Gossypium hirsutum
  Clone ID: GOSHI-09MAY01-C68_1.pep
MAPHLNIVPSMFVLLLLFISASKVQSGAIDVVAKFGAKADGKTDLSKPFLDAWKEACASVTPSTVVIPKGTYLLSKVNLEGPCKAPIEINVQGTIKAPADPGAFKDPNWVRFYSIENFKMSGGGIFDGQGSIAYEKNKDPHNRAFRVKLPVNIRFDFVTNALIQDITSKDSKLFHVNVFACKNITLERFTVEAPADSPNTDGIHMGKSDGVNIIGCEIKTGDDCISIGDGTKNLDIKDITCGPGHGISIGSLGKYPNEEPVEGVKVTNCTITNTSNGARIKTWPGESPGIVSDVHFEDIIVNNVSSPILIDQKYCPWSKCKINEESKVKLSNISFKNIRGTSALPEAVKFICSGSSPCQNVELADIDIKHTGPEPATSQCLNVKPKTSGKLNPTPCSSPVPKTLSATA

SEQ ID NO: 78605 - protein, 116 aa, Gossypium hirsutum
  unsure (1)..(116): unsure at all Xaa locations
  Clone ID: LIB3828-026-Q6-K6-E12.pep
GPQRLKPERVQIFKGQAPKRKNKQKKGLNPNTQKKNPRRNGPCESPSEEGQTAGASTGKRSRXKIGHAKTLTWNSXRXXLDISGXKRWSQSQTLYNGEFDTKCTMWGLILSNPPLP

SEQ ID NO: 78606 - protein, 212 aa, Gossypium hirsutum
  unsure (1)..(212): unsure at all Xaa locations
  Clone ID: LIB3828-021-Q1-K6-D3.pep
RIVNVPFVIADATSLTQAGYVGEDVESILYKLLVEAKFDVEAAQXXIVYIDEVDKITKKAESSNMGRDVSGEGVQQALLKMLEGTIVNIPMPDKGARRNPHGDSFQIDTKDILFICGGAFNDLEKTISERRQDSSIGFGAPVRENMRTSPLITAAVASSLLESVESDDLIAYGLIPEFIGRFPILVGLSALDEDQLVEVLMKPKNALGKQYK

SEQ ID NO: 78607 - protein, 62 aa, Gossypium hirsutum
  Clone ID: LIB3828-028-Q6-K6-A9.pep
KQFFFILKKKKKKKKKKKKKKKKKKKKRKKKKKKKKKKKKKKKNKKKKKKKKKKKIKRNKKR

SEQ ID NO: 78608 - protein, 109 aa, Gossypium hirsutum
  unsure (1)..(109): unsure at all Xaa locations
  Clone ID: GOSHI-09MAY01-C38_8.pep
SIELVEPEILRFKAGEPILLLXRHRFAGVDMRIRVKGGGHTSQIYAIRQSIAKALVAFYQKYVDEQSKKDIKDVLVTYDRTLLVADPRRCEPKKFGGRGARARFQKSYR

SEQ ID NO: 78609 - protein, 146 aa, Gossypium hirsutum
  Clone ID: GOSHI-09MAY01-C38_6.pep
MAERAPIESVQCFGRKKTAVAVTYCKRGRGLIKINGCPIELVEPEILRFKAVEPILLLGRQRFAGVDMRIRVKGGGHTSQIYAIRQSIAKALVAFYQKYVDEQSKKEIKDILVRYDRTLLVADPRRCEPKKFGGRGARARFQKSYP

SEQ ID NO: 78610 - protein, 146 aa, Gossypium hirsutum
  Clone ID: GOSHI-09MAY01-C38_5.pep
MAERAPIESVQCFGRKKTAVAVTHCKRGRGLIKINGCPIELVEPEILRFKAVEPILLLGRQRFAGVDMRIRVKGGGHTSQIYAIRQSIAKALVAFYQKYVDEQSKKEIKDILVGYDRTLLVADPRRCEPKKFGGRGARARFQKSYR

SEQ ID NO: 78611 - protein, 122 aa, Gossypium hirsutum
  Clone ID: GOSHI-09MAY01-C38_4.pep
MGPPGERWDDVVAGPQPERGLGRLRKITTTPPLSTKDEASSMAMPTSPTTPGTPSTPVSARRDNVWRSVFNPGSNLATKGIGAEVFDKPQPNSPTVYDCNQTEAQRQIMPDNLALCLVAAWK

SEQ ID NO: 78612 - protein, 93 aa, Gossypium hirsutum
  Clone ID: GOSHI-09MAY01-C38_3.pep
MVLLEKLWDDVVAGPQPERGLGRLRKITTTPPLSTKDEASSMAMPTSPTTPGTPSTPVSARRDNVWRSVFNPGSNLATKGFTAGRPGASITVD

SEQ ID NO: 78613 - protein, 111 aa, Gossypium hirsutum
  Clone ID: GOSHI-09MAY01-C38_2.pep
MVLLEKLWDDVVAGPQPERGLGRLRKITTTPPLSTKDEASSMAMPTSPTTPGTPSTPVSARRDNVWRSVFNPGSNLATKGIGAEVFDKPQPNSPTVYDWLYSGETRSKHHR

SEQ ID NO: 78614 - protein, 145 aa, Gossypium hirsutum
  Clone ID: GOSHI-09MAY01-C38_1.pep
MAEKAIESVQCFGRKKTAVAVTHCKRGRGLIKINGCPIELVEPEILRFKAVEPILLLGRQRFAGVDMRIRVKGGGHTSQIYAIRQSIAKALVAFYQKYVDEQSKKEIKDILVGYDRTLLVADPRRCEPKKFGGRGARARFQKSYR

SEQ ID NO: 78615 - protein, 81 aa, Gossypium hirsutum
  unsure (1)..(81): unsure at all Xaa locations
  Clone ID: uC-gsronu33B007d05b1.pep
LNGGKSTDRIRTMLRPQEDGGGPYPLTARPWPYQDYWSCYLALCAQQPTSRGILATKGIGAEVFDKPQPNSPTVYDXPFQR

SEQ ID NO: 78616 - protein, 137 aa, Gossypium hirsutum
  unsure (1)..(137): unsure at all Xaa locations
  Clone ID: uC-gsflnu33B008f04b1.pep
MAEKAIESVQCFGRKKTAVAVTHCKRGRGLIKINGCPIELVEPEILRFKAVEPILLLGRQRFAGVDMRIRVKGGGHTSQIXAIRQSIAKALVAFYQKSFDEHSMNAINDILVFTTIPLLSPLFFLFFSFTFFYSFFF

SEQ ID NO: 78617 - protein, 73 aa, Gossypium hirsutum
  unsure (1)..(73): unsure at all Xaa locations
  Clone ID: uC-gsronu33B108b08b1.pep
PYHFIMFDLSENRFSGSVPAWIGDKLSNLVILSLRSNNFDXHIPHKICDLQFLQNLDLAHNNISGVIPTRFNY

SEQ ID NO: 78618 - protein, 69 aa, Gossypium hirsutum
  unsure (1)..(69): unsure at all Xaa locations
  Clone ID: AI729708.1.pep
EKKVYAIRQSIAKALVAFYQKYVDEQSKKEIKDILVGYDRTLLVADPRRCEPKKFGGRGARARFXKSYR

SEQ ID NO: 78619 - protein, 89 aa, Gossypium hirsutum
  unsure (1)..(89): unsure at all Xaa locations
  Clone ID: LIB3196-010-P1-M1-H3.pep
MVLLEKLWDDVVAGPQPERGLGRLRKITTTPPLSTKDEASSMAMPTSPTTPGTPSTPVXVRRDNVWRSVFNPGSNLATKGIGAEVFDKP

SEQ ID NO: 78620 - protein, 62 aa, Gossypium hirsutum
  Clone ID: LIB3272-011-P1-K1-D4.pep
TRTPPLCTKDEASSMAMPTSPTPPGTPSTPVSARRDNVWRSVFNPGSNLATKGIGAEVFYKP

SEQ ID NO: 78621 - protein, 187 aa, Gossypium hirsutum
  unsure (1)..(187): unsure at all Xaa locations
  Clone ID: GOSHI-09MAY01-C28_2.pep
AVTGTCIMNNDLVTVPSYELRCRNDPQWXISRTITVTDTNYCTPNYALSSDNGGWCNPTQEHFDLAEPAFLPIAXIXAGILPDMYTTVLCVKKGSIKYTMNGHSYFNMVLITNVGGAGDITSVSIKGSKTGWLPMSRNWGQNWQSNAYLNGQSLSFKVTASDSRTITNYNVVPAGWQFGQTFEGGQF

SEQ ID NO: 78622 - protein, 258 aa, Gossypium hirsutum
  Clone ID: GOSHI-09MAY01-C28_1.pep
MATKTMMLQIFSLFFFLFSICNSIFLGANGDDNGGWQTAHATFYGGADATGTMGGACGYGNLYSQGYGTSTAALSTALFNNGLSCGACYELRCNNDPQWCISRTITVTATNFCPPNYALSSDNGGWCNPPREHFDLAEPAFLRIAEYRAGIVPVMFRRVSCVKKGGIRYTMNGHSYFNMVLITNVGGAGDITSVSIKGSKTGWLPMSRNWGQNWQSNAYLNGQSLSFKVTASDSRTITNYNVVPAGWQFGQTFEGGQF

SEQ ID NO: 78623 - protein, 102 aa, Gossypium hirsutum
  Clone ID: LIB3197-041-Q1-M1-H9.pep
MATKTMMLQIFPLFFFLFSVCNSIFLGANGDDNGGWQTAHATFYGGADATGTMGGACGYGNLYSQGYGTSTAALSTALFNNGLSCGACYELRCNNDPQWCIS

SEQ ID NO: 78624 - protein, 84 aa, Gossypium hirsutum
  Clone ID: LIB3197-016-P1-M1-A7.pep
MATKTMTLQIFPLFFFLFSVCNSIFLGANGDDNGGWQTDHATFYSGADATGTMGGACGYGNLYSQWYGTSTAPLSTALFNNGLS

SEQ ID NO: 78625 - protein, 285 aa, Gossypium hirsutum
  Clone ID: GOSHI-09MAY01-C948_1.pep
QQGEIPSPRAGHTGVTVGERGLIVGGGDNKSGASETVVLNMSTLVWSVVTSVEGRVPLASEGLSLVVGSISGEDILVSFGGYNGRYNNEVNVLKPSHKSTLQSKIMEAPVPDSVSAVQNATNPTRDLESDFEVGQEGKIREIVMDNTDSEHMKSKGEETSELIIATLKAEKEELESSLNKDKLQSLQLKEELTQAETRNTDLYKELQSIRGQLAAEQSRCFKLEVDVAELRQKLQTMETLQKELELLQRQKAASEQASLNAKQRQGSGGVWGWLAGSPPQNADDA

SEQ ID NO: 78626 - protein, 60 aa, Gossypium hirsutum
  Clone ID: GOSHI-09MAY01-C908_2.pep
SNKDISTVLVGMNSVKQVEENVAAATELVLFGKDHETLAEVEAILKPVKNQTWPSGIQQS

SEQ ID NO: 78627 - protein, 321 aa, Gossypium hirsutum
  Clone ID: GOSHI-09MAY01-C908_1.pep
MAVPKLEMRPLGNTGLKLSSVGFGASPLGSVFGSVSESDAVASVLEAFRLGINFFDTSPYYGATLSEKMLGKGLKALGVPRSEYIVSTKCGRYREGFDFSAERVTKSIDESLERLQLDYVDIFQCHDIEFGSLDQVVNETIPALQKLKEAGKIRFIGITGLPLEIFTYVLDRVPPGTVDVILSYGHYSINDSTLEDLLPYLKTKGVGVISASPLAMGLLTEFGPPEWHPASPELKSACQAAAVYCKEKGKNISKLAMQYSLSNKDISTVLVGMNSVKQVEENVAAATELALCGKDHETLAEVEAILKPVKNQTWPSGIQRS

SEQ ID NO: 78628 - protein, 90 aa, Gossypium hirsutum
  Clone ID: LIB3543-030-Q1-K6-H7.pep
MAVPKLEMRPLGNTGLKLSSVGFGASPLGSVFGSVSESDAVASVLEAFRLGINFFDTSPYYGATLSEKMLGKGLKALGVPRSEYIVSTKC

SEQ ID NO: 78629 - protein, 60 aa, Gossypium hirsutum
  unsure (1)..(60): unsure at all Xaa locations
  Clone ID: LIB3825-012-Q1-K6-C6.pep
TWTAPKLEMRPLGNTGLKLSSVGFGASPLGSVFGSVSESDAVASVLETFRLXINFFDTSS

SEQ ID NO: 78630 - protein, 135 aa, Gossypium hirsutum
  Clone ID: LIB3825-013-Q1-K6-E6.pep
TTNFAPFLVFLHKEENPIPYLLFIFASYFLRRKTNTIIVGYTPKHSTLLPVINNLCPILQEKETLSKHGCSQTRNEDLSETRASSSAAWASELLLSAASSVPLPKATLSPPSWKPIGSESTSSTPLRGCKFLCFN

SEQ ID NO: 78631 - protein, 89 aa, Gossypium hirsutum
  unsure (1)..(89): unsure at all Xaa locations
  Clone ID: LIB3083-050-Q1-L1-E5.pep
MAVPKLEMRPLGNTGLKLSSVGFGASPLGSVFGSVSESDAVAFVLEAFRLGINFFDTSPYYGATLSEKMLGKGXLKALGVPRSEYIVST

SEQ ID NO: 78632 - protein, 75 aa, Gossypium hirsutum
  Clone ID: LIB3145-039-Q1-K1-E6.pep
FFTGFRIASTSVRVFMIFPEQFNLISCNTVSMSFRFSKWLNKKNKNERLVIFKSYTREKIINNNLNHETPRIPMC

SEQ ID NO: 78633 - protein, 79 aa, Gossypium hirsutum
  Clone ID: GOSHI-09MAY01-C938_3.pep
IPISFGMYWIRVPFQLNVANNNNLMDHLFHDSLLLLGKVLVPLDGILVLTLYTWVLVFLRQVFGDLCSSLPSFRDCPHD

SEQ ID NO: 78634 - protein, 271 aa, Gossypium hirsutum
  unsure (1)..(271): unsure at all Xaa locations
  Clone ID: GOSHI-09MAY01-C938_2.pep
KTQDLPVPGRXLSGVHFAMEFLHANTKSLLDSDLQDGNYISAKGKKVVVIGGGDTGTDCIGTAIRHGCSSIVNLELLPQPPQTRAPGNPWPQWPRIFRVDYGHQEAATKFGKDPRSYEVLTKRFIGDDNGTVKGLEVVRVRWEKDASGRFQFKEVEGSEEIIEADLVLLAMGFLGPESTLAEKLGVEQDNRSNLKAEYGRFTTNVDGVFAAGDCRRGQSLVVWAISEGRQAAAQVDKYLTKEDKDTSVEGENQDSVKRHQDLPQKQQTVMK

SEQ ID NO: 78635 - protein, 768 aa, Gossypium hirsutum
  Clone ID: GOSHI-09MAY01-C938_1.pep
RPAADIRPEAAQYCIQKQDHGLDMALDQKLIKLSTAALEKGLPVYIETPICNVNRAVGTMLSHEVTKRYHLAGLPAGTIHIKLSGSAGQSLGAFLCPGIMLELEGDSNDYVGKGLSGGKIVVYPPKGSRFDPKENIVIGNVALYGATSGEADAFRGAPRRFCVRNSGAKAVVEGVGDHGCEYMTGGTVVVLGKTGRNFAAGMSGGIGYVLDVDGKFQSRCNPELVDLDKIEEEEDIVTLKMMIQQHQRHTNSQLASEVLADFESLLPKFIKVFPRDYKRVLAKMKDQEASERAAKEAEEQDEVELMEKDAFEELKKLAAASSNEKSSLTVEAEPVKRPTQVSDAVKHRGFVAYEREGVQYRDPNVRMHDWKEVMEESKPGPLLKTQSARCMDCGTPFCHQENSGCPLGNKIPEFNELVYQNRWREALDRLLETNNFPEFTGRVCPAPCEGSCVLGIIENPVSIKSIECAIIDKGFEEGWMVPRPPLKRTGKSIAVIGSGPSGLAAADQLNRMGHSVTVYERADRIGGLMMYGVPNMKTDKVDVVQRRVNLMAEEGVKFVVNANIGKDPSYSLDRLREENDAIVLAIGATKPRDLPVPGRDLSGVHFAMEFLHANTKSLLDSDLQDGNYISAKGKKVVVIGGGDTGTDCIGTSIRHGCSSIVNLELLPQPPQTRAPGNPWPQWPRIFRVDYGHQEAATKFGKDPRSYEVLTKRFIGDDNGTVKGLEVVRVRWEKDASGRFQFKEVEGSEEIIEVDLSATWGLCLITCGK

SEQ ID NO: 78636 - protein, 167 aa, Gossypium hirsutum
  Clone ID: LIB3583-056-P1-K1-A2.pep
RSLLHYSSTAALEKGLPVYVETPICNVNRAVGTMLSHEVTKRYHLAGLPAGTIHIKLSGSAGQSLGAFLCPGIMLELEGDSNDYVGKGLSGGKIVVYPPKGSRFDPKENIVIGNVALYGATSGEAYFNGMAAERFCVRNSSARASVEGVGDHGCEYMTGGTVGGLGK

SEQ ID NO: 78637 - protein, 67 aa, Gossypium hirsutum
  Clone ID: uC-gsflnu33B013g10b1.pep
VEMHWVSTQDHDRVRMSLGKLLGVLRIIWTDVLLMDEVLSEAALPGFYLEAAQVALNSMLPARLVTF

SEQ ID NO: 78638 - protein, 47 aa, Gossypium hirsutum
  Clone ID: uC-gsronu33B125g02b1.pep
LIFSRFRDILSFLMSGYLYLLFLFTFVCKVQLSWFSWGGQLCIVYVF

SEQ ID NO: 78639 - protein, 50 aa, Gossypium hirsutum
  Clone ID: uC-gsflnu33B013g05b1.pep
RTYKQKSINIHGAELIFSRLRDILSFLMSGYLYLLLLFSFDCKVQLSWFS

SEQ ID NO: 78640 - protein, 191 aa, Gossypium hirsutum
  Clone ID: GOSHI-09MAY01-C928_1.pep
MGRSRRKYKQSRAKVKVGLPRKNPHVFKPCFTLPPKLRSLANVDDALSKWDDKASVIQNYKSFGVVSNPNYLGVRSRTSHIVESDSLQVPHSPPSDEPADEFEPIDSGSDLEEDDLKTALGKKRRDGKSTHLQPLTTMQRLYIGQLIEKYGDDYQAMFMDVKLNKMQHSVANLEKLCKRYHMFGDKNPLIL

SEQ ID NO: 78641 - protein, 106 aa, Gossypium hirsutum
  Clone ID: GOSHI-09MAY01-C848_2.pep
MSTPARKRLMRDFKRLQQDPPAGISGAPQDNNIMFWNAVIFGPDDTPWDGGTFKLTLQFMEDYPNKPPTVRFVSRMFHPNIYADGSICLDILQNQWSPTYDVAAIL

SEQ ID NO: 78642 - protein, 152 aa, Gossypium hirsutum; identical to SEQ ID NO: 74260
  Clone ID: GOSHI-09MAY01-C848_1.pep

SEQ ID NO: 78643 - protein, 66 aa, Gossypium hirsutum
  Clone ID: GOSHI-09MAY01-C808_3.pep
SLSAPAHESILLIRRTWGFTKYNRADYLKWKSENRIMPDGVNAKLLGCHGPLANRQPGGAFLSGSA

SEQ ID NO: 78644 - protein, 220 aa, Gossypium hirsutum
  Clone ID: GOSHI-09MAY01-C808_1.pep
MGRRPARCYRQIKNKPYPKSRYCRGVPDPKIRIYDVGMKKKGVDEFPFCVHLVSWEKENVSSEALEAARIACNKYMAKFAGKDAFHLRVRVHPFHVLRINKMLSCAGADRLQTGMRGAFGKPQGTCARVDIGQVLLSVRCKDSNSHHAQEALRRAKFKFPGRQKIIVSRKWGFTKYNRADYLKWKSENRIMPDGVNAKLLGCHGPLANRQPGRAFLSGSA

SEQ ID NO: 78645 - protein, 64 aa, Gossypium hirsutum
  Clone ID: LIB3582-054-P1-K1-E8.pep
MFLEVFQKIIVSRKWGFTKYNRADYLKWKSENRIMPDGVNAKLLGCHGPLANRQPGRAFLSGSA

SEQ ID NO: 78646 - protein, 46 aa, Gossypium hirsutum
  Clone ID: LIB3148-056-Q1-K1-F9.pep
IIVSRKWGFTKYNRADYLKWKSENRIMPDGVNAKLLGCHGPLANRQ

SEQ ID NO: 78647 - protein, 184 aa, Gossypium hirsutum
  Clone ID: GOSHI-09MAY01-C558_1.pep
MAPVATTTTSTAATTETFKPDTLAQTLAVHKNALSSVKFSSDGSLLASSSADKTLRTYSLSPTASTLTPIHEYSGHDQGVSDVAFSSHSRFLVSASDDKTLRLWDVPTGSLIKTLHGHTNYVFCVNFNPQSNMIVSGSFDETVRVWDVKTGKCLKVLPAHSDPVTAVDFNRDGSLIVSSSYDGL

SEQ ID NO: 78648 - protein, 229 aa, Gossypium hirsutum
  Clone ID: GOSHI-09MAY01-C548_1.pep
MDPNLKSYPLLSYVLSRLPSISSRLQSSPSSDTPFDLEQPPPIDAASSSTAPPPIVDQMPHLSHPKVLASMTHAIYDVAQTRSVLQTLGPRPDHESVDMAHHKLAEIDSNLSKSLEELVLSPRPEGVDQAEWRANLADKEQQIRQQAEQEKSMYKSILQLDEMHEAYGKLVKQPEERLVNIYEKAGEVADDSEPVEETNPEVGGILEEAQGKGLERVDLCGRKLSICPK

SEQ ID NO: 78649 - protein, 126 aa, Gossypium hirsutum
  Clone ID: GOSHI-09MAY01-C578_8.pep
MGQGTPGGMNRQGFPGDRKPDGSDKKDKKFEPAAPPARVGRKQRKQKGPEAAARLPTVTPLTKCKLRLLKLERVKDYLLMEEEFVANQERLKPQEEKAEEDRSKVDDLRGSPMSVGNLEELIDENH

SEQ ID NO: 78650 - protein, 233 aa, Gossypium hirsutum
  unsure (1)..(233): unsure at all Xaa locations
  Clone ID: GOSHI-09MAY01-C578_6.pep
WEKETPGGLNRQGLGGDRKQDGADKKEKXFEPAAPXFFLGRKQQFWGGGGPLLLTHTKCKLRLLKLERVKDYLLMEEEFVANQERLKPQEEKAEEDRSKVDDLRGSPMSVGNLEELIDENQAIASSSVGPEYYVGILSFVVXDQLEPGRSFAVXSLVLFVVGLLQDEVDPMVSVMKVEKAPLESYADIGGLDSQIQDHRLRTXMLSMTNTEFYEDIGIKPPEGVILYGEPGQA

SEQ ID NO: 78651 - protein, 133 aa, Gossypium hirsutum
  Clone ID: GOSHI-09MAY01-C578_4.pep
FDSRGDVKVILATNRIESLDPALLRPGRIDRKIEFPLPDIKTRRRIFQIHTSRMTLADDVNLEEFVMTKDEFSGADIKAICTEAGLLALRERRMKVTHADFKKAKEKVMFKKKEGVPEGTLYVVEFQEIPGIP

SEQ ID NO: 78652 - protein, 151 aa, Gossypium hirsutum
  Clone ID: GOSHI-09MAY01-C578_3.pep
RSPSVQGAHSGGEREIQRTMLELLNQLDGFDSRGDVKVILATNRIESLDPALLRPGRIDRKIEFPLPDIKTRRRIFQIHTSRMTLADDVNLEEFVMTKDEFSGADIKAICTEAGLLALRERRMKVTHADFQKAKEKVMFKKKEGVPEGLYM

SEQ ID NO: 78653 - protein, 141 aa, Gossypium hirsutum
  Clone ID: GOSHI-09MAY01-C578_2.pep
GGEREIQRTMLELLNQLDGFDSRGDVKVILATNRIESLDPALLRPGRIDRKIEFPLPDIKTRRRIFQIHTSRMTLADDVNLEEFVMTKDEFSGADIKAICTEAGLLALRERRMKVTHADFKKAKEKVMFKKKEGVPEGLYM

SEQ ID NO: 78654 - protein, 415 aa, Gossypium hirsutum
  unsure (1)..(415): unsure at all Xaa locations
  Clone ID: GOSHI-09MAY01-C578_1.pep
MGQGTPGGLNRQGFPGDRKQDGSDKKEKKFEPAAPPARVGRKQRKQKGPEAAARLPTVTPHTKCKLRLLKLERVKDYLLMEEEFVANQERLKPQEEKAEEDRSKVDDLRGSPMSVGNLEELIDENHAIVSSSVGPEYYVGILSFVDKDQLEPGCAILMHNKVLSVVGLLQDEVDPMVSVMKVEKAPLESYADIGGLDAQIQEIKEAVELPLTHPELYEDIGIKPPKGVILYGEPGTGKTLLAKAVANSTSATFLRVVGSELIQKYLGDGPKLVRELFRVADDLSPSIVFIDEIDAVGTKRYDAHSGGEREIQRTMLELLNQLDGFDSRGDVKVILATNRIESLDPALLRPGRIDRKIEFPLPDIKTRRRIFQIHTSRMTLADDVNWKNCDDKDXFSGADIKAICPEADCCLRDHA

SEQ ID NO: 78655 - protein, 132 aa, Gossypium hirsutum
  unsure (1)..(132): unsure at all Xaa locations
  Clone ID: LIB3048-031-Q1-L1-B1-F2.pep
MLELLNQLDGFDSRGDVKVFLATNRIESLDPALLRPGRIDRKIEFPYLDIKTRRRIFQIHTSRMTLADDVKLIDFVSIHHXKPEGDINAICIKAGLLALTERRMKVRHXDVGKVVPLRLLGKKEGVPQELYM

SEQ ID NO: 78656 - protein, 133 aa, Gossypium hirsutum
  unsure (1)..(133): unsure at all Xaa locations
  Clone ID: LIB3829-024-Q6-K6-E3.pep
NFCWRNLLFFRPPTPLLGGGVSXLLPSXTXHTKNKFQLFXLVRVRFYLLMDEXFVAYHERFKPSDDNADEDRCIVDDLRCLPMSVGNLEELIDDNYAIVSSSFAPDFYVWILFFADSDLSEPVCAFLLPYSVL

SEQ ID NO: 78657 - protein, 219 aa, Gossypium hirsutum
  Clone ID: GOSHI-09MAY01-C518_1.pep
PTLSPTRPGQYKSHSKGGVTYPAYTDDKTVPKDSLTPTFAAAALFIDNARWDGVPFLMKAGKALHNKRAEIRVQFRHVPGNLYNRNFGTDLDQATNELVIRVQPDEAIYLKINNKVPGLGMRLDCSNLNLHYAARYSKEIPDAYERLLLDAIEGERRLFIRSDELDAAWSLFTPVLAELEEKKIMPEYYPYGSRGPVGAHYLAARYNVRWGDLGLDQSA

SEQ ID NO: 78658 - protein, 139 aa, Gossypium hirsutum
  Clone ID: GOSHI-09MAY01-C508_4.pep
MREILHVQGGQCGNQIGAKFWEVVCAEHGIDSTGRYGGDSELQLERINVYYNEASSGRFVPRAVLMDLEPGTMDGVRSGPFGQIFRPDNFVFGQSGAGNNWAKGHYTEGAELIDSVLDVVRKEAENCDCLQGYHLQFYF

SEQ ID NO: 78659 - protein, 93 aa, Gossypium hirsutum
  Clone ID: GOSHI-09MAY01-C508_3.pep
SCEEEKGIITTLTFKPVALELLGALHHSSRLHKLTAMVSIICSRKTIADSLDIKLLPWNSRVTCHSFSFRQRYSHSQHHLLFITFRNNGSGHI

SEQ ID NO: 78660 - protein, 420 aa, Gossypium hirsutum
  Clone ID: GOSHI-09MAY01-C508_2.pep
MREIVHVQGGQCGNQIGAKFWEVICTEHGIDSTGRYNGDSELQLERINVYYNETSSGRFVPRAILMDLEPGTMDGVRSGPFGQIFRPDNFVFGQSGAGNNWAKGHYTEGAELIDSVLDVVRKEAENCDCLQGFQVCHSLGGGTGSGMGTLLISKIREEYPDRTMLTFSVFPSPKVSDTVVEPYNATLSVHQLVENADECMVLDNEALYDICFRTLKLTTPSFGDLRKLAVNLVPFPRLHFFMVGFAPLTSRGSQQYKALTVPELTQQMWDAKNMMCAADPRHGRYLTASAVFRGKMGPDRVRARTINVQNKNSSYFVEWIPNNVKSTVCDIPPSGLKMASTFIGNSTSIQEMFRRVSEQFTAMFRRKAFLHWYTGEGMDEMEFTEAESNMNDLVSEYQQYQDATAEDEEYEEYEEYEEEA

SEQ ID NO: 78661 - protein, 445 aa, Gossypium hirsutum
  Clone ID: GOSHI-09MAY01-C508_1.pep
MREILHIQGGQCGNQIGAKFWEVVCAEHGIDSTGRYGGDSELQLERINVYYNEASCGRFVPRAVLMDLEPGTMDSVRSGPYGQIFRPDNFVFGQSGAGNNWAKGHYTEGAELIDSVLDVVRKEAENCDCLQGFQVCHSLGGGTGSGMGTLLISKIREEYPDRMMLTFSVFPSPKVSDTVVEPYNATLSVHQLVENADECMVLDNEALYDICFRTLKLTTPSFGDLNHLISATMSGVTCCLRFPGQLNSDLRKLAVNLIPFPRLHFFMVGFAPLTSRGSQQYRALTVPELTQQMWDAKNMMCAADPRHGRYLTASAVFRGKMSTKEVDEQMINVQNKNSSYFVEWIPNNVKSTVCDIPPIGLKMASTFIGNSTSIQEMFRRVSEQFTAMFRRKAFLHWYTGEGMDEMEFTEAESNMNDLVSEYQQYQDATADDEEYEEEEEYEAEA

SEQ ID NO: 78662 - protein, 94 aa, Gossypium hirsutum
  Clone ID: LIB3148-012-Q1-K1-F2.pep
YECNIKCNNPMYRINKNHSPHLTNDSMLKHKGCSLFFISCKEHSVVQSQLCWFSAFGSLIAAVFVIYRLVLLLCFLSVVFRSQIRFSHKCNLQL

SEQ ID NO: 78663 - protein, 162 aa, Gossypium hirsutum
  Clone ID: LIB3585-041-P1-K1-E2.pep
MREIVHVRGGQCGNQIGAKFWEVVCAEHGIDSTGRYQGDSELQLERINVYYNEASCGRFVPRAVLMDLEPGTMDSVRSGPYGQIFRPDNFVFGQSGAGNNWAKGHYTEGAELIDSVLDVVRKESENCDCLQGFQVCHSLGGGTGSGMGTLLISKIREEYPDR

SEQ ID NO: 78664 - protein, 59 aa, Gossypium hirsutum
  Clone ID: uC-gsronu33B016a04b1.pep
HSFAHASAASESLIAAIFAIYRLVLLLCFLSIIFSSQVRFSHTFSLQMWEQMLGCESIY

SEQ ID NO: 78665 - protein, 85 aa, Gossypium hirsutum
  Clone ID: GOSHI-09MAY01-C538_1.pep
KTMIVPAKGITNIYTRIEKREKVVLAKVISSVNFFSFDFFYLFYWLGLAGYESTPMRAQILQESEVRVRSRIVLKFSLFYEFFYV

SEQ ID NO: 78666 - protein, 338 aa, Gossypium hirsutum
  Clone ID: GOSHI-09MAY01-C498_1.pep
MAMMLRSLARPLERCLGLRAGGDGLMWHTDLKPHASGDYSIAVVQANKNLEDQSQVFTSPLGTYVGVYDGHGGPEASRFVNKHLFPFLHKFATEQGGLSADVIKKAFNATEEEFLHLVKQSLPVRPQIASVGSCCLVGAISNDVLYVANLGDSRAVLGKRVSEDKKNKVVAERLSTDHNVGVEEVRKEVEALHPDDSHVVVYTRGVWRIKGIIQVSRSIGDVYLKKPDFYRDPIFQRFGNPVPLKRPVITAEPSILIRKLKPQDLFLIFASDGLWEQLSDETAVDIVFRNPRAGIAKRLVSAALREVAKKREMRYGDIKKIEKGIRRHFHDDITVIVI

SEQ ID NO: 78667 - protein, 94 aa, Gossypium hirsutum
  Clone ID: LIB3543-036-Q1-K1-G7.pep
TYFFIQVSRSIGDVYLKKPDFYRDPIFQRFGNPVPLKRPVITAEPSILIRKLKPQDLFLIFASDGLWEQLSDENAVDIVFRNPRAVSIHLCLIG

SEQ ID NO: 78668 - protein, 55 aa, Gossypium hirsutum
  unsure (1)..(55): unsure at all Xaa locations
  Clone ID: LIB3166-029-P1-K1-E5.pep
IKKKRMRKRDREKKNKEKKRVDKRVGKEKEKMKTHTPPKKKXKKKKKKIRKERKL

SEQ ID NO: 78669 - protein, 120 aa, Gossypium hirsutum
  Clone ID: LIB3048-034-Q1-L1-E5.pep
AFNATEEEFLHLVKQSLPVRPQIASVGSCCLVGAISNDVLYVANLGDSRADLGKRVSEDKKNKVVAERLSTDHNVGVEEVRKEVEALHPDDSHVVVYTRGVWRINGIIHVLNKICWQTQL

SEQ ID NO: 78670 - protein, 311 aa, Gossypium hirsutum
  Clone ID: GOSHI-09MAY01-C448_1.pep
MEKVDVPRARPPVRPRVRELVRETRGLLEKIRDQGERAYMDAKPSTEKVHVGTEKDDKQILQISANAVADYGMEMPTSESETEVEKNKADSKEQMKGSVEMDIQKREQPVGPVSETANDDSITKGLTVEIAASIVGQAKDENIVDPSYQLNKEKKDVVFSNEDEREISEEQGLDLSENLSSVSLQGSPQEVNTEERWPSSSYSLHQDASDSSDLPVSTKAQEADNTKIPVENATDAPSNEAIHCEEKIWEQMNALRTIVGYKAARRETCIEELKALYVFTGIEPPASLKDTCDPAEVDAKLGFLKSVVGVQ

SEQ ID NO: 78671 - protein, 182 aa, Gossypium hirsutum
  unsure (1)..(182): unsure at all Xaa locations
  Clone ID: GOSHI-09MAY01-C468_9.pep
MASEKKLSNPMREIKVQKLVLNISVGESGDRLTRAAKVLEQLSGQTPVFSKARYTVRSFGIRRNEKIACYVTVRGEKAMQLLESGLKVKEYELLKRNFSDTGCFGFGIQXHIDLGIKYDPSTGIYRMDFYVVLERAGYRVGRRRRCKSRVGIQHRVTKEDAMKWFQVKYEGVILNKSQNIGA

SEQ ID NO: 78672 - protein, 155 aa, Gossypium hirsutum
  Clone ID: GOSHI-09MAY01-C468_7.pep
MASEKKLSNPMREIKVQKLVLNISVGESGDRLTRAAKVLEQLSGQTPVFSKARYTVRSFGIRRNEKIACCVTVRGEKAMQLLESGLKVKEYELLRRNLSDSGCFGIFMLLVLRLNFIDFLLFSLEPNHYVSVDYLFYAWALVHCRCGFIYHNLEV

SEQ ID NO: 78673 - protein, 182 aa, Gossypium hirsutum
  Clone ID: GOSHI-09MAY01-C468_5.pep
MASEKKLSNPMREIKVQKLVLNISVGESGDRLTRAAKVLEQLSGQTPVFSKARYTVRSFGIRRNEKIACYVTVRGEKAMQLLESGLKVKEYELLRRNFSDTGCFGFGIQEHIDLGIKYDPSTGIYGMDFYVVLERAGYRVGRRRRCKSRVGIQHRVTKEDSMKWFQVKYEGVILNKSQNIGA

SEQ ID NO: 78674 - protein, 139 aa, Gossypium hirsutum
  Clone ID: GOSHI-09MAY01-C468_4.pep
PRVRPRVRPRVRGRVGGIRRPRVRACYVTVRGEKAMQLLESGLKVKEYELLRRNFSDTGCFGFGIQEHIDLGIKYDPSTGIYGMDFYVVLERAGYRVGRRRRCKSRVGIQHRVTKEDAMKWFQVKYEGVILNKSQNIGA

SEQ ID NO: 78675 - protein, 211 aa, Gossypium hirsutum
  unsure (1)..(211): unsure at all Xaa locations
  Clone ID: GOSHI-09MAY01-C468_2.pep
GTSWLTAVKRACRSSTKDXHDDEKKRDKRRWIFRKQDTSPVKSVGNNGGGGGGASTAAAEKRHAIAVAVAKAAEAEAAVATAEAALQAARVTKPSYGRKHHFAAIVIQTAFRGYLARRALRALKGLVKLQALVRGHNVRKQAKMTLRCMQALVKVQSRVLDQRMRLSHDGCSRKSAFSDTXESRYLQDISDRRSLSRGGSSIANDWDERPH

SEQ ID NO: 78676 - protein, 182 aa, Gossypium hirsutum
  Clone ID: GOSHI-09MAY01-C468_1.pep
MASEKKLSNPMREIKVQKLVLNISVGESGDRLTRAAKVLEQLSGQTPVFSKARYTVRSFGIRRNEKIACYVTVRGEKAMQLLESGLKVKEYELLRRNFSDTGCFGFGIQEHIDLGIKYDPSTGIYGMDFYVVLERAGYRVGRRRRCKSRVGIQHRVTKEDAMKWFQVKYEGVILNKSQNIGA

SEQ ID NO: 78677 - protein, 76 aa, Gossypium hirsutum
  Clone ID: uC-gsflmaxxa096d03b1.pep
MGMKGGTSWLTAVKRAFRSPTKDTHEDEKRDKRRWIFRKQNTSPVKSVGNNGGGGASTAAAEQRHAIAVAVANAAS

SEQ ID NO: 78678 - protein, 109 aa, Gossypium hirsutum
  unsure (1)..(109): unsure at all Xaa locations
  Clone ID: uC-gsflnu33B056d03b1.pep
LNLTYLKWHFKVHKLVVYIYMGESDDRLTLAAKVSVQVRGQTPFLSKDRYTVRGFGLWRNEKIACYVTVRGEKAMRHIESGWQXKEYELMREDLSDTVCXGFGFKTHCL

SEQ ID NO: 78679 - protein, 120 aa, Gossypium hirsutum
  Clone ID: LIB3145-007-Q1-K1-B8.pep
MASEKKLSNPMREIKVQKLVLNISVGESGDRLTRAAKVLEQLSGQTPVFSKARYTVRSFGIRRNEKIACYVTVRGEKAMQLLESGLKVKEYELLRRNFSDTGCFGFGIQEHIDLGIKYDP

SEQ ID NO: 78680 - protein, 50 aa, Gossypium hirsutum
  Clone ID: LIB3189-021-P1-K1-E4.pep
MSPARCGVHRRHRCKSRVCIQHRVTKEDFMKWFQVKYEGVILNKSQNIGA

SEQ ID NO: 78681 - protein, 172 aa, Gossypium hirsutum
  Clone ID: LIB3543-065-Q6-K6-D6.pep
MQMPLRSCRVPTSTTSSSGMSRKPSVSDVSESIFPGEEESFGASMVNEIVNCDDEIPSVVQSDVSSATLVQGDQNERKDKNDRAGVSDCVSDASGDVTSYKMTSSGIRSEEVMAEVGVVSPCGSVLKEIYFPEKNSLEHSPAKALISHDPINVAELTVPISSGNDLSMASPG

SEQ ID NO: 78682 - protein, 134 aa, Gossypium hirsutum
  Clone ID: LIB3582-026-P1-K1-E12.pep
KNDRAVSDCVSDATGDVTTYERTCSGMRSEEVMAEDAVDSPRGSVLKEIYFSEKNTLEHSPAKAIISHDPINVAELTGPISSGNDLSMASPENDAYRTANSAKILTGISGSKNGYFGGEPAQNQALIVSNIGPI

SEQ ID NO: 78683 - protein, 263 aa, Gossypium hirsutum
  unsure (1)..(263): unsure at all Xaa locations
  Clone ID: GOSHI-09MAY01-C408_2.pep
GRVGGRVGGRVGNFELLKKLVLPDGSVLRTQLPGRPTVDCLFADPARDGISLLKIWNVNKCSGVVGLSRVXVFNCQGAGWCKVTKKTRIHDASPGTLTGSVCANDVDLIAQVAGADWNGESVVYAHRSGELVRLPKGASVSVTLKVLEYELFHFCPCKDSFFSFLLGYFFVFDYGGLLRAFSFGCREMAHTHFICTNRRFSAIKSFKVRGCGRGLVHTFISAFSLKWVVWTNADTHFQLLTQPPELVTLTLPVPSVEMFRWLV

SEQ ID NO: 78684 - protein, 633 aa, Gossypium hirsutum
  Clone ID: GOSHI-09MAY01-C408_1.pep
FGFAGDNTVETNRGLYLVYMHAGTNPFGGGGQAVKALEKHMQTFLHREKKKLPSFLDWFGWCTWDAFYTDVTAEGVKEGLKSLSEGGTPPRFLIIDDGWQQIESKPKESDCVVQEGAQFASRLTGIKENAKFKKNDQNNEQISGLKHVVDEAKQHHNVKNVYVWHALAGYWGGVKPAAAGMEHYDTALAYPVQSPGVMGNQPDIVMDSLAVHGLGLVHPKKVFNFYNELHAYLASCGVDGVKVDVQNIIETLGAGHGGRVSLTRSYVQALEASISRNFPDNGCIACMCHNTDGIYSTKQTAVVRASDDFYPRDPASHTIHISSVAYNTLFLGEFMQPDWDMFHSLHPAADYHAAARAVGGCAIYVSDKPGNHNFELLKKLVLPDGSVLRTQLPGRPTVDCLFADPARDGISLLKIWNVNKCSGVVGAFNCQGAGWCKVTKKTRIHDASPGTLTGSVCANDVDSIAQVAGADWNGESVVYAHRSGELVRLPKGASVPVTLKVLEYELFHFCPVKEISNTISFAPIGLLDMFNSSGAVEKFEVQMTSNEKLQFFDGEVSSELTTSLSNNRNPTAAISLKVRGCGRFGAYSSQHPLKCCVDNADTHFNYDSATGLVTLTLPVPSEEMYRWHVEIQV

SEQ ID NO: 78685 - protein, 87 aa, Gossypium hirsutum
  unsure (1)..(87): unsure at all Xaa locations
  Clone ID: uC-gsflnu33B145a06b1.pep
SFTRPAVEKFEGQLTSNEKLQFFDGEVCSXLTTSLSNNRNATAAISLKXRGCGMPGAYSSEHAVKCIGDNADTNLHCDSIAGMAALT

SEQ ID NO: 78686 - protein, 119 aa, Gossypium hirsutum
  Clone ID: LIB3582-026-P1-K1-G6.pep
MSSDTCGGGSPAQGSNEKGSSTSSVDKQRDKARVSRTSLILWHAHQNDAAAVRKLLEEDRSLVQARDYDNRTPLHVASLHGWIDVAKCLIDYGADVNAQDRWKNTPLADAEGATKHNMI

SEQ ID NO: 78687 - protein, 55 aa, Gossypium hirsutum
  Clone ID: uC-gsflnu33B011g07b1.pep
KLPFSLAPCTGDPPQHVSQLIVIDLFVYIGIYRPRNVYYIYSWNWSLQKSLIKCN

SEQ ID NO: 78688 - protein, 84 aa, Gossypium hirsutum
  Clone ID: GOSHI-09MAY01-C758_1.pep
WPDLTHGGRNFGDPVTPLPFPLFFLKKYANLMIFFQKKKGDKFQRFKQNFSIARSSPTSTHVCFGLSSVSRVPLHVFVPNSQTN

SEQ ID NO: 78689 - protein, 130 aa, Gossypium hirsutum
  Clone ID: GOSHI-09MAY01-C748_3.pep
RAVEKAGLVWQGRAHCGLDDAKNTARLLALLMRQGFKFAITNSLMWQASDGPVTWNPIPENTGFSLHHPHKLKDQQMPLFQYHPYCFCGVKSSKGMVRKPGPKQGSVFFGCGNWTVTRGARCHYFEWASP

SEQ ID NO: 78690 - protein, 201 aa, Gossypium hirsutum
  Clone ID: GOSHI-09MAY01-C748_2.pep
CTCLWILIIDKIMMALENKETMQNCEATLKCLQTKGFPYNLQCNRNSVEGIPELKHEFGTHPGRDVVEPVCSLSGEFVELPNEFYHKPTLHHECGSWSTFYPDSHKLQAYQLNAFGGQVYHFPVDNRFHYAPFNVITHGYPCEFQFQDFQYFVVIDFEATCDKERNPHPQEIIEFPSVIVSSVTGQLEACFQTYVRPTCNQ

SEQ ID NO: 78691 - protein, 196 aa, Gossypium hirsutum
  Clone ID: GOSHI-09MAY01-C748_1.pep
MINGFEKKGIKNTNFAVVTWSNWDCRVMLESECQFKKIRKPPYFNRWINLKVPFREVFGGVRCNLKEAVEMAGLAWQGRAHCGLDDAKNTAHLLTLMMRKGFKFAITNSLMWQASDGPLTWNPVPENTAFFPHHPHKPKDQQMPLFQYHPYCFCGVKSSKGMVRKPGPKQGSVFFGCGNWTVNRGARCHYFEWASS

SEQ ID NO: 78692 - protein, 87 aa, Gossypium hirsutum
  Clone ID: uC-gsflnu33B138b05b1.pep
FSMFFKHVNASILTKPNPHITDLFSCQTSQLYMFEASIHRKTQCLLSYAVLSRSLLRCFPTTRSVSKQLSNLRYVCFNEETTHCHCF

SEQ ID NO: 78693 - protein, 188 aa, Gossypium hirsutum
  unsure (1)..(188): unsure at all Xaa locations
  Clone ID: GOSHI-09MAY01-C778_1.pep
MNVSHASVHPAEYPPTTDAGEGGGGGGGGNIEVPRVRMKDFQGMPGTQGGLALRICQFVFAAVGLCIMAPARDFPSVTAFCYLVAATGLQSXWSLSLAIIDIYALLVMRSLQNYRVVTFFTIGDGIASTLTFAAACSSAGITVLIDNDLDICSQNHCVQFETATAMAFISWFTALPSFLFNLWSLASR

SEQ ID NO: 78694 - protein, 143 aa, Gossypium hirsutum
  unsure (1)..(143): unsure at all Xaa locations
  Clone ID: LIB3543-040-Q1-K6-E8.pep
MNVSHASVHPXEYPPTTDAGEGGGGGGGGNIEVPRVRMKDFQGMPGTQGGLALRICQFVFAAVGLCIMATTSDFPSVTAFCYLVAATGLQSLWSLSLAIIDIYALLVMRSLQNYRVVTFFTIGDGVRRLPFAVTSEARRLKNM

SEQ ID NO: 78695 - protein, 84 aa, Gossypium hirsutum
  Clone ID: GOSHI-09MAY01-C718_1.pep
QEATSPCLLPRQPKMLVEALLVLISRRRGLVTLNVSVDPPYKQIRTKITNSSYTLKRKSSKTHMKLKQMICHKTLLLSVSDKQR

SEQ ID NO: 78696 - protein, 64 aa, Gossypium hirsutum
  Clone ID: LIB3825-017-Q1-N6-F3.pep
AIYVYLYSVYYYSVKTKMSGFFQTSFYFGYTLMFCLGLGILCGAIGFLGSNLFVRRIYRNIKCD

SEQ ID NO: 78697 - protein, 61 aa, Gossypium hirsutum
  Clone ID: LIB3135-037-Q1-K1-F5.pep
SYMYSVYYYYVKTKMSGFFQTRFYFGYTLMFCLGLGILCGAVGYLGSNLFVRRIYRNIKCD

SEQ ID NO: 78698 - protein, 64 aa, Gossypium hirsutum
  Clone ID: LIB3148-050-Q1-K1-G2.pep
FFFFKKKKQETHPFNDFLDLSSLSPKQRTKQIQRKFNINSYIEHIYMQRDQGQKYNRSITMTVV

SEQ ID NO: 78699 - protein, 40 aa, Gossypium hirsutum
  Clone ID: LIB3083-120-Q1-L1-H10.pep
FFFFFFKKNKSKGNLTDHHRFNSYTESISMYAKGSMTNSI

SEQ ID NO: 78700 - protein, 235 aa, Gossypium hirsutum
  Clone ID: GOSHI-09MAY01-C738_2.pep
QLGIPSLAWWRRLEQQNKRTHWRPVNWRINHFPGLLVFWCFLEVTSSLSASRIFLGDPSANISCRDLPEKGGGGGEECLHVTLPFYQGCIWFKVAFAYGAVLYALIKKRGCFSFPDHHHQLFFGWCCLRPLFILYLCSGCLCASKKLAGMSAYLKPFYLSMMNLGLSSSFHILTSSHTFSAEKAFDSHSKSSWLGFVRCHLLCIPSLPAPFNHYGQELFRTKQRLSFMPFSPLSF

SEQ ID NO: 78701 - protein, 289 aa, Gossypium hirsutum
  Clone ID: GOSHI-09MAY01-C738_1.pep
MAVMADHHSLAVVFGILGNIISVLVFLAPVPTFCRIYKKKSTESFQSLPYQVALFSCMLWLYYALIKKGAFLLITINSFGCVVETIYISMFWAYASKNSRMSAMKLFISMNLGLFSFILILTHFLLKSSIRVQVLGWICVAISVSVFAAPLNIMARVVRTKSVEFMPFTLSFFLTLSAVMWFAYGLFIKDLCVALPNVLGFILGMLQMLLYAIYRHSEKVNIEEKKLPAEQMKSINVVLTTLGASEVHPVVLDIHTDDTKEEDNKNNEPTGEPDKQTDVKMEDANESPV

SEQ ID NO: 78702 - protein, 164 aa, Gossypium hirsutum
  unsure (1)..(164): unsure at all Xaa locations
  Clone ID: LIB3585-039-P1-K1-G4.pep
MLHLQKRKQQNKGAMAVMADHHXLADVIGILRNIISGLVFLAPVPTFXPIYKKKSTESIQSLPYQAELTSCMLWLYYALMKKGALLLITINSFGCVAETIDISIVWAYASKNSRMSAMKLFISMNLGLFSFILILTHFLLKRSIHIQALGWIXVAISVFDFAAP

SEQ ID NO: 78703 - protein, 76 aa, Gossypium hirsutum
  Clone ID: LIB3585-053-P1-K1-D2.pep
DAHKLASFFLPPSLSFHNSLHIGVMVIQRQFQGSLVLQVISVSYYTLGSGLGSSLFWFGTYIKQVSLLEVAPIFIT

SEQ ID NO: 78704 - protein, 248 aa, Gossypium hirsutum
  unsure (1)..(248): unsure at all Xaa locations
  Clone ID: GOSHI-09MAY01-C728_1.pep
MASGLTTADSTAKLLSDLKIDAGDWPPSLDKNVHLLSPDQIQLGKMLLEMGQSHLFQHWAEPGVDDDQKKAFFTQLSKLNSSYPGGLASYIKTAREXLLADSKAGKNPYDGFTPSVPTGEVLSLGDDNFIKFEDVGVKEAKNAAFVLVAGGLGERLGYNGIKVALPAETTTGTCFLQLYIESILALQEASSRLTQGTCQKEIPFVIMTSDDTHTSTVDXLASNSYFGMKPSQVKLLKQEKGACLDDND

SEQ ID NO: 78705 - protein, 108 aa, Gossypium hirsutum
  Clone ID: GOSHI-09MAY01-C648_3.pep
FFYLFFVQGSDALSMAEGQNEMQKLFKEYGVTPFTLLKGIFIQGPIFVSESQKRLPTEDKSGAGIRIHDNNEGDAPAAGGSVTGRFNMAQTPWGNMVACSGMPIAVVV

SEQ ID NO: 78706 - protein, 210 aa, Gossypium hirsutum
  Clone ID: GOSHI-09MAY01-C648_2.pep
MKYRSEFKTILEQNNGSYYDILEKGLEQFRSRLKSSKPKGQGSKATANTRAEEKETAKKKNPQRKGSNVEEKASKKLKRKSPSTDKQGKKKADEQEGPLKKQKKNNQTVEPNSRSAKAKPKSSTSKEQKKSKASKQGKEQKKPKQNKPNSIDTKSRTSKEKKLLEETDDQSSEGSSPGESPKSGARRTRVMQGLGLIAPPGSPFHKNGLI

SEQ ID NO: 78707 - protein, 184 aa, Gossypium hirsutum
  Clone ID: LIB3585-062-P1-K2-F1.pep
GRVGWPSIVVTTLLIRSATVPLWINQLKATTKMTLMRPRLEEVKERMSSKGSDALSMAEGQNEMQKLFKEYGVTPFTPLKGIFIQGPIFVSFFLAISTMAEKMESFKSGGAYWFTDLSTPDSLYIFPVMTALTFLLTVECNMQEGMEGNPAAATIKNVSRVFAVLTVPFTMSFPKAIFCYWITS

SEQ ID NO: 78708 - protein, 63 aa, Gossypium hirsutum
  Clone ID: LIB3145-016-Q1-K1-C2.pep
KYIVFYLQLTLSAEDKSGAGIRIHDNNGGEESAAVRFEGEVSLGDLMGLRLLGKTLRPAAGDD

SEQ ID NO: 78709 - protein, 391 aa, Gossypium hirsutum
  Clone ID: GOSHI-09MAY01-C618_1.pep
MASTTTSSVYINVIEDVINKVREEFINNGGPGEAVLNELQGIWEAKMMQAGVILGPIERSSQKQPTPGSAITPVHDLNVPYEGTEEYETPTADMLFPPTPLQTPVPTPLPGSADGSMYNIPTGGSDYPTPVNDNGSNADIKGGRPSPYMQSPSPWSNQRTPLSVDVNVAYVEGREEVDRGTSNQPLPPRPFMMSSGKRKREDFAQYQNGGYIPQQDGAGDATSEVAKAEGSRGGNFLDRRHSTTTAKSKILAELSKSSSKIPQLDGPIPDPYEDMLSTPNIYNYQGVVNEDYNVVNTPAPNDLQASTPAPAPQNDIVDDDDDEPLNEDDDDEDDLDDVDQGEELNTQHLVLAQFDKVTRTKSRWKCTLKDGIMHINNKDILFNKATGEFDF

SEQ ID NO: 78710 - protein, 108 aa, Gossypium hirsutum
  unsure (1)..(108): unsure at all Xaa locations
  Clone ID: AI730044.1.pep
MTSSTTSAVYIHVIEDVINKVRDEFINNGGPGEAVLNELQGIWETKMMQAGAICGPIKRSTGQKQPTAGGPITPVHDLNVPYEGTXEYETPTADMXFPPTPFANTAPI

SEQ ID NO: 78711 - protein, 340 aa, Gossypium hirsutum
  Clone ID: GOSHI-09MAY01-C608_1.pep
MFSRSLISSRVLPTVLSWYPNKTQVIRNLFPRNQRKSPVRLLDIRMASDGQQQQVPPQKQDAQPGKEHVMNPIPEYYSSNYQPSNKLQGKVALVTGGDSGIGRAVCHSFALEGATVAFTYVKSQEEKDAQDSLEILRKAKTSDAKDPLAVSADLGYDKNCKQVVDEVVKAFGRIDILVNNAAEQYKASSVEEIDEERLDRVFRTNIYSQFFLSRHALKYMKEGSSIINTTSVNAYKGNDKLLDYTATKGAIVAFTRGLSQQLVNRGVRVNTVAPGPIWTPLIPASFDEEETAQFGAQVPMKRPGQPSEVAPCFVFLACNHCSSYMTGQTLHPNGGTVVNG

SEQ ID NO: 78712 - protein, 126 aa, Gossypium hirsutum
  unsure (1)..(126): unsure at all Xaa locations
  Clone ID: LIB3583-023-P1-K1-G2.pep
ALLAVLAESNACEEGKEKIEEKATDIFNLIVGTFNXLSDTDGPSFRRIVVILETLAKYRSRVVMLDLECDDLVNEMFSTFFSIVRDDHPESFFXSTMQTIMIVVLEESEDVQDCLLLVILSALGRN

SEQ ID NO: 78713 - protein, 86 aa, Gossypium hirsutum
  unsure (1)..(86): unsure at all Xaa locations
  Clone ID: LIB3583-010-P1-K1-E1.pep
LFDKIPKKGCLLNEFSFGILVRGYCRFGLANKGLELLDLMRSSEILPNRXIFNLIVATFNGLSDTDGPSFRRIVVILETLAKYRSC

SEQ ID NO: 78714 - protein, 915 aa, Gossypium hirsutum
  unsure (1)..(915): unsure at all Xaa locations
  Clone ID: GOSHI-09MAY01-C638_1.pep
DMDSFEQDGNGAAPDSLPPPPPVPPDVVPIKAEPEPAKKKVVRVPMARRGLGSKGQKITLLTNHFKVNVGSSDGHFFHYCVSLYYEDGRPVDGKGVGRKVIERVQETYGNELAGKDFAYDGXEKSLFTVGALPNNKHEFTVVLEDVTSNRNNGNASPDVHDDSNGQDRKRIKRPYQSKTFKVEISFAAKIPMQAIQNALRGQESENSQEALRVLDIILRQHAAKQGCLLVRQSFFQNNPDNFTDIGGGVLGCRGFHSSFRASQGGLSLNIDVSTTMIIRPGPVVDFLLANQNARDPYSLDWTKAKRTLKNLRIKVSPSNQEYKITGLSEQLCKDQLFSLKQKSMKNDNGEAENLEITVYDYFVNHRNIQLRYSADLPCINVGKPKRPTYIPLELCSLVSLQRYTKALTTFQRASLVEKSRQKPQERMTVLSSALQRSNYGAEPMLRSCGISISTNFTQVEGRVLPAPRLKVGNGEDFFPRNGRWNFNNKKLVEPTKIERWAVVNFSARCDTNSLVRDLIRCGDMKGIRIDPPFDVFQESNQNRRCSPLVRVEKMFEDIQSKLPGAPQFLLCLLPDRKNSDLYGPWKKKNLSEFGIVTQCMAPTRVNDQYLTNLLLKINAKLGGLNSMLAIEQTPSIPVVSKVPTIILGMDVSHGSPGQSDIPSIAAVVSSRQWPLISRYRASVRTQSPKLEMIDSLFKKVSDKEDEGIMREVLLDFYTSSGKRKPDQIIIFRDGVSESQFNQVLNIELDQVIEACKFLDESWNPKFVVIVAQKNHHTKFFQQGSPDNVPPGTVIDNKICHPKNNDFYLCAHAGMIGTTRPTHYHVLLDQIGFSADDLQELVHSLSYVYQRSTTAISVVAPICYAHLAASQVGTFMKFEDTSETYSSHGGVTAPGAISVPQLPRLKENVCNSMFFC

SEQ ID NO: 78715 - protein, 80 aa, Gossypium hirsutum
  Clone ID: LIB3582-032-P1-K1-D11.pep
MIWCMSFGTLVIVFTIYPVFHYAGTVIDNKICHPKNNDFYLCAHAGMIGTTRPTHYHVLLDQIGFSADDLQELVHSLSYV

SEQ ID NO: 78716 - protein, 129 aa, Gossypium hirsutum
  unsure (1)..(129): unsure at all Xaa locations
  Clone ID: LIB3166-034-P1-K1-E8.pep
KHEFTVVLEDVTSNRNNGNASPDVHDDSNGQDRKRIKRPYQSKTFKVEISFAAKIPMQAIQNALRGQESENSQEALRVLDIILRQHAAKQXVKNISLGCLLVRQSFFQNNPDNFTDIGGGVLGXKGFHS

SEQ ID NO: 78717 - protein, 159 aa, Gossypium hirsutum
  unsure (1)..(159): unsure at all Xaa locations
  Clone ID: GOSHI-09MAY01-C198_1.pep
MDLGELWAIFGPGVAGAVFGTGWWFWVDAVVCSSVNVSFVHYLPGIPXFLFFFHIFFIHVLWLVISFLGIFASLAAVMFNCVKKDDIDYSPYDDGEWRLXLWLSVAYVVSFVSLAASVGLLIQDSLVKSGPSVWTGTAGVLQCVFVLISGLIYWTSHSE

SEQ ID NO: 78718 - protein, 301 aa, Gossypium hirsutum
  unsure (1)..(301): unsure at all Xaa locations
  Clone ID: GOSHI-09MAY01-C158_1.pep
VKSREEEQQNQISVLALLSAALRKSMLSCRVDSRDEVISSTLQHMEIGWPTNVRHITHVTFDRFNGFLGLPVEFQVEIPSRVPSASANVFGVSAESMLMLHSIPKGNSVPTILLLMQERLYSQGGLKAEGIFRINPENGQEEHVRDQLNKGIVLDNIDVHCLAGLIKAWFRELPSGVLDGLSPEQVLRCNTEEESVNLVKQLKPTEAALLNWAVGLMADVMEEEESNKMNARNIAMVFAPNMTRMSDPLTALMHAVQVMNLLKTLIXKTLRKREETEMGGYSPMSSNSCDCPTDEEFDSQP

SEQ ID NO: 78719 - protein, 187 aa, Gossypium hirsutum
  unsure (1)..(187): unsure at all Xaa locations
  Clone ID: LIB3828-009-Q1-K6-E4.pep
RVXRGLSPERFSXCNTEXESVDLVKQLKPTEAALLNWAVDLMADVVEEEESNKMNARNIAMVFAPNMTQMSDPLTALMHAVQVMNLLKTLIMRTLQEHEESATGGRCSPMSSHSCNGPTDEEFDSNREMETSCELKGPTSEYDNALYNSYSGDEDEVQSLDEIEECFLRQLDENNKTVTNSLFGGTS

SEQ ID NO: 78720 - protein, 165 aa, Gossypium hirsutum
  Clone ID: GOSHI-09MAY01-C148_3.pep
GDKGTVCLTGGTGFIGSWLSKRLLQEGYSVRTTVRADPENKRDLTFLTSLPGAAEMLKILSADLNDPNSFDAPIEGSKAGLHVATPLSLDGKESLEAVTQTSTSGALGILKACLRSKTVKRVVYTSSAATVIYNGQDTDMMDESFWTDVDFVTHKFNPQTHPYLI

SEQ ID NO: 78721 - protein, 115 aa, Gossypium hirsutum
  Clone ID: GOSHI-09MAY01-C148_2.pep
MVLGNQSEYSLLLNASMVHVDDLARAHIFLLEYPEAKGRYNCSSDTISLEKLSEFLGGKYPEFPIPSPESLGEIKGMKWPGVSSKKLLDTGFDFNCGVEEMFDGAIQCCKERGYL

SEQ ID NO: 78722 - protein, 328 aa, Gossypium hirsutum
  Clone ID: GOSHI-09MAY01-C148_1.pep
MEGDKGTVCVTGGTGFIASWVINSLLQEGYSVRTTVRADPENRRDLSFLTSLPGAAEKLKILSADLSDPNSFDAAIEGSKAVLHVATPVDFQNKESEEAITERSINGAVGILKACLRSKTVKRVVYTSSASTVVFNGQEMDMMDESFWTDVDFVRQKLSPNAHSYIISKTWTERAALEFGAQHGLDVVTVIPSLVVGPFICPKFPGSVRSSLALVLGNQSEYSFLLNFSMVHVDDVARAHIFLLEYPDAKGRYNCSSDTISLEKLSEFLGGKYPEFPIPSPESLGEIKGMKWPGVSSKKLLDTGFDFKCGVEEMFDGAIQCCKERGYL

SEQ ID NO: 78723 - protein, 298 aa, Gossypium hirsutum
  Clone ID: GOSHI-09MAY01-C168_2.pep
DPALPLEEFNDQVKELRERMAELPDDYFVVLVGDMITEEALPTYQTMINTLDGVKDETGASSSPWAVWTRAWTAEENRHGDLLRNYLYLSGRVNMFMIERTLQYLIGAGMDPGTENNPYLGFVYTSFQERATFVSHGNTARLAKEGGDPVLARICGTIAADEKRHEMAYSKIVGKLLEIDPTGAMLAIGDMMKKKITMPAHLMFDGEDPRLFEHFAAVAQRIGVYTSDDYADIVEALNERWGLEKLEGLRDEGRRAQEFVCNLAPRIRKLQERAEERAKKMGPQAVKFSWIFSREITL

SEQ ID NO: 78724 - protein, 207 aa, Gossypium hirsutum
  Clone ID: GOSHI-09MAY01-C168_1.pep
MQLTHCLPTKNLSWTPRVHHRRHSPPTSAVRFAPIFPAVTVSPPKHQKTHSMPPEKQEVFKSMENWATENVLPLLKPVKDCWQPQTFLPDPALPLEEFNDQVKELRERMAELPDDYFVVLVGDMITEEALPTYQTMINTLDGVKDETGASSSPWAVWTRAWTAEENRHGDLLRNYLYLSGRVNMFMIERTLQYLVGAGMVTFSSLFH

SEQ ID NO: 78725 - protein, 73 aa, Gossypium hirsutum
  unsure (1)..(73): unsure at all Xaa locations
  Clone ID: LIB3583-033-Q6-K7-D11.pep
GPPSRSTPRPXNANAIVTMQLTYCLPTKTSHGRHVSTTVAILHQPPPSGSPRYQPPLRFFLXTXKIFWGGGGG

SEQ ID NO: 78726 - protein, 60 aa, Gossypium hirsutum
  Clone ID: GOSHI-09MAY01-C118_10.pep
PRVRPRVRGLFAVMRRMNKRGRMRRRISRNRSGVCFLLFAFLTIWIFFFCSFNLNSWFGC

SEQ ID NO: 78727 - protein, 206 aa, Gossypium hirsutum
  unsure (1)..(206): unsure at all Xaa locations
  Clone ID: GOSHI-09MAY01-C118_9.pep
LFFPGQMISHXRRFSVNLIQFPRLHFFINECSQSTDPDLXQYITITVPYSTQXMWNAKNMMCAADPHHGRYLTASAMFRGKMSTKQIPDHMINVQNKNSSYFVEWIPNNVKSSVCDIPPKNLQMASTPGVRSTSIQEMFRRVSEQFTAMFRRKAFLHWYTGEGMDEMEFTEAESNMNDLVAEYQQYQDATVEEEGEYEGEEGVEEN

SEQ ID NO: 78728 - protein, 161 aa, Gossypium hirsutum
  unsure (1)..(161): unsure at all Xaa locations
  Clone ID: GOSHI-09MAY01-C118_8.pep
MRDQIGSKFWEVICDEHGVDPTGSYTGDESSSSDLQLERINVYYNEASGGRYVPRAVLMDLEPGTMDSIRSGPYGQIFRPDNFVFGQSGAXGNNWAKGHYTEGAELIDSVLDVVRKEAENCDCLQGFQVCHSLGGGTGSGMGTLLISKIREEYPDRMMMTF

SEQ ID NO: 78729 - protein, 351 aa, Gossypium hirsutum
  Clone ID: GOSHI-09MAY01-C118_4.pep
EVPERTKKSPGGPWTFCGLLPLFDPPRHDSAETIRRALNLGVDVKMITGDQLAIAKETGRRLGMGTPTRPPSPGLGREKDESEALPADELIEKADGFAGVFPEHKYEIVKILQEKKHVVGMTRDGVNDAPALKKADIGIAVADATDAARSAADIVLTEPGLSVIISAVLTSRAIFQRMKNYTIYAVSITIRLLLGFVLLALIWEYDFPPFMVLMVAILNDGTIMTISKDRVKPSPTPDSWKLNEIFATGVVIGTYLALVTVLFYWIVIDTDFFETHFNVRSISDNTEQISSAVYLQVSIISQALICVTPSRSWSFVERPGVLLMCAFVVAQLVKFSEKKLYLRIRINGKSD

SEQ ID NO: 78730 - protein, 391 aa, Gossypium hirsutum
  unsure (1)..(391): unsure at all Xaa locations
  Clone ID: GOSHI-09MAY01-C118_3.pep
LGKSCDELIEKADGFAGVFPEHKYEIVKILQEKKHVVGMTGDGVNDAPALKKADIGIAVADATDAARSAADIVLTEPGLSVIISAVLTSRAIFQRMKNYTIYAVSITIRIGLGFVLLALIWEYDFPPFMVLIIAILNDGTIMTISKDRVKPSPTPDSWKLNEIFATGVVIGTYLALVTVLFYWIVIDTDFFETHFNVRSISDDTEQISSAVYLQVSIISQALIFVTRSRSWSFVERPGVLLMCAFVVAQLVATLIAVYAHISFADISGIGWGWAGVIWLYSLVFYVPLDIIKFTVRYALSGEAWNLLFDRKTAFTSKKDYGKDDXGQPNGFCAQRSLQGLMAADLDFNGRRSRTSLIADQARRRAEIARLGELHTLRGHVESVMRLKNLDR

SEQ ID NO: 78731 - protein, 448 aa, Gossypium hirsutum
  Clone ID: GOSHI-09MAY01-C118_2.pep
MREILHIQAGQCGNQIGAKFWEVVCAEHGIDSTGRYQGDNDLQLERVNVYYNEASCGRFVPRAVLMDLEPGTMDSVRSGPYGQIFRPDNFVFGQSGAGNNWAKGHYTEGAELIDSVLDVVRKEAENCDCLQGFQVCHSLGGGTGSGMGTLLISKIREEYPDRMMLTFSVFPSPKVSDTVVEPYNATLSVHQLVENADECMVLDNEALYDICFRTLKLTTPSFGDLNHLISATMSGVTCCLRFPGQLNSDLRKLAVNLIPFPRLHFFMVGFAPLTSRGSQQYVSLTVPELTQQMWDAKNMMCAADPRHGRYLTASAMFRGKMSTKEVDEQMMNVQNKNSSYFVEWIPNNVKSSVCDIPPRGLKMSSTFIGNSTSIQEMFRRVSEQFTAMFRRKAFLHWYTGEGMDEMEFTEAESNMNDLVAEYQQYQDATVEDEEEYEGEEGLDENYET

SEQ ID NO: 78732 - protein, 449 aa, Gossypium hirsutum
  Clone ID: GOSHI-09MAY01-C118_1.pep
MREILHVQGGQCGNQIGSKFWEVICDEHGVDPTGKYSGDGSSDIQLERIDVYYNEASGGRYVPRAVLMDLEPGTMDSIRSGPIGQIFRPDNFVFGQSGAGNNWAKGHYTEGAELIDAVLDVVRKEAENCDCLQGFQVCHSLGGGTGSGMGTLLISKIREEYPDRMMMTFSVFPSPKVSDTVVEPYNATLSVHQLVENADECMVLDNEALYDICFRTLKLTTPSFGDLNHLISATMSGVTCCLRFPGQLNSDLRKLAVNLIPFPRLHFFMVGFAPLTSRGSQQYRALTVPELTQQMWDAKNMMCAADPRHGRYLTASAMFRGKMSTKEVDEQMINVQNKNSSYFVEWIPNNVKSTVCDIPPIGLKMASTFIGNSTSIQEMFRRVSEQFTAMFRRKAFLHWYTGEGMDEMEFTEAESNMNDLVSEYQQYQDATADEEYDYEEEDAEEDLQE

SEQ ID NO: 78733 - protein, 76 aa, Gossypium hirsutum
  unsure (1)..(76): unsure at all Xaa locations
  Clone ID: LIB3083-013-Q1-L1-A11.pep
MRVILDIHAGHCGNQIGAKFWEVVCAXHCIDSTVLYXGTKICTLERVNVYYNESCCSRFVSIACFMDLHPVTIDMC

SEQ ID NO: 78734 - protein, 184 aa, Gossypium hirsutum
  Clone ID: LIB3830-002-Q1-K6-D3.pep
VGRRGCFVEPRHGIESSKWAIFGKLTQQMWDAKNMMCAADPRHGRYLTASAMFRGKMSTKEVFLQMMNVQNKNSSYFVEWIPNNVKSSVCDIPPRGLKMSSTFIGNSTSIQEMFRRVSEQFTAMFRRKAFLHWYTGEGMDEMEFTEAESNMNDLVAEYQQYQDATVEDEEEYEGEEGLDENYET

SEQ ID NO: 78735 - protein, 77 aa, Gossypium hirsutum
  unsure (1)..(77): unsure at all Xaa locations
  Clone ID: LIB3083-011-Q1-L1-A9.pep
MRKEKKKKKKKKKKKRNKKKDKXKKIKKKKNKKKXKKKKKIKTNKKKKKKEKRKKIKKKKIINKKKKNKKKDKKNKK

SEQ ID NO: 78736 - protein, 97 aa, Gossypium hirsutum
  Clone ID: LIB3493-053-P1-M1-D11.pep
VVEPYNATLSVHQLVETADECMVLDNEALYDICFRTLKLTTPSFGDLNHLISAAMSGVTCCLRFPGQLTSDLRKLAVNLIPFPRLHFFMAGFAPLTS

SEQ ID NO: 78737 - protein, 83 aa, Gossypium hirsutum
  Clone ID: LIB3083-050-Q1-L1-D6.pep
TIWFQSTNNIKMQQLMRSMIMRRRRMRRRNSRNSSSVCFLLFAFLTFWKMFLFFQPEYLVWVLEMLFPGLCIFVYEHLYISRY

SEQ ID NO: 78738 - protein, 102 aa, Gossypium hirsutum
  unsure (1)..(102): unsure at all Xaa locations
  Clone ID: LIB3584-061-P1-K1-F10.pep
DAWADAWADAWADAWADAWVNAVGDLNHLISATMSGVTCCLRFPGQLNSDLRKLAVNLIPFPRLHFFMVGFAPLTSRGSQQYRALTVPELTQXMWDAKNMMG

SEQ ID NO: 78739 - protein, 829 aa, Gossypium hirsutum
  unsure (1)..(829): unsure at all Xaa locations
  Clone ID: GOSHI-09MAY01-C108_1.pep
MQIVPFQKGSLRVLLLHGNLDIWVLEANNLPNMDMFHRTLGDMFANFSSNISKKVGGRSDEKITSDPYVTIAVAGAVIGRTFVISNNENPVWMQHFNVPVAHHAXEVQFVVKDSDILGSDIIGVVAIPVEQIYAGGKIEGTYPVLNAAGKPCKPGAVLKLSIQYTPMEKLSFYHQGVGAGPEYVGVPGTYFPLRKGGKVTLYQDAHVPDGCLPNIKLDQGIHFVQGKCWTDIFDAIRQARRLVYITGWSVWHKVRLVRDVAPASDCTLGDILRSKSQEGVRVLLLLWDDPTSRSILGYKTEGIMATHDEETRSFFKHSSVQVLLCPRIAGKKHSWVKQKEVGTIYTHHQKTVIVDADAGNNHRKIIAFVGGLDLCDGRYDNPDHALFRTLQTYHKDDYHNPTYTGSTVGCPREPWHDMHSKIDGPAAYDVLVNFEERWLKAAKPHGLKKLKKPFDDALLRIARIPDIMGVSDFTENENDPERWHVQIFRSIDSNSVKGFPKDPKDATSKNLVCGKNVLIDMSIHTAYVKAIRAAQHFIYIENQYFLGSSYNWSSYKNLGADNLIPMEIALKIASKIKANERFAAYVVIPMWPEGVPTGAATQRILYWQNKTMSMMYETIYRALVEAALASACVPEDFLNFYCLGSRELDGYQPPIDESPKAANTPEALSRKSRRFMIYVHSKGMIVDDEFIIVGSANINQRSMEGTRDTEIAMGAYQPQHTWAAKRSSPLGQIYGYRMSLWAEHIGVVEDCFARPESLECVRRINQMAKLNWRQFAAEEVTEMRGHLLKYPVEVDPKGKVRPLPGSETFPDTGGSVGGSFLGIHENLTI

SEQ ID NO: 78740 - protein, 91 aa, Gossypium hirsutum
  unsure (1)..(91): unsure at all Xaa locations
  Clone ID: LIB3083-014-Q1-L1-G7.pep
MHLTLEFGGGLELLCKSVKFHNVNVDLPKGADKLSMRDLLAWVRTNLIKERPEMFMKGESVRPGVLVLVNDCDWELSGQLDTTLEEXDVVV

SEQ ID NO: 78741 - protein, 73 aa, Gossypium hirsutum
  Clone ID: GOSHI-09MAY01-C138_27.pep
PSINSNGSICLDILKEQWSPALTISKVLLSICSLLTDPNPDPPLRPEIAHMYKTDRAKYEATARSWTQKYAMG

SEQ ID NO: 78742 - protein, 123 aa, Gossypium hirsutum
  Clone ID: GOSHI-09MAY01-C138_26.pep
APRDEEGRSKRRNASGRLDPPARPARTDSVDFAWRMHVNDDKVKVVDGRMGSLVNLEQAIRALDIGLLCTLNESKGRPKMEEVVEFLSMDKQIPELPACRPVSLFPYNSATRLCTGYSCGPFK

SEQ ID NO: 78743 - protein, 109 aa, Gossypium hirsutum
  unsure (1)..(109): unsure at all Xaa locations
  Clone ID: GOSHI-09MAY01-C138_25.pep
PRVRLRGVENKRRSGDSRIGQQMSSQKDYSMATADVVDAEVRDLVETAYTRAKQIITTHIDILHKLAPLLREKETXVDGEEFMSLFIGGKAEPICFLDRTLYSPHSVLG

SEQ ID NO: 78744 - protein, 64 aa, Gossypium hirsutum
  Clone ID: GOSHI-09MAY01-C138_21.pep
IVHYIVPIQSLYNYDPHMFRFICVCFHKIGKKISILFLPVIEKTYDVAMKIENGTQLQFFVLKI

SEQ ID NO: 78745 - protein, 81 aa, Gossypium hirsutum
  Clone ID: GOSHI-09MAY01-C138_19.pep
NSLLPLRCVLCSSVPTAPKRILKELTDLQKDPPTSCSAGPVPEDMWHWQATSMGPSDSPYAGGGLSVSIPCSLPFLSCMSI

SEQ ID NO: 78746 - protein, 34 aa, Gossypium hirsutum
  Clone ID: GOSHI-09MAY01-C138_18.pep
PDDPLVLEMAPMYKTDRAKYEATARGWTQKYAMG

SEQ ID NO: 78747 - protein, 89 aa, Gossypium hirsutum
  Clone ID: GOSHI-09MAY01-C138_17.pep
VNPFEPEAESRAKTIDLCNNSMSTRKIYDYPRRIGSEWTDLDSEARKFTAKILGDELENPDPLPSPLSSSPETSSNDQSTDDLESKAEL

SEQ ID NO: 78748 - protein, 95 aa, Gossypium hirsutum
  Clone ID: GOSHI-09MAY01-C138_16.pep
DSLQNPKTKKKPPSHFLNINLRSFFLIFIQLTLTYLQDTKFFFHYIQTTLYPYFYTNKGFFAFFSSVTYNFKIPFFVWVAPLVLSMNSFVDRNGF

SEQ ID NO: 78749 - protein, 118 aa, Gossypium hirsutum
  Clone ID: GOSHI-09MAY01-C138_15.pep
PTLLSSPLSLFLFNLLSYTYKTPSSFFITYKQPFIHIFTLTKGSLLFSLQALTISKFPSLVFYLWTLLVIEMGSKPVQNNQTPPLSLVVWYQNWPEYTLLSLKMMTETKEEADLETAG

SEQ ID NO: 78750 - protein, 184 aa, Gossypium hirsutum
  Clone ID: GOSHI-09MAY01-C138_9.pep
ALMPEYDPVAKISIIPRGQAGGLTFFAPSEERLESGLYSRSYLQNQMAVALGGRIAEEVIFGEENVTTGASNDFMQVSRVARQMVERFGFSKKIGQVAIGGGGGNPFLGQQMSSQKDYSMATADVVDAEVRDLVETAYTRAKQIITTHIDILHKLAQLLMEKETVDGEEFMSLFIDGKAELYVS

SEQ ID NO: 78751 - protein, 149 aa, Gossypium hirsutum
  unsure (1)..(149): unsure at all Xaa locations
  Clone ID: GOSHI-09MAY01-C138_8.pep
MASKRILKELKDLQKDPPTSCSAGPVPEDMFHWQATIMGPSDSPYAGGVFLVTIHFPPDYPFKPPKVAFRTKVFHPNINXSNGSICLDILKEQWSPALTIFKVLLSICSLLTDPNPDDPFVPEIAHMYKTDRSKYEATASCWTQKYAMG

SEQ ID NO: 78752 - protein, 166 aa, Gossypium hirsutum
  Clone ID: GOSHI-09MAY01-C138_7.pep
SCVLIQQNAIGGGGGELQSSISVSVMVTDRRETMVCPKPRRLGLLNASFNDQPVRSLRWQLSHQTELCDSKAGSDILDMILTKGGCRAEQVASSPPFFCGSPPSRVANPLIQDARFGDEKMVNPPSPNPPPPSSPSSSSRKGGCIRANFGNKPAVRVEGFDCFALA

SEQ ID NO: 78753 - protein, 73 aa, Gossypium hirsutum
  Clone ID: GOSHI-09MAY01-C138_6.pep
MTMHKPSSKLTLTKGTKAGAHGAAALELVDPPGCSDPLVPEIAHMYKSVRAKYEATARSWTQKYAMGMTVVGV

SEQ ID NO: 78754 - protein, 160 aa, Gossypium hirsutum
  unsure (1)..(160): unsure at all Xaa locations
  Clone ID: GOSHI-09MAY01-C138_5.pep
MATFGFLTIAFFLVFELTFATDSPAPAPSLGADTSPLLAPTPVTGSPDSAPLISPVMPASPPAPIAPSPSDLAEGESSPSSSPAPSPGDASDINHSNINAEESENKTGGGGGLNGGKKXGIVVAVVAAACLGGFGGLIYRKRQAYIRRSQYGYAARREIL

SEQ ID NO: 78755 - protein, 140 aa, Gossypium hirsutum
  Clone ID: GOSHI-09MAY01-C138_4.pep
MASKRILKELKDLQKDPPTSCSAGPVAEDMFHWQATIMGPSDSPFAGGVFLVNIHFPPDYPFKPPKVAFRTKVFHPNINSNGSICLDILKEQWSPALTISKVLLSICSLLTDPNPDDRCRNANSNCGQSTLPSDQNHGVY

SEQ ID NO: 78756 - protein, 148 aa, Gossypium hirsutum
  Clone ID: GOSHI-09MAY01-C138_3.pep
MASKRILKELKDLQKDPPTSCSAGPVAEDMFHWQATIMGPSDSPYAGGVFLVSIHFPPDYPFKPPKVAFRTKVFHPNINSNGSICLDILKEQWSPALTISKVLLSICSLLTDPNPDDPLVPEIAHMYKTDRAKYEATACGWTQKYAMG

SEQ ID NO: 78757 - protein, 164 aa, Gossypium hirsutum
  unsure (1)..(164): unsure at all Xaa locations
  Clone ID: GOSHI-09MAY01-C138_2.pep
NSLLPLRCVLCCSVAVASERILKELKXDLQKDPPTSCSAGPVAEDMFHWQATIMGPSDSPYAGGLFLVTIHFPPDYPFKPPKVAFRTKVFHPNINSNGSICLDILKEQWSPALTISKVLLSICSLLTDPNPDDPLVPEIAHMYKTDRAKYEATARSWTQKYAMG

SEQ ID NO: 78758 - protein, 148 aa, Gossypium hirsutum
  Clone ID: GOSHI-09MAY01-C138_1.pep
MASKRILKELKDLQKDPPTSCSAGPVAEDMFHWQATIMGPSDSPYAGGVFLVTIHFPPDYPFKPPKVAFRTKVFHPNINSNGSICLDILKEQWSPALTISKVLLSICSLLTDPNPDDPLVPEIAHMYKTDRAKYEATARSWTQKYAMG

SEQ ID NO: 78759 - protein, 66 aa, Gossypium hirsutum
  Clone ID: uC-gsflnu33B019d08b1.pep
IRRFPNRSTFRTAAESRAKTIDLCNNPMTKEPKLQGARRIVSEWTDLDFEARKFTAKILGDELVSV

SEQ ID NO: 78760 - protein, 67 aa, Gossypium hirsutum
  Clone ID: uC-gsflmaxxa060e12b1.pep
TPKQNKMFEKALAEFDQDTPERWINIAKAVGGKSAEEVKQHYEILVRDVKEIESGRYPYPYPSGSSN

SEQ ID NO: 78761 - protein, 82 aa, Gossypium hirsutum
  unsure (1)..(82): unsure at all Xaa locations
  Clone ID: AI054602.1.pep
KELKDLQKDPPTSCSAGPVAEDMFHWQATIMGPSDSPFAGGVFLVNIHFPPDYPFKPPKLXFMIYVFHSNINCNESICLDIL

SEQ ID NO: 78762 - protein, 91 aa, Gossypium hirsutum
  Clone ID: LIB3166-017-P1-K1-E4.pep
IRRFPNKSSPSSSPAPSPGDASDINHSNINAEESENKTGGGGGLNGGKKAGIVVAVVAAACLVGFGGLIYKKRQDNIRRSQYGYAARREIL

SEQ ID NO: 78763 - protein, 67 aa, Gossypium hirsutum
  Clone ID: LIB3493-015-P1-M1-H7.pep
GRVGLDILKEQWSPALTIYKVLLSICSLLTEPNPDDPLGPEMAHMYKTDRSMYEATASCWTQKYAMG

SEQ ID NO: 78764 - protein, 50 aa, Gossypium hirsutum
  Clone ID: LIB3120-001-Q1-K1-F11.pep
HKSLVCPWIQQQFERLTYSGISGSTLIFNPLQHLVAYYAIPSLWVHRYPP

SEQ ID NO: 78765 - protein, 91 aa, Gossypium hirsutum
  Clone ID: LIB3584-048-P1-K2-E11.pep
PRDACTFFFVIGPVAEDMFHWQATIMGPSDSPYAGGVFLVSIHFPPDYPFKPPKVVAFRTKVFHPNINSNGSICLDILKEQWSPALTISKV

SEQ ID NO: 78766 - protein, 116 aa, Gossypium hirsutum
  Clone ID: LIB3543-010-Q1-K6-A5.pep
MKQRAIQQNAIGSSCEELQSSISVSVMVTDRRETMVCPKPRRLGLLNASFNDQPVRSLRWQLSHQTELCDSKAGSDILDMILTKDARFGDEKMVNPPSPNPPPPSSPSSSSRKGGC

SEQ ID NO: 78767 - protein, 123 aa, Gossypium hirsutum
  Clone ID: uC-gsflnu33B082a12b1.pep
NLGICGWRRREPISLLQSSCPGRILFFPCVAFFADQSPRLHSGFCETTMFLHFAYTPFQPFFRTTWIRVLYITTHFQPKPTKISYIAEILSLKIPISMISQTYARPPITSGRTGFHLLRLSSS

SEQ ID NO: 78768 - protein, 86 aa, Gossypium hirsutum
  Clone ID: uC-gsflnu33B035h02b1.pep
MEKTRAHLYASKLLSRLNSFTSLRCVLCCSVLMASKRILKELKDPHKDPPTSCSAGPVAVDMFHCEATIMGPSDSPYAGGVFLDTT

SEQ ID NO: 78769 - protein, 88 aa, Gossypium hirsutum
  Clone ID: LIB3272-007-P1-K1-A6.pep
MIPLGTVTPPRKALRWKIAMASKRILKELKDLQKDPPTSCSAGPVAEDMFHWQATIMGPSDSPYAGGVFLVTIHFPPDYPFKPSKVAF

SEQ ID NO: 78770 - protein, 69 aa, Gossypium hirsutum
  unsure (1)..(69): unsure at all Xaa locations
  Clone ID: LIB3493-013-P1-M1-E9.pep
PARRKDSKRVLKELTDLQKDPPTCWSAGPVAEDMFHWQATIMGPSDSPYAGGXFLDTIHFPPDYPFKPP

SEQ ID NO: 78771 - protein, 30 aa, Gossypium hirsutum
  Clone ID: uC-gsflmaxxa061f02b1.pep
ASSLMEKLSYMFLRLKIAHFWLKSLLSLLC

SEQ ID NO: 78772 - protein, 146 aa, Gossypium hirsutum
  unsure (1)..(146): unsure at all Xaa locations
  Clone ID: GOSHI-09MAY01-C128_3.pep
MSASRFIKCVTVGDGAVGKTCMLISYTSNTFPTDYVPTVFDNFSANVVVDGNTVNLGLWDTAGQEDYNRLRPLSYRGADVFLLAFSLISKASYENVSKKWIPELRHYAPGVPIILVXGTKLDLRDDKQFFVDHPGAVPITTAQGEE

SEQ ID NO: 78773 - protein, 199 aa, Gossypium hirsutum
  unsure (1)..(199): unsure at all Xaa locations
  Clone ID: GOSHI-09MAY01-C128_2.pep
MSASRFIKCVTVGDSAVRNTCMLISYTSNTFPXLDYVATVFDNFNANVVVDGTKFTLXLWDIAGHDYYLSLSTLTXRGAKFFLLAFPLITKSIYQNFSNKLIPELMHYAPGVPIILVGTKLDLRDDXQFFIDHPGAVPITTAQGEELRKLIGAPFYIECSSKTQQNVKAVFDAAIKVVLQPPKKKKKKKRKAQKACSIL

SEQ ID NO: 78774 - protein, 198 aa, Gossypium hirsutum
  Clone ID: GOSHI-09MAY01-C128_1.pep
MSASRFIKCVTVGDGAVGKTCLLISYTSNTFPTDYVPTVFDNFSANVVVDGNTVNLGLWDTAARKKTNTIKPLGYPAPAAALPARSLISKASYENVAKKWIPELRHYAPGVPIILVGTKLDLRDDKQFFVDHPGAVPITTAQGEELRKLIGAPVYIECSSKTQQNVKAVFDAAIKVVLQPPKQKKKKKRKSQKACSIL

SEQ ID NO: 78775 - protein, 99 aa, Gossypium hirsutum
  Clone ID: LIB3585-050-P1-K1-A7.pep
MSASRFIKCVTVGDGAVGKTCMLISYTSNTFPTDYVPTVFDNFSANVVVDGNTVNLGLWDTAGQEDYNRLRPLSYRGADVFLLAFSLISKARYENVSKK

SEQ ID NO: 78776 - protein, 95 aa, Gossypium hirsutum
  Clone ID: LIB3197-029-Q1-M1-D7.pep
MSASRFIKCVTVGDGAVGKTCLLISYTSNTFPTDYVPTVFDNFSANVVVDGNTVNLGLWDTAGQEDYNRLRPLSYRGADVFLLAFSLISKASYEN

SEQ ID NO: 78777 - protein, 62 aa, Gossypium hirsutum
  Clone ID: LIB3146-022-Q1-K1-C2.pep
LQNHKYNISSLKHTRSDYITRNNRKQFLHVSVNRSNISKSKVVEGKCENTKGHQYTNSKDNP

SEQ ID NO: 78778 - protein, 239 aa, Gossypium hirsutum
  Clone ID: GOSHI-09MAY01-C348_1.pep
MASRRLLSSLLRSTSRRSLSKSPSPTPRLPSPSPTRRPFPCPYFLSRDAEYSTSAAAAASAPSQPPPAKKGGKGKITDEFTGAGAIGQVCQVIGAVVDVRFDEGLPPILTALEVMDHSIRLVLEVAQHLGENMVRTIAMDGTEGLVRGQPVLNTGSPITVPVGRATLGRIINVIGEPIDEKGELKTDHFLPIHREAPAFVDQATEQQILVTGIKGVDLLAPYQRGGKIGLFGGAGVRKT

SEQ ID NO: 78779 - protein, 137 aa, Gossypium hirsutum
  unsure (1)..(137): unsure at all Xaa locations
  Clone ID: LIB3197-041-Q1-M1-A3.pep
MGSAGVRVISYRAWSSCAHLSANEKAVDLVSLALGRTDNLIMALYVEYHARLEDNTCAAGADYASSQPATGKNGRTGHSSDKFNGAGSMRQVXQVIAAEVDXVRFNEGWPPIMTALEAMDHSIRIELEVAQHLGENM

SEQ ID NO: 78780 - protein, 68 aa, Gossypium hirsutum
  Clone ID: uC-gsflmaxxa106a07b1.pep
AILGRIINDIGEPIVEKGELKTDHFSPRHREAPAFVEHATEQQILVTGIKAGAVLEPYDGGAILKNVK

SEQ ID NO: 78781 - protein, 231 aa, Gossypium hirsutum
  unsure (1)..(231): unsure at all Xaa locations
  Clone ID: GOSHI-09MAY01-C338_1.pep
KSHLEGDYLRIFKALVSAPGLSIHKVLDKWLEXEGKNLSRAEISSATLNLRKRRMYGRALQLSEWLEMKQQLEFNEKDYASRLDLIAKIRGLQKAEDYIQTIPKSFRGEIIYRTLLANCVVSNNLKKAEEVFNKMKDLEFPSTAFACNQLLLLYKRLDKKKIADVLLLMEKENVKPTLFTYRILIDTKGLCNDIYGMDQIVETMKAEGIEPDVQIQSGLAKHFASSGQIEK

SEQ ID NO: 78782 - protein, 111 aa, Gossypium hirsutum
  Clone ID: GOSHI-09MAY01-C328_2.pep
MGRGVSSGGGQSSLGYLFGSGESPKPTPKHVSPSTGTVNEVPQTQNEVVKETPPPAVVPKDIPAGIPGNNANNYFRADGQNCGNFLTDRPPIQMMLTKLSHRNIDEELFYT

SEQ ID NO: 78783 - protein, 113 aa, Gossypium hirsutum
  Clone ID: GOSHI-09MAY01-C328_1.pep
MGRGVSSGGGQSSLGYLFGSGESPKPTPKHVSPSTGTVNEVPQTQNEVVKETPPPAVVPKDIPAGIPGNNANNYFRADGQNCGNFLTDRPTTKVHAAPGGGSSLDYLFGGNPK

SEQ ID NO: 78784 - protein, 163 aa, Gossypium hirsutum
  unsure (1)..(163): unsure at all Xaa locations
  Clone ID: GOSHI-09MAY01-C288_1.pep
MSFTGPSVGPGGRTARRALEFGRTYVVRPKXRHQATIVWLHGLGDNGSSWSQLLETLPLPNIKWICPTAPTQPISIFGGFPSTAWFNVGELSEDAPDDIEGLDAVAAHVANLLAAEPADIKLGVGGFSMGXAATSLYSATCFAHGKYGNGNTYPANLSAVVGL

SEQ ID NO: 78785 - protein, 140 aa, Gossypium hirsutum
  Clone ID: LIB3582-023-P1-K1-H4.pep
IWKNLCGQAQSWSQLLETLPLPNIKWICPTAPTQPITIFGGFPSTAWFDVGDISEDAADDIEGLDAAAAHVANLLSTEPADIKLGVGGFSMGAATSLYSATCFTHGKYENGNPYPAKLSAVVGLSGWLPCSKTLKNKIGQ

SEQ ID NO: 78786 - protein, 96 aa, Gossypium hirsutum
  Clone ID: LIB3585-056-P1-K1-A10.pep
MSFTGSSVGPGGGTVRRALEFGRTYVVRSKGRHQATIVWLHGLGDNGSSWSQLLETLPLPNIKWICPTAPTQPITVFGGFLSTGWFDVGNILKDAV

SEQ ID NO: 78787 - protein, 178 aa, Gossypium hirsutum
  Clone ID: GOSHI-09MAY01-C248_2.pep
VGITIAARKYDFNTAMPFHTSDILNLQPVVKHSVPVCSEAKDLVEMGKVQLVEGMLTEAYTMFSEAFSILQQVTGPMHREVANCCRYLAMVLYHAGDMAGAIMQQHKELIINERCLGLDHPDTAHSYGNMALFYHGLNQTELALRHMSRALLLLSLSSGPDHPDVAATFINVAMMYQD

SEQ ID NO: 78788 - protein, 433 aa, Gossypium hirsutum
  Clone ID: GOSHI-09MAY01-C248_1.pep
PRVRWDLCSNEIVVRSAKHILKDVLRDTEDHDLGPAISHFLSGFVGSCQSVAAKLTSSSQSKNHKKEQASHHSSGKTSKGHARWKGKTSARKNISSYMNVSSESLWSEIQKFAKLKYQFELPEDARLRVKKISVLRNMCQKVGITIAARKYDFNTAMPFHTSDILNLQPVVKHSVPVCSEAKDLVEMGKVQLVEVSILKSETDPIKLKGMLTEAYTASADAWAIRQQVTGPGHREVANCCRYLAMVLYHAGDMAGAIMQQHKELIINERCLGLDHPDTAHSYGNMALFYHGLNQTELALRHMSRALLLLSLSSGPDHPDVAATFINVAMMYQDIGKMNTALRYLQEALKKNERLLGEEHIQTAVCYHALAIAFNCMGAFKLSHQHEKKTYDILVKQLGEEDTRTRDSQNWMKTFKMRELQLNAQKQKGQALNA

SEQ ID NO: 78789 - protein, 420 aa, Gossypium hirsutum
  unsure (1)..(420): unsure at all Xaa locations
  Clone ID: GOSHI-09MAY01-C278_1.pep
MGESDLCEESMAGDSEMNPEQVEEEFSVWKKNTPFLYDLVISHPLEWPSLTVHWVPSSPTPYGPDPTFNVHKLVLGTHTSGGAPDFLMIADAVLPTLASESNIAAKNDDPVIPKVEITQKMRVDGEVNRARCMPQNPVIIGAKTSGSDVFXFDYAKQAAAKEQEGDCVADLRLRGHEKEGYGLSWSPFKEGYLLSGSQDHKICLWDLSSWPQDKVLDATHVYEAHESVVEDVSWHLKNENIFGSSGDDCMLMIWDLRTNQPARPVKAHDREINYLSFNPYNEWVLATASSDSTVGLFDVRKLTVPLHVLSSHSGEVFQVEWDPNHETVLASSGDDRRLMIWDLNRIGEEQLEIELDADDGPPELLFSHGGHKAKISDFSWNKNEPWVISSVAEDNTLQVWQLAESIYRDEDDTQTAEDHP

SEQ ID NO: 78790 - protein, 111 aa, Gossypium hirsutum
  Clone ID: LIB3582-023-P1-K1-F1.pep
QMVCADGSRLKVNFDTAFNNHTKESCSGVVICNSKAEIICCKTEMNLNIPSVFSAEAVACLQVLKLRLPLGLREIEVEGDSRTIIRKLSNMGPPGAVEAMAQNKRRIEVVG

SEQ ID NO: 78791 - protein, 104 aa, Gossypium hirsutum
  Clone ID: LIB3135-018-Q1-K1-E4.pep
QMVCADGSRLKVNFDTAFNNHTKESCSSVFSAEAVACLQVLKLRLQLGLREIEVEGDSRTIIRKLTNMVPLGAVEAMAEDRRRMEVVGEVWVRRDRTRGRTSGR

SEQ ID NO: 78792 - protein, 114 aa, Gossypium hirsutum
  Clone ID: LIB3196-018-P1-M1-H5.pep
RPMAFYRMIVCAGRRICVDRWSAPIGSRLKVNFDVASVFSAEAVACLQALKLGLQLGWREIEVEGDSRRIIRKLTNMVPAGAVEAMAEDRRRMEVVGEVWGRRDEEVGESFLQF

SEQ ID NO: 78793 - protein, 196 aa, Gossypium hirsutum
  Clone ID: GOSHI-09MAY01-C218_1.pep
MSRMLTSLSWRAFNGCSAPRRRVLCVALWRRRGGGRGEPPSEGRIKINFDAAFDEGNSRSETGIVAKSNQGKVLFSWTILHAEVGTAFAAEALACLWAIKTSSEMGFSEIIIVGDSLSIVKKCNTNIHDRSEISAYIRNIKQEMNRFSFIRIQHINRSENQLAHLLAKECLSSGEASYLEDDVPSHARQTMENEWA

SEQ ID NO: 78794 - protein, 121 aa, Gossypium hirsutum
  Clone ID: LIB3197-019-Q1-M1-B5.pep
KNYIPIFSNLYYKRLVSNLLCPRSSIDVENVDQSFVAARAFNGCSAPRRRVLCVALWRRQAKEESKSILTRPLMRGIPDRKRELLLKAIKEKSYFHGRSCMLRWVPRFQQNALACLWAIKT

SEQ ID NO: 78795 - protein, 212 aa, Gossypium hirsutum
  Clone ID: GOSHI-09MAY01-C208_1.pep
HASVTISVVYHYQRFPQAENKLQNLVDLVMWRDVSKSALVFGMGTCIIISSSYTQDLNISFISAMSYVCLVYLAAIFLYRSIICRGVMDVDELSYVVGEEEAFWLLKLVLPYLNEFLIKLKALFSGDPATTMKLAVLLLVLARCGSSITIWKMTKLGFFGVFIVPKVCSAYSHQLTAYGKFWIRRFRDAWESCTHKNAVAMAIFTLVWNQCS

SEQ ID NO: 78796 - protein, 186 aa, Gossypium hirsutum
  Clone ID: LIB3582-047-P1-K1-D6.pep
QSQNKLQNLVDLVMWRDVSKSALVFGMGTFIIISSSYTQDLNISFISAMSYVCLVYLAAIFLYRSIICRGVMDVDELSYVVGEEEAFWLLKLVLPYLNEFLIKLKALFSGDPATTMKLAVLLLVLARCGSSITIWKMTKLGFFGVFIVPKVCSAYSHQLTAYGKIPFLPCDNNKYILSLCYIHFIF

SEQ ID NO: 78797 - protein, 248 aa, Gossypium hirsutum
  Clone ID: GOSHI-09MAY01-C228_1.pep
MANSNDNNNDEHHESSPLLSKQVADQDLKEKPSGKKAKEAAAEVPAHPVVATGDGFGWTADGLPLVHRSVVGEPLGRSQWNSSLLACLGRNDEFCSSDIEVCLLGSLVPCVLYGTNVERLGSDPGTFANHCLPYSVLYLIGNSFFGWNCLAPWFSYPTRTAIRRKFNLEGSCEALHRSCGCCGSCVEDELQREQCELTCDLATHVLCHPCAVCQEGREIRRRLHHPGFNAQPVFTMVPPGEQTMARGA

SEQ ID NO: 78798 - protein, 107 aa, Gossypium hirsutum
  Clone ID: AI725510.1.pep
MRLISGSADDRDAESLFRAKPISEIRNVESATNKQIQDKKEELRQLVGTRYRDLIDSADSILQMKSASESISSNISSIHHSIRSLSISVLEAPSPKLQTPPNPTTRL

SEQ ID NO: 78799 - protein, 86 aa, Gossypium hirsutum
  unsure (1)..(86): unsure at all Xaa locations
  Clone ID: AI725659.1.pep
MRLISGSADDRDAESLFRAKPISEIRNVESATNXQIPDXKEEPPQLGGHRYRELNESADSLLPMKSASQSISSNISFIPQSYRPPP

SEQ ID NO: 78800 - protein, 161 aa, Gossypium hirsutum
  Clone ID: GOSHI-09MAY01-C134973_1.pep
RKAVEDPTEVEVELKRRLGLLTDHLIQKQAQVEALSSEKATLSFRIEAVSRILEEGKSTNMNNATSSDLELGTWGLSSSKLNPVLKDKIRSGKRQLGSTIKQLDAIFLAGAIFLRRNATAKVWSLVYLICLHVWVIYILMSHSRPSDEERSGAVMSLGKYQ

SEQ ID NO: 78801 - protein, 109 aa, Gossypium hirsutum
  unsure (1)..(109): unsure at all Xaa locations
  Clone ID: AI727517.1.pep
VCCFILGISPCMVETLNYFSSTLEVFMNRGQVGPKASHISILLYCFNSTNFLXKKKKKKKKKKKKKKKKKKKKKKKKKKKKKIFWGPPPGEPPFPPKLILFTPPPGPPF

SEQ ID NO: 78802 - protein, 89 aa, Gossypium hirsutum
  unsure (1)..(89): unsure at all Xaa locations
  Clone ID: AI731113.1.pep
KCVVVVISGRPVVVQPFVSSIDALVXAWLPGTEGQGVADVLFGDYGFTGKLARTWFKTVDQLPMNVGDPHYDPLFPFGFGLTTKPTHQN

SEQ ID NO: 78803 - protein, 146 aa, Gossypium hirsutum
  Clone ID: GOSHI-09MAY01-C132763_1.pep
NGLKVNLIITDYSMPGMTGYELLKKIKRSSTFREIPVVIMSSENILTRIDSCLEEGAEEFLVKPVKLADVKRVMNDCIMRGETEGNKRRRVDKRKFEDDNHASSSSSSSSSSIPSSPSSPLPSSPSTAATSSPLHSLKRAKLRDHN

SEQ ID NO: 78804 - protein, 174 aa, Gossypium hirsutum
  unsure (1)..(174): unsure at all Xaa locations
  Clone ID: GOSHI-09MAY01-C132213_1.pep
KVFLRRQREGGKIMADDQEEPPLAIRIDQTVEEPSQSDQEKHQNDYVSVGVTVITGYLGAGKSTLVNYILNAQHGKRIAVILNEFGEEIGVERAMINEGESGALVEEWVELXNGCVCCTVKHSLVPAREXLVPLKKKLDLILXRTTGLPNPAPLXASVLWLDDQLGIFSQALIL

SEQ ID NO: 78805 - protein, 195 aa, Gossypium hirsutum
  Clone ID: GOSHI-09MAY01-C133473_1.pep
MGVPSDDAVLIQKGNKQGEPHVITVNCPDKHGLGCDICHIILDFGLYIAKGDVSTDGIWCYMVFWVVPHSSSPVVRWPSLKNRLQSLCPSCSVTFYLNDQPSNSPASPVYLLKFFCLDPKGLLHDVTQVLCELELTIQKVKVTTTPDGRVLDLFFITDNMELLHTEERQHHLCKQLDAVLGDSCISCKLRLGWSK

SEQ ID NO: 78806 - protein, 211 aa, Gossypium hirsutum
  Clone ID: GOSHI-09MAY01-C133063_1.pep
YLRPDIKRGKFSLQEEQTIIQLHALLGNRWSAIATHLPKRTDNEIKNYWNTHLKKRLTKMGIDPVTHKPKTDALGSTTGNPKDAANLSHMAQWESARLEAEARLVRESKLVPSNPPQSNHFTAVAPSPTPATRPQCLDVLKAWQGVVCGLFTFNMDNNNLQSPTSTLNFMENTTTLPMSSSSSVNGMFNENFGWNSSINPCESGDILKVEY

SEQ ID NO: 78807 - protein, 218 aa, Gossypium hirsutum
  Clone ID: GOSHI-09MAY01-C129633_1.pep
MSETFLASDAPELVVFIQESDYQSIKDIFIDREVPSRNRLKYKGIYSKYNTDVNGDSEEPGKSLSIMSSISNESEQDVQNYARKRHALEDLMKDDDAEDSDGRDVHSHDKTTMSNLEEFLQGSKCQQPHKTEGLPRNLTGPSQNIINEMASGDCGSIAASPIPCSGSMSLRSSSSTASSHSFAFPILPTEWNGSPVRMAEADPRRPKKHQSWKTCFLC

SEQ ID NO: 78808 - protein, 245 aa, Gossypium hirsutum
  unsure (1)..(245): unsure at all Xaa locations
  Clone ID: GOSHI-09MAY01-C129243_1.pep
ADIEHSRHVRPAVKLAMSILISGSAVLVLLAIYMLVRARFANNGLMEDDNWEVTLYQKLDLSIDDIVHNLTSANVIGTGSSGVVYRVIIPNGETLAVKKMWSSEESGAFTSEIETLGSIRHRNIVRLLGWGSNRNLKLLFYNYLPNGSLSSLLHGAGKGGAEWEARYDVMLGVAHALAYLHHDCVPAILHGDVKAMNVLLGAXYEPFLADFGLARVIKSNEDDKFFKLSPNHTYRSYGYMAPEHA

SEQ ID NO: 78809 - protein, 51 aa, Gossypium hirsutum
  Clone ID: uC-gsronu33B130b09b1.pep
SFGSSDYACFNSSSRPHMLCFTIGSSYVDSKHSYLHSVLSSRCGSAILLSI

SEQ ID NO: 78810 - protein, 79 aa, Gossypium hirsutum
  Clone ID: uC-gsronu33B130b03b1.pep
KEVEGGVLCLPIFSTSSLACKFQICTNPFSPLLGTTYILDNWEKKEKEKKLIWNLAPTDHGFWEFWFLFLKSVLFIWFI

SEQ ID NO: 78811 - protein, 201 aa, Gossypium hirsutum
  Clone ID: GOSHI-09MAY01-C125693_1.pep
HFEKYGEILEAVIISDKITGRSKGYGFVTFKDAEAAKKACEDAAPIINGRRANCNIASLGARRPRSASSAPPPQQGSNVGPRATPVAPANQGQGFYPAGAAAPPFHHQHHQAVPFYGYSPAYVATNISYNHKLGYNGGSYMNGHLSQVYPAGQAIVGANTLMPVYPFYHYHQSQTLGFPSSPASAALTFPSPTAWPISNCS

SEQ ID NO: 78812 - protein, 334 aa, Gossypium hirsutum
  unsure (1)..(334): unsure at all Xaa locations
  Clone ID: GOSHI-09MAY01-C126753_1.pep
QSQILSIRYSLLNRHLSAVELTHSYLNRLKQTEPHINCFLHISDPDKVLKQAQDIDDKIKRNEEVGPLAGVLVAIKDNICTADMPSTGGSYILEGYRPPFDATAVKRLKDLGAIVVGKTNLDEFGWGSTTEASAFKVTANPWDLSRVPGGSSGGSAASVSARQCVVSLGSDTGGSVRQPASFCGVVGLKPTYGRVSRFGLMAYASSLDVIGCFGSSVAHTGILLHAISGHDSLDATSSKREVPDFTSQFTSASSLKSRPLXGLRVGLIRETVDXGVDSGXVNQQFRGAAAHLEQLGCVLKKVSLPSFSLGLPAYYILASPESPSNLSRYHCVTY

SEQ ID NO: 78813 - protein, 207 aa, Gossypium hirsutum
  unsure (1)..(207): unsure at all Xaa locations
  Clone ID: GOSHI-09MAY01-C127233_1.pep
FYDRPAKQGVSQGHVLDLFASALEQGGVXAEMKAAVERTGGLAVLAESFGHSVFKDSLKRVXFKDGEQTLGLCFNGTLEINRSKDVKIQGVIGPRTSLEKKGPSRADTVIGEGNTTAWKMCGLDKSTCFTVLFDVSSTDKLNALGVANPQLYLQLLTSYQDPEGKTMLRVTTVTRQWVDSAVSSEELIQGFDQKTAADVMARITSLK

SEQ ID NO: 78814 - protein, 169 aa, Gossypium hirsutum
  Clone ID: GOSHI-09MAY01-C120503_1.pep
AQYKIAVMLLQEITRLQKVQGPRALSAKDEMARLSRHLGSLPLQAKHRINCIRTAIKRNMDVQNYAYAKQMLELLLSKAPPGKQEELRSLIDICVQRGLTNKSIDPLEDPSQFCAATLSRLSTIGYDVCDLCGAKFSALSAPGCIICGMGSIKRSDALGGAGPVPSPFG

SEQ ID NO: 78815 - protein, 248 aa, Gossypium hirsutum
  unsure (1)..(248): unsure at all Xaa locations
  Clone ID: GOSHI-09MAY01-C120433_1.pep
MAERNPSLSNAGFCYETRIYSSLRQPVPLPPADQPLSVAEYCLSIFSSISTSGATPFAVNATTGQTLSYSQFVSQVQLSKPVIAFATSQTSHKIPSLKHETILLDSPEFLSFLTQSNIDGNVIKRIKVNQSDSAAILYSSGTTGRVKGVMMSQRNLIAMMAAIHHHNTIEADGSDNPRDRXTFFTVPLFHVFGFXMLLGRFLSADTVVLTKRFDXEMLRAIEKYRGTXMPVSPPLVLALSNRIAKSST

SEQ ID NO: 78816 - protein, 301 aa, Gossypium hirsutum
  unsure (1)..(301): unsure at all Xaa locations
  Clone ID: GOSHI-09MAY01-C121903_1.pep
ALFKDGKRTRLSYPLENFHSDVSGRSFHNGRFIQRMREKAASLPNVRLEQGVVTSLLEEKGTIRGVQYKTKDGRELTAFAPLTIVCDGCFSNLRRSLCNPQVDVPSCFVGLVLENCYLPYANHGHVILADPSPILFYPISSTEIRCLVDVPGQKVPSIANGEMANYLKTVVAPQVPPEIYDSFVAAVDKGNIRTMPNRSMPASPYPTPGALLMGDAFNMRHPLTGGGMTVALSDFVVLRDLLKPLRDLNDXAPTLCKYLESFYTLRKPVASTINTLGGALYRVFCASPDQAGRNATGLFDI

SEQ ID NO: 78817 - protein, 69 aa, Gossypium hirsutum
  Clone ID: GOSHI-09MAY01-C121673_1.pep
VLTFYVFSSFYYRFILHKIREEASLDNPTSHQRIYSPSSKSDLKGRGRGLFFRIFRVWRALLSDSLKKG

SEQ ID NO: 78818 - protein, 129 aa, Gossypium hirsutum
  Clone ID: GOSHI-09MAY01-C121303_1.pep
KNLTLPARGGKLGSPKRGAPFFFIFFFFFFFFFFFFFFFFFFFFFFFFFFFFFFFFFLCQKQIHSNWEKRIKGDTLNSSFQLTKLFHHFKAASFTTTHRVEFGEETCFTIHLVLPNNTKDGELHSSKQI

SEQ ID NO: 78819 - protein, 106 aa, Gossypium hirsutum
  Clone ID: GOSHI-09MAY01-C122423_1.pep
PRVAETFWAIWAHFQYWAIRFGLEGLFWVFGFVIGHYWPCNFFGVFNYIYLFTWFVCNGPRHIWPTIPPSNIFPLSVNFLSSSFESVWESFIQSSLLWFLGSSIGW

SEQ ID NO: 78820 - protein, 181 aa, Gossypium hirsutum
  Clone ID: AI729154.1.pep
SEVGSPDHHAVQMTESSPSSRGVNLDKFFDDVESIKDELKELERLNDDLSSSHEQSKTLHNAKAVRDLRAKMDGDVAMALKKAKLIKVRLEALDRSNAANRSLPGCGPGTSSDRTRTSVVNGLRKKLKDSMESFNELRERISSEYTGTVHTKYFTVTGENPDDKTLDLMFSLCYFVIVNLK

SEQ ID NO: 78821 - protein, 155 aa, Gossypium hirsutum
  unsure (1)..(155): unsure at all Xaa locations
  Clone ID: uC-gsflnu33B066e06b1.pep
TLHSAKAVRDLXAKMDGDVAMALKKAKLIKVRLEALDRSNAANRSLPGCGPGSSSDRTRTSVVNGLRKKLKDSMESFNELRERISSEYRETVQRRYFTVTGENSDDKTLDLLISTGESETFLQKAIQEQGRXRILDPIYGIQDRHDAGTDLERHF

SEQ ID NO: 78822 - protein, 97 aa, Gossypium hirsutum
  Clone ID: uC-gsronu33B111f04b1.pep
TKVLSILEAKAACVLIDLCCGVLAPWITQVIAKVDLTVELMEDLLGIIQGACHSTARARARAALKYIVIGLSSHMDDILGKYYVLDYPFLTVYLTCV

SEQ ID NO: 78823 - protein, 53 aa, Gossypium hirsutum
  Clone ID: uC-gsflnu33B036h07b1.pep
ARLEFSNFKTLTSFQKKNKTRNFKPSPLRPASTVDELNRSLTPNRTWRSLNQM

SEQ ID NO: 78824 - protein, 153 aa, Gossypium hirsutum
  Clone ID: GOSHI-09MAY01-C119912_1.pep
GSFPELRIQGWSIPATMKKMFNLSSNFLTHRDAWAGTCERLVGELSSPRTDCPEKLPEAAPLTTTAANEDAGLSEFQSEVVQLARALNGDHFLSGFAEEMRTKMSVKGAHEYVKGAVSRFIRASKEAIKLGADESAICDMRSSLTTRSSSIHN

SEQ ID NO: 78825 - protein, 182 aa, Gossypium hirsutum
  unsure (1)..(182): unsure at all Xaa locations
  Clone ID: GOSHI-09MAY01-C119552_1.pep
LGIVLWYAVTNYRTWIFVLLYGYSMGVELSTDNVIAEYLYDRFNLKLHTAGIIAATFGMANLVARPFGGYASDKAAQLFGMRGRLWVLWSLQTLGGGFCIWLGRANSLPIAVLAMILFSIGAQAACGATFGIIPFISRRXLGIISGLTGAGGNFGFGLTQLIFFSTSRFSTASGLSWMGAMI

SEQ ID NO: 78826 - protein, 184 aa, Gossypium hirsutum
  unsure (1)..(184): unsure at all Xaa locations
  Clone ID: GOSHI-09MAY01-C119462_1.pep
WNIYKALAMPQEAIVCYQRAVQTRPNYPVALGNLASTYYERGQLDLAIHHYKQAIAYDQRFVEAYNNLGNALKDVGRVDEAIQCYNQCLTLQPNHPQALTNLGNIYMEWNMVGAAASYYKATLTVTTGLSAPFNNLAVIYKQQGNHMEAITCYNEVLRIDPLAADGLVHRGNTLQEXGRVSEAI

SEQ ID NO: 78827 - protein, 58 aa, Gossypium hirsutum
  Clone ID: GOSHI-09MAY01-C119772_1.pep
TKDDSPTLVTKNAICYKINFHLSWNPIFLVLSAAIPTYPDDLLSYVYITYTPRVQRKA

SEQ ID NO: 78828 - protein, 149 aa, Gossypium hirsutum
  Clone ID: GOSHI-09MAY01-C119162_1.pep
STCTKQAGRVNDQGLNKGNPAHFTIFPGDGNCSGDGQYSPAVISLQSAPSEQHSRFELGFGQPPMVCAKYPYMDQCYGVFSTYGPSVSGRVMLPLNIASEDGPIYVNAKQYNGILRRRQSRAKAVLENKLTKARKPYMHYSCHLHAYAS

SEQ ID NO: 78829 - protein, 211 aa, Gossypium hirsutum
  Clone ID: GOSHI-09MAY01-C114802_1.pep
GNSLRSFELVDEGKEPRKKGCPGVVSGAEFLIRAARDDVALAGGPDWVAGLGRKVSSTPSQEDSDNIMPSPRANATSLIDLFTKFNLSVKDLVALSGSHSIGEARCFSIMFRLYNQSGSGKPDPAIEPGFREKLDKLCPLGGDENVTGDLDATPTLFDNQYFKDLVAGRGVLNSDQTLFTFPQTREYVKLLGLALCCRNPLDGCQAIFFLV

SEQ ID NO: 78830 - protein, 156 aa, Gossypium hirsutum
  Clone ID: uC-gsronu33B154a12b2.pep
DVSKLSRGLENMGDVLRLNETMGLDESKEKFSESMNQFMKMAEQEIPRIQAHERLALSLVKEITEYFHGNSAKEETHPFRIFMVVRDFLTVLDRVCKEVGTINERTIVSSAHKFPVPVNPMMQQTFPVPVNPMMQQAFPGFQGNPHYDSDDDTAPS

SEQ ID NO: 78831 - protein, 72 aa, Gossypium hirsutum
  Clone ID: uC-gsronu33B154a06b2.pep
EKSSASLHQFMKMAEQEIPRIQAHERLALSLGKEITEYFHGNSAKEETHPFRIFMGVRDFLTVLDRVCKEVG

SEQ ID NO: 78832 - protein, 175 aa, Gossypium hirsutum
  Clone ID: GOSHI-09MAY01-C115142_1.pep
MSFNQSRSDKSEQQYRKSGRSASFNQQRSSSGVYSKGAGGGPAPSRSPSSSSSSLSSNRSLKKSNNAQGGQYRLNSLAANSTESSNTSAARTKQNGAHLQPQLQGASDASIASNAAQPVQSPIIQNSTRAVSKAPTSQPPTISSDSGLPTTAGKEDPSKAFSLQFGVITPGFMNG

SEQ ID NO: 78833 - protein, 176 aa, Gossypium hirsutum
  unsure (1)..(176): unsure at all Xaa locations
  Clone ID: GOSHI-09MAY01-C115152_1.pep
MEAMAAAKPVIKVAALCGSLREGSYNRGLLRYAMELTKEEIDGIQIDYIDISPLPMLNTDLEVNGKYPPVVEAFRQRILAADSILFASPEYNYSVTGPLKNAIDWASRSPNVFANKAAAIASVAGSLGGARAQYHYXQIGVYLDLHFINKPEFFLNAYDSPXKFDSDGNLIDPASK

SEQ ID NO: 78834 - protein, 163 aa, Gossypium hirsutum
  unsure (1)..(163): unsure at all Xaa locations
  Clone ID: uC-gsflmaxxa006a04b1.pep
EFEHGEINRLEALLAEGRIFCDMPALADRDSILLKDTHLENALICQPQQRNIHGRIFGGFLMHRAFELAFSTAYAFAGLVPCFLEVDHVDFLRPVDVGDFLRXKSCVLYTELENPDQPLNNVKVAAHVTRPEIRTSEVSNTFYFTFSVRPEAKATKNGFKIRN

SEQ ID NO: 78835 - protein, 167 aa, Gossypium hirsutum
  Clone ID: AI731748.1.pep
FLFEEAEARSKLRKRKRVDRREFEHGEINRLEALLAEGRIFCDMPALADRDSILLKDTHLENALICQPQQRNIHGRIFGGFLMHRAFELAFSTAYAFAGLVPCFLEVDHVDFLRPVSIFLLFVELLASTCISIYIFIFHARCCSRLFEHSTSFYLAFNHYFMHIAVK

SEQ ID NO: 78836 - protein, 161 aa, Gossypium hirsutum
  Clone ID: uC-gsflmaxxa006a10b1.pep
PTRPDREWPPFLFFFFQPCDMPFLADRDSILIKDTHLETAVICQPQKSNIHGRIFGGCLMHRAVELAFSTAYACAGLVPRFREVDHVDFLRPVDAGDVLRLESCVLYTELENPDQPLINVEVAAHVTRPEIKTSEVSNTIYFTFFVRPEGKATKNGFKIRN

SEQ ID NO: 78837 - protein, 92 aa, Gossypium hirsutum
  Clone ID: GOSHI-09MAY01-C116962_1.pep
MPLGLILGIGRTFRRKRTSSLDILSSKRAPRDYYKGKNCKSTGFHTRKGGYVVMQEKLPNYVVPDLTDFKLKPYVSQCPTEVKTAEAAESAK

SEQ ID NO: 78838 - protein, 82 aa, Gossypium hirsutum
  unsure (1)..(82): unsure at all Xaa locations
  Clone ID: uC-gsflnu33B093a09b1.pep
MPLGLILGIGRTFRRKSTSSFDFLSPKRAPRDYYKGKNCKSTGFHTHKGGYLVMQEKLPNYVLPDLTDFTLNPXVSQCPTGV

SEQ ID NO: 78839 - protein, 219 aa, Gossypium hirsutum
  unsure (1)..(219): unsure at all Xaa locations
  Clone ID: GOSHI-09MAY01-C116182_1.pep
LKTGIARIIVQPSTKRIHHDSLYEDVGCHISDDLSECGLILGIKQPKLDMILPNRAYAFFSHTHKAQKENMPLLDKILAERVSLYDYELIVGDNGKRLLAFGKYAGRAGMIDLLRGLGQRYLSLGYSTPFLSLGASYMYPSLAAAKAAXITVXGEEIASQGLPSGICPVIFVSXGFRNVSVGAQEILNYFSGFVEPETSDSWKVLTISGRMSSRGLQLW

SEQ ID NO: 78840 - protein, 173 aa, Gossypium hirsutum
  unsure (1)..(173): unsure at all Xaa locations
  Clone ID: GOSHI-09MAY01-C117192_1.pep
SDAGSSIDLSTSSSGKPKSSFSRALVKSNPLDVDQGCRSKSKATTTHHNFTSMVKRFVDNQSKTKAMGHAQLLIPSDVLAEDLKKTARKGAALTVLQRKLFGNGSAGKDRGKMEVKALTEVKGNTRTLPMGLRSETELLSANKELQMEIAELKLQFQXEHKVEKLKDLCLKQK

SEQ ID NO: 78841 - protein, 87 aa, Gossypium hirsutum
  Clone ID: GOSHI-09MAY01-C117012_1.pep
LLASRALRESLNDFLISPIPIFFFLVKLQINSSSLNEEIGMGCGGLKCLLRQSGQAQEWKVMLFFYFIWWRFCIAILWFWWRMAFTR

SEQ ID NO: 78842 - protein, 38 aa, Gossypium hirsutum
  Clone ID: uC-gsronu33B021a05b1.pep
YCQLNHVSISCNSFDHWVWSYNENHLQHVIVANVEFKI

SEQ ID NO: 78843 - protein, 38 aa, Gossypium hirsutum
  Clone ID: uC-gsronu33B021c04b1.pep
YCQLNHVSISCNSFDHWVCLYNENHLQHVIFVNFEFKI

SEQ ID NO: 78844 - protein, 66 aa, Gossypium hirsutum
  Clone ID: GOSHI-09MAY01-C110092_1.pep
LYFLPHSGRPAVRIVSFTLSRPWRWLWYAFDSTTTFISFAFTTQGLVLDRHGGNGNKERGSSENTN

SEQ ID NO: 78845 - protein, 191 aa, Gossypium hirsutum
  Clone ID: GOSHI-09MAY01-C110232_1.pep
MEKQMIFAWAMIFCLAMAPVYGQYYSRTVKAGPRVEKITHLHFYYHDIRSGNNPTAFLIASLNITQDPPSYGTLFAMDDPLTTEFELTSTLVGNAQGLYLALSRDLTKFSAVFYADFTFTTGRYNGSSFSLFSRFPPTDVVPAPGTIREMAIVGGTGKFRMATGFALLRPTSSSDTVGDAHVEFNVTLYHY

SEQ ID NO: 78846 - protein, 80 aa, Gossypium hirsutum
  Clone ID: uC-gsronu33B082c08b1.pep
VGIFLADEKIVVESMASASCNICCALPKKRAKIMDRSADEERMSCFLALPLNTCSFSASNFLKLSNAFQIYPTPGQWVTA

SEQ ID NO: 78847 - protein, 62 aa, Gossypium hirsutum
  Clone ID: uC-gsflnu33B135b03b1.pep
ADLSAQSGPSKHQHQSSFSTKLNYIATKTENMLLKHAQMLQHAYKLYALNKIIMVPCILTKT

SEQ ID NO: 78848 - protein, 181 aa, Gossypium hirsutum
  Clone ID: GOSHI-09MAY01-C111682_1.pep
RPLPSLAAEKQFRTEVSTIGTIQHVNLVRLRGFCSEGIRKLLVYDYMPNGSLDAHLFHEEKSKALTWKTRYQIALGTARGLAYLHEKCRDCIIHCDIKPENILLDAELCPKVADFGLAKLIGRDFSRVLTTMRGTRGYLAPEWISGVPVTAKADVYSYGMMLFESVSGRRNSEQSEDGKVR

SEQ ID NO: 78849 - protein, 115 aa, Gossypium hirsutum
  Clone ID: GOSHI-09MAY01-C111192_1.pep
MAESLGPRLYSCYNCGNHVSLHDDIISKSFQGRSGRAFLFSHAMNIRVGAKADRHLITGLHTVADIYCGDCGELLGWKYKRAYEASHKYKEGKIILEKAKDCFGELVVAFIPLQM

SEQ ID NO: 78850 - protein, 265 aa, Gossypium hirsutum
  unsure (1)..(265): unsure at all Xaa locations
  Clone ID: GOSHI-09MAY01-C112582_1.pep
TQIIDEILQSFKSIRPRSRPRIVYDLLLSYTLQSSDPIPLSLAVLQCTLRSGCLPAPQIKLLLSEAWLNFRGHSQPVSDSLLEMQDIGFFPDSMTCNYLISSLCAXDQLEEAAKILKGMSGAGCPPDLESFAGLITAMCTFRRTGDAIELVKQMVQKAXLTPRQGTVKKVVATLRANREIWKAVELIEFLERKGIPVGFESYELVVEGCLECCEYVLAGKVVVAMTERGFIPYIRVRQKVVEGLVRVNELKLAYLVRERFSELGS

SEQ ID NO: 78851 - protein, 56 aa, Gossypium hirsutum
  Clone ID: uC-gsronu33B098b11b1.pep
CSTDGTIATYLGFAHQWLLFLTWLYFELHTNFILHCPYNFQNTQARFLPRLCTLLA

SEQ ID NO: 78852 - protein, 44 aa, Gossypium hirsutum
  Clone ID: uC-gsronu33B106b11b2.pep
CFKDGTIATYLCFVHQWLLFLTWLYFELHNNFILALTYNFKIPV

SEQ ID NO: 78853 - protein, 179 aa, Gossypium hirsutum
  Clone ID: GOSHI-09MAY01-C113712_1.pep
LRPAIPVLERSIEIPVVVDGQTHALAKFAGCMQLGDTYAMQGQIENSILCYTAGLEIQRQVLGETDPRVGETCRYVAEAHGQALQFDEAEKLCQIALDIHGENGAPASIEEAADRKLMGLICDSKGDYESALEHYVLASMAMAANGNEVDVASIDCSIGDAYLSLARYDEAIWLIKKHS

SEQ ID NO: 78854 - protein, 78 aa, Gossypium hirsutum
  Clone ID: GOSHI-09MAY01-C113672_1.pep
FLFHSKEETVSPAISVWVQIQLLLQLYIVVTCIRRNEYLSALLGILYFTYRHQKPLSFTFHLCELRLISEYRSRIYFN

SEQ ID NO: 78855 - protein, 151 aa, Gossypium hirsutum
  Clone ID: GOSHI-09MAY01-C113172_1.pep
EIPTSPSANKGFKLTKQSMWRSAPNWLAVSANRHPSSAAHFMSNQQSLGLQLAQLSRDASAAGAARRISAQRQNVEVESVGAIKSDTNKVKKYFRLEFINKEQEEAEEYLDFKALDNGFVAVTPFSLCPQVEVDIQTAASDWISGALQVEQ

SEQ ID NO: 78856 - protein, 184 aa, Gossypium hirsutum
  unsure (1)..(184): unsure at all Xaa locations
  Clone ID: GOSHI-09MAY01-C113012_1.pep
SVNFGLSQVYSNEAKHDEHLRIVLRVLREKELYAKFTKCEFWLKEVTFLGHVVSAEGIKVDPRKIDAILEWKPPRSVSEIQSFLGLAGYYRRFVEGFSVMAAPLTKLIRKGVPFVWTEKQQKAFDRLTKVLTEAPVLIQPVSGKDFTVYXDASHVGLGCVLMQEGKVVAYASRQLQAHQVNYPA

SEQ ID NO: 78857 - protein, 198 aa, Gossypium hirsutum
  unsure (1)..(198): unsure at all Xaa locations
  Clone ID: GOSHI-09MAY01-C8949_1.pep
PTRPIDMASAVFIEPLPVMGFVAQLLGKDLLSRPLSDSDRVKIKKALRGVKVEVTHRGNVRRKYRVSGLTSQPTRELVFPVDDNSTMKSIVEYFQEMYGFTIQHTHLPCLQVGNQRMANYLPMEACKIVEGQRYTKRLNERQITALLKVTCQRPRDREHDILQTVQHNAYNQDPXAKEFGIKLVKNSFGRGLILPAPC

SEQ ID NO: 78858 - protein, 111 aa, Gossypium hirsutum
  Clone ID: GOSHI-09MAY01-C8939_5.pep
FGVSFGIICHTLVNLRSRRVLINACCPRGCLGDKDCSHIFRQCLTSLEAWQMLNLSWVTNNSIPEFRDWLTWVLLQGTKEQSRLFCYALWLIWYSRNRLVHERIFIIGRQQ

SEQ ID NO: 78859 - protein, 145 aa, Gossypium hirsutum
  Clone ID: GOSHI-09MAY01-C8939_4.pep
TMLTVKFGRGNNLGNSPFGAPYKLSQDSSLNPSSIILQTGLKNFYSKLWSLQLPTEITNTIWRIFWNYLPTLVNRRRGRVLINACCHRGCLGDKDSIPEFRDWLTWVLLQGTKEQSRLFCYALWLIWYSRNRLEHERIFIIGRQQ

SEQ ID NO: 78860 - protein, 149 aa, Gossypium hirsutum
  Clone ID: GOSHI-09MAY01-C8939_3.pep
DIFRRCVRQANFQICLRSVDELLASKSVLHNNVPSPFAAETYAGLEAIRLEILSGFRELQIRGDSITVIRKCQTTETDKSVIEVIIRDIQKRCIHFQTIEFKHIPRSDATGAARVAKEALESGVTSYLVQGEPNLHDSPSEGRWARDPD

SEQ ID NO: 78861 - protein, 101 aa, Gossypium hirsutum
  Clone ID: GOSHI-09MAY01-C8939_2.pep
LFHSSSSSSILDLLPNDLPKASHANSVLLVPDLLVSAATEMAHYCEGLTLMPKVHQHSGGRSGSSLVERSVEIYLNHCCLPMINIRSCTSRFLEYHISHRA

SEQ ID NO: 78862 - protein, 149 aa, Gossypium hirsutum
  Clone ID: GOSHI-09MAY01-C8939_1.pep
DIFRRCVRQANFQICLGSVDELLASKSVLHNNVPSPFAAETYAGLEAIRLEILLGFRELQIRGDSITVIRKCQTTETDKSVIEVIIRDIQKRCIHFQTIEFKHIPRSDNIRAHQIAKEALESGVTSYLVQGEPNLHDSPSEGRWARDPD

SEQ ID NO: 78863 - protein, 127 aa, Gossypium hirsutum
  Clone ID: GOSHI-09MAY01-C8889_1.pep
MDKISGSRRMGDASEVGDDMSDRVYTIDSIHTGVPYKGAPEPKPGVGDCLDYAYTPRDVLNLPDGCDPNIKKLYTRLQALEADRESMRQAIISMRTDNAQLVLLKEIAQQLCKEMPPERQLTVRKPS

SEQ ID NO: 78864 - protein, 242 aa, Gossypium hirsutum
  unsure (1)..(242): unsure at all Xaa locations
  Clone ID: GOSHI-09MAY01-C8579_1.pep
VRCSSHFCLFQNGAAVKRRERDRNRDSLETEAKDLDFWYAVPFNKDPFQNQSSSRFSLRSDNSHLSRNGAAVKAEKKGDMATKVSNFSDLIQRVAASCLLHPLAAGRQESGEADALTDDVIEEDPDEEEYYEYNNSSEDEEKVNGVKGAEKSRRIATVWNNNGEKTKEMVTLMEEVFEAVAEMKKAYVRLQEAHCPWDPERMRAADVAVVGELRRLGVLRXERFRRGARAGGRSRGKTRGLC

SEQ ID NO: 78865 - protein, 167 aa, Gossypium hirsutum
  Clone ID: LIB3829-027-Q6-K6-H11.pep
ESLQLCEKTPKLFSLTEFAVHLIFACFRNGAAVKAKKKGDMATKVSNFSDLIQRVAASCLLHPLAAGRQESGEADALTDDIIEEDPDEEEYYEYNNSSEDEEKENGVKGAEKSRRIATVWNNNGEKTKEMVTLMEEVFEAVAEMKKAYVRLQEAHCPWDPERMRAAD

SEQ ID NO: 78866 - protein, 148 aa, Gossypium hirsutum
  Clone ID: GOSHI-09MAY01-C8519_3.pep
MGFAVATKAALLLHLSLFVLSSFTVSSQILPEALPPHYHGISPVVPPAHPPSHHHHHHHPHPHPHPHPHPHPHQPTPSPTKPPTHPPVYPPPKAPKIAPVYPPPKSPSKPPTYAPPPKSPSKPTTYAPSPKSPSKPQLTLLVQATDQA

SEQ ID NO: 78867 - protein, 290 aa, Gossypium hirsutum
  Clone ID: GOSHI-09MAY01-C8519_2.pep
FTRPPTRPPTGAFSRPDHFHHHHPHPHPHPHPHPHPHQPTPSPTKPPTHPPVYPPPKAPKIAPVYPPPKSPSKPPTYAPPPKSPSKPPTYAPPPKSPSKPPTYAPPPKPPTKPPTYAPPPKPPVYPPTKPPTAPPTKPPVHPPTYPPPSPSPAKPPTYPKPQRSLVAVQGVVFCKSCKYAGSNTLLGAKPILGATVKLTCKNTKYKQEATAKTDKNGYFFLQAPKTVTSFGAHKCTVSLVSSPMAKCSKPSNLHGGLKGATLRPEKPFTANKLPFILYTVGPFAFEPKCY

SEQ ID NO: 78868 - protein, 240 aa, Gossypium hirsutum
  unsure (1)..(240): unsure at all Xaa locations
  Clone ID: GOSHI-09MAY01-C8519_1.pep
MRFAVAAKAALLLHLSLFVLSSFTVSSQILPEALPPHYHGISPVVPPAHPPSHHHHHHHPHPHPHPPTPSPTKPPTHPPVYPPPKAPKMAPGYPPPKSPSKPPTYAPXPSHPASRQLTPLHPSHHHHHHPHPHPHPHPHPHPHQPTPSPTKPPTYAPPPKPPVYPPTKPPTAPPTKPPVHPPTYPPPSPSPPKPPTYPKPQRSLVAVQGVVFCKSCKYAGSDTLLGATPILGQFETYHYT

SEQ ID NO: 78869 - protein, 132 aa, Gossypium hirsutum
  unsure (1)..(132): unsure at all Xaa locations
  Clone ID: uC-gsflnu33B075f02b1.pep
MPPTYPKPQRSLVAVQGVVFCKSCKYAGSDTLLGATPILGATVKLTCKNTKYKQXATAKTDKNGYFFLQAPKTVTSFGAHKCTVSLVSSSMAKCSIPYNMHGGLKGATLRPWKPFTVNKLLFIIYTVGPYAF

SEQ ID NO: 78870 - protein, 63 aa, Gossypium hirsutum
  Clone ID: LIB3272-055-P1-K1-H3.pep
LQLSFKQNMGFAVTTKAAWLLHLSLFVLSSFTVSYQILPEGMPPYNHGILTRVPTDHTSSLYY

SEQ ID NO: 78871 - protein, 142 aa, Gossypium hirsutum
  Clone ID: GOSHI-09MAY01-C8539_1.pep
MEKLRVCIVVLACVVVSAAAQSASNVRATYHLYNPQNINWDLTAASAFCATWDASKPLAWRQKYGWTAFCGPAGPQGQAACGRCLRVTNTATGTQATVRIVDQCSNGGLDLDVNVFNQLDTNGIGNAQGHLTVNYEFVNCGD

SEQ ID NO: 78872 - protein, 135 aa, Gossypium hirsutum
  Clone ID: GOSHI-09MAY01-C8489_1.pep
MASLAGSSISMQPRQTLATSRVSGLKLVSFVNRGRSSLSFRLRPDRLRISCAAKPETVDKVCEIVRKQLALPSDKPVTGESKFAELGADSLDTVEIVMGLEEEFGITVEEDNAQSISTVHDAAELIDKLCGEKSA

SEQ ID NO: 78873 - protein, 68 aa, Gossypium hirsutum
  Clone ID: uC-gsflmaxxa096f07b1.pep
MATSRVSGLKLVSFVNRGRSSLSFRLRPDRLRISCAVCFSLNDMIFVSTQCNPLVKGKGYITGIYISF

SEQ ID NO: 78874 - protein, 112 aa, Gossypium hirsutum
  Clone ID: LIB3135-058-Q1-K1-A11.pep
MCMLPFQTLDTKPFLGLKIDSLLNRQRSSLFFRLRPDRSRIACAATPETEGKVCEIGQKQLALPSDKAVTGESKYAELGADYLDTVYTVIGLDEELGITVVEDNGQSISTVM

SEQ ID NO: 78875 - protein, 100 aa, Gossypium hirsutum
  Clone ID: LIB3146-010-Q1-K1-F8.pep
MASLAGSSISMQPRQTLATSRVSGLKLVSFVNRGRSSLSFRLRPDRLRISCAAKPETVDKVCEIVRKQLALPSDKPVTGESKFAELGADSLDTVEIVMGL

SEQ ID NO: 78876 - protein, 166 aa, Gossypium hirsutum
  Clone ID: GOSHI-09MAY01-C8459_1.pep
FIYFYFQVVQVSGTGRSEGKENPFTAKASLIRYWNNHISNNLPKPPFLISKASPLNAIDLAKLTQLANHNSLSSHIESFCSLANLFCSFQEESSKLDAVGKGKGDANFAVYSSKNFKGYGSLSRGGIDSFKNYSDGLNTPNESFKKYSRGSNAHSEDFTSYAKDAN

SEQ ID NO: 78877 - protein, 143 aa, Gossypium hirsutum
  unsure (1)..(143): unsure at all Xaa locations
  Clone ID: LIB3493-039-P1-M1-H5.pep
MKTSLFFLYLGSGSYFSVVLVFGTGRSEGKENPFTAKASLIRYWNNHISNNLPKPPFLISKASPLNAIDLAKLTQLANHNSLSSHIESFCSLANLFCSFQEDSSKLDAVVKGKGDAXLAVYSSKNFKGYGSLRRGGIDSFKNY

SEQ ID NO: 78878 - protein, 121 aa, Gossypium hirsutum
  Clone ID: GOSHI-09MAY01-C8479_3.pep
MAAEEGQVYGCHTIESWNEQLQKGNESEKLVVVDFTASWCGPCRFIAPFLAELAKKFPSVTFLKVDVDELKEVATDWAVEAMPTFMFLKEGKIVDKVVGAKKEELQQTLSKHMAVPSTTSA

SEQ ID NO: 78879 - protein, 140 aa, Gossypium hirsutum
  unsure (1)..(140): unsure at all Xaa locations
  Clone ID: GOSHI-09MAY01-C8479_2.pep
MAAEEGQVYGCHTIESWNEQLQKGNESEKLVVVDFTASWCGPCRFIAPFLGXELAKKFPSVTFLKVDVDELKEVATAKIIEMQSASQWRAQLEASKQSTKLLVIDFSATWCGPCKWMETVIDDMPLYDDVEFIKIDVDTL

SEQ ID NO: 78880 - protein, 118 aa, Gossypium hirsutum
  Clone ID: GOSHI-09MAY01-C8479_1.pep
MGNKASTAKIIEMQSASQWRAQLEASKQSNKLLVIDFSATWCGPCKWMEPVIEEYANLYDDVEFIKIDVDTLEDVARQFKVEAMPTFVLVKKGKEICRLVGAKKTELQKLIEKHRFDN

SEQ ID NO: 78881 - protein, 133 aa, Gossypium hirsutum
  unsure (1)..(133): unsure at all Xaa locations
  Clone ID: LIB3584-018-P1-K1-D9.pep
MAHEVYMNYTNVTVDACREYSCHTVQSSYTQLEAGDVLQKEAAVDSTASWCGHCRFNAXLFWLILAYKLPVGSFVKADVDELKEDAADCAVEAMPTFMFLKEGKIVDKVVGAKKEELQQTLSKHMAVPSTTSA

SEQ ID NO: 78882 - protein, 175 aa, Gossypium hirsutum
  Clone ID: GOSHI-09MAY01-C8779_1.pep
DSIDFYKQQIKEFDKRMKLERQKILKDSKSILPVAFVSFKSRWGAAVCAQTQQSKKATLWLTDWAPEPRDVYWRNLAIPFVSLTIRKLIISLSVFALVFFYMIPIAFVQSLANLEGLERVAPFLRPVIELNFIKSFLQGFLPGLALKIFLYVLPTILMIMSKIEGHIAILTLERR

SEQ ID NO: 78883 - protein, 150 aa, Gossypium hirsutum
  Clone ID: GOSHI-09MAY01-C8769_1.pep
MSRRKVREPKEETTTLGPAVRDGEHVFGVAHIFASFNDTFIHVTDLSGRETMVRITGGMKVKADRDESSPYAAMLAAQDVSQRCKELGITALHIKLRATGGNKTKTPGPGAQSALRALARSGMKIGRIEDVTPIPTDSTRRKGGRRGRRL

SEQ ID NO: 78884 - protein, 137 aa, Gossypium hirsutum
  Clone ID: GOSHI-09MAY01-C8739_1.pep
MASFNPSGYEKYSGSAAEATKFGQDAATTGIPVSSSNAYYTDTSQNTNTRPQTKTRVPWSSGLCGCFSDWRNCCITCWCPCVTFGQIAEIVDKGSSSCGVNGALYTLIACVTGCACCYSCFYRAKMRQQYMLKKHPC

SEQ ID NO: 78885 - protein, 650 aa, Gossypium hirsutum
  unsure (1)..(650): unsure at all Xaa locations
  Clone ID: GOSHI-09MAY01-C8699_1.pep
MKWVEDVXGLEYDLDLFNVVAVPDFNMGAMENKSLNIFNSKLVLASPETASDADYAAILGVIGHEYFHNWTGNRVTCRDWFQLSLKEGLTVFRDQEFSSDMGGRPGKRIADVPKLRNFQFPQDAGPMAHPVRPHACIKMDNFYTLTVYEKGADVVRMYKTLLGTQGFRKGMDLYFKRHDGQAVTCEDFFAAMKDANGADFANFLLWYSQAGTPVVKVTSSYNAEAHTFSLKFSQEVPPTPGQPVKEPMFIPVAVGLLDSSGKDMILSSVYHNGTLQSVASNNQPVLSTVLRVTKKEEEFVFCDIFERPIPSLLRGYSAPIRLESDLSDSDLFFLLAHDSDEFNRWESGQVLARKLMLSLVADFQQSKPLTLNPKFVQGLKSILCDPSLDKEFIAKAITLPGEGEIMDMMEVADPDAVHAVRTFIRKELASQLKSEFLSTVENNRSSEEYVFDHPNMARRALKNTALAYLGSLEDSEMTELALHEYKTATNMTDQFAALSAISQKPGKTRDDVLADFYTKWQHNYLVVNKWFALQAMSNIPGNVENVRKLLNHPAFDLRNPNKVYSLIGGFCGSPVNFHAKDGSGYKFLGEIVLQLDKLNPQVASRMVSAFSRWRRFDESRQTLAKQQLETIMSANGLSENVFEIALKSLA

SEQ ID NO: 78886 - protein, 137 aa, Gossypium hirsutum
  Clone ID: LIB3272-009-P1-K1-C7.pep
LYFKRHDGQAVTCEDFFAAMKDANGVDFANFLLCQEVPPTPGQPVKEPMFIPVAVGLLDSSGKDMILSSVYHNGTLQSVASNNQPVLSTVLRVTKKEEEFVFCDIFERPIPSLLRGYSAPVRLESDLSDSDLFFLLA

SEQ ID NO: 78887 - protein, 120 aa, Gossypium hirsutum
  Clone ID: LIB3083-003-Q1-L1-H2.pep
PTGVFLYFKTHDRRAKAGKNLFAAIKDTNGSDFANSLLWYSQAGTPVVKVTLSYNAEANTGSIKLIQQVHITHVQPVKQPIFISAANGLLDSSGKDMILSSMYNIATLHTVARNNQLDLS

SEQ ID NO: 78888 - protein, 377 aa, Gossypium hirsutum
  Clone ID: GOSHI-09MAY01-C8659_1.pep
METSGIVCKTVSRLPAARVDFSGRLSRELNHGVGDSRVSVRPRIKSCRRLSCQFSDLGHVQYYVSPRGGGGDATKKDKGKSCEIKQVKNKLKLLKRLSKDLSMLPQIANGEDTRIGLAAEVKATIIHEASGVLQAQLQKLKSEQKELKRKLKEERAKLKATFGKSESSSSSESSDSECGEVVDMKALRNNALKPSLEAETPIGNALKRPLEIVIEAPPLAREATLANSLMELENSDSSPQIRIRVPLAGLDGECCSSNGFKDGQSNILVEGTSTKQIEVCMGGKCKKMGAAALLEEFERKLGEEGTVVACKCMGKCKTSPNVRVLNSQTETTTRINEDSVRLGINPTCTGVGLQDFDLIVANLLGKNIDDECLVLSS

SEQ ID NO: 78889 - protein, 113 aa, Gossypium hirsutum
  Clone ID: uC-gsronu33B008e06b1.pep
FTVLTESSLILVVAPVLEVQDPYIWRGLEQHMHIAGHSSGCILNNSFQPLQRGPPLACSLRLRIIVDSYCMGHDPSARMLLCSFFKPFQLPHSPSDPARGTRIRIWGLEPEFS

SEQ ID NO: 78890 - protein, 164 aa, Gossypium hirsutum
  unsure (1)..(164): unsure at all Xaa locations
  Clone ID: uC-gsflnu33B062d03b1.pep
MTPRDPQRLPRGPGLCPCFTQIDDGEDIRIGLAAEVKATTIHEASGVLLAQLQKLKSEQKELKRKLKEERAKLKATFGKSESSSSSESSDSECGXVVDMKALRNNALKPSLESETPIGNALERPEEIVIEAPTVAEEATLANSLMELENSDSSPQIRIRVPLTG

SEQ ID NO: 78891 - protein, 79 aa, Gossypium hirsutum
  Clone ID: uC-gsronu33B008e05b1.pep
LTRPQLPSCGTCHPCKLQSAWLMSLPQECCSAPPSRNVINTDIGFLGPAIVEMDWACGTSSLFEQDPVMSPSVPKQKRV

SEQ ID NO: 78892 - protein, 115 aa, Gossypium hirsutum
  unsure (1)..(115): unsure at all Xaa locations
  Clone ID: uC-gsflnu33B057c06b1.pep
GVQVLXHALVEEASIGGSAGMLLHYLRRKKKVMVIAITTMEDPKPYLSQCGLKLSKLDDRKLEKQQRDADGDVEEGCRRKCSRRLPMTMRKTTEGDAANVNLKFLTNLICWTRKS

SEQ ID NO: 78893 - protein, 84 aa, Gossypium hirsutum
  Clone ID: LIB3166-004-P1-K1-H1.pep
DRQQAERIRDFILKSNPIEGYLWRVHQIKNSGFTSTASPSVVFCIIVGSPLLLLHWHPSFTSPSASLCCFSSFLPSNLLSFNPH

SEQ ID NO: 78894 - protein, 252 aa, Gossypium hirsutum
  Clone ID: GOSHI-09MAY01-C8669_1.pep
FANFSIVGMNVSLMGNSGGFYQIAKLSMSPVSCFLEVVFDKVRYSRDTKLSILLVLLGVAVCTVTDVSVNVKGFLAAVIAVWSTALQQYYVHFLQRKHSLGSFDLLGHTAPVQAASLVLAGPFVDYWLTEKKVYAYNYTTVSTFFIILSCTIAVGTNLSQFICIGRFTAVSFQVLGHMKTILVLILGFLFFGKEGLNLHVILGMVIAVAGMIWYGNASSKPGGKERWIYSAPSDKSQKPDNLLGSTETDEKV

SEQ ID NO: 78895 - protein, 60 aa, Gossypium hirsutum
  Clone ID: GOSHI-09MAY01-C8389_1.pep
LSWLYFYLRGKLPYHCLNNWIISLKGTLMRTILLSTDAFTIVIKYLCSYCHGFFFFADAW

SEQ ID NO: 78896 - protein, 275 aa, Gossypium hirsutum
  unsure (1)..(275): unsure at all Xaa locations
  Clone ID: GOSHI-09MAY01-C8359_1.pep
MSFDEEDSIEHTLLVVREVSVFKIPPRSTSGGYKCGEWLQSDKIWSGRFRVVSCKDRCEIRLEDPNSGELFAACFIHPGQRESSVEPALDSSRYFVLKIEDGNGKHAFIGLGFNERNEAFDFNVALSDHEKHVRXENEKETGETSDSDSHIDIHPAVNHRLKEGETIRINVKHKPSSGTGMLSAAGLSGSGKPKTLSLAPPPSGAGKIRSPLPPPPNDPVAARLASTSQGVGQRAPKENMKQTNPSTYFSQLERNHLPATGSGSTKTTASGWAAF

SEQ ID NO: 78897 - protein, 93 aa, Gossypium hirsutum
  Clone ID: LIB3147-040-Q1-K1-A4.pep
PTRPRINVKHMPSSGTGMLSAAGLSGSGKPKTLSLAPPPSGAGKIRSPLPPPPNDPVAARLASTSQGVGQRAPKENMKQTNPSTYFSQLEVCL

SEQ ID NO: 78898 - protein, 95 aa, Gossypium hirsutum
  Clone ID: GOSHI-09MAY01-C8349_1.pep
PGGGGLLHFPLNSNTKRVQRLQMQLQNQELMKEDDRHATSTRRRQFILHAPLIAFSFPQLIMSTAIAIAEIDVPQDFRVYTDEVNKFKIFIPQGQ

SEQ ID NO: 78899 - protein, 184 aa, Gossypium hirsutum
  Clone ID: GOSHI-09MAY01-C8379_1.pep
MDETRGSSKVQLKDVRDVSSPTRSRDSLGAGRVVGESGEEDLKRRSSKSKSKSRSPTWSRDSGSEQSKSVGGGGGEEKKNEETPVENGTSTEMEEREFDPGPHAKCETDLATGAGTGNDGNESWQLEMENVEGGMIPNVEGLEEVNEEVVNKRENDVKDDGELQDCRQTLNGGTNEVVNRREGD

SEQ ID NO: 78900 - protein, 67 aa, Gossypium hirsutum
  Clone ID: LIB3166-001-Q1-K3-B6.pep
NPTLKILNFYLTRLFPIISGSSLSSKISFTLSLSLRTKFTFFNLIIIPISNGVSSFFFSFQQQQQHF

SEQ ID NO: 78901 - protein, 44 aa, Gossypium hirsutum
  unsure (1)..(44): unsure at all Xaa locations
  Clone ID: GOSHI-09MAY01-C8339_1.pep
SVPSPSAGRHTMSGSRRGSSSNSVPSADGFGXGTPVPRPQRTRG

SEQ ID NO: 78902 - protein, 109 aa, Gossypium hirsutum
  Clone ID: GOSHI-09MAY01-C8329_1.pep
ERERERRHDYDRRSRYADESRRYRSRSRSPSVSGNRRSRSQSEQRGNSHYDRLPSPAKEGGKASSNLAKLKDLYGDVSDTKGDDGGFERIAKRDNSGKEVIRLGGSSWK

SEQ ID NO: 78903 - protein, 144 aa, Gossypium hirsutum
  Clone ID: uC-gsronu33B080b12b1.pep
DQDRGWGRDREGDLDRSWDRDRDRDWDRNRERNREREREREQRHDYDRRSRYADESRRYRSRSRSPSVSRNRSRSQSEQGGNSHYDRLPSPSKEGSKASSNLAKLKDLYGDVSDTKGDDAGFERIAKRDNSGEEVIRLGGSFWK

SEQ ID NO: 78904 - protein, 112 aa, Gossypium hirsutum
  Clone ID: GOSHI-09MAY01-C8289_1.pep
MGCTSSESSVAAVDFYRPPPSSFAVFDINAIDEPWVKVDQTPSENQEKPTHVPAAILEKLNAFETAPHSWGEVSKALEDLKPTINNENKKPQAPNSPQKPPKQVTQLSLVRT

SEQ ID NO: 78905 - protein, 100 aa, Gossypium hirsutum
  Clone ID: GOSHI-09MAY01-C8249_1.pep
MINKQIWSEMSRFVLSYLKEVNGFENSTSRVSKEIKKWKPPSDQIVKINFNGAYNERNRQLAFEVVVKNSEGVLLLSCTEIHHRGLSAFAGKGIACRKAT

SEQ ID NO: 78906 - protein, 97 aa, Gossypium hirsutum
  Clone ID: LIB3165-027-P1-K1-F2.pep
SRSGQQMSRFVLSYLKEVNGFELSTSRVSKQIKQWTHPSDQIVKINFNGAYNERNRQLALQVVVANSEGLRLLSCTEIHHRVLSAFAAQAIACRKAT

SEQ ID NO: 78907 - protein, 208 aa, Gossypium hirsutum
  Clone ID: GOSHI-09MAY01-C8229_1.pep
MTILIDQPELGVEAGVNKLDNADNELVLDGGFVVPQTNSFGHTFRDYHVESERQQGVENFYRTNHINQTSDFVKRMRTEYGKLNKMEMGIWECCELLNDVIDESDPDLDEPQIEHLLQTAEAIRKDYPNEDWMHLTGLIHDLGKVLLHPGFGELPQWAVVGDTFPVGCAFDKSIVHHKYFEENPDYHNSDYNTKYGVYLEGCGLNNVM

SEQ ID NO: 78908 - protein, 147 aa, Gossypium hirsutum
  Clone ID: LIB3825-009-Q1-N6-B11.pep
MTILIDQPDFGIEAGFNKADDVEKKAVLNGGFMMPHTNFFGHTFRDYHVESERQQGVENFYRTNHINQTYDFVKRMREESGNLNKVEMTIWECCELLNDVVDESDPDLDEPQIEHLLQTAEAIRKDYPDEDWLHLTGLIHDLGKVLL

SEQ ID NO: 78909 - protein, 125 aa, Gossypium hirsutum
  unsure (1)..(125): unsure at all Xaa locations
  Clone ID: LIB3825-002-Q1-K6-H10.pep
MTILIDQPDFGIEAGFNKADDVEKEAVLNGGFMMPHTNSFGQGGRRFFCXFWERQQXXENGERTXPRTATXDXXKRXREEXGXPDKGEKSTRERRERPKDAXXESDPDPGEPHKEHRPQTAEATR

SEQ ID NO: 78910 - protein, 124 aa, Gossypium hirsutum
  unsure (1)..(124): unsure at all Xaa locations
  Clone ID: LIB3149-040-Q1-K1-G7.pep
NRATHASEENTDWFSFKXEMGIWGGGELLNDVIHXSDPHLDEPQIEHLLQTAEAIRKDYPNEDWMHLTGLIHDLGKVLLHPGFGELSQWSRVKHTFPVGCAFDKSIVHHNYFEENSDYHNSDYN

SEQ ID NO: 78911 - protein, 59 aa, Gossypium hirsutum
  Clone ID: LIB3582-041-P1-K1-B9.pep
ILENKILSLPFVWSVGKCETKRKSTKQNPKLSATFSYTSHLTKIQMRRTRGRTRGRTRG

SEQ ID NO: 78912 - protein, 70 aa, Gossypium hirsutum
  unsure (1)..(70): unsure at all Xaa locations
  Clone ID: LIB3166-020-P1-K1-G12.pep
KDESLPDRDQDXKPRFHTSRFHGSEDAEDDINIDDDSFNVWNLRKCSAAALDVLSNVFGDEILPTLMPII

SEQ ID NO: 78913 - protein, 208 aa, Gossypium hirsutum
  Clone ID: GOSHI-09MAY01-C9969_1.pep
KIGWEKPVSTDGLFRFIKSVISDEQQEETGPFYVLDLGATRSLVETWFHNLPMVQPFYAVKSNPNPAFLKEMAALGTGFDCASLPEIETILSLGVSPDRIVFANTCKPESHIKYATKVGVNLATFDSNCELEKIKKWHPKCELLIRIKVPEASGSAFMFGSKFSALPEEIAPLLKAAQEAKLQVVGVSFHIGTGAINFHSIQGAIEAA

SEQ ID NO: 78914 - protein, 56 aa, Gossypium hirsutum
  Clone ID: GOSHI-09MAY01-C9939_1.pep
HASAHASADAFVSVVQGMPLGEASDQYFWFGRPQLVLHLIHFALFQVFISSTSIDS

SEQ ID NO: 78915 - protein, 78 aa, Gossypium hirsutum
  Clone ID: GOSHI-09MAY01-C9859_1.pep
KWAPSKKKKKKKKKKKKKKKKKKKKKKKKKKKKKKKKKKKKKKKKKKKKKKKKGGDNLKVKKFMGGREEKFIFFFMGV

SEQ ID NO: 78916 - protein, 87 aa, Gossypium hirsutum
  Clone ID: uC-gsflnu33B056f04b1.pep
STRPRTRGAWTTGGWRALGGGGVRGGGTARIVGAWHAALGLRVCSILSKLLKSFGPGFLFWARWVYLILALGYYCNRLSYFGFWVSI

SEQ ID NO: 78917 - protein, 158 aa, Gossypium hirsutum
  Clone ID: GOSHI-09MAY01-C9559_1.pep
GNTKLWTLKKTQSETRTKEELAAHIKQFTKSLTFKASPMPSFYHEGPPPKVELKKMPPTRAKSPKLGRRKSCSGPLSSSHGDMVKGTSHHKNRHSLGSQREAIIATTFCSANITNQNNVPNGNSPLEFKDESSKAQEMCELVPPDANGHIDLDINFLS

SEQ ID NO: 78918 - protein, 122 aa, Gossypium hirsutum
  Clone ID: GOSHI-09MAY01-C109572_1.pep
MSFQRVPQDPYPPPGYASPYPPPPPSGYPSAPPYEGYPPPPPPGYPPYPQPQRQPYEGYQGYFAEGYPPPPPPPPPPGHPQYHHCHYEHHHHHNHSDDGCFSFLKGCLAALCCCCMLEECCF

SEQ ID NO: 78919 - protein, 73 aa, Gossypium hirsutum
  Clone ID: LIB3083-102-Q1-L1-G11.pep
MIFQREPQDPYPRAGYASPYPPPPPPPPGHPQYHHCHYEHHHHHNHSDDGCFSFLKGCLAALCCCCMLEECCF

SEQ ID NO: 78920 - protein, 132 aa, Gossypium hirsutum
  Clone ID: GOSHI-09MAY01-C9579_1.pep
NSSLPSYLSPLFALLPFVKTKTLTQKIDKIPIFFFSSLADLNWVSKTFLSLFKAWASEGEFWGIFSGYKISSTLRVLLFKVRGLGLMRIVRGMQRLFREEANVLGWKKSFSQGIGITAPKARKRDKTMSLGL

SEQ ID NO: 78921 - protein, 111 aa, Gossypium hirsutum
  Clone ID: AI728106.1.pep
MAPSFDLWAKGSHKGTPVVVKMENPNWSMFELEGPSEENFLIGNTPTGSREKARGKNAKQLTWVLLLKAHRAAGCLTSIGSAFVSLGSTIRRRVASGRTDADSTSSNENKT

SEQ ID NO: 78922 - protein, 56 aa, Gossypium hirsutum
  Clone ID: LIB3197-004-P1-M1-A10.pep
MAPSFDLWAKGSHKGTPVVVKMENPNWSMFELEGPSQDDFLIGNTPTRFLRKSARE

SEQ ID NO: 78923 - protein, 70 aa, Gossypium hirsutum
  unsure (1)..(70): unsure at all Xaa locations
  Clone ID: LIB3166-014-P1-K1-G4.pep
LFFCFFLVRXNFRPRKSKPNREVLSIRKSNKNPTMAPGFDLWAKGSHKGTPDVVKMEKAHSRQIYLKGTF

SEQ ID NO: 78924 - protein, 239 aa, Gossypium hirsutum
  Clone ID: GOSHI-09MAY01-C9419_1.pep
MGRSKTEVNFQRLLAAAPQQRNHSKLMHYVATLRELLEQLAEERTPEGLPRVSSAVVSDYSKKIEEIASELTAPLPEIKVSQEPITRNSFKQSPKSDSENHMPSSPGLRRRVVPASNIKDRTHEITEADASAPIKLDAAAEAHIQKHRKLQEDLTDEMVGLAQQLKERSLMMSRSLEDTEKILDSTETAIEQSLATTGHTNVRAMKIYSETSKTTCFQWLLMLAMICVFIMVVLLIRVT

SEQ ID NO: 78925 - protein, 64 aa, Gossypium hirsutum
  Clone ID: GOSHI-09MAY01-C9409_1.pep
MGRIFMITLEGCVYSCKYCFTHLALLDDIISKSFHCGHGKAYLFDKVRVFHCYALFFFSPWSVL

SEQ ID NO: 78926 - protein, 71 aa, Gossypium hirsutum
  Clone ID: LIB3585-065-P1-K2-B9.pep
LETKNKTGRIFMITLEGRVYSCKHCFTHLALIDDIISKSFHCGHGKAYLFDKVVRITSQSCKSWYIFYQHV

SEQ ID NO: 78927 - protein, 43 aa, Gossypium hirsutum
  Clone ID: LIB3166-014-P1-K1-A5.pep
MGRIFMITLEGRVYSCKHCFTHLALLDDIISKSFHCGHGKAYL

SEQ ID NO: 78928 - protein, 428 aa, Gossypium hirsutum
  Clone ID: GOSHI-09MAY01-C9429_2.pep
PTNFLAIQTPKRKRAHIVFQTSQLPKTLLLKPSLPPPVHPLAGKPRKNLTVVKCSSSSLIDGGDSSVAALERCFSAPPAPVESASSGSGEVGPVMKGGQYGAFGAVTLEKGKLDLSQKQSTSSPELATGGGGGDIGKKINHGGGDGGDDDGDDDDYFDDFDDDGEGEEGGLFRKRMFLEELFDRKFVDAVLNEWHKTMMDLPAGFRQAYEMGLVSSAQMVKFLAINARPTTSRFISRTLPQAMSRAFIGRMLADPAFLYRLLLEEVATIGSSVWWELKNRKDRIKQEWDLALMNVLTVAACNALVVWSLAPCRSYGNTFRFDLQNTLQKLPNNIFERSYPLREFDLQKRIHSLFYKAAELCIGGLTAGAVQGSLSNFLPSKKKEKLSVTIPSMSTNALGCAAFPGPYANLRYQLLCGFDQAMVNHFDV

SEQ ID NO: 78929 - protein, 192 aa, Gossypium hirsutum
  Clone ID: GOSHI-09MAY01-C9429_1.pep
FDLQKRIHSLFYKAAGRGGGRVAAGAVQGSLSNFLASKKKEKLSVTIPSMSTNALGYGAFLGLYANLRYQLLCGFDQAMVNHFDVIGVALFFSTALRVLNVQLGERSRLAWLGVEVDPLVQSDDLLKAYNRPSEDGTRSSSKWFISKTAIVSGLGLLGIRQGNAESAANEETRAPKARRKRIVRKKVTASSA

SEQ ID NO: 78930 - protein, 231 aa, Gossypium hirsutum
  unsure (1)..(231): unsure at all Xaa locations
  Clone ID: AW187022.1.pep
AFGAVTLEKGKLDMSQKQSTSSPELATGGGGGDIGNKINHGGGDGGDDDGHDHDYFDDFDDDGEGDDDGLFTRRMFLELLLEXDFVHAVLNQWQLTIMDLAAGFSLPYYEGSVISPLSVHLLGVCPGPTTCLLFPRSLPSATSPAFFCSMLSHPAFLIAALCIRGCLPWFLCSGGTSIIQLYSIWCFWGFIVYEFSQRGELLIPLFFGYLPRGSFPRAAALGFDAPVRLRL

SEQ ID NO: 78931 - protein, 431 aa, Gossypium hirsutum
  Clone ID: GOSHI-09MAY01-C9789_1.pep
MAEKTRSENPALLHGKYELGRMLGHGTFAKVYHARNLQTGKSVAMKVVGKEKVIRVGMMEQIKREISVMKMVKHPNIVELHEVMASKSKIYFAMELVRGGELFSKIAKGRLKEDLARVYFQQLVSVIDFCHSRGVYHRDLKPENLLLDEDGCLKVTDFGLSAFSEHLKQDGLLHTTCGTSAYVAPEVIGKNGYDGAKADLWSCGVILYVLLAGFLPFQDDNMPAMYRKIYRGDFKCPPWFSPEARRLITKLLDPNPNTRITTSKVMDSSWFKKSIPKTIRTKEELEFEAFNGEKSSKPETLNAFHIISLSEGFDLSPLFEEKKREEKEELRFATTRPASSVISRLEEVAKSMKFSVKKSESSVRLQGQECGRKGKLAIAADIFALTPSFLVVEVKKDHGDTLEYNQFCSKELRPALKDIVWTSPSDNSTVA

SEQ ID NO: 78932 - protein, 73 aa, Gossypium hirsutum
  Clone ID: GOSHI-09MAY01-C9759_1.pep
GLGGLSSPPLSRRHHSGGWGGASRAFYPRLKTPSKAVLSRPKNAKEKGSLSSFKFDYGDGEENSDVVATGWSR

SEQ ID NO: 78933 - protein, 220 aa, Gossypium hirsutum
  Clone ID: GOSHI-09MAY01-C9719_1.pep
MSPAAVVEAANPETEQVPSTEESKIELQSEEAVVEDVKEDEKEHDDDDDEDDDDDDDDDKEDGAQGANGSSKQSRSEKKSRKAMLKLGMKPVTGVSRVTIKRTKNVLFFISKPDVFKSPNSETYVIFGEAKIEDLSSQLQTQAAQQFRMPDIGSLAAKPDTSTAAAAPADEEEEEVDETGVEPRDIDLVMTQAGVSRAKAVKALKSNNGDIVSAIMELTT

SEQ ID NO: 78934 - protein, 238 aa, Gossypium hirsutum
  unsure (1)..(238): unsure at all Xaa locations
  Clone ID: GOSHI-09MAY01-C9709_1.pep
MAVGLRHFTARXETASGEPILDTDNGEELVHVQPSVSVAVGDRAPESPGTLYITTRQVIWLSELDREKGYAVDFLSLSLHAASRDPEAYPSPCIYTQIETEADEVEDESEDSDSECSEVLDLSKIREIRFIPSDANQLDTLFQVFCECAELNPEPIEEGEEEGHNWIFSADQLEDEAGAGDDVEWHFSQNPTNTIGHSNGHHDLASSVLELQINDQRFEDAEEMEQDSDTGHHHQSQQ

SEQ ID NO: 78935 - protein, 361 aa, Gossypium hirsutum
  Clone ID: GOSHI-09MAY01-C9739_1.pep
MDSLSLFCTGALLAGGLYWFVCVLGPAEQKGKRAVDLSGGSISAEKVRDNYKQYWSFFRRPKEIETAEKVPDFVDTFYNLVTDIYEWGWGQSFHFSPSIPGKSHRDATRLHEEMAVDLIDVKPGDRILDVGCGVGGPMRAIAAHSRAKVVGITINDYQVNRARMHNKKAGLDSLCEVVCGNFLEMPFQDNSFDGAYSIEATCHAPKLEDVYAEVFRVLKPGSLYVSYEWVTTEKYRADNPEHVEVIQGIERGDALPGLRSYSDIAEAAKKVGFEIVKEKDLAKPPSLPWWTRLKMGRIAYWRNHILVIVLAAIGIAPKGTVDVHDMLFKTADYLTRGGDSGIFSPMHMILLRKPKEAPSKS

SEQ ID NO: 78936 - protein, 111 aa, Gossypium hirsutum
  Clone ID: GOSHI-09MAY01-C9729_1.pep
YATTSKTLLMFWLLVTCIAAVSLGSAVETQGFGGCLMSFASVKGCVEAIHEVVSHEKFDALQPKCCKAIIKLGDNCWPIVFPNQPCLPVLLKTVCKVLGMVVKVENVAAAP

SEQ ID NO: 78937 - protein, 207 aa, Gossypium hirsutum
  Clone ID: GOSHI-09MAY01-C9699_1.pep
MNDSDAPKFDNDERQEDIRMRLRPSDSNVTEDQEPFMGVKVRRKASRRHEYKGDYMDIPSRPYLMKILQKQGDKQVFFADKVLKFTSTGKLKRRILMVTDFAVYLVDPDTGTLKRRIALAAVDKICLSELSDNFFAIIVPTEYDLLMACTRKTEIVTVLVDATKNASEYELEVDFSNRSEYNASADLVKEVQFEEAEGSVRTRIVKK

SEQ ID NO: 78938 - protein, 257 aa, Gossypium hirsutum
  Clone ID: GOSHI-09MAY01-C9689_1.pep
LFGFYEALLGFVNFQLYHSINVKYPPILDPRLEALAADLYALSRYFDANHRAAIQEPQVAGSSRSEQEQEESDLRLAQLQHQLPANEPGALMHLVQDASSEIEEDETTRNCKNLFQNKKIFLSREVPRESLLFVIPAFGGIVSWEGDGAPFAESDDSITHQIVDRPTQGHVYLSREYVQPQWVYDCINARIILPTEPYMVGRDPPPHLSPFVDDEAEGYVPDYAKTIRQLQAAAKSDIQPLPGTGNDELDTSQNMLA

SEQ ID NO: 78939 - protein, 499 aa, Gossypium hirsutum
  Clone ID: GOSHI-09MAY01-C9659_2.pep
MVPNSLLRSTLKTQLGSYIKNAAAYRSSMDHPLKGALLARLYSTEPSLQRDDSDLKDGNGFKGHDMLAPFTAGWQTTDLHPLVIEKSEGSYVYDTHGKKYLDSLAGLWCTALGGSEPRLMEAATAQLNKLPFYHSFWNRTTKPSLDLAKDLLETFTATKMAKVFFTNSGSEANDTQVKLVWYYNNALGRPNKKKFIARAKSYHGSTLISASLSGLPALHQKFDLPAPFVLHTDCPHYWRYHLEGGAEEEFSTRLANNLENLILKEGPETIAAFIAEPVMGAGGVIPPPATYFEKIQAVVKKYDILFIADEVICAFGRLGTMFGCDKYNIKPDLISLAKALSSAYMPIGAVMVSPEVSEVIYSQSNKLGSFSHGFTYSGHPVSCAVAIEALKLYKERNIVEKVKSISPRFQDGLKSFSDSPIVGEIRGTGLILGTEFTDNKSPNDPFPPEWGVGTYFGAQCEKHGLLVRVAGDNIMMSPPFIITPQEVDEVSCKDVTPVC

SEQ ID NO: 78940 - protein, 287 aa, Gossypium hirsutum
  unsure (1)..(287): unsure at all Xaa locations
  Clone ID: GOSHI-09MAY01-C9659_1.pep
PAPFVLHTDCPHYWRYHLEGETEEEFSTRLANNLENLILKEGPETIAAFIAEPVMGAGGVIPPPATYFEKMLYLLLLLILRRTSCCXKKYDILFIADEVICAFGRLGTMFGCDKYNIKPDLISLAKALSSAYMPIGAVMVSPEVSEVIFSQSNKLALKLYKERNIVEKVKSISPRFQDGLKSFSDSPIVGEIRGTGLILGTEFTDNKSPNDPFPPEWGVGTYFGAQCEKHGLLVRVAGDNIMMSPPFIITPQEVDELISKYGKALKATGERVKELKSQTEETVNRLY

SEQ ID NO: 78941 - protein, 76 aa, Gossypium hirsutum
  Clone ID: AW187883.2.pep
YLGKSISYPCRERNIVEKVKTISPRFQDGLKSFSDSPIVGEIRGTGLILGTEFTDNKSPNNPFPPEWGKFFSLLTL

SEQ ID NO: 78942 - protein, 74 aa, Gossypium hirsutum
  unsure (1)..(74): unsure at all Xaa locations
  Clone ID: LIB3825-012-Q1-K6-B5.pep
DGREFSTRIANNLENLILKXGPETIAAFIAEPVMGAGGVIPPPATYFEKIQAVVKKYDILFIADEVICAFGRLG

SEQ ID NO: 78943 - protein, 126 aa, Gossypium hirsutum
  Clone ID: GOSHI-09MAY01-C9669_3.pep
MAVMDAQNPLLGETTCGTLLQKLQEIWDEVGESDEERDKMLLQIEQECLDVYKRKVEQAAKSRAELLVTLSDAKLELSTLVSALGDKSFLGVDTVKASVTIKEQLAAIAPALEQLWKQKEERVRSF

SEQ ID NO: 78944 - protein, 152 aa, Gossypium hirsutum
  Clone ID: GOSHI-09MAY01-C9669_2.pep
MADAENSLLGETTCGSLLQKLQEIWDEVGESDEERDKMLLQIEQECLDVYKKKVEQAANSRAQLLQVLSDAKLELSTLVSALGDKSSVGIPEKGSETIKEQLAAIAPALEQLWKQKEERVKEFSDVRSQIQRIFGEIAGNASEQTGALAGDE

SEQ ID NO: 78945 - protein, 267 aa, Gossypium hirsutum
  Clone ID: GOSHI-09MAY01-C9669_1.pep
MAVMDAQNPLLGETTCGTLLQKLQEIWDEVGESDEERDKMLLQIEQECLDVYKRKVEQAAKSRAELLVTLSDAKLELSTLVSALGDKSFLGVDTVKASGTIKEQLAAIAPALEQLWKQKEERVKEFSDVQSQIQKICGEITGSANEQAGAPAVDESDLSLKKLNEYQVKLQELQKEKSDRLHKVLEFVSTVHDLCAVLGMDFFSTVTEVHPSLDDKTCVQSKSISNDTLLRLAETVSALHEDKKQRIHKLQELATKLTDLWNLMDTP

SEQ ID NO: 78946 - protein, 272 aa, Gossypium hirsutum
  unsure (1)..(272): unsure at all Xaa locations
  Clone ID: GOSHI-09MAY01-C9619_1.pep
MAIACLPKLRLATATAVSVSTFLKPLRHGLRSFGSAAALELPDEDVYYEYEQAHRDRRSAQPKIDVDGSATDRGVQWVLIGEPGVKRHAYAERLSKLLEVPHISMGTLVRQELNPHSSLYKQIANAVNEGKLVPEDVIFALLSKRLEEGYYGGENGFILDGIPRTRIQAEILDQITDIDLVVNFKCTEEQMLKSSESEVLHIGSSKDVGTSXKKNVHVYSEQAKSVGDYYSKQKKLLNFQVSGXTTDAWQSLLAALHLPHINALTSSPKLTA

SEQ ID NO: 78947 - protein, 362 aa, Gossypium hirsutum
  Clone ID: GOSHI-09MAY01-C9199_1.pep
VGIKDPVRPGVKESVAICRAAGITVRMVTGDNINTAKAIARECGILTDDGIAIEGPDFREKSQEEMLALIPKIQVMARSSPMDKHTLVRQLRSIDEVVAVTGDGTNDAPALHEADIGLAMGISGTEVAKESADVIILDDNFSTIVTVAKWGRSVYINIQKFVQFQLTVNIVALIVNLSSACLTGTAPLTAVQLLWVNMIMDTLGALALATEPPTDERGKRAPVGKKGNFISNVMWRNILGQSFYQFMVIWYLQVKGKGMFSLDGPDSDLTLNTIIFNSFVFCQVFNEISSRNMEEINVFKGILNNYVFVAVLGCTAVFQVIIIEFLGTFASTTPLTCLQWFVSVVIGFLGMPIAAALKTIPV

SEQ ID NO: 78948 - protein, 105 aa, Gossypium hirsutum
  Clone ID: LIB3166-011-P1-K1-C8.pep
GIVGIKDPVRSGVKESVAMWRSAGITVRMVTGDNINTAKAIARECGILTDDGIAIEGPDFREKSQEEMLALIPKIQVMARSSPMDKHTLVRQLRSIAAALKTIPV

SEQ ID NO: 78949 - protein, 94 aa, Gossypium hirsutum
  Clone ID: GOSHI-09MAY01-C9189_1.pep
KKFKKEIRNHLKRNIFPFFYSVFVKNIVHSVLPFYSLKMEIKLIRKIQLLCCNTAYSVISLFSCVPFAEKNHLTARAETRVRDWWRTCSVRPYH

SEQ ID NO: 78950 - protein, 117 aa, Gossypium hirsutum
  Clone ID: GOSHI-09MAY01-C9179_2.pep
SSAFAAEVLVCYQALDLGFQLGLKGVEVEGDSRSVIHKPDAREEDRSEIAVYIEDSKKMSLSCRYCAFRFLNREANKVAHLIATEDIKNGENTYLLQRISSGAEARVMDDRRWTKNV

SEQ ID NO: 78951 - protein, 67 aa, Gossypium hirsutum
  Clone ID: GOSHI-09MAY01-C9179_1.pep
YIQHSINLTRNCILTYLVRISDGNESTIQLFWTSLDLSSIFFVLDLIQFKFNHSIIHFMQNNPLTHI

SEQ ID NO: 78952 - protein, 63 aa, Gossypium hirsutum
  Clone ID: uC-gsflmaxxa076f01b1.pep
SLPQLPRPSGRVGIPDLVPDNTPTPRPQKQTPRQNLSSVIALMEQPIWLYGFFCQIKNKENRT

SEQ ID NO: 78953 - protein, 61 aa, Gossypium hirsutum
  Clone ID: LIB3146-010-Q1-K1-A11.pep
HTNTSAAKADAASKFILSHSPDGATHLVVWILLSVILATEGSGIVEDCHHTIEFILVLLKV

SEQ ID NO: 78954 - protein, 66 aa, Gossypium hirsutum
  Clone ID: LIB3148-030-Q1-K1-D11.pep
HTNTSAAKADDQGRTKSNLNRGKSKIIEWAPRLHLKFLRAILATESSGIVEDCHHTIQFILVLLKV

SEQ ID NO: 78955 - protein, 229 aa, Gossypium hirsutum
  Clone ID: GOSHI-09MAY01-C9169_1.pep
NRALLTQLRGPAVAIPSDEKIALLGAVQALFEGSMYTFVFLWTPALSPNDEEIPHGFIFATFMLASMLGSSLASRLMARSSPRVESYMQIVFVISSASLLLPIITNFLVAPSKVKGGSISFAGCLQLLGFCTFEACVGIFWPSIMKMRSQYIPEEARSTIMNFFRIPLNIFVCIVLYNVDAFPITVMFGMCSIFLFVASILQRRLMAISDKPKMESWTAMDPGAEPLND

SEQ ID NO: 78956 - protein, 75 aa, Gossypium hirsutum
  Clone ID: LIB3166-025-P1-K1-B3.pep
QFLVPPSKEKGGSISFAGCLQLLGFCTFEACVGIFWPSIMKMRSQYIPEEARSTIMNFFRIPLNIFVCIVVYNVC

SEQ ID NO: 78957 - protein, 106 aa, Gossypium hirsutum
  Clone ID: GOSHI-09MAY01-C9059_1.pep
KKKKTLLNPLQKHSNMLFLRLVFGSIFIVCCLTTLSNEASLPNAEVEALESIGRTLGKTNWNFTGTCIQGNGRLDQPSPEFNESYVDNVICDCSFNNYTTCHVIHM

SEQ ID NO: 78958 - protein, 100 aa, Gossypium hirsutum
  unsure (1)..(100): unsure at all Xaa locations
  Clone ID: GOSHI-09MAY01-C9079_1.pep
MKSAFSLVYLLLVLAFFSHITWAVKGNFALQTDRYWGEIRPHSVTITXEFGAVGDGVTLNTKPFQNAIFYLNSFADKGGAKLFGPAGRWLTGSFDLISYL

SEQ ID NO: 78959 - protein, 126 aa, Gossypium hirsutum
  Clone ID: GOSHI-09MAY01-C9069_1.pep
HASAHASAHAFAHASALLAVFAEGKSGMAETESQALPTKRHHHHQNDDSEGQEDDDDEEEEEEDGLENEEEEEGASRVSESQGAGAAPPSDDAGWKHSQLDTLPNDDPPEGLQVNSTSESKEGAEF

SEQ ID NO: 78960 - protein, 119 aa, Gossypium hirsutum
  Clone ID: GOSHI-09MAY01-C9019_4.pep
RNVPSFDDRRGGTRLYVGHLSSRTRSRDLEDMFSRYGRVRDVDMKRDYAFVEFSDPRDAGDARYALNGRDLDGSRMIVEFAKGVPRGSGGSRDYPGRGPTPGSGRCFNCGIDGHWARDC

SEQ ID NO: 78961 - protein, 156 aa, Gossypium hirsutum
  Clone ID: GOSHI-09MAY01-C9019_2.pep
VRDVDMKRDYAFVEFSDPRDADDARYSLNGRDLDGCRIIVEFAKGVPRGPGGSRDYAGRGPTPGSGRCFNCGIDGHWARDCKAGDWKNKCYRCGERGHIERDCQNSPKKLSRRPRSYSRSPSDRRGRSRSRSYSRGRSDSRSRSPVKRERVLSVTI

SEQ ID NO: 78962 - protein, 190 aa, Gossypium hirsutum
  Clone ID: GOSHI-09MAY01-C9019_1.pep
MPRYDDHRGGTRLYVGHLSSRTRSRDLEDMFSRYGRVRDVDMKRDYAFVEFSDPRDADDARYSLNGRDLDGCRIIVEFAKGVPRGPGGSRDYAGRGPTPGSGRCFNCGIDGHWARDCKAGDWKNKCYRCGERGHIKRDCQNSPKKLSRRPRSYSRSPSARRGRSRSRSYSRRRSDSRSKSPVKRERSPRA

SEQ ID NO: 78963 - protein, 115 aa, Gossypium hirsutum
  unsure (1)..(115): unsure at all Xaa locations
  Clone ID: LIB3825-025-Q6-K6-A2.pep
MPRYDDRRGGTRLYVGHLSSRTRSRDLEDMFSRYGRSVGFCLIWRSMSXEFSDPRDADDARYALNGRDMDGSRMIVEFAKGVPRGSGGSRDYPGRGPTPGSGRCFNCGIDGHWAR

SEQ ID NO: 78964 - protein, 113 aa, Gossypium hirsutum
  Clone ID: LIB3272-018-P1-K1-A4.pep
MPRYDDRRGSGTRLYVGHLSSRTRSRDLEDMFRRYGRIRDVDMKRDYAFVEFSDPRDADDARYSLNGRDLDGSRIVVEFAKGVPRGPGGSSDYPGRGPAPGAGRCFNCGIDGH

SEQ ID NO: 78965 - protein, 91 aa, Gossypium hirsutum
  Clone ID: LIB3196-013-P1-M1-H3.pep
LCHDGLTVSGTRLRRVRDVDMKRDYAFVVRISLLFLFNPDGHFLSIIFFTILVNMIILLGTFFLLYVLYIVGLLDCRNSVILEMPVMQDMH

SEQ ID NO: 78966 - protein, 82 aa, Gossypium hirsutum
  unsure (1)..(82): unsure at all Xaa locations
  Clone ID: LIB3197-040-Q1-M1-D7.pep
MPRYDDRRGGTRSYVGHLSSRTRSRDLEDMFSRYGRVRDVPLMGIYLGPXYSWVGDADDARYALNGRDMDGSRMIVECAKGV

SEQ ID NO: 78967 - protein, 102 aa, Gossypium hirsutum
  Clone ID: GOSHI-09MAY01-C9389_1.pep
MAVEGSSKKMIATQAEMVENKVPIPYRDQCAHLLIPLNKCRQAEFYLPWKCEIERHSYEKCEYELVMERMLQMQKIREEEAKLKQAGKQGASVPLIPKTANA

SEQ ID NO: 78968 - protein, 78 aa, Gossypium hirsutum
  Clone ID: GOSHI-09MAY01-C9359_4.pep
VVAVKRLVVGLRGGSAGPPHGEHRSARPYCRRCAPGLNWPGRSSGAVTLKKFVLHNVGELELLMMHNRTYCAEIAHDV

SEQ ID NO: 78969 - protein, 72 aa, Gossypium hirsutum
  Clone ID: GOSHI-09MAY01-C9359_2.pep
RYFGRDIFMLIVRLKGGSAGPPHGEHRSARPYCRRCAPGLNWPGRSSGAVTLKKLECSKQAYACIHEHGITS

SEQ ID NO: 78970 - protein, 133 aa, Gossypium hirsutum
  Clone ID: GOSHI-09MAY01-C9359_1.pep
MAVPLLSKKIVKKRVKKFKRPQSDRKISVKTNWRRPKGIDSRVRRKFKGCTLMPNIGYGSDKKTRHYLPNGFKKFVVHNVGELELLMMHNRTYCAEIAHDVSTKKRKEIVERAAQLDVVVMNKLARLRSQEDE

SEQ ID NO: 78971 - protein, 45 aa, Gossypium hirsutum
  Clone ID: LIB3149-048-Q1-K1-G1.pep
VRRKFKGCTLMPNIGYGSDKKTRHYLPNGFKKFVVHNVGELELLM

SEQ ID NO: 78972 - protein, 171 aa, Gossypium hirsutum
  Clone ID: GOSHI-09MAY01-C9319_1.pep
QEGQDQLQTCYKQFYKRLWSLELPFKIKITIWRCTRNFLPNYSNLHYRRLIDSTMCWRCHSGAETGMHLFRDCPERSVNNVRWVAPICPRIKINFDAACNRQRRESCSGLVVRNEKAEVVCSRSVLHVNVPSAVAAEALACFQALDLGVQLGLKEVEVEGDSRPVIRKLQM

SEQ ID NO: 78973 - protein, 203 aa, Gossypium hirsutum
  unsure (1)..(203): unsure at all Xaa locations
  Clone ID: AI730701.1.pep
HYRRLIDSTMCWRCHSGAETGMHLFRDCPVAKETWEKLNLSWPSPTVDSDFHADLMNFFVSQSISKCRLISCALWAIWTSKNRFLHEGEMKSGAQVAEFVLNYIKELDGAKAPLPERSVNNVRWVAPICPRIKINFDAACXRQRKESCSGLVVRNEKAEVVCSKSVLHVNVPSAVAAEALACFQALDLGVQLGLQEVEMXGDL

SEQ ID NO: 78974 - protein, 118 aa, Gossypium hirsutum
  Clone ID: GOSHI-09MAY01-C9309_3.pep
LPVLRLALAGRDLADYLMKILTERGYSFTTTAEREIVRDIKEKLCYVALDFQQEMATAASSSSLEKSYELPDGQVITIGNERFRCPEALFQPSFLGEGRPASRPCLTWGSPLGLGWGS

SEQ ID NO: 78975 - protein, 375 aa, Gossypium hirsutum
  Clone ID: GOSHI-09MAY01-C9309_1.pep
MDDDIAALVVDNGSGMCKAGFAGDDAPRAVFPSIVGRPRHQGVMVGMGQKDSYVGDEAQSKRGILTLKYPIEHGIVTNWDDMEKIWHHTFYNELRVAPEEHPVLLTEAPLNPKANREKMTQIMFETFNTPAMYVAIQAVLSLYASGRTTGIVMDSGDGVTHTVPIYEGYALPHAILRLDLAGRDLTDYLMKILTERGYSFTTTAEREIVRDIKEKLCYVALDFEQEMATAASSSSLEKSYELPDGQVITIGNERFRCPEALFQPSFLGMESCGIHETTFNSIMKCDVDIRKDLYANTVLSGGTTMYPGIADRMQKEITALAPSTMKIKIIAPPERKYSVWIGGSILASLSTFQQMWITKQEYDEAGPSIVHRKCF

SEQ ID NO: 78976 - protein, 96 aa, Gossypium hirsutum
  Clone ID: LIB3196-055-P1-M1-G11.pep
CDEDETTALVCDNGSGLVKAGFAGDDAPRAVFPSIVGRPRHQGVMVGMGHKDAYVGDMAHSKRGILTLKYPIEHGIITNWDDMEKIWHHTLYNELR

SEQ ID NO: 78977 - protein, 101 aa, Gossypium hirsutum
  unsure (1)..(101): unsure at all Xaa locations
  Clone ID: LIB3166-012-P1-K1-H3.pep
IRKDLYANTVLFVGTTMYPGMADRMQKEITALAPSTMKIKIIAPPERKYSVWIGGSILASLSTFQQMWISKQEYDEXQAPPLSTAXASRWTEQVPGICCMS

SEQ ID NO: 78978 - protein, 295 aa, Gossypium hirsutum
  Clone ID: GOSHI-09MAY01-C9339_1.pep
MGMMRLSKCWVSLLFLVALSGFTHGFVMSPRTLLNRFSQNSNYYLTTEEHWFDQTLDHYSPYDHRQFKQRYYEFLDYFQVPDGPIFLKICGESSCSGISNDYLGVLAKKFGAAVVSLEHRYYGKSSPFKSHTTENLKYLSSKQALFDLAVFRQWYQESLNLKRNKTGAENSWFVFGISYSGALSAWFRLKFPHLTCGSLASSGVVLAVYNYTDFDKQVGESAGPECKAVLQEITELVDRSLESNRKELKKQFGAAELEIDGDFLYFLADAAVIAFQYGNPDTLCTPLVEAKKAGE

SEQ ID NO: 78979 - protein, 99 aa, Gossypium hirsutum
  Clone ID: GOSHI-09MAY01-C9329_4.pep
SCDEIQEASQILSCLADMVYCTVCACMQTQHKVEMDKRDGKFCPQPMAVPPVQQMSRIDQPIPPAAGYPPAAYGQPYPAQGYPPAAYPPPQYPPSGYSR

SEQ ID NO: 78980 - protein, 197 aa, Gossypium hirsutum
  Clone ID: GOSHI-09MAY01-C9329_3.pep
PRVRDMSRYTCCAGYMPCSGRCGESKCPEFCLCTEVFLCCCNSVASTRFLLQDEFNIQTTKCDNCIIGFMFCLQQVACIFSIVAMIVGSDELQDAAQLLNCLADMVYCTVCACMQTQHKIEMDKRDGMFGPQPMAIPPVQHMSRLDQPIPPAAGYPPAAYGQPYPPPQGYPPAAYPPPQYPPAGYPAPGYPPSGYPK

SEQ ID NO: 78981 - protein, 244 aa, Gossypium hirsutum
  Clone ID: GOSHI-09MAY01-C9329_2.pep
MASQEYLDKMKVRQEYRNLWHTDLMSTIQRDPPYCCLAFWCGPCVSYMLRKRALYNDMSRYTCCAGYMPCSGRCGESKCPEFCLCTEVFLCCGNSVASTRFLLQDEFNIQTTKCDNCIIGFMFCLQQVACIFSIVAMIVGSDELQDAAQLLNCLADMVYCTVCACLQTQHTIGMDKRDGMFGPQPMAIPPVQQMSRLDQPIPPAAGYPPAAYGQPYPPPQGYPPAAYPPHQYPPAGYPAPGYPK

SEQ ID NO: 78982 - protein, 89 aa, Gossypium hirsutum
  Clone ID: GOSHI-09MAY01-C9329_1.pep
PKPKPKPEPAIRPFTIHSSKGAFPLPFSIPFLVCALCLCGCALRFERSLASQEYLDKMKVRQEYRNLWHTDLMSTIQRDPPYCCLALWW

SEQ ID NO: 78983 - protein, 277 aa, Gossypium hirsutum
  unsure (1)..(277): unsure at all Xaa locations
  Clone ID: GOSHI-09MAY01-C9229_1.pep
MATMESLIGLVNKIQRACTVLGDHGGQGMSLWEALPSVAVVGGQSSGKSSVLESIVGRDFLPRGSGIVTRRPLVLQLHKTQSGAEYAEFLHAPKRRFTDFAAVRKEISDETDRITGKTKQISNIPIHLSIYSPNVVNLTLIDLPGLTKVAVEGQSDSIVEDIENMVRSYVEKPNCIILAITPANQDIATSDAIKLAREVDPSGERTFGVLTKLDLMDKGTNATEVLEGRAYRLQHPWVGIVNRSQADINKNVDMIVARRKDXEYFETSPXYGHLASK

SEQ ID NO: 78984 - protein, 350 aa, Gossypium hirsutum
  Clone ID: GOSHI-09MAY01-C4959_1.pep
MGEEVACCKRTGPGYGTPLEAMSGPKEALMYVTCVYNGTGREKPDFLATVDVDPNSPTYSKVIHRLSLPYIGDELHHTGWNACSSCHGDPSSDRRFLILPSLLSGRIYVIDTQKNPKAPSLHKVVEPEHIIEKTGLAYPHTSHCLANGDIIISFLGDKDGNAQGNGFLLLDSQFNIKGRWEKPGRKAEFSYDFWYQPRHKTMICSTFGAPSAFTQGFTLKHVEDGFYGRQLSVYDWPDGRLKQTLDLGDNGLIPGEIRFLHDPTKDTGYVECILSSKMVRFFKTQDGSSWSHEVAISVKPLKVQNWILPEMPGLIIGLLISLDDRFLYFVNWFHGDVRQYNIEDPKNPIL

SEQ ID NO: 78985 - protein, 159 aa, Gossypium hirsutum
  Clone ID: LIB3584-050-P1-K2-A1.pep
PTRPPTRPPTRPPTRPPKAPSLHKVVEPEHIIEKTGLAYPHTSHCLANGEIMISFLGDKDGNAQGNGFLLLDSQFNIKGRWEKPGRKAEFSYDFWYQPRHKTMICSTFGAPSAFTQGFTLKHVEDGFYGRQLSVYDWPDGRLKQTLDLGDNGLIPGEIR

SEQ ID NO: 78986 - protein, 246 aa, Gossypium hirsutum
  Clone ID: GOSHI-09MAY01-C4949_1.pep
PRVRPRVRRESGLCDLKEIPEDKWFCCDDCNRIHVALQSYVSSGVQPTRPVFANIIRRKYLEKGLLIDGATDCVQWRILSGKSRYSEHLPLLSSAAAIFRECFDPIVAKSGRDLIPVMVYGRNISGQEFGGMYCVVLIVRSVVVSAGLLRIFGREVAELPIVATSRKHQGKGYFQALFACIENLLSSLNVENLVLPAADEALSIWTKKFGFTKMSEQQLSKYQKELQLTIFKGTFDVEIKVEPIPE

SEQ ID NO: 78987 - protein, 98 aa, Gossypium hirsutum
  Clone ID: uC-gsflmaxxa004g09b1.pep
RLGQEFGGMYCVVLIVRSLVVAGLLRIFGREVAELPIVATSRKHQGKGYLQALFACIENLLSSLNVENLVLPAADEALSIWTKKFGFTKMSEQQVSAV

SEQ ID NO: 78988 - protein, 54 aa, Gossypium hirsutum
  unsure (1)..(54): unsure at all Xaa locations
  Clone ID: LIB3582-002-P1-K1-A10.pep
PLLSSAAAIFQECFDPIVXKAGCDLIPAXYGRSISGQEFGGMYCVVLIXRFSVV

SEQ ID NO: 78989 - protein, 214 aa, Gossypium hirsutum
  Clone ID: GOSHI-09MAY01-C104922_1.pep
STRPPTRPGSAHGWDVLFYIFSFLKGIMLFTLIVLIGTGWSFLKPYLQDKEKKVLMIVIPLQVVANIAQVVIDEASPFGQDRATWKQLFLLVDVICCCAVLFPIVWSIKNLREAARTDGKAAVNLMKLTLFRQYYVVVICYIYFTRVVVYALETITSYKYLWTAVLAGELATLAFYVFTGYKFKPEAHNPYFAIDDEEEEAAAEQLKLEDEFEL

SEQ ID NO: 78990 - protein, 127 aa, Gossypium hirsutum
  unsure (1)..(127): unsure at all Xaa locations
  Clone ID: GOSHI-09MAY01-C4939_1.pep
NRQKVQDKIIKEKIKLPAFLSSEAHSXLKGLLQKEASKRLGCGKGGSEEIKRHTWFKAINWKKLEAREVRPSFLPDVAGNHCVANFEECWTSMPVIDSPVASPTFGENPFKGFTYVRPVASFLQRNA

SEQ ID NO: 78991 - protein, 115 aa, Gossypium hirsutum
  Clone ID: LIB3584-026-P1-K1-A5.pep
MQFLMLLQGIMVFEFSCYKIRNHGLGCFSLQLLQKEASKRLGCGKGGSEEIKRHKWFKAINWKKLEAREVRPSFLPDVAGNHCVANFEECWTSMPVIDSPIASPTFGENPFKGFT

SEQ ID NO: 78992 - protein, 230 aa, Gossypium hirsutum
  unsure (1)..(230): unsure at all Xaa locations
  Clone ID: GOSHI-09MAY01-C4849_1.pep
VDMASDANESMAERSPTSPSSDVAEDDVSLNGDMSDHCFGHIPMDNLERTVVICPDYVLYQNDYHTGVSVIFSPSGVKIEGSTVSEHQRTFSFESRIDDIISINCRWFQRVGYMTLKMKVLSKVAIEAENACDTSADEELKFTVIDPRWSEKHAAIISLNFQYQALWNIMPDPLAEMDGDDSLVQRSYFPNFDEPFEEVIYPKGDIDAVSISKRDVDLLLTRKFXNDTII

SEQ ID NO: 78993 - protein, 531 aa, Gossypium hirsutum
  unsure (1)..(531): unsure at all Xaa locations
  Clone ID: GOSHI-09MAY01-C4599_1.pep
LIRQPKYGHLKELHRXIKMCERALVSADPIVTSLGDLQQAYMYTSESGDCAAFLSNYDTKFAARVLFNNMHYNLPPWSISILPDCRNAVFNTAKVGVQTSQMQMLPTNSETFSWESHDEDPSSLDYSSAITADGLLEQINVTRDASDYLWYITSVDIGSSESFLHGGELPTLIVQSTGHAVHVFINGQLSGSAFGTRQNRRFTYTGKVNLRAGTNKIALLSVAVGLPNVGGHYETWNTGILGPVALHGLDQGKWDLSRQKWTYQVGLKGEAMDLVSPNGFSSVEWMAASLVAQKPEPLRWHKAYFNAPEGDEPLALDMVSMGKGQIWINGQSIGRYWTAYAHGDCNGCNYAGTFRPPKCQLGCGQPTQRWYHVPRSWLKPTQNLLVLFEELGGDPTRISLVKRSVSSVCADVTEYHPNIKNWQIESYGKAQQFRRPKVHLRCSPGQSISFIKFASFGTPLGTCGSYQQGPCHAPATYAIVEKKCVGKQRCVVTIANSNFGQDPCPNVLKRLSVEAVCAPISSTTAQPNWGG

SEQ ID NO: 78994 - protein, 186 aa, Gossypium hirsutum
  unsure (1)..(186): unsure at all Xaa locations
  Clone ID: LIB3828-032-Q6-K6-H11.pep
VLGGGGRGVERHYETWXTGILGPVALHGLDQXKWDLSRQKWTYQVGLKGEAMGGGGPNGFSSVEWMAASLVAQKPEPLRWHKAYFNAPEGDEPLALDMVSMGKGQIWINGQSIGRYWTAYAHGDCNGCNYAGTFRPPKCQLGCGQPTQRWYHVPRSWLKPTQNLLVLFEELGGDPTRISLVKRSVS

SEQ ID NO: 78995 - protein, 106 aa, Gossypium hirsutum
  unsure (1)..(106): unsure at all Xaa locations
  Clone ID: uC-gsflnu33B006g07b1.pep
MSSYAFAKIKADPTRLWLVKRSESSVCADVTEYHPNIKNWQIESYGKAQQFRRPKVHLRCSPGQSISFIKFASFGTPLGTCGSYQQGPCXATDTYAILENTCLRTQ

SEQ ID NO: 78996 - protein, 49 aa, Gossypium hirsutum
  unsure (1)..(49): unsure at all Xaa locations
  Clone ID: LIB3148-042-Q1-K1-G3.pep
XKSKXTCILYSWAVYRVIKKXXXHMQDISPFGPKLKDPKNLETHLSFDH

SEQ ID NO: 78997 - protein, 158 aa, Gossypium hirsutum
  Clone ID: GOSHI-09MAY01-C4579_1.pep
PGCKPNKYFKSPFTLAHQPVDPKSIGLNLMPGYNSADPNPLHYWPISKILLLRPITTDLNGPKTKVAQLAQTVTPRHETLGFLPLFLLAPQVEDSRSHPNRRVVPATLQQGHNPKALSHAEITATSGPSSSLRHHRNLCKSPARKGNTADTTKTKKGN

SEQ ID NO: 78998 - protein, 94 aa, Gossypium hirsutum
  unsure (1)..(94): unsure at all Xaa locations
  Clone ID: GOSHI-09MAY01-C4499_6.pep
LIGAGTDHCEGQLISDRVNVKEGELGDLSPDIRSTVDDTGDRSGIHPRRSSWGRKSGRWEMSPEVLALAAXVGEPNRVGGGSSCNNLTTESRPS

SEQ ID NO: 78999 - protein, 125 aa, Gossypium hirsutum
  unsure (1)..(125): unsure at all Xaa locations
  Clone ID: GOSHI-09MAY01-C4499_3.pep
MYMVPPPQRSDPGSIGGGSGDLRVYQAWKGSNIFLFQGRFIFGPDVRSLGLTILLIVAPVSIFCVFVARKLMDDFSHHSGNLIMXLPVVFTAYDLLLLLLTSGRDPGIIPRNAHPPEPESFDGNV

SEQ ID NO: 79000 - protein, 436 aa, Gossypium hirsutum
  Clone ID: GOSHI-09MAY01-C4499_1.pep
MYVAPPTQRSDPSSIGGGPGDLRVYQSWKGSNIFLFQGRFIFGPDVRSLGLTILLILAPVSIFCVFVARKLMDDFSHHLGISIMVVAVVFTLYDLVLLLLTSGRDPGIIPRNAHPPEPESFDGNADVGAGQTPPLRLPRIKEVEVNGISVKIKYCDTCMLYRPPRCSHCSICNNCVERFDHHCPWVGQCIGLRNYRFFFMFVFSTTLLCIYVFAFCWVYIRRIMASEETTIWKAMIKTPASIVLIVYTFISMWFVGGLTAFHLYLISTNQTTYENFRYRYDRRANPYNKGVVDNFKEIFCSSIPSSKNNFRAKVPREPVLPTRPGGFMSPNMGKAVDDIEMGRKTVWGDIGASTDHCEGQLTSDRVNVKEGELGELSPDIRSTVDDTGDHAGIHPRRSSWGRKSGRWEMSPEVLALAARVGEPNRAVGSSSRSLAT

SEQ ID NO: 79001 - protein, 83 aa, Gossypium hirsutum
  Clone ID: LIB3584-046-P1-K2-F7.pep
FYCVLQQDYRFFFMFVFSTTLLCMYVFGFSWVYIRRIMASEETTTWRAMIQTPTSIVLIVYTFISMWFVGGLTAFHLYLISTK

SEQ ID NO: 79002 - protein, 134 aa, Gossypium hirsutum
  Clone ID: LIB3829-029-Q6-K6-G6.pep
MYVAPPTQRSDPSSIGGGPGDLRVYQSWKGSNIFLFQGRFIFGPDVRSLGLTILLILAPVSIFCVFVARKLMDDFSHHLGISIMVVAVVFTLYDLVLLLLTSGRDPGIIPRNAHPPEPESFDGNADVGAGQTPP

SEQ ID NO: 79003 - protein, 189 aa, Gossypium hirsutum
  unsure (1)..(189): unsure at all Xaa locations
  Clone ID: LIB3825-024-Q6-K6-H6.pep
ERVCGATTPIGSGGGSVLLLLTSRGDPGIISRNAHPPEPEGFNGNVDVGAVKTPQLRLPRIKXSGGEQFDHHCPWVRQCIRLQDYRFFFMFVFSTTLLCMYVFGFSWVYIRRIMASEETTTWRAMIQTPTSIVLIVYTFISMWFVGGLTAFHLYLISTNQTTYENFRYGYDHXANLYRKGVIENFKQIF

SEQ ID NO: 79004 - protein, 51 aa, Gossypium hirsutum
  Clone ID: LIB3145-032-Q1-K1-G1.pep
MYMVPPPQRSDPGSIGGGSGDLRVYQAWKGSNIFLFQGKFIFGPDVRSLRL

SEQ ID NO: 79005 - protein, 55 aa, Gossypium hirsutum
  unsure (1)..(55): unsure at all Xaa locations
  Clone ID: LIB3828-006-Q1-N6-B12.pep
PYNKEGVRNFKXIFCSSIPSSKNNFSAKVPREPVLPTRASGFMSPNMGKDPIISV

SEQ ID NO: 79006 - protein, 118 aa, Gossypium hirsutum
  Clone ID: GOSHI-09MAY01-C4459_1.pep
NTSFLIKLSNFHLKLAPASSKSWSIQYWFPESTNIKKVLFSRSLCFHKPEFGLGSIHFRTFRWKANPTYPLKEDEVPLLRTPKARKGCSRWLSLQSYTTQRRVWIFASEHDRIQMLMG

SEQ ID NO: 79007 - protein, 207 aa, Gossypium hirsutum
  unsure (1)..(207): unsure at all Xaa locations
  Clone ID: GOSHI-09MAY01-C4479_3.pep
NNLNNEGRIRTVLDVGCGVASFGAYLLSSDIXTHASAHASAMSLAPNDVHQNQIQFALERGIPAYLGVLGTKRLPYPSRSFELAHCSRCRIDWLQRDGILLLELDRLLRPGGYFAYSSPEAYAQDEEDLPIWREMSALVGRMCWRIAAKRNQTVIWQKPLTNDCYMEREPGTNPPLCRSDDDPDAVWGVPMEACITPYSDHDQKAQG

SEQ ID NO: 79008 - protein, 135 aa, Gossypium hirsutum
  Clone ID: GOSHI-09MAY01-C4479_2.pep
KQDVWVMNVVPEDGPNTLKVIYDRGLIGTTHNWCEAFSTYPGTYNLLQAWTVFSDIEKKGCSAEDLLLEMDRILRPSGFVIIRDKQPVIDFVKKYLSALHWEAVATADSDNEGDDIVFIIQKKLWLTSESLRNSE

SEQ ID NO: 79009 - protein, 398 aa, Gossypium hirsutum
  unsure (1)..(398): unsure at all Xaa locations
  Clone ID: GOSHI-09MAY01-C4479_1.pep
FYVGCGVASFGAYLLSSDIIAMSLAPNDVHQNQIQFALERGIPACLAGRATTGRPGPSRSFELAHCSRCRIDWLQRDGILLLELDRLLRPGGYFAYSSPEACAQGEXDLRIWKEMSALVERMCWRIAAKRNQTVIWQKPLTNDCYMERAPGTNPPLCRSDDDPDAVWGVPMEACITPYSDHDQKAKGSGLAPWPARLTSPPPRLADFGYSNEMFEKDTETWRQRVENYWNLLSPKIEANTLRNLMDMKANMGSFAAALKERNVWVMNVIPEDGPNTLKLIYDRGLIGTTHNWCEAFSTYPRTYDLLHAWTVFSDIEKKGCSAEDLLLEMDRILRPRGFIIIRDKQPVIDFVRKYLSALHWEAVATADSSSDSEHEGDNVVFIVQKKLWLTSESILNSE

SEQ ID NO: 79010 - protein, 72 aa, Gossypium hirsutum
  unsure (1)..(72): unsure at all Xaa locations
  Clone ID: LIB3166-039-P1-K1-D1.pep
ISKGIDETMLPPLPCLFQTFHLNNQNQQALEEXIVNLVWPRSXNHFPWLSXXIXIETKRSFSYXIKFKLXSF

SEQ ID NO: 79011 - protein, 285 aa, Gossypium hirsutum
  unsure (1)..(285): unsure at all Xaa locations
  Clone ID: GOSHI-09MAY01-C4439_1.pep
MEKQNRSGTAGKVIRCKAAVCRNPGEPLVIEEIMVDPPKAWEIRIKILCTSLCHSDVTFWKISIGPFALFPRIFGHEAVGVVESVGEHVEEFQEGDMVVPVFRPNCRECRDCKSQKGNGCSIFGDKLVAEMPRDGTSRFKGMNGETLHHFLSVSSFSEYTVVDVVHVVKISSEFPAEKACLLSCGVSSGIGAAWKVADIEEGSTVAIFGLGAVGLAVAEGARLRGASKIIGVDLNQEKFEIGKKFGVSEFINPATCGEKKVSEVIXKEITDGGSDYSFECIGLLH

SEQ ID NO: 79012 - protein, 140 aa, Gossypium hirsutum
  unsure (1)..(140): unsure at all Xaa locations
  Clone ID: LIB3584-026-P1-K1-C5.pep
PRVRPRVRGTARKVIRCKAALCRNGVXPLVIEAIMVDPPKACQIHIKHLCTSICHSHIXLMKTFHAHMLXYEQIKGHSSFGVAESVREHVEEFHEGHIVVPVFASNSRQCMYCNVPNRYRCGISSSYTGMGRLYTRFTRH

SEQ ID NO: 79013 - protein, 64 aa, Gossypium hirsutum
  Clone ID: LIB3083-029-Q1-L1-D3.pep
GERKAGLFVSVGERSKSWGGRPSRYNGMGRIYTRLDRKWSGSEYMVRLGRLRAKTLPQFRSIFC

SEQ ID NO: 79014 - protein, 343 aa, Gossypium hirsutum
  unsure (1)..(343): unsure at all Xaa locations
  Clone ID: GOSHI-09MAY01-C4429_1.pep
MQWQTRRPSGSGLLFTRTGVLFVRESITQKKKKILQATVTGREAKRAMAKHEDLPVPVDSSLELVYGEGXSQLEEAQLRFDQLKSKFVEVFGHPPDVFARSPGRVNLIGEHIDYEGYSVLPMAIRQDTIVAIRKHKEGEAEKLLKIANVNDKYATCTYPADPNQEIDLKNHKWGHYFICGYKGFYEYAKSKGVNVGKPVGLDVLVDGTVPTGSGLSSSAALVCSATIAIMAAFGVNFSKKEIAQLTCICEQHIGTQSGGMDQAISVMAKNGFAELIDFNPIRATDVQLPAGGTCVIAHSLAESQKAVTAATNYNNRVVECRLAAIVLGIQLGMRPQEAISKVK

SEQ ID NO: 79015 - protein, 117 aa, Gossypium hirsutum
  unsure (1)..(117): unsure at all Xaa locations
  Clone ID: LIB3166-011-P1-K1-E3.pep
FARDFFTQKKIAGCGARKRGKESNGKARRPSVPVYSLLELVYGERSXLEEAQLRFDQFKSKFVKVFGHPPDVFARSSGRVNLIGEHIDYXGYSMLPMAIMQDTIVAILKHKEGEAEK

SEQ ID NO: 79016 - protein, 186 aa, Gossypium hirsutum
  Clone ID: GOSHI-09MAY01-C4779_2.pep
MKTTKASVFLLFIIFSVTPSSFLFGVANATNEPVLDTDGNEVQTGTEYYVVSAIWGAGGGGLALGRPSGNPCPEVVAQRRSGDDGIPVIFSSSDSDDGVVRLSSDINIEFVPLRPRLCRTTTVWKVDDYDHSAGKWWVITDGVKGNPGADTLTSWFRIEKGGVLGYKFKYCPAVCGTCPALCNEIG

SEQ ID NO: 79017 - protein, 218 aa, Gossypium hirsutum
  Clone ID: GOSHI-09MAY01-C4779_1.pep
SVFLLFIIFPRAPPPVRPRVPNATNEPVLDTDGNEVQTGTEYYVVSAIWGAGGGGLALGRPSGNPCPEVVAQRRSGDDGIPVIFSSSDSDDGVVRLSSDINIEFVPLRPRLCRTTTVWKVDDYDHSAGKWWVITDGVKGNPGADTLTSWFRIEKGGVLGYKFKYCPAVCGTCPALCNEIGRDSDGDMVRLALSTDNGWPFIFKKKESSLRGIQQVIRT

SEQ ID NO: 79018 - protein, 171 aa, Gossypium hirsutum
  unsure (1)..(171): unsure at all Xaa locations
  Clone ID: GOSHI-09MAY01-C4739_1.pep
PRVRGRVGTALSDTRVQFHQDQMHFLVVHETQLAIYETTKLERVKQWVPLESSXPITHATFSCDSQLVYSSFLDXTVCVFTAANLRLRCRINPSAYLPASVSSNVHPLVXAAHPSEPNEFAWGLSDGGVHVFEPPXSENKWGVPPPVENGSSSNMAATPSVGASGSEQAQR

SEQ ID NO: 79019 - protein, 135 aa, Gossypium hirsutum
  unsure (1)..(135): unsure at all Xaa locations
  Clone ID: GOSHI-09MAY01-C4729_1.pep
PRVRPRVRPRVRASDIVRIALESETKTHKKKVLEEFVWAVLCNGRKMGYSIRRKQLSDDELHVMQLLRGVSMGAGVLPSPNDKETVTADGELTYMRAXRFERVGGSXKDSEAFYMINPDGAASGPELSIFFVRSN

SEQ ID NO: 79020 - protein, 121 aa, Gossypium hirsutum
  Clone ID: GOSHI-09MAY01-C4699_2.pep
PRVRFAEDSDLSVTTRLACGAAAGTAGQTVAYPLDVIRRRMQMVGWKDAASVVTGDGRNKAPLQYTGMIDAFRKTVRHEGFGAFYKGLVPNSVKVVPSIAIAFVTYEVVKDILGVEIRISD

SEQ ID NO: 79021 - protein, 139 aa, Gossypium hirsutum
  Clone ID: GOSHI-09MAY01-C4699_1.pep
VGLNFAVYESLKDWLIKNKQFGLAEDSELSVTTRLACGAAAGTVGQTVAYPLDVIRRRMQMVGWKEAASVVTGDGRNKAPLEYTGMIDAFRKTGRHQGFGALYKGLVPYSGEGGPSIALAFVTYEVVKDILGVEIRISD

SEQ ID NO: 79022 - protein, 119 aa, Gossypium hirsutum
  Clone ID: GOSHI-09MAY01-C4689_1.pep
LLHPELKHCSIDDHQLVFDLVNEALVGMSEKACVHKFPKPFNRGIGLMFKGNAVLLQEVWRYVSGNMGFQQEHDGSLDDIVGRDMEKDAWMFLQGEDDFVALELQELVFDGLLDELLCD

SEQ ID NO: 79023 - protein, 178 aa, Gossypium hirsutum
  Clone ID: GOSHI-09MAY01-C4659_1.pep
MGNQKQKWTAEEEEALLAGITKHGPGKWKNILKDPEFAPFLTHRSNIDLKDKWRNLSVSTSTQGARDISRAPKVKAIVASLPNTPNSSAPVALRAHNVTSDTVVGDSSNNGIDGQNAPRYNTMIFEALLTIKDTNGCDISAIVSYIEHRHEVPPNVYRVLKFKVEKTCSQGNLERSKF

SEQ ID NO: 79024 - protein, 367 aa, Gossypium hirsutum
  Clone ID: GOSHI-09MAY01-C4669_1.pep
MSGYDVMLMEPPRPPPPPPPPPPPPPPPPPPALAEKVIVKPIVPNEVTAGPSAKTPKPSTFARSFTIAALQQYTNSFSQENLLGGGMLGSVYRAELPDGKLLAVKKLEKRVASQQKDDEFIELVENIDRIQHVNVVRLMGYCAEHGQKLLIYEYCSNGSLQDALHSDDEFKKLLSWNTRIRMALGAARALEYMHEACHPPVIHRNFNSANVLLDDDLDVRVSDCGLAPLIASSSVSQLSGQLQSIYGYGAPEFESGIYTSQSDVYSFGVFMLELLTGRKSYDRTRSRGEQFLVRWAIPQLHDIEALSRMVDPSLNGEYPAKALSRFADIISRCVQSEPEFRPPMSEVVQDLLDIIRRERPSNESIGD

SEQ ID NO: 79025 - protein, 139 aa, Gossypium hirsutum
  unsure (1)..(139): unsure at all Xaa locations
  Clone ID: GOSHI-09MAY01-C4189_1.pep
TRSDFVERKMKGEDQARSLFGIPLTDRPKWQQFLICSSGFFFGYLVNGICEEYVYNRLQFSYGWYFTFVQXFVYLILIRLQGFTTKXMVNPWKTYVKLQLXIGSHGLPKFLAYLTTQTNMLNYKVLLYNMVLNPGLKEI

SEQ ID NO: 79026 - protein, 195 aa, Gossypium hirsutum
  unsure (1)..(195): unsure at all Xaa locations
  Clone ID: LIB3583-006-P1-K1-A11.pep
PRVRPRVRFSYGWHFTFVQRFDYLILIRLXGFTTKKMVNPWKTYVKLSAALMGSHGLTKGSLAYLNYPAQIMLKSTKVLPVMIMGAFIPGLRRKYPVHEYICALLLVIGLILFTLADAQTYPNFSIIGIIMILGALVMDAFLGNFQEAIFTMNPETTQMEMLFCSTVVGIPFLVVPMILTGELVRAWNSCSQHPY

SEQ ID NO: 79027 - protein, 81 aa, Gossypium hirsutum
  Clone ID: GOSHI-09MAY01-C4169_4.pep
SLSFDDIKHMMKFCNSLHGGLNKLAELLEVERVGVCHQAGSDSLLTSCTFRKLRDNFFNGSTEKYAGVLYGLGVESGQTTN

SEQ ID NO: 79028 - protein, 273 aa, Gossypium hirsutum
  Clone ID: GOSHI-09MAY01-C4169_1.pep
MSILPKGDSVHIREVWNDNLEEEFALIREIVDTYNYVAMDTEFPGVVLRPVGSFKNISDYNYQTLKDNVDMLKLIQLGLTFSDANGNLPTCGTDSSCIWQFNFREFNISEDIFVSDSIELLRQCGVDFKKNNEKGIDVKRFGELLMSSGIVLNDDVHWVTFHSGYDFGYLLKLLTCRSLPDTQTGFFNLIKMYFPMVYDIKHMMKFCNGLHGGLNKLAELLEVERVGVCHQAGSDSLLTSCTFRKLRDNFFKSVQKYAGVLYGLEVEGGQNSD

SEQ ID NO: 79029 - protein, 139 aa, Gossypium hirsutum
  unsure (1)..(139): unsure at all Xaa locations
  Clone ID: LIB3828-027-Q6-K6-D2.pep
SPFCFFFEVWVFLGCAYVLFSNLGWAVFVALIRYSGKCRVCPRVNRFILREVRNDNLQEQFALIREIVDTYNYVAMDTEFPGVVLRPVATFKNXNDYNYQTLKXNVDMLKLIQLGLTSSDQNGKLPTCGTVSFCIWQFN

SEQ ID NO: 79030 - protein, 72 aa, Gossypium hirsutum
  Clone ID: LIB3583-005-P1-K1-G3.pep
MSVLPKGDSVQIREVWNDNLEEEFVLIREIVDAYNYVAMDTEFPGVVLRPVGTFKNVSDYNYQTLKDNVDML

SEQ ID NO: 79031 - protein, 81 aa, Gossypium hirsutum
  Clone ID: uC-gsflnu33B076h10b1.pep
SELLRQCGVDFKKNNQKGIDVKRFGELLLPSGIETIDEAHQGIFILRRPNRVDAETSYATDSVHHATLESLICTKMDGLTE

SEQ ID NO: 79032 - protein, 67 aa, Gossypium hirsutum
  Clone ID: uC-gsronu33B087h01b1.pep
ARFHNFKICFQHLNATVSGTQLGDSIFKGFEFGCACLLFGLLEMSILPKGDSVHIREVWNDNLEEEF

SEQ ID NO: 79033 - protein, 174 aa, Gossypium hirsutum
  Clone ID: GOSHI-09MAY01-C4109_1.pep
PRVRTTEESSVSLQNAGSDSSSGRIHHLDVPEVFTSSLDGSEPIYEGEDCILDSITTTYQDREPIYEGEVILAKQAGKTAVEDSNMRSKDEINLQQGELIGNFLKNNASQLTFYGLFCLQDGLKERELCVFFRNNHFSTMFKYDGELYLLATDQGYLNQPDLVWEKLNEVNGDT

SEQ ID NO: 79034 - protein, 215 aa, Gossypium hirsutum
  Clone ID: GOSHI-09MAY01-C4139_1.pep
MMGRKHLHELLQEDQEPFVLKKYIADRRCELKKPSPKTLLQIKKRKPITQTSSFPSNFCKNACFFSTKTTTDFTKSPLFEFPSPVKRSPCKSPNAIFLHIPARTAALLLEAALRIQKQSKTKNNGGSSGLFGSILKRITHRNKSRNSEISNVEGAEVSVKDILRWDSSVGKNNQSGRPSSSAVWSETNEEKSMDLDLDTSCSCSQSEDFEEIFVN

SEQ ID NO: 79035 - protein, 128 aa, Gossypium hirsutum
  Clone ID: GOSHI-09MAY01-C4049_1.pep
SVWSPILYGVQHLAIWVYFLVYRSSLFEGDFLLFFRELLYKPVVLACGHMSCFWCVYNAMNHVHESHCPICRCPYNHFPSVCQMLHFLLLKLYPVAYNRRERHVRDEEKRAGHFSLQFDQNLVGTKSL

SEQ ID NO: 79036 - protein, 143 aa, Gossypium hirsutum
  Clone ID: GOSHI-09MAY01-C4009_3.pep
EKLDSIYGSFEKPSEKKKGSRVPPPVRVNADLRRIINSDEVQSVVKPIKKEIKRAPLKKNPLKNLNAMLKLNPYAKTARRMSLLAEAQRVKAKKEKLDKKRKPISKEEATAIKSAGKAWYQTMISDSDYTEFENFSKWLGVSQ

SEQ ID NO: 79037 - protein, 418 aa, Gossypium hirsutum
  Clone ID: GOSHI-09MAY01-C4009_2.pep
LSGLPSKPKTLTMAAAAARPLVSVQTIESDMATDATPTVPLADVMKASIRPDIVTFVHDNISKNSRQPYAVSKRAGHQTSAESWGTGRAVSRIPRVPGGGTHRAGQGAFGNMCRGGRMFAPTKIWRRWHRKINVNQKRYAVASAIAASAVPSLVMARGHRIESVPEMPLVISDAVESVEKTSAAIKVLKQIGAYPDVEKAKDSQGIRPGKGKMRNRRYISRKGPLIVYGTEGAKLIKAFRNIPGVEVANVERLNLLKLAPGGHLGRFIIWTKSAYEKLDTIYRSFDRPFEIMKGSVWPRSNMVDAALGRIINSDEVQSVVKPIKKEIKRAPLKKNPMKNLNAMLKLNPYAKTARRMSLLAEAQRVKAKKEKLDKKRKPISKEEATAIKSAGKAWYQTMISDSDYTEFENFSKWLGVSQ

SEQ ID NO: 79038 - protein, 405 aa, Gossypium hirsutum
  Clone ID: GOSHI-09MAY01-C4009_1.pep
MAAAARPLVSVQTIESDMATDATPTVPLADVMKASIRPDIVTFVHDNISKNSRQPYAVSKRAGHQTSAESWGTGRAVSRIPRVPGGGTHRAGQGAFGNMCRGGRMFAPTKIWRRWHRKINVNQKRYAVASAIAASAVPSLVMARGHRIEAVPEMPLVISDAVESVEKTSGAIKVLKQIGAYPDVEKAKDSQGIRPGKGKMRNRRYISRKGPLIVYGTEGAKLIKAFRNIPGVEVANVERLNLLKLAPGGHLGRFIIWTKSAYEKLDTIYGSFDKPSEKKKGYVLPRSKMVNADLGRIINSDEVQSVVKPIKKEIKRAPLKKNPLKNLNAMLKLNPYAKTARRMSLLAEAQRVKAKKEKLDKKRKPISKEEATAIKSAGKAWYQTMISDSDYTEFENFSKWLGVSQ

SEQ ID NO: 79039 - protein, 110 aa, Gossypium hirsutum
  Clone ID: LIB3829-001-Q1-N6-D11.pep
RIINSDEVQSVVKPIKKEIKRAPLKKNPLKNLNAMLKLNPYAKTARRMALLAEAQRVKAKKEKLDKKRKPVSKEEATAIKSAGKAWYKTMISDSDYTEFENFSKWLGVSQ

SEQ ID NO: 79040 - protein, 150 aa, Gossypium hirsutum
  unsure (1)..(150): unsure at all Xaa locations
  Clone ID: LIB3493-051-P1-M1-A2.pep
MAAAARPLVSVQTIESDMATDATPTVPLADVMKASIRPDIVTFVHDNISKNSRQPYAVSKRAGHQTSAESWGTGRAVSRIPRVPGGGTHRAGQGAFGNMCRGGRMXAPTKIWRRWHRXINVTRSVRPCSASRLVSSSHDVHDECRIRAFA

SEQ ID NO: 79041 - protein, 107 aa, Gossypium hirsutum
  unsure (1)..(107): unsure at all Xaa locations
  Clone ID: LIB3135-051-Q1-K1-A9.pep
AFRNIPGVEDANVERLNRLKLAPGGHLVRFIICTKSSYEKLDSVYGTFEKPLQKKNGYVMARTKIVNADMGRIINYDXYNXVLNPNKIDNNMAPLKKKPMKNLMLCW

SEQ ID NO: 79042 - protein, 95 aa, Gossypium hirsutum
  unsure (1)..(95): unsure at all Xaa locations
  Clone ID: LIB3585-038-P1-K1-D7.pep
MAAAAAAARPLGGVQTIECDMATDSTPTVPLADVMKASIRPDIVTFVHDNISKNRRQPYAVSKCAGHQTSAESXGTGRAVSRIPRVPGGGTHRAG

SEQ ID NO: 79043 - protein, 115 aa, Gossypium hirsutum
  Clone ID: GOSHI-09MAY01-C4319_3.pep
IIESRQIVTRKPSHCVWFAVLPNPLRPDYVCITLRPYSGVWFAVIGITRVIGYAPNPQIPVFSNPFPFRCISYYFRPPSPSPCFTLPPYPTLSSSVHEPLPSPLNSFYILEPPTK

SEQ ID NO: 79044 - protein, 221 aa, Gossypium hirsutum
  unsure (1)..(221): unsure at all Xaa locations
  Clone ID: GOSHI-09MAY01-C4319_2.pep
VAGEIILRSCDRIAESGATELLSSSWLDFHTSTHRANWIFSPQELVEKYKAANQRAIQALEKYGTTQMEVDADGSLSYPEPIARDNADKHSRPKPLNIEEEQFMRVFYENKLREVCSAFYFPNKIQFCXATALIYFKRFYLQWSVMEHHPKHIMLTCVYAAYKIEENHVSAEELGKGISQDHQMILNYEMIVSQSLEFDLIVYAPYRSVEGFVNDMEKLHL

SEQ ID NO: 79045 - protein, 275 aa, Gossypium hirsutum
  Clone ID: GOSHI-09MAY01-C4319_1.pep
MADFHTSTHRANWIFSPQELVEKYKAANQRAIQALEKYGTTQMEVDADGSLSYPEPIARDNADKHSRPKPLNIEEEQFMRVFYENKLREVCSAFYFPNKIQATALIYFKRFYLQWSVMEHHPKHIMLTCVYAACKIEENHVSAEELGKGISQDHQMILNYEMIVYQSLEFDLIVYAPYRSVEGFVNDMEELHLSINQMLKDLQETARLEVDKIMLTDAPHLFPPGQLALAALRNANEMRRVLDFEGYLRRILARQNSKHTILQLIESLDAIDAWV

SEQ ID NO: 79046 - protein, 63 aa, Gossypium hirsutum
  Clone ID: LIB3135-028-Q1-K1-C11.pep
KAKTGEKKEWKFISTKTQNLFFFFFFFFFFFFFFFFFFFFFFFFFFFFFFFFFFFIKLFSKFH

SEQ ID NO: 79047 - protein, 223 aa, Gossypium hirsutum
  unsure (1)..(223): unsure at all Xaa locations
  Clone ID: GOSHI-09MAY01-C4309_1.pep
FLQVFHTHSSSKIQPLIQLNRLRDLRQLLAALVRIDLINHSTSSTPLERTPAQLSTLASGTSVVPGPSTLSSTYSDQKSEISKDSKEKKLEQLQLSAXENLSMQSCSSFTRSRTKVLMQGIAVGRAVDLAIFEGYGQLIDELEEMFDIKGELRPRNKWEIVYTDDEGDMMLVGDDPWPEFCNPRGRIFICSSQDVKKLKTGSKLPLASIEGEGTVISSDSSEN

SEQ ID NO: 79048 - protein, 175 aa, Gossypium hirsutum
  Clone ID: GOSHI-09MAY01-C104302_1.pep
PRVRPRVRFSLLEGLTEVNVVVWNSNTLSSDDLIGYGRIQLQKAISQGYDDSSWAIQTKTGRYAGEVQLILHYPNAKHQASGGYSQPSAPPAYAPPPHQRPPYGGPPVPAPYPPPGPAGYPAPPYPGGYPQQPLYPPARYPLGPDPYGGYPPPAGAYPPPPYYPPGPYPGPYPPY

SEQ ID NO: 79049 - protein, 108 aa, Gossypium hirsutum
  Clone ID: GOSHI-09MAY01-C4339_3.pep
NKVVDSYNPFSLLNKEAWRCSKGINSIIFLLYADPRSEVKNNVVYSSDRFFFGNCSISTQTKCFLFHFNVSMKFSSINASSMSGTKVAEIFFILTSLKQMKLPSPWPP

SEQ ID NO: 79050 - protein, 422 aa, Gossypium hirsutum
  Clone ID: GOSHI-09MAY01-C4339_2.pep
QVTGARSYSGKVGPDDTDKVDMAYWVVADHIRTLSFAIADGASPGNEGREYVLRRILRRAVRYGSEVLKAPEGFFSRLVRIVVEAMGDVFPELKQHEARIGDIIAAEEASFGKTLVKGIEKFKKAAQDVQGRILSGQDAFILWDTYGFPLDLTQLMAEERGLIVDVDCFNNAMDEAREKSRSARNKQAGGAIVMDADATSALHKKGVSTTDDSFKFIWFQPHESVIKAIYNGSEFMENATAGDDVGIVLESTSFYAEQGGQIFDTGYLDGSFGSFQVCNVQIFGGFVLHIGSLSGASGKFSVGDKVTCKVDYDRRTLIAPNHTCTHMLNFALREVLGNHVDQKGSIVLPEKLRFDFSHDPNRDGAINADHLRKIEAIVNEQIKSELDVYSKEVTLAEAKRINGLRAVFGGSYPGSVRVVAVG

SEQ ID NO: 79051 - protein, 422 aa, Gossypium hirsutum
  Clone ID: GOSHI-09MAY01-C4339_1.pep
IFDTGYLDGSFGSFQVCNVQIFGGFVLHIGSLSGVSGKFSVGDKVTCKVDYDRRRLIAPNHTCTHMLNFALREVLGNHVDQKGSIVLPEKLRFDFSHDPNRDGAINADHLRKIEAIVNEQIKSELDVYSKEVTLAEAKRINGLRAVFGEVYPDPVRVVAVGKKVEDLLADPENKEWSSISSELCGGTHITNTLEAKAFALLSEEGIAKGVRRITAVTTESALKAMELGGLLLKEVDDASNMEVSLLEKKVASLKTTVDSASIPAAQKADIRAKIAQLQNQLKKAQKKIAEQNMQRAVATATELAEVAAKEGKTFCVTRIDVGLDAAALREAVSKVIQQKGMPVMVFSIDETTNKAVVYAGVPEKSEQSKLLEVSQWLTNAVGPLKGRCGKRKGGLATGHGTDGSHVNEALDLATSFASMKLK

SEQ ID NO: 79052 - protein, 224 aa, Gossypium hirsutum
  unsure (1)..(224): unsure at all Xaa locations
  Clone ID: GOSHI-09MAY01-C4269_1.pep
HASAHASAFNIYSADTSHRQRLRKKREMPGLACNACNREFLDEAERKLHYKSDWHRYNLKRKVAGVPGVTEALFLARQTALAEEKDKQNETPMLYSCGLCGKGYRSSKAYSQHLKSRAHIAQTSQHPEEGKAAIIKPFIRRAVNKPPQPRDTNDEENDDNWVEVDPDEXLASGDEMHIDNGEETGREELDPCCCSMCDLEHDTIESCMVHMHKFHGFFIPDVSI

SEQ ID NO: 79053 - protein, 181 aa, Gossypium hirsutum
  Clone ID: AI728144.1.pep
NHNCKAWGFHSAYLCGKGYRSSKAYSQHLKSRAHIAQTSQHPEEGKAAIIKPFIRRAVNKPPQPRDTNDEENDDNWVEVDPDEDLASGDEMHIDNGEETGREELDPCCCFMCDLKHDTIESCMVHMHKFHGFFIPDVEYLKNPEGLLIYLGLKVKKDFICLYCNERCHPFTILEAVRKRMA

SEQ ID NO: 79054 - protein, 199 aa, Gossypium hirsutum
  Clone ID: GOSHI-09MAY01-C4209_1.pep
DGIKMIKHSMNFLKIWSSERELKGRCTLCRKQVADDGGVCSIWRPICPDGYVSIGDIARVGTHPPNVAAVYRNIDKLFALPVGYDLVWRNCLDDYTTPVSIWYPRAPDGFFSLGCVAVAGFEEPEADLVRCVAETVAEETTFEEQKVWCAPESYPWGCHVYQVQSDALHFVALRETKEESNWKPSRVRDDFQSPRSSES

SEQ ID NO: 79055 - protein, 72 aa, Gossypium hirsutum
  Clone ID: GOSHI-09MAY01-C5919_1.pep
QIPTFGIFSTCHHPSTGLSLLWFDMRVFYVRVSNFQVDDSTPEFLTLNHIPLDPDTLLEVNGIRSSIYSDGV

SEQ ID NO: 79056 - protein, 54 aa, Gossypium hirsutum
  Clone ID: LIB3583-059-P1-K1-B2.pep
KLKEGLQLDPLACYHSKLGDKRKLTPGLLICRIPWGSCWWWFLQAFQIPFSMGL

SEQ ID NO: 79057 - protein, 128 aa, Gossypium hirsutum
  unsure (1)..(128): unsure at all Xaa locations
  Clone ID: GOSHI-09MAY01-C5929_2.pep
PTRPLAFLVLNFSFFFFSFLLTGFSAYMQKRSKGTKRKTRQAKALENARKAPRSFLELLHEANLESLPPHVPSYLRAAVGPPSSTSRRHFCSVCGFSAKYTCVTCGMRFCSCRCQNIHNDTXCMKFVA

SEQ ID NO: 79058 - protein, 172 aa, Gossypium hirsutum
  Clone ID: GOSHI-09MAY01-C5929_1.pep
MDDDNSNALRRMSTRTRKVAPKMAAALGSSDNRSQAALARLEALENDNAGIEAVEMNDDDEASLDEDDQAYMQKRSKGTKRKTRQAKALENARKAPRSFLELLHEANLESLPPHVPSYLRAAVGPPSSTSRRHFCSVCGFSAKYTCVTCGMRFCSCRCQNIHNDTRCMKFVA

SEQ ID NO: 79059 - protein, 262 aa, Gossypium hirsutum
  Clone ID: GOSHI-09MAY01-C5589_1.pep
MDPPAMMSDGRYNLAEIWQYPMSESGISRGQFGHGLAQFGDPSREVSGNDPGSLEQQQRRGGMRRRRDGEVETAKVVSTSSTSSGNAVNNGEGKRIKAAGGREQNHESRVEAEPSSGKLVEEKAQPSEPPKQDYIHVRARRGQATDSHSLPERARREKISERMKILHDLVPGSTQRPGKALVLDEIINYIQSLQRQVEFLSMKLEAVNSGINPAIEVFPRKDYGQQAFDATGMAFGSQVIREYSGGTSPEWLHIGSAFERTT

SEQ ID NO: 79060 - protein, 255 aa, Gossypium hirsutum
  Clone ID: GOSHI-09MAY01-C5559_1.pep
MAFLMPSPEISTASAKFFSNPTPRPKFLKSCAISKNDDEKVWSRTNARVGVKDAGSTVSCLSQNLRLYVQFSAPVKRGSKPSKEEEEKQDYYVNMGYAIRTLREEFPDIFYRELSFDIYRDDIVFKDPLNTFIGIDNYKSIFRALRFHGRIFFKALWLDIVSVWQPMDNVVMVRWTIHGIPRVPWESRGRFDGTSEYKLDKKGKIYEHRVDNTALNSPPKFHVLAVEDLIRSVGCPSTPRPTYFEISSASPPEKT

SEQ ID NO: 79061 - protein, 134 aa, Gossypium hirsutum
  unsure (1)..(134): unsure at all Xaa locations
  Clone ID: LIB3582-016-P1-K1-F11.pep
MAFLMPSPEISTASAKIFSNPTPRHKFLKSCAISKNDDEKVWSRTNARVGVKDAGSTVSGLSQNLRLYVQFSAPVKRGSKPSKEEEEKQDYYVNMGYAIRTLREELPDIFYRELSXDIYRFGFNFPVFDFFEME

SEQ ID NO: 79062 - protein, 86 aa, Gossypium hirsutum
  Clone ID: uC-gsflmaxxa057b04b1.pep
NGVQLMYTIASSPRSVTTTKIKCVPVILNYLLHFKEIKCGKIESQPVNIKNEFSVEDVRELLSQGPKTARTNSSFGSNPKPYCQHL

SEQ ID NO: 79063 - protein, 287 aa, Gossypium hirsutum
  Clone ID: GOSHI-09MAY01-C5569_1.pep
PRVRKHIKAVMNIGPAFLGVPKAVSNLFSAEGKDVSYIRAMAPGVFDSEILGLQTFERVMRMARTWDSIVSLLPKGGEVIWGNMDRSPEEGHVCDFSKKSHSKTSLTTNNVNNSDVKRGFLVKDLANYGRIISLGKPASVLHSSKLPTADSKVFSRTSTSENFNNFSCGEAWTEYDEMSRQSIQNVAADKAYTTTTLLDLLRFVAPKMMRRAEAHFSHGIAENLDDPKYNHYKYWSNPLETKLSDAPDMEIYCMYGVGIPTERSYVYKLSPNSGAKAFHTRLITQST

SEQ ID NO: 79064 - protein, 137 aa, Gossypium hirsutum
  Clone ID: GOSHI-09MAY01-C5479_1.pep
MADGMGGGPTSPAGGSHESGGEHSSPQSTVREQDRYLPIANISRIMKKALPSNGKIAKDAKDTVQECVSEFISFLTSEASDKCQKEKRKTINGDDLLWAMATLGFEDYIEPLKIYLARYRELEGDTKGSARGGDGSF

SEQ ID NO: 79065 - protein, 176 aa, Gossypium hirsutum
  Clone ID: GOSHI-09MAY01-C5469_1.pep
MALVVYWYDCVCFGIVAAAFLGSLWVLWRKEAASRCEDDSVYESLLAAQQDADGFVHATPTAHVGSNQLWTSCWKGVHPGWLVLTRFVSFAVLAGFLSWDIVEWDASIFVYYTEWTFALVMVYFGLGTVISAYGCWVCLNTPLPENGARAEFLKSDVEESRTENSGTYKENNVRDK

SEQ ID NO: 79066 - protein, 81 aa, Gossypium hirsutum
  unsure (1)..(81): unsure at all Xaa locations
  Clone ID: LIB3166-016-P1-K1-G8.pep
HFFFCCSHGSKTPXGWGLDHGASTLLVRLRLFRHCGGCLPWVFMGFMEKRNCIYMRGQQRIQVFAFSLTGCLSVPSFHTHL

SEQ ID NO: 79067 - protein, 89 aa, Gossypium hirsutum
  Clone ID: GOSHI-09MAY01-C5409_2.pep
AAWGQKCLDFGWFFMFYLLHLGFCIFAAIAPPIVFHGKSLTGILAAIDVISDHMLAGVFFFVGFGLFCLESLLSLWVIQKIYLYFRGHK

SEQ ID NO: 79068 - protein, 265 aa, Gossypium hirsutum
  Clone ID: GOSHI-09MAY01-C5409_1.pep
MNRHHDPNPFDEEEVNPFSNGGSVAPARPLASEPLGFGQKHDATVDIPLDSMNDSKKREKELAAWEADLKRREKDIKRREDAVSQAGVSVDDKNWPPIFPIIHHDIANEIPVHAQRLQYLAFASWLGIVLCLVFNVIAVIVCWIQGGGVKIFFLAVIYMLLGCPLSYVLWYRPLYRAMRTDSALNFGWFFMFYLLHLGLGILAAIAPPIVFHGKSLTGILAAIDVISDHMLAGVFFFVGFGLFCLESLLSLWVIQKIYLYFRGHK

SEQ ID NO: 79069 - protein, 91 aa, Gossypium hirsutum
  unsure (1)..(91): unsure at all Xaa locations
  Clone ID: LIB3585-045-Q6-K1-B3.pep
CWIQGGGVKIFFLAVIYMXLGCPLXHVLWYRPLYRAMRTDSALNFGWFFMFYLLHLGFCIFAAIAAPIXFHGKYLTGIQPEMDVIYDHMQD

SEQ ID NO: 79070 - protein, 127 aa, Gossypium hirsutum
  unsure (1)..(127): unsure at all Xaa locations
  Clone ID: LIB3189-046-P1-K1-B2.pep
MNRHHDPNPVDEKEVNPFSNGGSVAPARPLASEPLGFGQKHDATVDIPLDSMNDSKKREKELAAWEADLKRREKDIKRREDAVSQAGVSVXDXNLPLIVPVIHHDIANVIPVNAQMLHYLAFASWLV

SEQ ID NO: 79071 - protein, 134 aa, Gossypium hirsutum
  Clone ID: GOSHI-09MAY01-C5429_3.pep
ANDYTAYDLDNWDGVDRYHCNARVSKQDLADTYDVPFKSCVVEGKVASVMCSYNQVNGKPTCADPDLLKGTIRGQWGLSGYIVSDCDSVGVMYDTQHFTATPEESAAAAIKAGLDLDCGPFLAIHTDLAVRRGL

SEQ ID NO: 79072 - protein, 271 aa, Gossypium hirsutum
  Clone ID: GOSHI-09MAY01-C5429_2.pep
GLLLPGYQQELVTRVAQASKGPTILVLMSGGPIDVSFAKYDRRVSAILWAGYPGQAGGTAIADILFGTTNPGGKLPMTWYPQSYVAKVPMTNMGMRPSPGYPGRTYRFYKGPVVFSFGHGLSYTNFKQSLALAPTDLSVLINTNLFATKNYSTLSSNAIKVKHTNCDSLSLPLHIDVENIGNMDGTHTLLLFSEPPAAVKWSPNKQLISFHRVHVIAGSKQRVKINVHACKHLSVVDEFGIRRMPVGQHSLYIGDLKHSISLQANLEGIKN

SEQ ID NO: 79073 - protein, 379 aa, Gossypium hirsutum
  unsure (1)..(379): unsure at all Xaa locations
  Clone ID: GOSHI-09MAY01-C5429_1.pep
GKPTCADPNLLKRTILWQWHLNGYIVSHCESVGVMXETQHFTVTPXESAAATIKAGLDLDCRPFLAIYTDLAIXRGLLTVTDVDMALANTVTVQMRLGMFDGEPSAQPYGHLGPRHVCTPDHKQLALEAARQGIVLLKNSGSLPLSTSRHRTIAVIGPNSDVTETMIGNYAGVACDYTSPLKGISRYVRTVHQVGCSNVACKANNLFGFAEVAARHADATVLIMGLDQSIEAEFKDRTGLLLPGYQQELVTRVAQASKGPTILVLMSGGPIDVSFAKYDRRVSAILWAGYPGQAGGTAIADILFGTTNPGGXKLPMTWYPQSYVAKVPMTNMGMRPSPGYPXRTYRFYKGPVVFSFGHGLSYTNFKQSLALAPLIFSAH

SEQ ID NO: 79074 - protein, 226 aa, Gossypium hirsutum
  unsure (1)..(226): unsure at all Xaa locations
  Clone ID: GOSHI-09MAY01-C5749_1.pep
MADNGSPEEFLATAVDAAKKAGEIIRQGFYQTKHVEHKGQVDLVTETDKACEDLVFNHLKQHYPSHKFIGEETTAACGASELTDEPTWIVDPLDGTTNFVHGFPFVCVSISLTLGKVPTVGVVYNPIMDELFTGILGKGAFLNGSPIRVSSQTELVKSLLATEAGTKRDTPTVDATTNRINNLLFKVRSVRMSGSCALNLCGIACGRLDLFYELGYGXPWDVATGF

SEQ ID NO: 79075 - protein, 146 aa, Gossypium hirsutum
  unsure (1)..(146): unsure at all Xaa locations
  Clone ID: AI055739.1.pep
MADNGSPEEFLATAVDAAKKAGEIIRQGFYQTKNVEHKGQVDLVTETDKACEDLVFNHLKQHYPSHKFIGEETTAACGASELTDEPTWIXVNPLEGPPNLGTGFPXVWRPIGLTMGKVPTMGVVNTQIVKDFPWWPRKGAXLTGPL

SEQ ID NO: 79076 - protein, 162 aa, Gossypium hirsutum
  Clone ID: LIB3543-048-Q6-K6-E1.pep
ILWISGSPEEFLATAVDAAKKAGEIIRQGFYQTKNVEHKGQVDLVTETDKACEDLVFNHLKQHYPSHKFFGEETTAACGASELTDEPTWIVDPLDGTTNFVHGFPFVCVSIGLTIGKVPTIGVVYNPIMDELFTAVLGKGAFLNGTPIRVSSQTELVKSLLA

SEQ ID NO: 79077 - protein, 110 aa, Gossypium hirsutum
  Clone ID: GOSHI-09MAY01-C5709_1.pep
MAALVAGTPWVRIRVIPEFAPPLIFRRHFRRNFSVRAPIDSDAPVRVRFAPSPTGNLHVGGARTALFNYLFARSKGGKFVLRIEDTDLERLSLQSGGAVLLLLSQLCLLS

SEQ ID NO: 79078 - protein, 318 aa, Gossypium hirsutum
  Clone ID: GOSHI-09MAY01-C5729_1.pep
MFLLKTWRASAFGVYGYLNFTRNGFLGHSKKFKPEDMEIRIEGKNCVVTGANAGIGFATAEALASCGATVYMVCRNKEKGETALSKIQSSTGNPNVHLEVCDLSSISEIKSFASRFSSKDVPVHVLVNNAGLMEHKRVTTSEGFELNFAVNVLGTYATTELMLPLLEIASPDARVITVSSGGMYTTSLTSDLQFSDGKFSGAEQYARNKRVQVALTEKWAEMYKNKGIGFYSMHPGWAETPGVAKSLPDFNKWLSGKLRTSEEGADTVIWLALQPKEKLVSGGFYFDRAEAPKHLKFAATRQSHAIIDSIYDTLRSLV

SEQ ID NO: 79079 - protein, 85 aa, Gossypium hirsutum
  Clone ID: LIB3583-029-Q6-K1-A10.pep
MKNATLHFEFHISITALIMFLLKTWRASAFGVYGYLNFTRNGFLEHSKKFKPEDMEIRIEGKNCVVTGANSGIGFATAEALASWC

SEQ ID NO: 79080 - protein, 260 aa, Gossypium hirsutum
  unsure (1)..(260): unsure at all Xaa locations
  Clone ID: GOSHI-09MAY01-C5649_1.pep
NIFHFFFNGGEAGGSVSCGSWIRRPETXNWVVLARIMTRPTSSSSSSVIEIFPFDPNTTSLSSSPLARHELEESDGDPITIAVHPSGDCFVCSTTNGGCKLFELYGHRNTFTAVHQRVTXPLLDAGPQKCLAFSVDGSRFAAGGVDGRLRILEWPTLRIIVDEVRAHKSFRDMDFSLDSEFLASTSTDGSARIWKTEDGVPLMTLARNSDEKIELCRFSKDGTKPFLFCTVQRGDKAVTASYDISTWNKIGHKRLLGKPA

SEQ ID NO: 79081 - protein, 186 aa, Gossypium hirsutum
  Clone ID: GOSHI-09MAY01-C5189_1.pep
HASAHASAWKSTDCIAGYDWSSIRCFSSTGEASNVDEYLWLMGRACYKPVIEYCGGTEIGGGFVSGSFLQPQSLAAFSTPVMGCRLFILGDDGHPIPEDAPGMGELALGPLMFGSSSTLLNASHYDVYFKEMPSWNGLVLRRHGDVFERTSRGYYRAHGRADDPMNIGGIKVSSVEIERICNAIDS

SEQ ID NO: 79082 - protein, 150 aa, Gossypium hirsutum
  unsure (1)..(150): unsure at all Xaa locations
  Clone ID: GOSHI-09MAY01-C5149_3.pep
MASKLLLIAVFVLDLIAFGLAVAAEQRRSTAKIVQDSEVNYNYCVYDSDISTGYGVGAFLFLMVSQALVMAASKCFCCGKGLNPSGSRAWAVILFIVCWLFFLIAEICLLAGSVRNAYHTKYRTIFSEQPPSCETVRKXVFGAGAAFIFL

SEQ ID NO: 79083 - protein, 187 aa, Gossypium hirsutum
  Clone ID: GOSHI-09MAY01-C5149_2.pep
MASKLLLIAVFVLDLIAFGLAVAAEQRRSTAKIVQDSEVNYNYCVYDSDISTGYGVGAFLFLMVSQALIMAASKCFCCGKGLNPSGSRAWAVILFIVCWLFFLIAEICLLAGSVRNAYHTKYRTIFSEQPPSCETLRKGVFGAGAAFIFLTAIVNKFYYICYSNARENSFRPYGGGGKAGVGMGAYK

SEQ ID NO: 79084 - protein, 65 aa, Gossypium hirsutum
  Clone ID: LIB3543-053-Q1-K6-D6.pep
HHSQLLCLSYIHNSCIEFHYPAQSWPAIKHAPNVSCFELKRNKKFFSCWIYTFDPDKSIMEALIL

SEQ ID NO: 79085 - protein, 166 aa, Gossypium hirsutum
  unsure (1)..(166): unsure at all Xaa locations
  Clone ID: AW186670.1.pep
MASKLLLIAVFVLDLIAFGLXVAAEQRKSTAKIVQDSEVNYNYCVYDSDISTGYGVGAFLFLMVSQXLVMAASKCFCCGKGLNPIGSRAWAVILFIICWLFFLIGEICLLGGMVKNCXITNYRTIFXSNPPSCENVKKSFFWCRGTFHFLNCHGPPISIIFGYPVS

SEQ ID NO: 79086 - protein, 158 aa, Gossypium hirsutum
  Clone ID: LIB3828-029-Q6-K6-A8.pep
MILLSGSKAKIVQDNEIQYNYCVYNSDIATGYGVGAFLFLMASQALIMVASRCFCCGKALNPSGSRAWAVILFIVCWLFFLIAEICLLAGSVRNAYHTKYRTIFSEQPPSCETLRKGVFGAGAAFIFLTAIVNKFYYICYSNARENSFRPYGGGGEAG

SEQ ID NO: 79087 - protein, 174 aa, Gossypium hirsutum
  Clone ID: LIB3585-037-P1-K1-C4.pep
MASKLHLIAVLVLDLIAFGLAVAAEQRRSTAKIVQDSEVNYNYCVYDSDISTGYGVGAFLFLMVSQALVMAASKCFCCGKGLNPSGSRAWAVILFIVCWLFFLIAEICLLAGSVRNAYHTKYRTIFSEQSTSCETVRKGVFGARAVFIFLNAMANKSFLIFILKCLGQKASKLN

SEQ ID NO: 79088 - protein, 64 aa, Gossypium hirsutum
  unsure (1)..(64): unsure at all Xaa locations
  Clone ID: uC-gsflnu33B115b01b1.pep
FIFAMASLISEAGSERNAYHTKYRTIFSEQPPSCETXERKGVLGARSDLTILTAIVNKLYYFCY

SEQ ID NO: 79089 - protein, 96 aa, Gossypium hirsutum
  unsure (1)..(96): unsure at all Xaa locations
  Clone ID: LIB3584-011-P1-K1-G12.pep
MASKLLLIAVFVLDLIAFDLTKTAXGGGIFFFXXXXXXXQXNYXXXNSXIXTXYXVGAFLFLMASQVLIMVASRCFCCXKALDRGGSXAWAVFLFF

SEQ ID NO: 79090 - protein, 371 aa, Gossypium hirsutum
  Clone ID: GOSHI-09MAY01-C5169_1.pep
MDKETNNQENPSLLSNNNTNKEDCSPKKHPGSSTVTGGGGGSNDRLKRDEWSEGAVSSLLEAYENKWVLRNRAKLKGHDWEDVARYVSARANCTKSPKTQTQCKNKIESMKKRYRSESATAEGSSWPLYPRLDLLLRGNAAAAAAAPSPPPLQPLPPPPQQLHLTAMVQPQPPGPLFTNLPLTLPEASTLVVLQQQQQQQPPPPLPIAAPPPALAPQGLGTAQNSHGSNGFEKIPKDDGAGTKVSDHLSDKVAIETDSSTPGLYSDKEKLRSKKLKMKTMENKKKKRRKKDEYREIGESIRILAEVVLKSEESRMETLREIEKMRIEAETKRGEMELKRTEIIANTQLEIAKLFAGSSNKGIDPSLRIGRS

SEQ ID NO: 79091 - protein, 191 aa, Gossypium hirsutum
  Clone ID: LIB3584-034-P1-K1-D1.pep
PTRPPTRPPTRPPTRPETNNQEKPSLLSNNNTNKEDCSPKKHPGSSTVTGGGGGSNDRLKRDEWSEGAVSSLLEAYENKWVLRNRAKLKGHDWEDVARYVSARANCTKSPKTQTQCKNKIESMKKRYRSESATAEGSSWPLYPRLDLLLRGNAAAAAAAAAPSPPPSLPLPPPPQQLHLSAVVQPQPPGPL

SEQ ID NO: 79092 - protein, 88 aa, Gossypium hirsutum
  Clone ID: LIB3828-014-Q1-N6-G4.pep
KKKRGKKEEFRKIGESFRILAEGVLKSEESRGETLREIEKMGVEAETKRGERGLKRTEIIANTQWEIAKLFAGSSNKGIDPSLGIGKS

SEQ ID NO: 79093 - protein, 338 aa, Gossypium hirsutum
  unsure (1)..(338): unsure at all Xaa locations
  Clone ID: GOSHI-09MAY01-C5109_1.pep
AFAKSSSLLQAISTYTSRLKTLISREIEEVDVRADAEALRYKYENNRVMDVSSPDVSSPLNQLYGNEKIGMDVLSRGMQNQLLERQKAHVQQFLATEDALNKAAEARDLCQKLIKRLQGGSDLVPSRSLVGGATQKVGSLRQFELEVWANPRVRAGLKASLNTLMSEIQRLNRVCAERKEAQDSLRKKWKKIEEFDSRRSELESIYTALLKANMDAAAFWNQQPLAAREYASSTIIPVCNIVADISNGAKEFIVKEVSAFYRSPDNSLYMLPSSPQALLESMGANGSTGPEAVAAAEKNAALLTARAGARDPSAIPSICRVSXAALPYPAGLEGSDPV

SEQ ID NO: 79094 - protein, 160 aa, Gossypium hirsutum
  Clone ID: GOSHI-09MAY01-C5089_1.pep
TEKRGENLGLGFVRYTHGLRRKGGGISNEIDDGTKASSLKRRCPPRRPTDDDDNCYEKSALELLPQDIIIKIICGVDHEDLKRLPIVSKSIREAAMVAKQLHFAYSTPTKVKAFKTSIDFDEQSESNDLELEAPNAPQQWRSHRSINKKKLADISIQLFL

SEQ ID NO: 79095 - protein, 95 aa, Gossypium hirsutum
  Clone ID: LIB3584-031-P1-K1-B4.pep
VQNISIQFIFSYFFNHLIWLLAVIILIFLAMVAKQLHFAYSTPTKVKAFKTSIDFDEQSESNDLELEAPNAPQQWRSHRSINKKKLADISIQLFL

SEQ ID NO: 79096 - protein, 267 aa, Gossypium hirsutum
  unsure (1)..(267): unsure at all Xaa locations
  Clone ID: GOSHI-09MAY01-C5059_1.pep
MGKFNCIQKLKNQQQQASASRSIDKASKGTNSSNHSTTMSIGNSSNSVSKLSAKAKYGFIDDNFSTLHQVTAALRGSGLESSNLIIGIDFTKSNEWTGQVSFNNRSLHAIGAAPNPYEKAISIIGKTLAPFDDDNLIPCLGFGDATTHDDEVFSFHSDHSSCHGFGEVLDCYKKIVPNLRLSGPTSYAPVIDAAIDIVESSGGQFHGLVILADGQVTXRSVNTSNNEMSPQEEKTINFIGNASSHPLAIVLGWWRWTWKMKKLMIDP

SEQ ID NO: 79097 - protein, 155 aa, Gossypium hirsutum
  unsure (1)..(155): unsure at all Xaa locations
  Clone ID: GOSHI-09MAY01-C5009_2.pep
DDEALVIYEKLFSNACPKFITPSAPSFXTPLVNYNQDAYRLQLKLFLYEVKQQQLLSGVRTFLKVYSTISLGKLANYLEVDEPTLRTILLTYKHKTHAVDSDGKIISNADVDFYIDDDMIHVVESMPVKRYGDYFLRQIVKLEGVINDMDRIKLE

SEQ ID NO: 79098 - protein, 520 aa, Gossypium hirsutum
  Clone ID: GOSHI-09MAY01-C5009_1.pep
MAANYDYDEAPATYDDANRQELGYDPNFVPDSVKSFVVHLYRHIREKNVYEIHQMYEISFQTLSDRLFKDTPWPSVDAVAHYVDNDQVFCLLYREMWFRHLYARLSPTLKQRIDSWDNYCSLFQVVLHRVVNMQLPNQWLWDMVDEFVYQFQSFCQYRAKMKNKTEQEIALLRQFDQAWNVYGVLNYLQAFVEKSNIIQILEQEKEGLEQFTATDGYDYSGGSNVLKVLGYFSMVGLLRVHCLLGDYQTGLKCLLPIDISQQGVYTSVIGSHIATIYHYGFANLMMRRYVEAIREFNKMLLYIYKTKQYHQKSPQYEQILKKNEQMYALLAICLSLCPQVKLVDETVNSQLREKYGEKMARMQRYDDEAFVIYDELFSYACPKFITPSAPSFEEPLVNYNQDAYRLQLKLFLYEVKQQQLLSGVRTFLKVYSTISLGKLANYMEVDEPTLRTILFSYKHKTHAVDSDGKIISNADVDFYIDDDMIHVVESKPVKRFGDYFLRQIVKLEGVINDMDRIRLE

SEQ ID NO: 79099 - protein, 135 aa, Gossypium hirsutum
  Clone ID: GOSHI-09MAY01-C5399_1.pep
MPMAAGAATPRERVQAMGPAAVVPMMQAVPAVADVLAKDTIISWFRGEFAAANAIIDALCGHLAQLQGGGGEGSEYEAVFAAIHRRRLNWIPVLQMQKYHSIADVTVELKQVTAKKTGGGDGIGKEEVEGGGGGR

SEQ ID NO: 79100 - protein, 94 aa, Gossypium hirsutum
  Clone ID: GOSHI-09MAY01-C5389_1.pep
KSGRSVLIDDGALPWIVQNANNDSSPIRRHIELALCHLAQHEVNAKDMISGGALWELVRISRDCSREDIRSLARRTLNLSPIFRAEMRRLRIEV

SEQ ID NO: 79101 - protein, 149 aa, Gossypium hirsutum
  Clone ID: GOSHI-09MAY01-C5369_4.pep
MEKSAVSTDSTDVDLFADATFVSAPTKVTHESSPQAQQQVDLFASQPAITPAASPTVDIFAAGDPVVQPHIKGQVDLFASQPAITPAASPSAGPVASADPVVQPAMAANVEPVNASIVDPFAAVPLNNFDGSDIFGSFPTPSDAAFLVP

SEQ ID NO: 79102 - protein, 113 aa, Gossypium hirsutum
  Clone ID: GOSHI-09MAY01-C5369_3.pep
GAAAHTKYSTKSIINDGPHTTLSGMWSICQVVRHKHHIAAYRECNERRLTGHHETADINSFSCCVANTGASIRVGRDTDKDGNSYPARSPPPPNMDPYVVTSIIAETTILCKP

SEQ ID NO: 79103 - protein, 191 aa, Gossypium hirsutum
  Clone ID: GOSHI-09MAY01-C5369_2.pep
MSLLNDLINLNLSDTTEKIIAEYIWIGGSGMDLRSKARTLPGPVTDPSKLPKWNYDGSSTNQAPGDDSEVILYPQAIFKDPFRKGNNILVMCDAYTPAGEPIPTNKRFNAAKGFSHPDVVAEEPWYGIEQEYTLLQKDTKWPLGWPVGGFPGPQGPYYCGVRADMCFQPDILIYILQALTYAGSNISGTNG

SEQ ID NO: 79104 - protein, 356 aa, Gossypium hirsutum
  Clone ID: GOSHI-09MAY01-C5369_1.pep
MSLLNDLINLNLSDTTEKIIAEYIWIGGSGMDLRSKARTLPGPVTDPSKLPKWNYDGSSTNQAPGDDSEVILYPQAIFKDPFRKGNNILVMCDAYTPAGEPIPTNKRFNAAKIFSHPDVVAEEPWYGIEQEYTLLQKDTKWPLGWPVGGFPGPQGPYYCGVGADKSFGRDIVDSHYKACLYAGVNISGINGEVMPGQWEFQVGPSVGISAGDQIWIARYILERITEIAGVVLSFDPKPIPGDWNGAGAHTNYSTKSMRNDGGIDVIKKAIEKLGLRHKEHIAAYGEGNERRLTGRHETADINSFSWGVANRGASIRVGRDTEKDGKGYFEDRRPASNMDPYVVTSMIAETTILWKP

SEQ ID NO: 79105 - protein, 220 aa, Gossypium hirsutum
  Clone ID: GOSHI-09MAY01-C5309_1.pep
MAMVLWLLFSPFLFLSVSVNTQTKVTDNPADELVAALNANRTAHKSSALTDNPGLACIALQYIKAYQGDCKAVGEAKKPADSEFSETFAPNCGVEASTLSPITGRLLGCQSKYVEPSEAFSMLMKNEKSLEILYNKNHTEVGAGVTGSDGGGPYFWCVLFSNGKHNSSFVAQGGVAKISRPGCFSGANDECSGANDLSRLHHMWLYAVTAFVAAGYAFGI

SEQ ID NO: 79106 - protein, 152 aa, Gossypium hirsutum
  Clone ID: GOSHI-09MAY01-C105232_1.pep
SALMSSSGSPHMGFSRSSSRLSFQDDMDDCELSCPFDGDDVDVSDSSSQNTEGKKASEFTAQSNLVGKKSQDAAVGILVQMLRTAPPLRQDSSCYSTHSLRTEYEGGVSIASGFFMPRKTADALEELNSYREMKDLLLSKSGTRVVRQEEMK

SEQ ID NO: 79107 - protein, 112 aa, Gossypium hirsutum
  Clone ID: GOSHI-09MAY01-C6989_1.pep
MVDLDVQIPTTFDPFAEAGEFDGTGTKEYVHIRIQQRNGKKSLTTVQGLRHDLSYEKILKSLKKDFCCNGNVVKDKELGKIIQLQGDQRKNVSQFLVNAGIVKKDQIKIHGF

SEQ ID NO: 79108 - protein, 60 aa, Gossypium hirsutum
  Clone ID: LIB3148-016-Q1-K1-C4.pep
PRVRPRVRPRVRFLVNAGIVEKRPNQDSWFLRITQVAIYEKKNQHCSFFSLNKTLVLLSL

SEQ ID NO: 79109 - protein, 184 aa, Gossypium hirsutum
  Clone ID: GOSHI-09MAY01-C6949_1.pep
MMQSRFTSVVRAISSAAKARPFSSTIDSPTPTKPDFPPTLAGLRARLAAESPTLSDFFGLQTNNLYSVEVGTKKKPLPKPKWMRESIPGGEKYVQIKAKLRELKLHTVCEEARCPNLGECWSGGETGTATATIMILGDTCTRGCRFCNVKTSRTPPPPDPDEPRNVAEAIASWGLDYVVITSVD

SEQ ID NO: 79110 - protein, 124 aa, Gossypium hirsutum
  Clone ID: GOSHI-09MAY01-C6919_1.pep
MTTTTSATLSPPTLAAASVGNPRRRTKVNVSYIIGLNSFGGLKAHNNVISLGQPVCIERSFAKVVSSLRAPSKGKGSGGGALSSTCNAIGEIFRIAAIMNGLVLVGVAVGFVLLRIEASLEEAE

SEQ ID NO: 79111 - protein, 223 aa, Gossypium hirsutum
  Clone ID: GOSHI-09MAY01-C6879_1.pep
MDRRSAFAVALICFVVTAVGGQSPAASPTKAPPAATTPATAPATAPVSKPKSPAPTAAPTTSPPTSSPPAAAPEKSAAVPAPSKSAPASSPPAAAPVSSPPAPVPVSSPPAKSPPVAAPTTPPESSASPPAPVAAPTTAEVPAPAPSKSKSKSKKSKKHHAPAPSPDMLGPPAPPTGAPGPSLDASSPGPSVAADESGAAAMKNMKKIIGGLALGWAAIALSF

SEQ ID NO: 79112 - protein, 62 aa, Gossypium hirsutum
  Clone ID: LIB3149-022-Q1-K1-F5.pep
PTPSPDMLGPFAPPTGAPGPSLDASSPGPSVAADESGAEAMKNMKKIIGGLALGWAAIATSF

SEQ ID NO: 79113 - protein, 126 aa, Gossypium hirsutum
  Clone ID: GOSHI-09MAY01-C6599_2.pep
MSSSTAANQVRASHILINHQGSRRKASWKDPEGRVISTTTRDAAVSQLKLLGDDIVSNKAKFDEVASRYSDCSSAKRGGDLGCKECPFGRGQMQKPFEDATYNLNIGEISDIVDTDSGVHIIMRTG

SEQ ID NO: 79114 - protein, 122 aa, Gossypium hirsutum
  Clone ID: GOSHI-09MAY01-C6599_1.pep
MSSSSPANQVRASHILIKHQGSRRKASWKDPEGRVISNTTRDAAVSQLKALRDDIASGNAKFGEVASRHSDCSSAKRGGDLGPFGRGQMQKPFEDATYSLNIGEISDIVDTDSGVHIIMRTG

SEQ ID NO: 79115 - protein, 122 aa, Gossypium hirsutum
  Clone ID: LIB3829-023-Q6-K6-G12.pep
MSSSSPANQVRASHILIKHQGSRRKASWKDPEGRVISNTTRDAAVSQLKALRDDITSGNAKFGEVASRHSDCSSAKRGGDLGPFGRGQMQKPFEDATYSLNIGEISDIVDTDSGVHIIMRTG

SEQ ID NO: 79116 - protein, 125 aa, Gossypium hirsutum
  Clone ID: LIB3165-006-P1-K4-B10.pep
FFSYFANQERAAHVLINHQGCRCKATGKDPECRVICTTTRDAGVSQLKLLGDDIACNKAKFDEVASRYSDCSSAKRGGDLGCKECPFGRGQMQKPFEDATYNLNIGEISDIGDTDSGVHNIMRTG

SEQ ID NO: 79117 - protein, 74 aa, Gossypium hirsutum
  Clone ID: uC-gsflnu33B081g12b1.pep
ACSPKDVPGAPRGFPASVLYSHKPRCCILGPPHATDPAPQGRDHPRRPKGPAPQVTLVTLTVPSGPKRCRPGGL

SEQ ID NO: 79118 - protein, 133 aa, Gossypium hirsutum
  Clone ID: GOSHI-09MAY01-C6549_2.pep
PPARAARFSRKAAASAFSGCRYVTASRSFSAEAAKTISPSSDRVKWDYRGQRKIIPLGQWVPKVAVDAYVAPNVVLAGQVTVNDGASVWNGCVLRGDLNKITVGFCSNVQERCVIHAAWSSPTGLPAETSIER

SEQ ID NO: 79119 - protein, 249 aa, Gossypium hirsutum
  Clone ID: GOSHI-09MAY01-C6549_1.pep
MATCIAARISRKAAASAFSAHRHVISSRCFATESAKTISPSSDRVKWDYRGQRKIIPLGQWVPKVAVDAYVAPNVVLAGQVTVYDGASVWNGCVLRGDLNKITVGFCSNVQERCVIHAAWSSPTGLPAETSIERFVTIGAYSLLRSCTIEPECIIGQHSILMEGSLVETHSILEAGSVVPPGRRIPTGELWAGNPARFVRPLTHEETLEIPKLAVAINDLSKEHFSEFLPYSTVYLEVEKLKKSLGINI

SEQ ID NO: 79120 - protein, 72 aa, Gossypium hirsutum
  Clone ID: LIB3146-042-Q1-K1-H1.pep
PRVRPRVRPTCELWAGNPARVVRALTHEETLEIPKLAVAINDLSKEHFSEFLPYSTVYLEVEKLKKSLGINI

SEQ ID NO: 79121 - protein, 121 aa, Gossypium hirsutum
  Clone ID: GOSHI-09MAY01-C6569_1.pep
MATTTAATVSHFFGTRIQTSNPSSGRIQARFGFGTKKAPPAPKKAAPKRPSDRLVWFPGANPPEWLDGTMIGDRGFDPFGFAKPAEYLQYDLDSLDQNFAKNVAGEIIGVISETAELEPTP

SEQ ID NO: 79122 - protein, 175 aa, Gossypium hirsutum
  Clone ID: GOSHI-09MAY01-C106522_1.pep
MHRPSLLLTLLTLLTLLTAAPLPAIGYRPLPHLRPNSSDSRFGDSKKYEGSSEFVHLRYHMGPVLTGSITVHTIWYGQWQNSQKKIIREFIGSFSAVNAKHPPVAGWWDTVRLYTDQTGANISRTGRLGEQKNDRFYSHRKSLTRLSIQSVIKSAVTAKTKPLPINPINGLYLLL

SEQ ID NO: 79123 - protein, 230 aa, Gossypium hirsutum
  unsure (1)..(230): unsure at all Xaa locations
  Clone ID: GOSHI-09MAY01-C6529_2.pep
DTEFAKDAAFGYKSSNLREWVEEKTAGRIPASIVASISIQLLRKGGPDAVCELLCSLEKGSTCIVNAVSERDMAVFAAGMIQAELKGKSFLCRSAASFVSARIGIIPKAPIRPKDLGISKERSGGLIVVGSYVPKTTKQVEELQTQHGHMLKSLEVSVHKVAMKSSEEREEEINRTAEMASVFLATRKDTLIMSSRELITGKNASESLXINFKVSSALGEVVRRITTRPR

SEQ ID NO: 79124 - protein, 482 aa, Gossypium hirsutum
  unsure (1)..(482): unsure at all Xaa locations
  Clone ID: GOSHI-09MAY01-C6529_1.pep
SARIGFWGGWRPPKESRISKERSGGGVVVGSYVPKTTKQVEELHSHXFMLKSLEFLGGPVPXPSPPPRDQEINRTAEMASVFLAARKDTLIMSSRELITGKTASESLEINFKVSSALVEVVRRITTRPRYILAKGGITSSDLATKALEAKRAKVVGQALAGIPLWELGPESRHPGVPYIVFPGNVGDSKALAEIVRSWARPLRLSSTKEILINAEKGGYAVGAFNVYNMEGVKAVVSAAEQERSPAILQVHPGAFKQGGVTLVACCISAAEQASVPITVHFDHGTSKQELLESLELGFDSVMGDGSHLPFKDNISYTKHISNLAHLRDMLVEAELGRLSGTEDDLTVKDYEAELTDINQADEFIVETGVDALAVCIGNVHGKYPASGPNLKLDLLKDLYALSSRKGVFLVLHGASGLSKELVKGCIERGVRKFNVNTEVRKAYMESLSSPKGDLVHVMASTIEAMKAVVAEKMHLFGSAGKA

SEQ ID NO: 79125 - protein, 98 aa, Gossypium hirsutum
  Clone ID: GOSHI-09MAY01-C6409_2.pep
MLGQKQSEEAIVSNYNESEHHVENRDEEKEEENQSLFNVKNLLWHGGSAWDAWFSCASNQVAQVLLTLPYSFSQLGMLSGILLQVFYGIIGSSFKVKA

SEQ ID NO: 79126 - protein, 199 aa, Gossypium hirsutum
  unsure (1)..(199): unsure at all Xaa locations
  Clone ID: GOSHI-09MAY01-C6409_1.pep
PVTKAQVGGALATGEAFDXINEELARIEAESMAEKAVSAHNALVAEVEKDVNASFEKELLIEKEKIDAVEKMAEEALHELERLKAEREAENMALMKDRAAIDSEMEALSRLRCEVEEQLESLMNNKVEISYEKEAINKLRKETEDESQEVVRLQHELEVERKALSMARAWAEDEAKRAREQAKALEEARERWERQGIKV

SEQ ID NO: 79127 - protein, 178 aa, Gossypium hirsutum
  Clone ID: GOSHI-09MAY01-C6429_1.pep
MSAAVAAAAAAASVSSNTTSSSHHPSNQAPNHGWIPFFQPPAQRAALPALSRYESQKRRDWKAFVEYLKKHRPHLGLSRCTGVHVLEFLDYQFGNTKLHTRNCPFWGNPPDLPSPCSCSCPLDQAWSSLDGVVGRLRVAFEENGGQPKTNPFSARVVRLYLTDLRDAQAKATGNAYTF

SEQ ID NO: 79128 - protein, 96 aa, Gossypium hirsutum
  Clone ID: LIB3493-059-P1-M1-A11.pep
ARILELQGQGKVKLQRGASPFWGNPPDPPSPCSCSCPLDQAWSSLDGVVGRLRVAFEENGGQPETNPFSAHVVRLYLRDLRDAQAKARGNAYTFEE

SEQ ID NO: 79129 - protein, 115 aa, Gossypium hirsutum
  unsure (1)..(115): unsure at all Xaa locations
  Clone ID: GOSHI-09MAY01-C6719_1.pep
MARMKIRECDSMRLWKEHGKRLSXGRDLPITCAQFTASTDFNQLVQMEPWLSSQILAGKPGMLFGMRGQSALGGLNIGCAQVITFXKERLGTXGELRGYKGPVTTPIGGPYIPDN

SEQ ID NO: 79130 - protein, 235 aa, Gossypium hirsutum
  Clone ID: GOSHI-09MAY01-C6709_1.pep
MGSQGSVMAMLLLMMFTLSSASDMSIISYDETHPDKSTSSWRTDDEVMAMYEEWLVKHGKTYNGLGEKERRLQIFKDNLRFIDEHNADESQSFNVGLNRFADLTNEEYRAIYLGIKKPNRKVSKASDRYSALLGEKLPDSVDWREKGAVAEVKDQGSCGSCWAFSTIAAVEGINQIVTGELLSLSQQELVDCDTSYNEGCNGGLMDYAFEFIIKNGGIDTEQDYPYTGHDRTCDP

SEQ ID NO: 79131 - protein, 128 aa, Gossypium hirsutum
  Clone ID: uC-gsflmaxxa098c07b1.pep
MGSQGSVMAMLLLMMFTLSSASDMSIISYDEAHPDKSTSSWRTDDEVMAMYEEWLVKHGKTYNGLGEKERRLQIFKDNLRSCREGDGGEGERLGMLLEVAIACCSSCSEQRPTMWQVLKMLQEIKEAV

SEQ ID NO: 79132 - protein, 63 aa, Gossypium hirsutum
  Clone ID: GOSHI-09MAY01-C6629_1.pep
FGFAYCSLILSKYLLISCCIEELEVSSLDLENSGFSLIGKFFHCSCHRNDERAKRLILLLDCT

SEQ ID NO: 79133 - protein, 57 aa, Gossypium hirsutum
  Clone ID: GOSHI-09MAY01-C6189_1.pep
KFTKCLVQLNILLFKCVLLNFLLSLLNNLCGKMCVTFPSFFISYFQESNVAINCILV

SEQ ID NO: 79134 - protein, 182 aa, Gossypium hirsutum
  Clone ID: GOSHI-09MAY01-C6169_1.pep
HASAHASEDQNHCRFLQRIFDEGGCLDVQIIFNEIIDNIVELMMDPFGNYLVQKLLDVCTEGQRLQIVHMVTKESGQLVRISLNTYGTRVVQKLIETLKSREEVSLIKSALKPGILDLIKDLNGNHVLQRFLQCLGNEDNKIIFDAAAQFCVDIATHRHGCCVLQRCIAHSNGQHRYNLITQ

SEQ ID NO: 79135 - protein, 196 aa, Gossypium hirsutum
  Clone ID: GOSHI-09MAY01-C6119_1.pep
MAPEAEDEIKDEKNPRPLDEDDIALLKTYGLGPYSTSIKKVEKEIKEMAKKVNDLCGIKESDTGLAAPSQWDLVSDKQMMQEEQPLQVARCTKIINPNTEDAKYVINVKQIAKFVVGLGDKVSPTDIEEGMRVVVDRNNYQIPIPLPPKIDPSVTMMTVEEKPDVTYNDVGGCKEQIEKMREVVELPMLHPEKFVK

SEQ ID NO: 79136 - protein, 85 aa, Gossypium hirsutum
  Clone ID: uC-gsronu33B121h01b1.pep
MAPEPEDEFKDEKNPRPLDEDDIALLKTYGLGPYSTSIKKVEKEIKEMAKNVNDLCGIKESDTGLAAPSQWDLVSDKQMMQEEQP

SEQ ID NO: 79137 - protein, 189 aa, Gossypium hirsutum
  Clone ID: GOSHI-09MAY01-C6109_1.pep
KLSKTILLVVQWEKKAKGIAWVGNLYQKFEAMCMEVDDMVPRVPLRYVENQLQTVGSNVKQFCTELMQDLVASSTDSLEDLNTVQIAGVAASVDSNGSANEDHSQTKLVDSSSVKSVEDVHLGLPSEQFTEDQNSLAHSKGFTAPASLIFSKAFKNELKDNDSTADDTSLESMEPEVKMGPARLLEAYP

SEQ ID NO: 79138 - protein, 132 aa, Gossypium hirsutum
  unsure (1)..(132): unsure at all Xaa locations
  Clone ID: LIB3585-047-Q6-K1-E2.pep
CPPSALWYQIQLLCLLXHXXXNSINLYPLFTXXNTXYXPXIANEDHSQTKLVDSSSVKSVEDVHLGLPSEQITKDQNSLAHSKGFTAPGSLILSKAFKNELKDNDSTADDTFLESMEPEVKMGPARLLEAYP

SEQ ID NO: 79139 - protein, 285 aa, Gossypium hirsutum
  unsure (1)..(285): unsure at all Xaa locations
  Clone ID: GOSHI-09MAY01-C6129_1.pep
GISDMIDDTVNTXVTDMLEWPHRIVVPIGGIPVDTSELELKPEGKLTVTVVKANDLKNMEMIGKSDPYVVVYIRPLFKIKTKVIENNLNPVWNETFELIAEDRETQELTVEVFDQDIGQDKRLGIAKFRLIELEPETPKEVNLNLLSSLDTLKIKDNKDRGSCTIKLLYHQFNKEEQLIALEEEKRILEERKRLKEAGVIGSTMDALDGAASLVGSGVGMVGTGIGTGVGLVGSGVSAGVGMVGSGLSKAGKFMGRTVTGHSSKKSETTTTPDESKEENGGAKPQ

SEQ ID NO: 79140 - protein, 442 aa, Gossypium hirsutum
  unsure (1)..(442): unsure at all Xaa locations
  Clone ID: GOSHI-09MAY01-C6099_1.pep
LYDKLQILGSDAAEAQASKILAGLGFTKQMQGRPTRSFSGGWRMRISLARALFVQPTLLLLDEPTNHLDLRAVLWLEEYLFRWKKTLVVVSHDRDFLNTVCTDIIHLHDFKLQFYRGNFDDFESGYEQRRKEMNKKFEIYEKQVKAAKRSGNRVQQEKVKDRAKFAAAKEAAKSKGKGKGKIDEDDPPAEAPKKWRDYSVEFHFPEPTELTPPLLQIMNVSFSYPNREDFRLSDVDLGIDMGTRVAIVGPNGAGKSTLLNLIAGDLVPTEGEVRRSQKLRIGRYSQHFVDLLTMEETPVQYLLRLHPDQEGLXKQEAVRAKLGKFGLPSHNHLTPIAKLSGGQKARVVFTSISMSKPHILLLDEPTNHLDMQSIDALADALDEFTGGVVLVSHDSRLISRVCEDEEKSQIWVVDNGTVNTFPGTFEDYKDELQREIRAEVDE

SEQ ID NO: 79141 - protein, 106 aa, Gossypium hirsutum
  Clone ID: LIB3148-055-Q1-K1-B7.pep
HASAHASEARVVFTSISMSKPHILLVDEPTNHLDMQSIDALADALDEFTGGVVLVSHDSRLISRVCEDEEKSQIWVVDNGTVNTFPGSFEDYKEELQREIRAEVDD

SEQ ID NO: 79142 - protein, 220 aa, Gossypium hirsutum
  Clone ID: GOSHI-09MAY01-C6039_1.pep
MTEQMNGASVDENNCTQSEEMLLHEALRRLISTIIYPDGSSSSPAPLLQRIKISVSENGPRLGEASRNTSRTVIRWTRSGSPLRALLVISVGSIAFLTLTGLLVFMLFFLAATVNAVIISSLIALAAAGGFLALFFACVTVFYIGAISVAAFVISTAIISAIIAALVATGWVGFFWVLWLGTKRSMDLAKHSLSITGSAFSAYSSAQHAHRHQELHKVSD

SEQ ID NO: 79143 - protein, 167 aa, Gossypium hirsutum
  Clone ID: GOSHI-09MAY01-C6399_2.pep
ATTHGSLFKFQSPSAFLLPKSKPSTLSIPLISLKPSPHRLTVAAAAGKMKMIEGVSDELNSIASQNLDYAAARRRVRSAFIPVHQQLDHLLFKMAPTGVRTEEWIERNSKGLEIFFRRWMPEPGVKIKGVVCFCHGYGDTCTFFFEGIARFIAASGYGVYAIDHPGF

SEQ ID NO: 79144 - protein, 141 aa, Gossypium hirsutum
  unsure (1)..(141): unsure at all Xaa locations
  Clone ID: GOSHI-09MAY01-C6399_1.pep
MAPTGVRTEEWIERNSKGLEIFFRRWMPEPGVKIKGVVCFSHGYGDTCTFFFEGIARFIAASGYGVYAIDHPGFGLSEGLHGYIYSFDELADNVIEQYAKIKERPEVRGLPCFIXGQSMGGAVTLKVXFKDPHGWDGIILV

SEQ ID NO: 79145 - protein, 107 aa, Gossypium hirsutum
  unsure (1)..(107): unsure at all Xaa locations
  Clone ID: GOSHI-09MAY01-C6389_1.pep
PTRPRDAAIKEKLASVKDTSEEVKQLEEQAAAIMRAARAEIAAALNKMKKETQLEVEEKLAEGRXKVEVGLQDASPNLENQKDETIXSLDSQIAALSQDIVKKVLPL

SEQ ID NO: 79146 - protein, 62 aa, Gossypium hirsutum
  Clone ID: GOSHI-09MAY01-C6359_4.pep
CFFTSSGGLRSYEHPLNELKPVPRVDSSGHVCGATFNVDVETKKESTGMKKVGSAADWSANY

SEQ ID NO: 79147 - protein, 198 aa, Gossypium hirsutum
  Clone ID: GOSHI-09MAY01-C6359_2.pep
MLAVFDKSVAKSPDALNAPDNPQAVSALKDGFLPNHFASVYPGSVSISLGSSGVMAYSLEKQNPLLPRLFAVVDDIFCLFQGHIENIAVLKQQYGLNKTANEGIIVIEAYRTLRDRGPYPPDQVVRDIQGKFAFIIFDSSSKATFIASDADGSVPFFWGTDAENHLVLADDVETGLKGCWNSFGSIPKGVLFFSTGRF

SEQ ID NO: 79148 - protein, 251 aa, Gossypium hirsutum
  Clone ID: GOSHI-09MAY01-C6359_1.pep
MLAVFEKSIAKSPDALKVSGDSEAASALNKGFLATHFATLHPGSVTVNLGSSGFMAYSLDKQNPLLPRLFAVVDDIFCLFQGHIENVAVLKQQYGLNKTANEGIIVIEAYRTLRDRGPYPPDQVVRDIQGKFAFIIFDSSSKATFIASDADGSVPFFWGTDAEGHLVLADDGETVKKGCGKSSAPFPKGCFFTSSGGLRSFEHPQNELKAVPRVDGSGQACGATYCVDTETKKESTGMKKVDSAANWSTNY

SEQ ID NO: 79149 - protein, 133 aa, Gossypium hirsutum
  Clone ID: uC-gsflnu33B080c08b1.pep
MLAVFDKSVAKSPDGLTVADQPQALSALKDGFLANHFGSVHPGSVTINLGSSGVMAYSREKQNPLLPRLFAVVGEIFCMFQGHIENVAVLKQQYGLNKTADEGIIAIEAYRTLRDRGPYPPDQVVRDIQGKFV

SEQ ID NO: 79150 - protein, 53 aa, Gossypium hirsutum
  Clone ID: LIB3148-016-Q1-K1-F6.pep
THIDNVAVLNQQYMLNKTANDGIIVIEAYRTLRNRSSYPPDQVVRDIQGKFAF

SEQ ID NO: 79151 - protein, 56 aa, Gossypium hirsutum
  Clone ID: GOSHI-09MAY01-C106372_1.pep
IGKTQRFHTKKSVLKGGEPRNCLQFIMKFCLIIMTQIVKHLQIRLITYQSKPHFSE

SEQ ID NO: 79152 - protein, 142 aa, Gossypium hirsutum
  Clone ID: GOSHI-09MAY01-C6369_1.pep
MASASSNSLSISPSSTLVDAKAPRQPTAASPQCVTLPTLPPPPVQSQSRPWKTTAYCRKIARNVMAMATGETLATREAPTEVTPTELTEFINKIQETWDKVEDKYAVSSLAVAGLVLVWGTAGMVSAIDKLPVISTFLEVVG

SEQ ID NO: 79153 - protein, 61 aa, Gossypium hirsutum
  Clone ID: LIB3120-008-Q1-K1-H9.pep
MASASSNSLSISPSSTLVDAKAPRQPTAASPQCVTLPTLPPPPVQSQSRPWKTTAYCKFID

SEQ ID NO: 79154 - protein, 345 aa, Gossypium hirsutum
  Clone ID: GOSHI-09MAY01-C6289_3.pep
ALETVGFGKFQGFVLGYAGLGWFAEAMEIMILSFIGQAVKSEWQLSSGQESLLSTIVFAGMLLGANTWGLLSDNYGRRKGFLTISMVTFGAGLLSTFSPNYLTLVLLRGLVGFGLGGSSVFLSWFLEFIPASNRGMWMVVFSTFGTFGSIFEATLAWIVMPRLNWKWVLAFSAVPSFALLILYGVAPESPRYLCMKGNTSDALRILEKIASVNQTKLPPGVLVSGRSNDKDEESAPSENTAPLLPSLSKSTTQSKSGFSSFFMLFSSKLIRTTLLLWVLFFGDSFSYYGIILLTSKLSSGQSTCFPSLQSNINPQDDGLYLNAFITSMAGIMSHSHFLLYAFFFS

SEQ ID NO: 79155 - protein, 161 aa, Gossypium hirsutum
  Clone ID: GOSHI-09MAY01-C6289_2.pep
LRVRPRVRPRVRQHVFHGFRFGEKSQASLLADQIVSVNSKLLQQALENVEIASKRWTITESLAGTKLVRNRLRISEKRFTPSTSEEKLGTNFTLQEKALQLISKGKVAVVLDMSDHKNRGKEYDLSLSSSTSRENSETSSLQMLLCDDERFVKAEYRSSMP

SEQ ID NO: 79156 - protein, 482 aa, Gossypium hirsutum
  Clone ID: GOSHI-09MAY01-C6289_1.pep
MDYKAAGLYTLDEALETVGFGKFQGFVLGYAGLGWFAEAMEIMILSFIGQAVKSEWQLSSGQESLLSTIVFAGMLLGANTWGLLSDNYGRRKGFLTISMVTFGAGLLSTFSPNYLTLVVLRGLVGFGLGGSSVFLSWFLEFIPASNSPRGRPRVPPRGPFGSIFEAALAWIVMPRLNWRWVLAFSAVPSFALLILYGVAPESPRYLCMKGNTSDALRILEKIASVNQTKLPPGVLLSGRSNDKDEESSPSENTAPLLPSLSKTTTQSKSGFSSFFMLFSSKLIRTTLLLWVLFFGDSFSYYGIILLTSKLSSGQSTCFPSLQSNINPQDDGLYLNAFITSMAELPGLLLSAILVDRVGRKQSMAIMFGLAFIFLSPLLIQQPAVLTTCLLFGARMNAMGTFTVASIYSPELYPTSVRTTGAGVASAIGRIGGMVCPLVAVGLVNECHQTAAVALFLVAIVVSIVCIQLFPYDTKGRELSDTS

SEQ ID NO: 79157 - protein, 134 aa, Gossypium hirsutum
  Clone ID: LIB3825-003-Q1-K6-A11.pep
LSSGQENLLSTIVFAGMLLGANTWGLLSDNYGRRKGFLTISMVTFGAGLLSTFSPNYLTLVLLRGLVGFGLGGSSVFLSWFLEFIPASNRGMWMVVFSTFWTFGSIFEATLAWVCIFPISQFKAIFTIASSPCT

SEQ ID NO: 79158 - protein, 56 aa, Gossypium hirsutum
  Clone ID: LIB3146-020-Q1-K1-D11.pep
IRRIGGMVCSLVAVGLVNECHQTAAVALFLVAIVVSIVCIQLFPYDTKGRELSDTS

SEQ ID NO: 79159 - protein, 74 aa, Gossypium hirsutum
  Clone ID: uC-gsflnu33B108d11b1.pep
LGFLLYGFPFFFFFFFFFFFFFFFFFFFFFFYVIEETILIMTMTGMFLQNDPSTPLHFLRKLSLHNIPTLQFKL

SEQ ID NO: 79160 - protein, 407 aa, Gossypium hirsutum
  Clone ID: GOSHI-09MAY01-C6209_1.pep
MLEIGHAPGNALFGKYEIGRLLGCGAFAKVYHARNLRTGLSVAVKVINKKKLPNLTMMSNVKREISIMSRLNHPYIVKLYEVLATKTKIYVVMEFVKGGELFAKVAKGRFTEDLSRKYFQQLISAVGYCHSRGIFHRDLKPENLLLDDNGNLKVSDFGLSAVTEQIRADGMLHTLCGTPAYVAPEILSKKGYDGAKVDVWSCGVILFVMNAGYLPFNDPNLMAMYRKIYNGEFRCPKWMSSDMKRFISRLLDTNPVTRISLDEILKDPWFRKGYKEPKFHEEQPKDDAQASSSKLNAFDLISFSSGLNLSGLLDESHDYGERFILRESPEKLVEKVEQLGKGERLKVKKKKQWGVELEGKERISGVAIEVYQLTDELVVVETKRTGSDAQWYKELWNNKLRPALVGN

SEQ ID NO: 79161 - protein, 199 aa, Gossypium hirsutum
  unsure (1)..(199): unsure at all Xaa locations
  Clone ID: AW187888.1.pep
ARYQIRHKDPYIVKLYEVLATKTKIYVFMEFVKGGEXCAXVSKXRFTXNLXXNYFQHLISSVGYCHSLGIFHRDLKPQNLLLDDNWNFNVSHFGLSAVTEHILSHRMLHTLCGTPPYVSPEILSNKGYHRANVDLWSCRVILFVMNARYFPFNDPNLMAMYTKIYNRDFRCPKLIFNHMKLXNSLLPDTNPLTRISPDY

SEQ ID NO: 79162 - protein, 74 aa, Gossypium hirsutum
  unsure (1)..(74): unsure at all Xaa locations
  Clone ID: LIB3585-051-P1-K1-G10.pep
FNIVAKSRFTHYLKRTYFQQXISNIIYIHSLWIFHRDLKPENLLLDDNGNLKVSDCRLISRTQHILAYILLHTF

SEQ ID NO: 79163 - protein, 53 aa, Gossypium hirsutum
  Clone ID: LIB3166-004-P1-K1-G10.pep
MLEIGHAPGNALFGKYEIGRLLGCGAFAKVYHARNLRTGLSVAVKVINQKNRQ

SEQ ID NO: 79164 - protein, 82 aa, Gossypium hirsutum
  Clone ID: LIB3148-026-Q1-K1-A10.pep
HFGGVVLKITGNFVYLGINKVPIPNIKFTIGFLLLVFYCIVLYIPFLLVYIREVQPKRILDFFKKKKKKKKKKNKRLKFKIK

SEQ ID NO: 79165 - protein, 95 aa, Gossypium hirsutum
  unsure (1)..(95): unsure at all Xaa locations
  Clone ID: GOSHI-09MAY01-C6239_7.pep
MASATVSVAKPNLQIQAKGKGVGFADFSGLHNSSTSLPFARKTSDDFHSLVAFQTSALGSNNGGYRKXMAEAKLKVAXNGFGRIGRNFLRCWHGR

SEQ ID NO: 79166 - protein, 169 aa, Gossypium hirsutum
  Clone ID: GOSHI-09MAY01-C6239_5.pep
NFFITKGTTATTYAYTGDQRSLDASHRDLMRARAAPLNIVTTSTGAANAVALVLPTLKGKLNGIALRRPTPNVSVVDLIVQVSKKTFAEDANAAFRESAEKELQGILSAGAGPLASVDFRCSDVSSTVDASLTMVMGDDMVKVIAWYDNEWGYSQRVVDLADIVANSWK

SEQ ID NO: 79167 - protein, 142 aa, Gossypium hirsutum
  Clone ID: GOSHI-09MAY01-C6239_3.pep
MASATVSVAKPNLQIQAKGKGVGFADFSGLHNSSTSLPFARKTSDDFHSLVAFQTSALGSNNGGYRKGMAEAKLKVAINGFGRIGRNFLRCWHGRKDSPLDVIAINDTGGVKQASHLLKYDSTLGIFAADVKPVGTDGISVD

SEQ ID NO: 79168 - protein, 403 aa, Gossypium hirsutum
  Clone ID: GOSHI-09MAY01-C6239_2.pep
MVSVTVSVAKPTLQANAKGFAEFSGLRNSASLTFARKTSDDFQSVIAFQTSALGINNGGYRKGVVEAKLKVAINGFGRIGRNFLRCWHGRKDSPLDVIAINDTGGVKQASHLLKYDSTLGIFAADVKPVGTDGISVDGKVIKVVSDRNPANLPWGDLGIDLVIEGTGVFVDREGAGKHIQAGAKKVLITAPGKGDIPTYVVGVNADTYNPDEPIISNASCTTNCLAPFVKVLDQKFGIIKGTMTTTHSYTGDQRLLDASHRDLRRARAAALNIVPTSTGAAKAVALVLPTLKGKLNGIALRVPTPNVSVVDLVVQVSKKTFAEEVNAAFKESAEKELQGILSVCDEPLVSVDFRCSDVSSTVDASLTMVMGDDMVKVIAWYDNEWGYSQRVVDLADIVANSWK

SEQ ID NO: 79169 - protein, 295 aa, Gossypium hirsutum
  Clone ID: GOSHI-09MAY01-C6239_1.pep
MEFPFGHNHSHTHHHRNDDEENQERPPPPHLHHHEFTPPYPPPPSYQQPPGFDGPYPPPPPSSYLHQPGFDGPPPPSYFQQPGFPPPPPHQPPSYQYQQPPHVTHVHRQPEHSPSNYSPPPASVSNVSHESSQGRVDDHPSFRPHLPPEFYKKPTVKVYCKADPNFHLTIRDGKVILAPSDPSNEFQHWYKDEKFSTSVKDEVGFPSFSLVNKATGQAIKHSIGASYPVQLVPYKPDHLDESVDFRCSDVSSTVDASLTMVMGDDMVKVIAWYDNEWGYSQRVVDLADIVANNWK

SEQ ID NO: 79170 - protein, 150 aa, Gossypium hirsutum
  Clone ID: LIB3135-031-Q1-K1-D7.pep
PASVSNVSHESSQGRVDDHPSFRPHLPPEFYKKPTVKVYCKADPNFHLTIRDGKVILAPSDPSNEFQHWYKDEKFSTSVKDEVGFPSFSLVNKATGQAIKHSIGASYPVQLVPYKPDHLDESMLLSESKEVHDGYRAIRMINNIRLNVDA

SEQ ID NO: 79171 - protein, 121 aa, Gossypium hirsutum
  Clone ID: LIB3120-002-Q1-K1-F12.pep
MASATVSVAKPNLQIQAKGKGVGFADFSGLHNSSTSLPFARKTSDDFHSLVAFQTSALGSNNGGYRKGMAEAKLKVAINGFGRIGRNFLRCWHGRKDSPLDVIAINDTCGVKQASHLLKYD

SEQ ID NO: 79172 - protein, 92 aa, Gossypium hirsutum
  Clone ID: LIB3120-010-Q1-K1-H6.pep
MPYYEFLTNANVIYMTGIIKGTMTTTHSYTGDQRLLDASHRDLRRARAAALNIVPTSTGAAKAVALVLPTLKGKLNGIALRVPTPNVSVVDL

SEQ ID NO: 79173 - protein, 104 aa, Gossypium hirsutum
  Clone ID: GOSHI-09MAY01-C6229_10.pep
MCWGPLQHGPSSLASGFLHVTLGKGQPTTTHFSCKAMVGGVQCMPGVAPLLGRKKFETLSYLPDLTPVQLAKEVDYLLRSKWIPCLEFELEEGFVHRKYSSLPT

SEQ ID NO: 79174 - protein, 133 aa, Gossypium hirsutum
  Clone ID: GOSHI-09MAY01-C6229_9.pep
HIVLVKHQYQWPPSMISSATIATVNRCLPGNKPNMVAPFTGLKSASAFPVTRKANNDITSLASNGGRVQCMHVWPPLAKKKFETLSYLPDLTPVQLAKEVDYLLRSKWIPCLEFELEEGFVHRKYSSLPTYYD

SEQ ID NO: 79175 - protein, 118 aa, Gossypium hirsutum
  Clone ID: GOSHI-09MAY01-C6229_7.pep
MASSMISSATIATASPAQANMVAPFTGLKSASAVPVTRKANNDITSLASNGGRVQCMQVWPPLGKKKFETLSYLPDLTPVQLAKEVDYLLRSKWIPCLEFELEVFSSSKLFHSNTLFF

SEQ ID NO: 79176 - protein, 118 aa, Gossypium hirsutum
  unsure (1)..(118): unsure at all Xaa locations
  Clone ID: GOSHI-09MAY01-C6229_5.pep
MASSMISSATIATASPAQANMVAPFTGLKSASAFPVTRKANNDITSLASNGGRVQCMQVWPPTGKKKFETLSYLPDLTPVQLAKGSXDYLLRSKWVPCLEFELEEGFVLRTLLHSSTL

SEQ ID NO: 79177 - protein, 152 aa, Gossypium hirsutum
  Clone ID: GOSHI-09MAY01-C6229_3.pep
LRNSFGGRVRNAFNHSFSYFSSHGGRMQCMHVWPPTGKKKFETLSYLPDLTPVQLAKEVDYLLRSKWVPCLGSHFEEGFVHRKYSSLPTYYDGRYWTMWKLPMFGCTDSAQVLEELEECKKAYPNAFIRIIGFDNVRQVQCISFIAYKPPGF

SEQ ID NO: 79178 - protein, 182 aa, Gossypium hirsutum
  Clone ID: GOSHI-09MAY01-C6229_2.pep
MASSMISSATIATVNCSSPAQANMVAPFTGLKSASAFPVTRKANNDITSLASNGGRVQCMQVWPPLGKKKFETLSYLPDLTPVQLAKEVDYLLRSKWIPCLEFELEEGFVHRKYSSLPTYYDGRYWTMWKLPMFGCTDSAQVLEELENCKKEYPNAFIRIIGFDNVRQVQCISFIAYKPKGY

SEQ ID NO: 79179 - protein, 179 aa, Gossypium hirsutum
  Clone ID: GOSHI-09MAY01-C6229_1.pep
MASSMISSATIATASPAQANMVAPFTGLKSASAFPVTRKANNDITSLASNGGRVQCMQVWPPTGKKKFETLSYLPDLTPVQLAKEVDYLLRSKWVPCLEFELEEGFVHRKYSSLPTYYDGRYWTMWKLPMFGCTDSAQVLKELEECKKEYPNAFIRIIGFDNVRQVQCISFIAYKPPGF

SEQ ID NO: 79180 - protein, 148 aa, Gossypium hirsutum
  unsure (1)..(148): unsure at all Xaa locations
  Clone ID: LIB3120-004-Q1-K1-C5.pep
LPVKDGAAYSRAYLVDPFTGLRAASVLEAIMQANTYITILARNGERMQCMQVWPTTGKKKLETLSYLQDLTPVQLAKEVDYLLSSKWLTCLEXELEEGFAHRTYSRLPTYYHGRYWTMXKLPMIGCTDXAQVLKELEECKNEYRNAFI

SEQ ID NO: 79181 - protein, 137 aa, Gossypium hirsutum
  Clone ID: LIB3165-040-Q1-K1-A1.pep
RTRGRTRGRTRGLASNGGRVQCMQVWPPTGKKKFETLSYLPDLTPVQLAKEVDYLLRSKWVPCLEFELEEGFVHRKYSSLPTYYDGRYWTMWKLPMFGCTDSAHVLKELEECKKEYPNAFIRIIGFDNVRQVQCISF

SEQ ID NO: 79182 - protein, 133 aa, Gossypium hirsutum
  unsure (1)..(133): unsure at all Xaa locations
  Clone ID: LIB3165-022-P1-K1-H6.pep
RPRVPLFLYPSRDTTVQCMQVWPAXGKKKFETLSYLPDLTPVQLAKEVDYLLRSKWVPCLEFELEDGFVHRKYSSLPTYYDGRYWTMWKLPMFGCTDSAQVLKELEECKKEYPNAFIRIIGFDNVRQVQCISF

SEQ ID NO: 79183 - protein, 100 aa, Gossypium hirsutum
  unsure (1)..(100): unsure at all Xaa locations
  Clone ID: LIB3120-008-Q1-K1-H10.pep
MASSMISSATIATASPAQANMVAPFTGLKSASAFPVTRKANNDITSLASNGGRVQCMQVWPPTGKKKFETLSYLPDLTPVQFAKEXRYLLRSKMGPCLEF

SEQ ID NO: 79184 - protein, 121 aa, Gossypium hirsutum
  unsure (1)..(121): unsure at all Xaa locations
  Clone ID: LIB3165-045-Q1-K1-E2.pep
MGFFINLSGTIGNGNWFFPGQGNMGGPFNRLKACFCFPSTKKGNNHHTFFGSHGGRRQWMAVGPSFGKKKVETTLYPPDLTPVQWLKKXDYLLRSKWIPCXEFELXEGFVHPKYSSLPTYY

SEQ ID NO: 79185 - protein, 93 aa, Gossypium hirsutum
  unsure (1)..(93): unsure at all Xaa locations
  Clone ID: LIB3165-052-Q1-K1-E4.pep
MASSMISSATIATASPAQANMVAPFTGLKSASAFPVIXKANNDITSLASNGGRVQCMQVWPPTGKKKFETLSYLPDLTPVQLAKEVDYLLRSK

SEQ ID NO: 79186 - protein, 84 aa, Gossypium hirsutum
  Clone ID: LIB3165-018-P1-K1-B9.pep
MASSMISSATIATVNRSSPAQANMVAPFTGLKSASAFPVTRKANNDITSLASNGGRVQCMQVWPPLGKKKFETLSYLPDLTSLQ

SEQ ID NO: 79187 - protein, 75 aa, Gossypium hirsutum
  Clone ID: LIB3493-057-P1-M1-D1.pep
MASSMISSATIATVNRSSPAQANMVAPFTGLKSGSAFPVTRKANNDITSLASNGGRVQCMQVWPPLGKKKFETLS

SEQ ID NO: 79188 - protein, 71 aa, Gossypium hirsutum
  Clone ID: LIB3120-025-Q1-K1-D6.pep
PTRPRSRAPPFFFFFFFFFWFRFLGKKLGFYSLVLSRSIGNPKQNKEKDPQPNTLIKKEKEKGGGGLRGLI

SEQ ID NO: 79189 - protein, 109 aa, Gossypium hirsutum
  Clone ID: LIB3165-053-Q1-K1-H4.pep
MHCTLPPLLAREVMSLLAFLVTGKAEADLRPVKGATMLAKEVDYLLRSKWIPCLEFELEEGFVHRKYSSLPTYYDGRYWTMWKLPMFGCTDSAQVLEELENCKKEYPNA

SEQ ID NO: 79190 - protein, 92 aa, Gossypium hirsutum
  unsure (1)..(92): unsure at all Xaa locations
  Clone ID: LIB3165-005-P1-K1-E10.pep
MASSMISSATIATASPAQANMVAPFTGLKSASAFPVTRKANNDITSLASNGGRVQCMQVWPPTGKKKFETLSYLPDLTPVQLAXEVDYPLRS

SEQ ID NO: 79191 - protein, 88 aa, Gossypium hirsutum
  Clone ID: LIB3165-055-P1-K1-C9.pep
MASSMISSATIATASPAQANMVAPFTGLKSASAFPVTRKANNDITSLASNGGRVQCMQVWPPTGKKKFETLSYLPDLTPVQLAKEVDY

SEQ ID NO: 79192 - protein, 74 aa, Gossypium hirsutum
  unsure (1)..(74): unsure at all Xaa locations
  Clone ID: LIB3120-023-Q1-K1-D6.pep
MASSRISWATIAAASXAQANMVAPFTGLXFPITKNANNDITSLASNDGRMQCMHVWPATGNNKLETLSYLPDLH

SEQ ID NO: 79193 - protein, 57 aa, Gossypium hirsutum
  Clone ID: LIB3120-053-P1-K1-C5.pep
MASSMISSATIATASSAQANMVAPFTGLKSASAFPVTRKANNDITSLASNGCRVQCM

SEQ ID NO: 79194 - protein, 72 aa, Gossypium hirsutum
  Clone ID: LIB3165-008-P1-K1-C1.pep
DSFEYLYHLVIVSSNSSGLLHDLIGNHCHREPLLPAQASWCPLTGSNCSVSSTGSTHILLSTGSIIRCAWRE

SEQ ID NO: 79195 - protein, 203 aa, Gossypium hirsutum
  Clone ID: GOSHI-09MAY01-C7989_4.pep
NFKATPMPSFYQEPPRPKVELKKIPPTRAKSPKLGRRKSSTPLDSDGNSNSGHQSVQLSLDEKAFQSTSSKVISPVNAKKPQRKSLPKLPSQKTSLSGSTNDEKTSNTPSQKKVNAPKASTEGKIALPKATNEENNTLSDVTNEELSPTQLQPAVSAADSGESQPDIDQVDLVQEPIALEHLSMAMVSSGCSYTKFLTCICLI

SEQ ID NO: 79196 - protein, 295 aa, Gossypium hirsutum
  Clone ID: GOSHI-09MAY01-C7989_3.pep
MKQPLRGRALNERQANVSKHSEKPDAGNAEKLKLKPLNKVEGDTESSPTAADAKVHKIGTLPNYGFSFKCDERAEKRKEFYNKLEEKIHAREVEKSNLQAKSKETQEAEIKMLRKTLKFKATPMPSFYQEPTPPKVELKKIPPTRAKSPKLGRRKSSTPSDIDGNSNNNHQPGRLSLDEKASQSISAKVISPVHAKKSQRKSLPKLPSQKTSLSGAKNEEQKSKESDQETTTKPKATSKVTREESTASSYLKNEESSPIQQLEAFSGANSGGSQPDLDLGPVIGDLEQEPIAVEH

SEQ ID NO: 79197 - protein, 253 aa, Gossypium hirsutum
  Clone ID: GOSHI-09MAY01-C7989_2.pep
FSRPPTRPQNQGSLTAAEAKVHPTRTLPNYGCSFKCDERAEKRKEFYNKLEEKIHAREVEKSNLQAKSKETQEAEIKMFRKTLNFKATPMPSFYQEPTPPKVELKKIPPTRAKSPKFGRRKSSTPSDSDGNSSSDHQSVQLSLDEKAFQSTSSKVISPVNAKKPQRKSLPKLPSQKTSLSGSTNDEKTSNTSSQKKVNAPKASTEGKIALPKAINEELSPTQLQPAVSAAGSDESQRDIDQVDLVQEPIALEH

SEQ ID NO: 79198 - protein, 318 aa, Gossypium hirsutum
  Clone ID: GOSHI-09MAY01-C7989_1.pep
MDSDNLLSAGGLEVAHQNGVYPQLRVSGDDSGILNNVNGNAEETVGTCSQNGIDDHGATMEARERSNDLVDNNGSIGSKEEEVNDHVNVKQSKPQKVQSKTKNEKPSGTRNASSALMKKSKDGKTAEVRLTASNGGSVATNSHLKQPLKNRSCNERQANASKGPEKPDAAFSEGPMEKPKLKPLKKGPLNKAEGDTESSPMAADAKPRKVGSLPNYGFSFKCDERAEKRKEFYTKLEEKIQAMEVEKSNLQAKSKETQEAEIKMFRKSLNFKATPMPSFYQEPAPPKVELKKIPTTRAKSPKLGRKKGSFLLSSMLLQ

SEQ ID NO: 79199 - protein, 106 aa, Gossypium hirsutum
  Clone ID: uC-gsflmaxxa097g02b1.pep
MRFVSLAENSHPREALKRSGGVNEKHGNALEQSARAGAALTEGTMEKPLAGPVNTGPIHTTDIYTELLSPMAADAKPLRVGTLPNYGFSFKCDERAEKRREFYTNL

SEQ ID NO: 79200 - protein, 58 aa, Gossypium hirsutum
  Clone ID: GOSHI-09MAY01-C107972_1.pep
HNCGHGTDMRGCPQSPLSIEGNAENCSAPDAVNKVRQKMIEHIDLWLSECKGTGRSSM

SEQ ID NO: 79201 - protein, 491 aa, Gossypium hirsutum
  unsure (1)..(491): unsure at all Xaa locations
  Clone ID: GOSHI-09MAY01-C7969_1.pep
MKMGEDAPASDHLHINQVFDLSSDVLPQGGTKCYDDDGRLKRSGTVWTASAHIITAVIGSGVLSLAWATAQLGWIAGPIVMILFSFVTYYTSTLLAACYRSGDPVNGKRNYTYMDAVRSNLGGFKVKICGWVQYLNLFGVAIGYTIASSISMMAIKRSNCFHASGGKNPCHMNSNPYMIAFGIVEIIFSQIPDFDRLWWLSIVAAVMSFTYSTIGLGLGIAKVAETGKIRGSLTGISVGTVTQTQKIWRSFQALGDIAFAYSYSLILIXEIQDTPLRXPPSEIKDNGRKPPLISVGVTTLFYMLCGCMGYAAFGDLSPGNLLTGFGFYNPFWLLDIANAAIVIHLVGAYQVYCQPLFAFIEKSATERFPDSEFITKDIKIPIPGFRPYNLNLFRLVWRTIFVIITTLISMLLPFFNDIVGLLGALGFWPLTVYFPVEMYISQKKIPKWSTRWVCLQILSIACLFITIAAAAGSIAGVVLDLKSFKPFATVY

SEQ ID NO: 79202 - protein, 142 aa, Gossypium hirsutum
  Clone ID: LIB3543-058-Q6-K6-E1.pep
MGEKGAVKNHLHNNLVFDHPIGFDDDGRLKRTGTVWTASAHIITAVIGSGVLSLAWATAQLGWIAGPAVIFLFSFVTYYTSTLLAACYRCDDPVNGKRNYTYMEAVRANLGGFEVKICGWVQYLNLFGVAIGYTIASSISMM

SEQ ID NO: 79203 - protein, 106 aa, Gossypium hirsutum
  Clone ID: LIB3166-052-P1-K1-C11.pep
MGEEVLPKGGTKCYDDDGRLKRSGTVWTASAHIITAVIGSGVLSLAWATAQLGWVAGPLVMILFSFVTYFTSTLLAACYRSGDPVNGKLNYTYMDAVRSNLGGFKV

SEQ ID NO: 79204 - protein, 134 aa, Gossypium hirsutum
  Clone ID: GOSHI-09MAY01-C107912_1.pep
VETSVLILTPYGGRMKQIKSSATPFPYRSEYLYGIQYMISWDVAEETGKRIGWMRRLYKYMEPYVSTAPRAAYFNYRDLDLGRNSYPNTSYVESSEWGLKYFNHNFNRLVRVKTLADPHNFFWNEQSIPVLRLE

SEQ ID NO: 79205 - protein, 170 aa, Gossypium hirsutum
  unsure (1)..(170): unsure at all Xaa locations
  Clone ID: GOSHI-09MAY01-C7839_1.pep
MESSSMYYLKARFHFNKNQFADLMLIGGIVATISQLFIMPLLVSPIGDGRLLSIGLFASCVYAILYSIAWSAWVPYAAAAVSTVMVFAPPSLRSIASKQAGPREQGKAQGCISGIISLANIMAPLIFSPLTSLFLSEGAXFHFPGFSIICIAITLMIAFIQSLMIGRALH

SEQ ID NO: 79206 - protein, 141 aa, Gossypium hirsutum
  Clone ID: LIB3165-021-P1-K1-H2.pep
DTQRAFAFGFFVGLTSGAWVGATLAVGFLSAGSTFKVATLDSMLAVVNMRIFLEEGIPNQNDGMTQPILKETEGVIQKDGNVGTRKMPVFKTIPSLKDIIRLIKSSPSFSQAAIVAFFQSLAEGGMICSIMYYLKARFHFN

SEQ ID NO: 79207 - protein, 312 aa, Gossypium hirsutum
  unsure (1)..(312): unsure at all Xaa locations
  Clone ID: GOSHI-09MAY01-C7829_1.pep
NFSKVDRCRRFSVAATATTTPQSEDSAAPPQIPPDTRIPATIITGFSGSGXTTLLNHILTAHHGKRIAAIETEYGEVDIDGSLVAAKAAGAEDIVMLNNGCLCCTVRGDLVRMIAELVSKKKGKFDHIVIETTGWANPAPRLQTFYAEEQVFNDVKLDGVVTLVDAKHAGFHLDEVKPKGVVNEAVEQIAYADRIIVNKTDLVGEPEITSLVKRIRSINGMAHLKHTEFGKVDLEYVLGIGGFDLERIESSVNDGTKEDHAHHHDHDHHHLHHHEHEHXHDHHHDHTHDPGVSSVSIVCEGSLDLKKANIWL

SEQ ID NO: 79208 - protein, 76 aa, Gossypium hirsutum
  Clone ID: GOSHI-09MAY01-C7599_4.pep
PVTRVNAVAPGFVPTNFAAYITKDEGVKAANEEKTLLGRLGTPKDMAAAAAFLASDDACYITGETLIVAGGLPSRL

SEQ ID NO: 79209 - protein, 245 aa, Gossypium hirsutum
  Clone ID: GOSHI-09MAY01-C7599_3.pep
MQTSQKHKITGKCIDWPVQELESYCWPPNQSLEPYQSGSDDGSNSVQHSVPNLERYCTLDSSSSMQNSSSTASFSPDGSPVSQQNYTYPLDLHHSPENTCASPISGSCVIDNENDLGLMIRQLETAMLGIDSGDLDLHAIAASGRATKVSVEAERWKYMKEMIARGDLKELLCTCAKAIESNDMYMTDCLIAQLRQMVSVSGEPMQRLGAYLLEGLVARLASSGSSIYKALRCKEPASPELLSYM

SEQ ID NO: 79210 - protein, 260 aa, Gossypium hirsutum
  Clone ID: GOSHI-09MAY01-C7599_1.pep
MAKIMDMETKIGRRFEGKVAIVTASTQGIGFAIAERLGLEGASVVISSRKQKNVDEAVEKLKNKGLEVFGVVCHVSNAQHRKDLIQKTVDKYGKIDVIVSNAAVNPSVDPLLRTLESILDKLWEINVKATVLLLQEAAPHLQKGSSIVIISSIAGYNPQPAMAMYGVTKTALLGLTKALATEMAPVTRVNAVAPGFVPTNFAAYITKDEGVKKANEEKTLLGRLGTPKDMAAAAAFLASDDACFITGETLIVAGGLPSRL

SEQ ID NO: 79211 - protein, 85 aa, Gossypium hirsutum
  Clone ID: LIB3825-021-Q1-K6-B5.pep
LYLSFCVDLETYTRNHDLNVMQLQWGKNPFYTVVGLADWCIEPLCYFSFCLYLGPMINKRLVAAIACFGGKVLQETYIIDWQAHR

SEQ ID NO: 79212 - protein, 56 aa, Gossypium hirsutum
  Clone ID: LIB3083-054-Q1-L1-A7.pep
TGSAVLSDAGYDLLNRLLTYDPDKRITADDALKHDWFRELPLPKSKEFLPTFRPKV

SEQ ID NO: 79213 - protein, 41 aa, Gossypium hirsutum
  Clone ID: LIB3149-060-Q1-K1-H6.pep
STRFFKKRVIRDRSFAFYINSVLAIWSIKDSTLKLKDLCFI

SEQ ID NO: 79214 - protein, 101 aa, Gossypium hirsutum
  Clone ID: GOSHI-09MAY01-C7559_1.pep
NEPSPVGPGFWSFQNPFPFPLALLLPSCQPLRTPLLQPTLPPPIFHVDTPMNALFTSPRTASLEGLASPVTSAPLEVRTLAIRLEVERKLKNFRVFFNGKS

SEQ ID NO: 79215 - protein, 59 aa, Gossypium hirsutum
  Clone ID: LIB3146-057-Q1-K1-F6.pep
VYGVFFLQRNRIEIEYKNSHEILNTSKKQQVNISFYFEGDCIFYFPLLLSALHLDYFVY

SEQ ID NO: 79216 - protein, 110 aa, Gossypium hirsutum
  Clone ID: GOSHI-09MAY01-C7519_1.pep
MALPQLIPSHSSSSLTHQPSINPNAANPYPMLKSFLKPSSLSQSRRFHRLSSLRASASSFPDHHQTDPSKPDDVVELPIFPLPLVLFPGAILPLQIFEFPYRIMMHTLLH

SEQ ID NO: 79217 - protein, 113 aa, Gossypium hirsutum
  Clone ID: LIB3165-017-P1-K1-F4.pep
KNYPPQKKKHYYSNSSLNHQPYINPNSSNPYPTFNTLYKNHILSHKLPSNTILNIHLYTASSFPHHHQTNPSKPDYVLELPIFPLPLVLFPGAILPLQNFQFPYRIIMHTLLH

SEQ ID NO: 79218 - protein, 189 aa, Gossypium hirsutum
  unsure (1)..(189): unsure at all Xaa locations
  Clone ID: GOSHI-09MAY01-C7509_1.pep
MWLFGRKGPSGFSSSSTAEEVTQGIDGTGLTAIVTGASSGIGTETARVLALRGVHVIMGVRNVAAGKDVKEAIVKEIPTAKVDTMELDLSSIASVRKFAADFSSSGHPLNLLINNAGIMATPFMLSKDNIKLQFATNHIGHFLLTNLLLDTMKKAARTSKREGRIXNVSSEAHRYTYKEGIHFDKINDH

SEQ ID NO: 79219 - protein, 100 aa, Gossypium hirsutum
  Clone ID: GOSHI-09MAY01-C7489_2.pep
MASTAVLATSTVSSTSFVRRQPVRSLSSLPNFKQALFGLKPQRGGRLTMAVYKVTLLTPEGPQEFECPDDLKILDAADENGIDLPYSCRAGACSSCAWRV

SEQ ID NO: 79220 - protein, 130 aa, Gossypium hirsutum
  Clone ID: LIB3165-017-P1-K1-B3.pep
KWLSPPPSPLPRAGAPHSSAPNFKQALFGLKPQRGGRLTMAVYKVTLLTPEGPQEFECPDDLKILDPAEENGIDLPYSCRAGACSSCAGRVKEGSVDQSENSFLSDEQTEEGFVLTCVALPTSDVVIETH

SEQ ID NO: 79221 - protein, 123 aa, Gossypium hirsutum
  Clone ID: GOSHI-09MAY01-C7459_1.pep
DKIMSKSWFDKGYNGVGPNDDFFDDVIKYLDLPLEDVEGPDGNGSTEDVNNFLLPVEENNDGGEDWDCDFENLEPPPTNVLASLSSGFYGDFFSDSLAQNLTDSCDGSSQLNQLSSTTSITPR

SEQ ID NO: 79222 - protein, 212 aa, Gossypium hirsutum
  Clone ID: GOSHI-09MAY01-C7449_1.pep
MAFSEFRPLDENSLIEYIKATPSLSSKIVDNYDGLKIKEVGDGNLNFVYIIVGPSGSFVIKQALPYIRCIGESWPMTKERAYFEALALKQHGALCPEHVPEVYHFDRTMSLIGMRYLEPPHIILRKGLIAGIEYPLLAEHMSEYMAKTLFCTSLLYRSTTEHKRAVAEFCGNVELCRLTEQVVFSDPYKRSEYNPWTSPYLDRDAETVREDN

SEQ ID NO: 79223 - protein, 133 aa, Gossypium hirsutum
  unsure (1)..(133): unsure at all Xaa locations
  Clone ID: GOSHI-09MAY01-C7479_1.pep
MGTQAPPENGYGRSNSLEEKSAKEKAIDEWLPITSSRNAKWWYSAFHNVTAMVGAGVLSLPYAMAELGWGPGVTVLILSWIITLYTLWQMVEMHEMVPGRRFDRYHELGQYAXGEKLGLYIVVPQQLIVEVGV

SEQ ID NO: 79224 - protein, 121 aa, Gossypium hirsutum
  Clone ID: GOSHI-09MAY01-C7439_2.pep
GVTSVVIKGPAEHKDTLGAPLGPWRHYDDKAAEVGQGFWNCPCVPMRERKECHCMLFLTPDNDFAGQDQSITLEEIKETTTNMLFMTFITWFSQSPKEFQVKFYFCISKGVNFFSLFYTYL

SEQ ID NO: 79225 - protein, 145 aa, Gossypium hirsutum
  Clone ID: GOSHI-09MAY01-C7439_1.pep
MTLQATSCNFGAISSLLRPPKISRHRFVIRAEVEPSEKSVEIMRKFSEQYARRSGTYFCMDKGVTSVVIKGLAEHKDSLGAPLCPCRHYDDKAAEVNQGFWNCPCVPMRERKECHCMLFLTPDNDFAGQDQTIPLEEIKETTAYM

SEQ ID NO: 79226 - protein, 76 aa, Gossypium hirsutum
  Clone ID: GOSHI-09MAY01-C107692_1.pep
GIFRDIYPREPQSVHQIDHAFHSPCDVSLDFETLRSSIQVLLNMSRRFDTSQARALLPSKSSLKSVGQRKIKRKCA

SEQ ID NO: 79227 - protein, 169 aa, Gossypium hirsutum
  Clone ID: GOSHI-09MAY01-C7169_2.pep
MMQQPAQAMVPPPMAPPPSMAGAPQTQQQYQYQQPPPAPVPQTQPPYMMMNMMQPPQSHPPPMWPPQQGSAGVPAQQQPAGQPANADEVRTLWIGDLQYYMDENYLLSCFAQTGEVASVKVIRNKQTGQVEGYGFIEFVSRAAAERVLQTYNGTPMPNGESNYRLNWAS

SEQ ID NO: 79228 - protein, 410 aa, Gossypium hirsutum
  Clone ID: GOSHI-09MAY01-C7169_1.pep
MMQQPAQAMVPPPMAPQTQQYQYQQPPPAPVPQAQQPYMMMNMMQPPQSHPPPMWPPQQGSAGVPAQQQPAGQPANADEVRTLWIGDLQYYMDENYLLSCFAQTGEVASVKVIRNKQTGQVEGYGFIEFVSRAAAERVLQTYNGTPMPNGESNYRLNWASFSSGDRRDETPEFTIFVGDLAADVTDYMLQETFRAHFPSVKGAKVVIDRITGRTKGYGFVRFGDETEYNRAMTEMNGAFCSTRPMRIGPATNKKTGAAQQYPAASSQGTQNENDPNNTTIFVGNLDSNVTEDHLREVFSPYGQLVHVKIPQNKRCGFVQFADRSCAEEALRILNGTQLGGQSIRLSWGRSTSNKQAQADPNQWNAGYYGYSQGYGYGYGAAPQDPNMYYGGYPGYGNYQQPQQQQQVGYS

SEQ ID NO: 79229 - protein, 60 aa, Gossypium hirsutum
  unsure (1)..(60): unsure at all Xaa locations
  Clone ID: LIB3148-034-Q1-K1-G12.pep
XFFFFKGSKPPWESQYSHPPGRPILGFRLVHSLISFLFFPRFRLLAFLGISVLHHKRQTI

SEQ ID NO: 79230 - protein, 136 aa, Gossypium hirsutum
  Clone ID: GOSHI-09MAY01-C7009_1.pep
MESKPFFRFLFFFIAIAFLFLFAWTHLHYAPSPGVTTLLDCASNSPWCTSSKNRFQSKQPTLTKTPRASTSQRRHHESAVPRHPLDPLTIQEFNKVRKILSSHALFKSSNNYALHSVVLEEPNKELVLKWKKGQPL

SEQ ID NO: 79231 - protein, 452 aa, Gossypium hirsutum
  Clone ID: GOSHI-09MAY01-C7359_1.pep
RKGTIGISFVPVLCGSAFKNKGVQPLLDAVMDYLPSPLELPAMKGTDPENPEVIIERTASDEEPLSGLAFKIMTDPFVGSRTFVRVYSGKLAAGSYVLNANKGKKERIGRLLEMHANSREDVKVALAGDIVALAGLKDTITGETLSDPDHPIVLERMDFPDPVIKVAIEPKTKADVDKMANGLIKLAQEDPSFHFSRDEEINQTVIEGMGELHLEIIVDRLKREFKVEANVGAPQVNYRESISKVSEVKYVHKKQSGGQGQFADITVRFEPMDAGSGYEFKSEIKGGAVPKEYIPGVMKGLEECMCNGVLAGFPVVDVRAVLVDGSYHDADSSVLAFQLAARGAFREGIRKAGPRMLEPIMKVEVVTPEEHLGDVIGDLNSRRGQINSFGDKPGGLKVVDALVPLAEMFQYVSTLRGMTKGRASYTMQLAKFDVVPQHIQNELATKQQEVGA

SEQ ID NO: 79232 - protein, 249 aa, Gossypium hirsutum
  Clone ID: GOSHI-09MAY01-C7369_1.pep
MPIRNIAVGRPEEATHPDALKAALAEFISTLIFVFAGSGSGMAFNKLTDGGATTPAGLVAASLAHGFALFVAVSVGANISGGHVNPAVTFGAFVGGNITLLRGILYWIAQLLGSTVACLLLKFATSGLGVPAFGLSSGVGALNAFVFEIVMTFGLVYTVYATAVDPKRGNLGVIAPLAIGLIVGANILAGGAFDGASMNPAVSFGPALVSWSWENHWVYWAGPLIGGGLAGLVYEFIFINQTHEQLPNY

SEQ ID NO: 79233 - protein, 106 aa, Gossypium hirsutum
  Clone ID: LIB3147-040-Q1-K1-G8.pep
SDFKLKYDFNQFLLLIQSLSFAKYQFVFINSFAFCYGDSQGVPAFGLSSGVGALNAFVFEIVMTFGLVYTVYATAVDPKRGNLGVIAPVAIGLIVGANILAGGAFD

SEQ ID NO: 79234 - protein, 133 aa, Gossypium hirsutum
  Clone ID: LIB3272-034-P1-K1-H6.pep
DLYPCLLHCWYLWRTHQPFNKLTDGGATTPAGLVAASLAHGFALFVAVSVGANISGGHVNPAVTFGAFVGGNITLLRGILYWIAQLLGSTVACLLLKFATSGLGVPAFGLSSGVGALNAFVFEIVMTFGLVYT

SEQ ID NO: 79235 - protein, 58 aa, Gossypium hirsutum
  Clone ID: uC-gsronu33B072e03b1.pep
MPIRNIAVGRPEEATHPDALKAALAEFISTIIFAFAGPGTWLVFNLCRPFFGLFSIST

SEQ ID NO: 79236 - protein, 199 aa, Gossypium hirsutum
  Clone ID: GOSHI-09MAY01-C7309_1.pep
ERGELEVEEAYEQVKEFEDQMVMEYGKMMEAEGPPKFDETAVPDLKKNLDDPPGEGPILRWQTRAVFAPGGDAWHPKNRKVKMSVTVKELGLSKHQFRRLRELVGKRYHPGEGELTITSERFDHREENRKDCLRTLFSLIEEAGKANKMVEEARTKYVKNRLRANPAFMERLRAKTMKLQESTTFPIMNSLKEINWFFF

SEQ ID NO: 79237 - protein, 126 aa, Gossypium hirsutum
  unsure (1)..(126): unsure at all Xaa locations
  Clone ID: LIB3147-005-Q1-K1-A4.pep
EYGKMMEAEGPPKFDETAVPDLKKNLDDPPGEGPILRWQTRAVFAPGGDAWHPKNRKVKMSVTVKELGLSKHQFRPVRELVGKKYHPGKNELTFTSEKXDPREKTKKNGLKPFFFLFEEPGKATKW

SEQ ID NO: 79238 - protein, 332 aa, Gossypium hirsutum
  Clone ID: GOSHI-09MAY01-C7299_1.pep
MGDVQTAESSNRARLAIMELANMISVPMSLNAIVRLNVPDAIWQGGANTPLSAVQILSRVLPYGGGDPENLQRILRMLTSYGVFDEHLNCSGDDSHSPERKYSLTDIGKTLVTDAEGLPYAPYVLQHHQDALMRAWPLVHEAVLNPTSEPFVKANGEGAYSYYGKKPEMNGLMQKAMSGVSVPFMRAILDGYDGLKGVKRLVDVGGSAGDCLRMILQKYPHVEGINFDLPEVVARAPSIPGVTHVGGDMFESIPAADAIFMKWVLTTWTDDECKAIMENCYKALPVGGKLIACEPVLPKESDDSHRTRALLEGDIFVMTIYRAKGKHRTQDE

SEQ ID NO: 79239 - protein, 160 aa, Gossypium hirsutum
  Clone ID: GOSHI-09MAY01-C7259_1.pep
MSGGIARGRLAEERKAWRKNHPHGFVAKPETLPDGTVNLMVWHCTIPGKAGTDWEGGYFPLTLHFSEDYPSKPPKCKFPQGFFHPNVYPSGTVCLSILNEDSGWRPAITVKQILIGIQDLLDAPNPADPAQTEGYHLFIQDANEYKRRVRQQAKQYPPLV

SEQ ID NO: 79240 - protein, 58 aa, Gossypium hirsutum
  Clone ID: LIB3197-059-Q1-M1-G8.pep
MSGGIARGRLAEERKAWRKNHPHGFVAKPETLPDGTVNLMVWHCTIPGKAGVSRRTSI

SEQ ID NO: 79241 - protein, 147 aa, Gossypium hirsutum
  Clone ID: GOSHI-09MAY01-C7209_1.pep
MGVEGTLEYISDLLSSVKKKKKKKQIQTVALKIRMDCEGCARKVKKVLSGVKGAKSVDVDLKQQKATVTGYVEAKKVLAAAQSTKKKVELWPYVPYTLVANPYVAQAYDKKAPPNHVRKVPASATVSETTIDNRFTNLFSGDNPNAC

SEQ ID NO: 79242 - protein, 184 aa, Gossypium hirsutum
  unsure (1)..(184): unsure at all Xaa locations
  Clone ID: LIB3543-030-Q1-K6-G2.pep
GDGVYGTDEFRMYTFKVKPCSTAYSHDWTECPFVHPGENARRRXSXKYHYSCVPCPEFRKGSCRQGDNCEYAHGIFECWLHPAQYRTRLCKDDTNCTRRVCFFAHKPDELRPLYASTGSAVPSPRSYSATGSYLDVGSISPLALGSTSIMIPPTSTPPLTPTGATSPMGGAMWPNQSNILPPTL

SEQ ID NO: 79243 - protein, 124 aa, Gossypium hirsutum
  Clone ID: uC-gsflnu33B078a03b1.pep
PHHHGELLYMVCLKRVSRGSFNKICRCMVLLIRGCWEPTCAWLCIYDDTCDITPPLTRTGATSPMGGAMWPNESNILPTTLQLSGSKLKAAFSAWHMDLDMELFGLESHDLDQHTQLIDEISGF

SEQ ID NO: 79244 - protein, 126 aa, Gossypium hirsutum
  Clone ID: GOSHI-09MAY01-C7229_2.pep
HSPLFSPHISSITQSPFHLGNQSPILHPNATSPCTHTNHGSNLTSFFIFFLHPLFPSFTSFFSTSPPQVSFLQGHVSSYCKPADMFNSCCPQKVELLHKGSSWRKCACNRRSYFCPWKSSTRASSS

SEQ ID NO: 79245 - protein, 185 aa, Gossypium hirsutum
  Clone ID: GOSHI-09MAY01-C7229_1.pep
MEATSLLSSSSSFALSFLPSPLSSPDLHHKSLVFRGMFPVTVNPQTCSTAVVRRKLSFCTKAVLGGNVHVTGVPTSVPVRVAHELHQAGHRYLDVRTPEEFSAGHVPGAINIPYMYKVGSGMAKNPSFVAEVSSHLGKYDEIIVGCQLGKRSLMAATELLAAGFTAVTDIAGGYAAWTQNGLPTE

SEQ ID NO: 79246 - protein, 125 aa, Gossypium hirsutum
  Clone ID: GOSHI-09MAY01-C100992_1.pep
VSLSARRWGCGCGTKRRIISGEDAVCCICLAKYTNNEELRELPCSHFMHKECVDKWLKINASCPLCKNDIGENVLDAISGTSTASILSSLSGAHDNQRRAAYSLMVFLLMCWVVVPSILYGYLTG

SEQ ID NO: 79247 - protein, 85 aa, Gossypium hirsutum
  Clone ID: GOSHI-09MAY01-C100802_1.pep
QGERSFSKRQYNKEIYHVQTTKTCSDSLHKLCAHSYAYLLFILNKKIDKMYHLLSCTLGVQWICKTSVQIIKILLANKVKIYISF

SEQ ID NO: 79248 - protein, 54 aa, Gossypium hirsutum
  Clone ID: GOSHI-09MAY01-C100812_1.pep
RSGLIPAAYITVRAGIALSELQSLGDLYDFNSIATLFLIGVVSVTPTLMSKTKQ

SEQ ID NO: 79249 - protein, 124 aa, Gossypium hirsutum
  Clone ID: GOSHI-09MAY01-C100542_1.pep
ERERKGNSEQEVMAVAPMDGLQQMDKLSSRSVALDSYFGAQPSVQGMVQLNLMAPRDNYYGNQQTIQGLGQLNTIATSHDGYYGTQQAMPGMGPMDFFRSPSFYIRDDPNVRVAQLHDDASRHT

SEQ ID NO: 79250 - protein, 250 aa, Gossypium hirsutum
  unsure (1)..(250): unsure at all Xaa locations
  Clone ID: GOSHI-09MAY01-C100482_1.pep
VSDNFPQMFVHNSMDAVSEDHVMSLEKLEVELVELLKTKRGDPVSIASLPLLYYEKYGKVLQADGYLTESQRHGKAGYSLTKRRARLKNTIRVIDRPHGQHSVILAEDAPKYMENRNDRNDPGXIVSGSRQIYLTFPAESTFRGDDVSNYFSNYGQVEDVRIPCQQKRMFGFVTFVSADTVKMILAKGNPHYVCGARVLVKPYREKSKLVDRKYPERIESPMFYSPHYIDMESELQSIPRGYATSRLFKK

SEQ ID NO: 79251 - protein, 317 aa, Gossypium hirsutum
  unsure (1)..(317): unsure at all Xaa locations
  Clone ID: GOSHI-09MAY01-C100492_1.pep
LIPKTDEANDMSLFHPISLCSVLYKVILKSLRIDRIWGYDDEAQGACGRXDTVLVDMRMHAEEEENGKKGDAPKLDMSKAHDRAEWDPMEGMMLKXGLDTRWVELIIHCISGSYFVMVNKEAIEVFIPSKGLRQGDPLSPYLFLIRTKCFSTLLKIAKQDGIMXERGSPSMTHLFFNDDSIIFGEATERGGXVIKDIFEKYERASGXKINLDKSVIFFSSTLENHVCNQIVNNLGVXNIXYGTVFGLPTLVGRSKKEXFSYICDRMRQKIENWSVHFLSHGGKEIFIKVVLQALPTYSMSYFFLPKTLCHNLEKILN

SEQ ID NO: 79252 - protein, 140 aa, Gossypium hirsutum
  Clone ID: GOSHI-09MAY01-C100402_1.pep
LGTNVDLRRASNTSLNCQLINESDNEDGKKGDTVSISNIEQGINSLEKLVQSDHISNDIVNSHVEIVGFVRKGGKGMASKMFQGDKNTKFFHQLEELGIKLVSVPNDIRGVIQVHFLAFYSNAVTLKLIDLDCYNTPNLF

SEQ ID NO: 79253 - protein, 276 aa, Gossypium hirsutum
  Clone ID: GOSHI-09MAY01-C100742_1.pep
MVGWQRHLQCALRQVGRRLEHNYTHSTNYSSVSRLNSPVLPRELPSYQKLWKSPASMSPVLYRYFQQLGISTSRKLLAGSSEETPIASPLTPVLAIDSGKTEEKKVVPNRTKVQAVLKKIKQSPKKVNLVAALVRGMRVEDALLQLQVTVKRAAKTVYQVIHSARANATHNHGLDPDRLLVAEAFVGKGLFLKRVSYHGKGRSGIKERPECRLTVVVREMTPEEEAELARLRVSKFRKLTKREKRLVPHKLIETSPIWNRKGSGNGRTQEPNGMVA

SEQ ID NO: 79254 - protein, 162 aa, Gossypium hirsutum
  Clone ID: GOSHI-09MAY01-C100722_1.pep
RQLDIAETNGLSETAYFDIVLGRPLPPALIPYLRLVALGGTDAFLLESIFRNTIWGHLDLPVSRANEELICRVVRDACKSALSGYHTTIEEDEKLMEDENLDSRLKIAVGIRAGEKKVLQQIDEIFKGRESELDELEYYQERRLKDLGLVGEQGEIIFWETN

SEQ ID NO: 79255 - protein, 312 aa, Gossypium hirsutum
  unsure (1)..(312): unsure at all Xaa locations
  Clone ID: GOSHI-09MAY01-C100682_1.pep
MPFLSGMVVLLMAPLAIPVKMTFCPSRINRPEIRNQQVASSDETLQGEGNADKTEPLLKSSESSTYLESFREGDEASEVAMLLAVGEGAVKKKRRPKRGEDFKFTEAIIKADFWLLFLVYFTGVGSGVTVLNNLAQIGIAQGIHSTTILLSLFSFCNFIGRLGGGVVSEHFVRSKTVPRTLWMTCTQIIMVITYLLFASAISGTLYAATALLGICYGVQFSIMIPTVSELFGLKHFGIFYNFMSLGNPLGAFLFSGLLXGYIYDNEAAKQHGLGLITSSISCIGPNCFRLTFLILAGICGVGSYNIILTKRI

SEQ ID NO: 79256 - protein, 72 aa, Gossypium hirsutum
  Clone ID: GOSHI-09MAY01-C100022_1.pep
TRPFPFYILSFSFIARKINKNKKKKKIKKILVILIPLLSIAICYSVLQVCMAWSEAVCGRAGVEEAVGDCSN

SEQ ID NO: 79257 - protein, 133 aa, Gossypium hirsutum
  Clone ID: GOSHI-09MAY01-C100232_1.pep
LKLCRNGFSDEAIAAFFEASGSSLTELSLNNIASVGLNTAISLSKCSRKLFSLDLSWCRNLTDEALGLVVDSCSSLKLLKLFGCTQITDVFLKGHSNPQVQIIGLKMATLLEFLNVFEPREAPLRYSPVDNLH

SEQ ID NO: 79258 - protein, 39 aa, Gossypium hirsutum
  Clone ID: GOSHI-09MAY01-C1999_1.pep
SAFNKLLTRLAAEGYDLSNPVDLKHHWAKHGTNRYIPIK

SEQ ID NO: 79259 - protein, 101 aa, Gossypium hirsutum
  Clone ID: GOSHI-09MAY01-C1989_3.pep
CPDTRGSNGNRSYASGQYRRLLQVFTVASLLRLPLLECWVVSKLHMLIDAVTESYNKYFFGDVGREIYDFFWGDFADWYIEASKATIYHSGDDSVALVAQT

SEQ ID NO: 79260 - protein, 63 aa, Gossypium hirsutum
  Clone ID: GOSHI-09MAY01-C1989_1.pep
VRHRLRKDHGIEGGIPVVFSSHAPEAKLLPFRGPSGEEDNPSDYQVRVLASYFCSFKVLCLIT

SEQ ID NO: 79261 - protein, 85 aa, Gossypium hirsutum
  Clone ID: LIB3583-021-P1-K1-A5.pep
METEVMVACSIDSSFRCYICLLEYEEGDSMRIFACNHEFHRTCIDKWLKEVHREDFERTGISTLVTVGVRDIQGEGFLDQFSGLA

SEQ ID NO: 79262 - protein, 129 aa, Gossypium hirsutum
  Clone ID: LIB3048-005-Q1-L1-A4.pep
KTKLPCNTTTSGGTSCFSVLFIPSVFTFIQLKHHTYWIPFFIGLQFQIKRIRPRLVGSLFILGRISMLLFGWFPQMRNRDSVLNALNGHSDHGRIEIKNILPKISFTLSLQMRSNLLLLSQRYTFRFGD

SEQ ID NO: 79263 - protein, 84 aa, Gossypium hirsutum
  Clone ID: LIB3145-052-Q1-K1-F9.pep
HASGEQLSLFVPHSNSLNSQKVRHRLRKDHGIEGGIRVVFSLEKPKAQLLPFRGPSGEEDNPSDYQVRMLASYFCSFKVLCLIT

SEQ ID NO: 79264 - protein, 236 aa, Gossypium hirsutum
  unsure (1)..(236): unsure at all Xaa locations
  Clone ID: GOSHI-09MAY01-C101992_1.pep
MLSTNAIRTIVGIIGNIISLFLFLSPVPTFIKIFKLKSVEEFKPDPYVATILNCAMWVFYGLPIVHPDSLLIITINGVGLVIEGVFVTIFFIFSNNKKRKRICFXLLIEIIFMVAVVLITLLVFQTTQKRSMFVGILAIVFNIGMYTXSPLTVMRMVIKTKSVKYMPFSLSLFNFLNGVVWVIYALLKFDINVLIPNGLGTLSGLVQLILYAWFYRTTKWDEDDKAPAQQVQLSEI

SEQ ID NO: 79265 - protein, 312 aa, Gossypium hirsutum
  Clone ID: GOSHI-09MAY01-C1949_2.pep
MDDGGHRENGRLKADQYRTAQGQWLMHQPSMKQIMAIMAERDAAIQERNLALSEKKAAIAERDMAFLQRDAAIAERNNAIAERDNAIANLQYRENSLASGNISSCPPGFHISRGVKHMQHPQQHVHHLPHISEVPYNSREMHASDVLPVTPGTSEAAKSRQGKRAKEAKVIASNKKATKPPKKVKQENEDSDKLMSGKSHEWKGGQDVGGAGDDLNKQLVTTKSDWKGKDLGLNQVVFDDSTMAPPVCSCTGVLRQCYKWGNGGWQSSCCTTSLSMYPLPAVPNKRHARIGGRKMSGSAFNKLLTRLATERL

SEQ ID NO: 79266 - protein, 74 aa, Gossypium hirsutum
  unsure (1)..(74): unsure at all Xaa locations
  Clone ID: GOSHI-09MAY01-C1949_1.pep
MDDGGHRENGRLKADQYRTAHGQWLMHQPSMKQIMAIMAERDAAIQERNLALSEKKXAIAERDMAFLHRDATIA

SEQ ID NO: 79267 - protein, 204 aa, Gossypium hirsutum
  Clone ID: GOSHI-09MAY01-C1979_1.pep
LKVMVRSVSQNEFVSSRLTGKLEQQMQDAFTLSTGGMPLWCNDLVSSCPFMFSFEARCKYFRLAAFGPRRGQLNAISRSNSGTSSDRQTTSGGLPRKKFLVSRDQILDSATRMMDLLARHKGLLEVEYNEEVGTGLGPTLEFYTLVSHEFQKFGLGMWRGDHWSLITPTTLPTESVILRNSSGLFPRPCSPKSDANNGIQFSQV

SEQ ID NO: 79268 - protein, 60 aa, Gossypium hirsutum
  Clone ID: GOSHI-09MAY01-C1969_10.pep
MSCCGGNCGCSSGCKCGNGCGGCKMFPDIIEKTTTETIVLGVTTQKMNNKEKQSGLCLFN

SEQ ID NO: 79269 - protein, 71 aa, Gossypium hirsutum
  unsure (1)..(71): unsure at all Xaa locations
  Clone ID: GOSHI-09MAY01-C1969_8.pep
LNNAKGATXGDAVKKLGLWGLFTRGLPLRIVMIGTLTGAQWGIYDAFKVFVGLPTTGGVAPAPAAVEPAKA

SEQ ID NO: 79270 - protein, 77 aa, Gossypium hirsutum
  Clone ID: GOSHI-09MAY01-C1969_6.pep
MSCCSGKCGCGADCKCGSGCNGCSMFPDIIEKTTTETIVLGVATQKMHFEGSEMGVGVEGGCPCGDNCKCNPCTCGK

SEQ ID NO: 79271 - protein, 76 aa, Gossypium hirsutum
  Clone ID: GOSHI-09MAY01-C1969_5.pep
MSCCGGNCGCSSGCKCGNGCGGCKMFPDIIEKTTTETIVLGVTTQKMHFEGSEMGVGVENGCKCGDNCTCNPCNCK

SEQ ID NO: 79272 - protein, 196 aa, Gossypium hirsutum
  Clone ID: GOSHI-09MAY01-C1969_3.pep
MAFRLSNNLVGILNFITFLLSIPILGAGIWLSREGVTECERFLDKPVIVIGVFLMLVSLAGLIGACCRVTWLLWLYLVVMFLLIVLGIVFTIFAFAVTNKGAGEALSGKGYKEYRLGDYSNWLQKRVTSQKNWNKIKSCLADSKVCTDFHDKYLNASASEFSQTHLSAVQSGCCKPSNDCQFTYVGPTNWTRGSAE

SEQ ID NO: 79273 - protein, 378 aa, Gossypium hirsutum
  Clone ID: GOSHI-09MAY01-C1969_2.pep
MAIDSDSFKQSLLPSFLYSSAPNSFSLDRLLNANSPAFSASRSTIPDAPAASSSPSIKARTFMIPSPNEPGKKIEMYSPQFYAACTFGGILSCGLTHMAVTPLDLVKCNMQIDPAKYKSISSGFGVLLKEQGVRGFFRGWVPTLLGYSAQGACKFGFYEFFKKYYSDLAGPEYFAKYKTLIYLAGSASAEVIADVALCPFEAVKVRVQTQPGFARGLSDGLPKFVRSEGALGLYKGIVPLWGRQIPYTMMKFASFETIVEMIYKYGIPTPKEQCSKNLQLGVSFAGGYVAGVFCAIVSHPADNLVSFLNNAKGATVGDAVKKLGLWGLFTRGLPLRIVMIGTLTGAQWGIYDAFKVFVGLPTTGGVAPAPAAVELAKA

SEQ ID NO: 79274 - protein, 263 aa, Gossypium hirsutum
  Clone ID: GOSHI-09MAY01-C1969_1.pep
MATIDVPEQVSVLADAEALRKACKGWGTDEKAIISVLGHRNAVQRKQIRLAYEDLYQEDLIKRLESELSGDFEKAVYRWILDPADRDAVLANVAIKKLSPDHHVIVEISCTRSPEELLAVRRAYQARYKHSLEEDVAAHTKGDTRKLLVALVSAFRYDGEEINTRVANSEAKILHEAVKDKEFNHEEIIRILSTRSKMQLMATFNRYRDDHGTTITKNLEGDSGDEFLKTLRPTIRCLNDPKKYFEKVLRNSIRRVGTDEDAL

SEQ ID NO: 79275 - protein, 184 aa, Gossypium hirsutum
  Clone ID: LIB3543-031-Q1-K6-E1.pep
FAWADAWADAWVREEIGSEKKKATIDVPEQVSVLADAEALRKACKGWGTDEKAIISVLGHRNAVQRKQIRLAYEDLYQEDLIKRLESELSGDFEKAVYRWILDPADRDAVLANVAIKKLSPDHHVIVEISCTRSPEELLAVRRAYQARYKHSLEEDVAAHTKGDTRKLLVALVSAFRYDGGRNK

SEQ ID NO: 79276 - protein, 109 aa, Gossypium hirsutum
  Clone ID: LIB3196-016-P1-M1-C10.pep
MATLIAPEHTSAVEDAEKLQKACKGWGTDEKAIISVLGHRNAVQRKQIRLAYEDLYQEDLIKRLESELSGDFEKAVYRWILDPADRDAVLANVAIKKLSPDHHVIVEIS

SEQ ID NO: 79277 - protein, 86 aa, Gossypium hirsutum
  Clone ID: uC-gsflmaxxa028d09b1.pep
PAGDVQGPVGGIMIECGTDSPMEQVLSQDDAECCICLSAYEDGVELRELPCRHHFHCACVDKWLYINATCPLCKYNILKSSSQEEV

SEQ ID NO: 79278 - protein, 65 aa, Gossypium hirsutum
  Clone ID: uC-gsflnu33B140g07b1.pep
GADCKCGSGCNGCSMFPDIMEKTTTETIVLGVATQKMHFEGSEMEWLLGGITMMVLRVVCHPRSW

SEQ ID NO: 79279 - protein, 136 aa, Gossypium hirsutum
  Clone ID: uC-gsflnu33B138b07b1.pep
MSCCSGKCGCGADCKCGSGCNGCSMFPDIIEKTTTETIVLGVATQKMHFEGSEMGAGVAAMAFRLSNNLVGILNFITFLLSIPILGAGIWLSLEGVTECERFLDKPVIVIGVFLMLVSLAGLIDPCCRVTWLLLLY

SEQ ID NO: 79280 - protein, 92 aa, Gossypium hirsutum
  Clone ID: uC-gsflnu33B092g12b1.pep
YLLIVLGIVFTIFAFAVTNKGAGEALSGKGYKEYRLGDYSNWLQKRVTSQKNWNKIKSCLADSKDCSDFHYKFLNTSVSKFFHTHIFYPFVW

SEQ ID NO: 79281 - protein, 65 aa, Gossypium hirsutum
  Clone ID: uC-gsflnu33B057c07b1.pep
KSKGQLSFSPCWYSLPYLVLVHCLSFVVLILILRYNHYDDHICSGIYYLNKSWFNFKKKKKKKKT

SEQ ID NO: 79282 - protein, 54 aa, Gossypium hirsutum
  Clone ID: uC-gsflnu33B107g02b1.pep
CCICLSAYEDGVELRELPCRHHFHCACVDKWLYINATCPLCKYNILKSSSQEEV

SEQ ID NO: 79283 - protein, 78 aa, Gossypium hirsutum
  Clone ID: LIB3493-053-P1-M1-G5.pep
GLFTRGLPLRIVMIGTLTGAQWGIYDAFKVFVGLPTTGGVAPAPAAVEPAKAYNVGKQSNIGLLEWFVKLVERYSFLR

SEQ ID NO: 79284 - protein, 46 aa, Gossypium hirsutum
  Clone ID: LIB3148-037-Q1-K1-F3.pep
SNRIYLVKMTKATLLLFVVHFPQVQGLHLQLSPHGHPPSTPTGRVG

SEQ ID NO: 79285 - protein, 83 aa, Gossypium hirsutum
  Clone ID: LIB3165-014-P1-K1-F8.pep
MSRWSGKCGCGADCKCGSGCNGCSMFPDILEKTTTETIVLGVATQKMHFEGSEMGVGVEGVSPMGDDQNCALKDMGPRSSEVC

SEQ ID NO: 79286 - protein, 77 aa, Gossypium hirsutum
  Clone ID: LIB3272-042-P1-K1-F5.pep
MSCCSRKWGCGADCKCGNGCNGCSMFPDIIEKTTTETIVLGVATQKMHFEGSEMGVGVEVPFPLGDYLICYPWTCGM

SEQ ID NO: 79287 - protein, 52 aa, Gossypium hirsutum
  Clone ID: LIB3148-050-Q1-K1-G12.pep
LNKFYYFSMYQQIFMRIWFLIMCNVGFSAMSECIMIFKKVFFQLKEWQFLSL

SEQ ID NO: 79288 - protein, 81 aa, Gossypium hirsutum
  unsure (1)..(81): unsure at all Xaa locations
  Clone ID: uC-gsflnu33B085c02b1.pep
ALGLYKGIVPLWGRQIPYTMMKLASFEAIADMIYKYGIPTPKEHCIXIVHLDVSYGGGYDAGVTCNTVAYPDVNRVYLIHL

SEQ ID NO: 79289 - protein, 76 aa, Gossypium hirsutum
  Clone ID: uC-gsronu33B087g09b1.pep
MSCCSGKCGCGADCKCGSGCNGCSMFPDIIEKTTTETIVLGVATQKMHFEGSEMGVGVAAFFPLLLLLFFSFLSSL

SEQ ID NO: 79290 - protein, 200 aa, Gossypium hirsutum
  unsure (1)..(200): unsure at all Xaa locations
  Clone ID: GOSHI-09MAY01-C1909_2.pep
MATISKLSNPNPVASLSSSSKPRSSSSLKCFVGFPTRPGFCSKLVSSSSLSSINTHPFRGSLVVRCSLADGNGSSVKRTTLHDLYEKEGQSPWYDNLCRPVTHSPPLIASGVRGVTSNPPIFQKAISSSNAXYNDPYXKLGAYGKISXSAYWELVVNDIQDACILSEPFYDQTDXGDGYVSDEVSSRLADDTLWDLLFLP

SEQ ID NO: 79291 - protein, 442 aa, Gossypium hirsutum
  Clone ID: GOSHI-09MAY01-C1909_1.pep
MATISKLANPNPVASLSLSFKPRSSSSLKCFVGFPTRPAFSSKLVSSSSLSSINTHPFRGSLVVRCSLADGNGSSVKTTTLHDLYEKEGQSPWYDNLCRPVTDLLPLIASGVRGVTSNPAIFQKAISSSNAYNDQFRELVQSGKDIESAYWELVVKDIQDACKLFEPIYDQTDGGDGYVSVEVSPRLADDTNGTIEAAKYLHKVVDRPNVYIKIPATAPCIPSIKEVIANGISVNVTLIFSLARYEAVIDAYLDGLEASGLSDLSRVTSVASFFVSRVDTLIDKMLEMIGTPEALDLRGKAAVAQAALAYRLYQKKFSGPRWEALVKKGAKKQRLLWASTSVKNPAYPDTLYVAPLIGPDTVSTMPDQALQAFIDHGTVSRTIDANVSEAEGIYSALEKLGIDWGKVGSQLEDEGVESFKKSFDSLLDTLQEKANTLKFVIS

SEQ ID NO: 79292 - protein, 78 aa, Gossypium hirsutum
  Clone ID: LIB3272-018-P1-K1-H6.pep
LSFKPRSSSSLKCYVGFPTRPAFSSKLVSSSSLSSINTHPFRGSLLVRCSLADGNGSSEKTTTLHDLYEKEGQSPWYD

SEQ ID NO: 79293 - protein, 48 aa, Gossypium hirsutum
  unsure (1)..(48): unsure at all Xaa locations
  Clone ID: LIB3272-030-P1-K1-B4.pep
GCSIGRLKNRVPGISFLNRNMTIPSICLVIPWLKKFAGILDVLPHLXP

SEQ ID NO: 79294 - protein, 177 aa, Gossypium hirsutum
  Clone ID: GOSHI-09MAY01-C101902_1.pep
FWTSKRLPSQWTHHSIAPIEGTFGHLAPEYFMHGTVDEKTDVFAFGVFLLEIISGRKPVDASHQSLHCWAKPLLKREEMEKLVDPRLGGSYDISQLKRLAFTASLCIRASSAWRPTMNEVLEVLMEGETDKERWRMPEEEEQEEFWGFEDLEYECHTSFSLSPDDSLSTASSLREKN

SEQ ID NO: 79295 - protein, 173 aa, Gossypium hirsutum
  Clone ID: GOSHI-09MAY01-C1889_1.pep
TQNCDFGMARQYGSPLKPYTTKVVTQWYRAPELLLGAKKYSTAVDTWSVGCIMAELLAKEPLFKGTSEIDQLRKIFDTLGVPSEKIWPGFSELPGSKANYSKQPYNLLRKKFPAASFTGSAVLSDAGFDLLNRLLTYDPEKRITADDALNHDWFRELPLPKSKDFLPTFPPKV

SEQ ID NO: 79296 - protein, 104 aa, Gossypium hirsutum
  unsure (1)..(104): unsure at all Xaa locations
  Clone ID: GOSHI-09MAY01-C101852_1.pep
MTVLKRYVLRLFISLKYITANVVDRNNGRILATASTVEHSIKNSLECGRSCNAKAATVIGEVLAMRLKVEGLEQGQGRGIHVDVNKEVEKKXKNRTKVWAVVNA

SEQ ID NO: 79297 - protein, 180 aa, Gossypium hirsutum
  unsure (1)..(180): unsure at all Xaa locations
  Clone ID: GOSHI-09MAY01-C1819_1.pep
MSQGPKLYDNKPKKAQLKQFQHHQKGKEFPSTSSGAASYSMGXAAPPPPPQPPKESFARRYKFLWPLLLAVNFTLAAVLASGTKKKDTNLAEEDVDLSPPVSTTPVTAPPVTETPSPVSSITQPLKLPEPIPESQQRELFKYILEEKRKVKPKDPEEKKRLDEEKAILKQFIRAKSIPQL

SEQ ID NO: 79298 - protein, 143 aa, Gossypium hirsutum
  Clone ID: LIB3147-035-Q1-K1-F6.pep
KLVTGKLRAMLQRSDEQVRSLKKQSTFLSQLAAKTIPNAIHCLSMRLTIEYYLLPLEKRKFPRSENLENPNLYHYALFSDNVLAASVVVNSTIMNAKDPSKHVFHLVTDKLNFGAMNMWFLLNPPGKATIHVENVDEFKWLNS

SEQ ID NO: 79299 - protein, 39 aa, Gossypium hirsutum
  Clone ID: LIB3147-035-Q1-K1-F4.pep
YGSEPAIAVLNIVTDKLNFGALNMWFLLNPTGKATIHVE

SEQ ID NO: 79300 - protein, 204 aa, Gossypium hirsutum
  unsure (1)..(204): unsure at all Xaa locations
  Clone ID: GOSHI-09MAY01-C1839_3.pep
DSFVHAVAENLVHRLEDCKKTFPTALCLGSSLQAVRQMLRGRGAIQKFIMMDTSYDMLKLCESSQLGSGNENIDTSYVVGDEEFLPIKESSLDLVIMXLGLHCTNDLPGAMIQCKLALKPDGLFLAAILGGETLKELRIACTVAQMEREGCISPRVSPLAQVKDAGNLLTSAGFALPGVDVDEYVVRYKSALDLIRHLRAMSEN

SEQ ID NO: 79301 - protein, 315 aa, Gossypium hirsutum
  unsure (1)..(315): unsure at all Xaa locations
  Clone ID: GOSHI-09MAY01-C1839_2.pep
MRRFLFSQTSCSLLRRQRRPKDIPHRWFLSSASFSTAEYDDGDAFQSSPSKVKIFDRHLKRTQRDRAAWLLRPNDSFVHAVAENLVDRLEDCKKTFPTALCLGGSLQAVRQMLXGRGAIQKFIMMDTSYDMLKLCKSSHLGSGHENIETSYVVGDEXFFQILTDCILDLVISCLGLHWTNDLPGAMIQCKLALKPDGLFLAAILGGETLKELRIACTVAQMEREGGISPRVSPLAQVRDAGNLLTRAGFALPGVDVDEYVVRYNSALDLIEHLRAMGETNALLQRTNILKRETALATAAYDSMFAAEDGTIPATF

SEQ ID NO: 79302 - protein, 322 aa, Gossypium hirsutum
  Clone ID: GOSHI-09MAY01-C1839_1.pep
MRRFLFSQTSCSLLRRQRRPKDIPHRWFISSTSFSTAEYDDSDAFQSSPSKVKIFDRHLKRTQRDRAAWLLRPNDSFVHAVAENLVDRLEDCKKTFPTALCLGGSLQAVRQMLRGRVDLVISCLGLHWTNDLPGAMIQCKLALKPDGLFLAAILGGETLKELRIACTVAQMEREGGISPRVSPLAQVRDAGNLLTRAGFALPGVDVDEYVVRYKSALDLIEHLRAMGETNAILQRTNILKRVTALATASIYDSMFAAKDGTIPALYQVIDMTGWREHPSQQKSKRRGSASISFKDIQSNLEMGVNLYVCVPVFVYLCKEYVK

SEQ ID NO: 79303 - protein, 138 aa, Gossypium hirsutum
  Clone ID: GOSHI-09MAY01-C1829_1.pep
MHHPQPHISSSTSTSFPAAAEFDFKPAKRRGSYNCGRCGLPKKGHVCHLNSTTYPTSISTPTSSPSAITVENSSSASRPPPLRQSYTHLRRALSFDDIDTRADSPARDLDESNSPYPGTDLDPDNEMISGGLPAGCLW

SEQ ID NO: 79304 - protein, 211 aa, Gossypium hirsutum
  Clone ID: GOSHI-09MAY01-C1589_1.pep
RIESGDGERDSFSDSLSDESESDKLWRWDGCSSEDGGSEHDSLWHVNNRLGYLYFQYFERSTPYGRVPLMDKINGLSRRYPGLMSLRSVDLSPASWMAVAWYPIYHIPMGRTIKDLSTCFLTYHTLSSSFQDMDLEDDIENPERKRKEGEGISLPPFGLATYKMQGNVWVSGNSGRDQERLVSLLSVADSWLKQLRVQHHDFNYFTGIRRG

SEQ ID NO: 79305 - protein, 216 aa, Gossypium hirsutum
  unsure (1)..(216): unsure at all Xaa locations
  Clone ID: GOSHI-09MAY01-C1519_1.pep
DGKIHLCKSWLSSSSPELISVSPLAVVSGQETSLLVRGRNLTNPGTEIHCAYMGGYSSMQINGSTYKGASYDEVNMGSFKIQVPSPKALSRCFIEXENGFKGNSSPIIIADAAICKELRLLESELDTEAKASDIISEEHAYDSHRPRSMEEVLHFLNELGWLFQRSTAPLPKSSDHSLRRFKFLLMVSXESDYCALVKVLFDMLVESNLDMNDLSK

SEQ ID NO: 79306 - protein, 172 aa, Gossypium hirsutum
  unsure (1)..(172): unsure at all Xaa locations
  Clone ID: GOSHI-09MAY01-C101502_1.pep
GLVYLHHEXHVIHGHIKPSNLLVNXNGEVKIADFGLSTLVASSMDQTDTFVGTDNNYMSPERISGSTYDYSSGIWSLGMVALECAIGRYPYKQSEDPQTWPSIDELLKPNAPPNEFSSEFCSFVSACLQTSPEKRASSLALLSPPFIKKSQPFTLVYFVGWLESPLNYPRRR

SEQ ID NO: 79307 - protein, 315 aa, Gossypium hirsutum
  unsure (1)..(315): unsure at all Xaa locations
  Clone ID: GOSHI-09MAY01-C1499_1.pep
MACNDENEPLLSGLATPRTQKTNGDRPKKRRFRRVRSAPFADFVPTDGNREAAVPRSGSIFGRLNPSLKKVALFLTLYMGLGTICFYTTRTQIKGDKTNGILDALYFCVVTMTTVGYGDLVPNSDLAKLLACAFVFTGMALVGLVLTKAADYLAEKQEILLVKALHMNQKVGELHVLKEIETNRVAHVFFTSLIILGGLILSGTIFLYEVENLGLVDSFYCVCSTITTLGYGDKSFSTEGGRIFAVFWILASTICLAQFFLYVAEVNTENRQRALVKWVLGRRTTNVDLEAADIDDNXSVGAAEFVLFKRKDTEK

SEQ ID NO: 79308 - protein, 74 aa, Gossypium hirsutum
  Clone ID: GOSHI-09MAY01-C1459_2.pep
LGPTRVPPPSPQIPIPRRVLQQSCASLPVTSSRIVQASIPNRFTSAIVKAPTSLGSFKIIFKPFWLEVFMSSQY

SEQ ID NO: 79309 - protein, 150 aa, Gossypium hirsutum
  Clone ID: GOSHI-09MAY01-C1459_1.pep
MATVRVTSSSIVQASIPNRFTSAIVKAPTSLGSFKNISKPFGLKCSSNHKTFMAAYKIKLVGPDGEVSEFQAPDDQYILDAAEEAGVELPYSCRAGACSTCAGKMVSGSVDQSDGSFLDEKQIADGYVLTCVSYPTSDCEIHTHKEADLY

SEQ ID NO: 79310 - protein, 112 aa, Gossypium hirsutum
  Clone ID: GOSHI-09MAY01-C1449_8.pep
MSDLDIQIPTAFDPFADANAEDAGAGAKEYVHIRIQQRNGRKSLTTVHGLKKEFSSRSILKDLKKEFCCYGTVVQDPQLGKVIQLLGDQRKNVSTFLVQAGIAKTDRITIHG

SEQ ID NO: 79311 - protein, 84 aa, Gossypium hirsutum
  Clone ID: GOSHI-09MAY01-C1449_6.pep
SKEERLHFSCSGYCHHHLVFLYIFLKLVYASDINVDMLCEYDSIEHTCVDTRSLVSVRLYKFLILYVLYEQAGIVKDNIKIHGF

SEQ ID NO: 79312 - protein, 111 aa, Gossypium hirsutum
  Clone ID: GOSHI-09MAY01-C1449_3.pep
MSDLDIQIPTAFDPFADANAEDSGAGTKEYVYIRIQQRNGRKSLTTVQGLKKEFSYNKILKDLKEFCCNGTVVQDPELGQVIQLQGDQRKNVSLFLVQAGIVKDNIKIHGF

SEQ ID NO: 79313 - protein, 113 aa, Gossypium hirsutum
  Clone ID: GOSHI-09MAY01-C1449_2.pep
MSDLDIQIPTAFDPFADANAEDAGAGAKEYVHIRIQQRNGRKSLTTVQGLKKEFSYNKILKDLKKEFCCNGTVVQDPELGKVIQLQGDQRKNVSTFLVQAGIVKKDSIKIHGF

SEQ ID NO: 79314 - protein, 113 aa, Gossypium hirsutum
  Clone ID: GOSHI-09MAY01-C1449_1.pep
MSDLDIQIPTAFDPFADANAEDSGAGAKEYVHIRIQQRNGRKSLTTVQGLKKEFSYNKILKDLKKEFCCNGTVVQDPELGQVIQLQGDQRKNVSTFLVQAGIVKKDNIKIHGF

SEQ ID NO: 79315 - protein, 52 aa, Gossypium hirsutum
  Clone ID: uC-gsronu33B143e05b1.pep
MSDLDIQIPTAFDPFADANAEDSGAGTKEYVYIRIQQRNGRKSLTTVQGLKK

SEQ ID NO: 79316 - protein, 146 aa, Gossypium hirsutum
  Clone ID: LIB3583-012-P1-K1-D6.pep
SILPISLLSPRSSTRERSPYSCRTHSHTHSLNGSSHPNIKIGTGFDPQGDANAEDSGAGAKEYVHIRIQQRNGRKSLTTVHGLKKEFSYNKILKDLKKEFCCNGTVVQDPELGQVIQLQGDQRKNVSTFLVQAGIVKKDNIKIHGF

SEQ ID NO: 79317 - protein, 104 aa, Gossypium hirsutum
  Clone ID: LIB3543-019-Q1-K1-B10.pep
MSDLDIQIPTAFDSGAGAKEYVHIRIQQRNGRKSLTTVQGLKKEFSYNKILKDLKKEFCCNGTVVQDPELGQVIQLQGDQRKNVSTFLVQAGIVKKDNIKIHGF

SEQ ID NO: 79318 - protein, 50 aa, Gossypium hirsutum
  unsure (1)..(50): unsure at all Xaa locations
  Clone ID: LIB3145-046-Q1-K1-B11.pep
MLLDPFADANAEDAGAGAKEYVHIRIQQRNGRKSLTTVXGLKKEFSYNKI

SEQ ID NO: 79319 - protein, 216 aa, Gossypium hirsutum
  Clone ID: GOSHI-09MAY01-C1479_2.pep
MRLIKGIANFRRLYANSIDLNTKSYLSTTKRAFCRPSEYAKVVNTTITCSPFYCTNNLGSRSHSSRPEMEGIEHRVIKANGINIHVAEKGKGPVILFLHGFPELWYTWRNQITAFASLGYRALAPDLRGFGETEAPDDASTYNSLHVVGDLIALLDVVAADQDQVFVVGHDWGALIAWWLCMFRPDRVKALVNMSVAFNPRNPNMKPLEGLRALYG

SEQ ID NO: 79320 - protein, 163 aa, Gossypium hirsutum
  unsure (1)..(163): unsure at all Xaa locations
  Clone ID: GOSHI-09MAY01-C1479_1.pep
MRLIQGIANFRRLYANSIDLNTKSYLSTTKRAFCRPSEHAKVVNTTITCSPFYCSNNLGSRSHSSRPEMEGIEHRVIKANGINIHVAEKGKGPVILFLHGFPELWYTWRHQITAFASLGYRALAPDLRGFGETEAPDDAFTYNSLHVVGXDLIALLDDVYVVS

SEQ ID NO: 79321 - protein, 139 aa, Gossypium hirsutum
  unsure (1)..(139): unsure at all Xaa locations
  Clone ID: GOSHI-09MAY01-C1419_8.pep
MAEKSKVLIIGGTGYLGKFIVEASAKEGHPTFVFVRESTASHPVXGKLVDNFKNLGVHLLFGDMYHHESLVKAIKQVDVVISVVGQMQLSDQVKIIAAIKEAGNVKRFFPSESGMDVDKNNAVEPAKSTFAIKAQIRHA

SEQ ID NO: 79322 - protein, 194 aa, Gossypium hirsutum
  unsure (1)..(194): unsure at all Xaa locations
  Clone ID: GOSHI-09MAY01-C1419_5.pep
PRVRPRVRPRVRFIFYCCVMQGDMCDGESLVKAIKQVDVVISVVGQMQLSVLVKIIAAIKEAGNVKRFFPSEFGMDVDKNNAVEPAKSTFAIKAQIRXAVEAEGIPYTYVPAYCWAGYFLPTLXQPVSHLSPQETRVVILGDGNPXACFSTHEADIGTYTIKAVDDPRTANKTLFIRPAKNTYSFNELIALWRS

SEQ ID NO: 79323 - protein, 161 aa, Gossypium hirsutum
  Clone ID: GOSHI-09MAY01-C1419_3.pep
LLFITSPENPPTELPLLVRETQPVPRVGVVLFVLKGKSVLLGRRRASIGESTFALPGGHLEFGESFEECGARELMEETGLEMGKADFLTVTNKVFLDKSKHCHYVIVFLRAVLADPNQVPQNPEPDKCDGWDWYDWDNLPQPLFSTLDEMVRSGFNPFPST

SEQ ID NO: 79324 - protein, 240 aa, Gossypium hirsutum
  Clone ID: GOSHI-09MAY01-C1419_2.pep
MAGKSKVLVIGGTGYIGKFIVEASVKEGHPTFAFVREGSVSDPVKGKVINNFKNLGVHLLYGDLYDHESLVKAIKQADVVISAVGSMQLADQVKIIAAIKEAGNVKRFFPSEFGNDVDRVHAVEPAKTAFATKAQIRRAIEAEGIPYTYVSSNCFAGYFLPGLSQPGATTPPRDKLVIPGDGDPKEATFPYKCGLAIRHSVFVRGDHTHFEIEPSFRVEASELYPDVKYTTCEEYLSRLV

SEQ ID NO: 79325 - protein, 308 aa, Gossypium hirsutum
  Clone ID: GOSHI-09MAY01-C1419_1.pep
MAEKSKVLIIGGTGYLGKFIVEASAKEGHPTFVFVRESTVSDPVKGKLVDNFKNLGVHLLLGDMYDHESLVKAIKQVDVVISVVGQMQLADQVKIIAAIKEAGNVKRFFPSEFGMDVDKNNAVEPAKSTFAIKAQIRRAVEAEGIPYTYVPANCFAGYFLPTLSQPGATSPPRDKVVILGDGNPEAVFNHEADIGTYTIKAVDDPRTANKTLFIRPPKNTYSFNELIALWEKLIGKTLEKTYVPEDQLLKQIQESPIPINIMLAISHSIFVNGDCTNFEIDPSFGYEASELYPQVKYTTVEEGLSHFV

SEQ ID NO: 79326 - protein, 66 aa, Gossypium hirsutum
  Clone ID: uC-gsronu33B154b04b2.pep
PSFPPTRTAKEGHGTFVFVREGTISDPVKGKLVDNFKNLGVHLLLGDMYDHESLVQALKQVDVVIS

SEQ ID NO: 79327 - protein, 88 aa, Gossypium hirsutum
  unsure (1)..(88): unsure at all Xaa locations
  Clone ID: LIB3828-031-Q6-K6-E11.pep
FXITRXXYDSXXLVSNQXRLRXIPXXSSIXFTSXGTXLRKTSTXXMTPFDSQSXGMIXPPHKXTENXLIXXIXXHCKWKXVSXXLTXV

SEQ ID NO: 79328 - protein, 113 aa, Gossypium hirsutum
  Clone ID: LIB3829-033-Q1-N6-H9.pep
TYTIKAVDDPRTLNKILYIRPPKNTYSFNEIVALWEKLIGKTLEKTYVPEDQLLKQIKEATFPYSVGLAIRHSVFVRGDHTNFEIEPSFGVEASELYPDVKYTTVEEYLSRLV

SEQ ID NO: 79329 - protein, 71 aa, Gossypium hirsutum
  Clone ID: LIB3585-061-P1-K1-E8.pep
VSHFRPLLVRPEQGNDPFCDCLCSQLCKGLLCIGLLKNVSQITRAVFCLHRCSVAAKAELLPPSLAATLMS

SEQ ID NO: 79330 - protein, 137 aa, Gossypium hirsutum
  Clone ID: LIB3585-055-P1-K1-D10.pep
RNSWRAEKSKVLIIGGTGYLGKFIVEASAKEGHPTFVFVRESTVSDPVKGKLVDNFKNLGVHLLLGDMYDHESLVKAIKQVDVVISVVGQMQLSDQVKIIAAIKEAGNVKRFFPSEFGMDVDKNNAVEPAKSTFAIK

SEQ ID NO: 79331 - protein, 128 aa, Gossypium hirsutum
  unsure (1)..(128): unsure at all Xaa locations
  Clone ID: LIB3584-004-P1-K1-B12.pep
PASGFYRGGDVAVAEXSKGLIIGGTGYLGKFIVEASAKXGHPTFVFVRESTVSDPXKGKXGAXFXNLXVHLLLGDMYDHESLVKAIKQVDVVISVVGLMPXADHVKILAASSRAGCVXCFFPSAFGLV

SEQ ID NO: 79332 - protein, 70 aa, Gossypium hirsutum
  Clone ID: LIB3585-042-P1-K1-D2.pep
NCLDCSTVPGLVNSKYYASTASFTITTSTWRVHSTKVASYGFNYIKVVAANLIYSDVRYYVEAKLEYKTN

SEQ ID NO: 79333 - protein, 204 aa, Gossypium hirsutum
  Clone ID: GOSHI-09MAY01-C1439_1.pep
MEKETNQENPSLLSNNNISITKENSSPKKHPGNTAAAGGGDRLKRDEWSEGAVSSLLEAYENKWVLRNRAKLKGHDWEDVARYVSARANCTKSPKTQTQCKNKIESMKKRYRSESATADGSSWPLYPRLDLLLRGSTAPPPPPLLPPQLQPSAVPQAATPISTNPPFMTLPEPSMMVVLQQQHPPPPPPHLAPQLPGTTQNSHD

SEQ ID NO: 79334 - protein, 64 aa, Gossypium hirsutum
  Clone ID: GOSHI-09MAY01-C1779_1.pep
KVISNFFISFDWFAILARTHEEGPESTPMKAQTSQRCIDVGEGRAVLKICLNLQNLFHFFERIA

SEQ ID NO: 79335 - protein, 182 aa, Gossypium hirsutum
  Clone ID: GOSHI-09MAY01-C1769_9.pep
MIAAGSVVPKLKLKIKFPSQKIEDQSFEWGQQLSSSFDGKKTSPAGNSKETSTAHKREPEGMNVGGPPEKRREMDRCMTQQGSALPHQPGFNMKGGKSKSDATSAKLSVKSKAGKKSGKAAKDPNMPKRPASAFFVFMEEFREQYKKDHPTNKSVAAVGKAGGDKWKSLSEAEKAPYVAKAE

SEQ ID NO: 79336 - protein, 104 aa, Gossypium hirsutum
  unsure (1)..(104): unsure at all Xaa locations
  Clone ID: GOSHI-09MAY01-C1769_8.pep
KPQSKREEFREQYKKEHPKNKSVAAXVGKAGGDKWKSLSEAEKRPYVDKAEKRKVEYEKNMEAYNKRQAEGPQEDEEESEKSVSEVNDEEEDDDEGSGDEEDDE

SEQ ID NO: 79337 - protein, 70 aa, Gossypium hirsutum
  Clone ID: GOSHI-09MAY01-C1769_7.pep
HSHNHTNQQHPRHIYINTPVKSHWSKQQNYKRGQQQDQIIGLILYKGIYLSHSTLNQKVHMEADYPIYNY

SEQ ID NO: 79338 - protein, 141 aa, Gossypium hirsutum
  Clone ID: GOSHI-09MAY01-C1769_6.pep
MKGGKSKSDTKGSRLAVNKKSSAKAGKKSGKAAKDPNKPKRPASAFFVFMEEFREQYKKEHPKNKSVAAVGKAGGDKWKSLSDAEKAPYIAKAEKPKVEYEKNMKAYTKRQAEAPKEEESESEMSVSEVNDEEDEDDEEGS

SEQ ID NO: 79339 - protein, 146 aa, Gossypium hirsutum
  Clone ID: GOSHI-09MAY01-C1769_4.pep
MKGGKSKSDAKSAKLSVNKKSTTKAGKKSGKAAKDPNKPKRPASAFFVFMEEFREQYKKEHPKNKSVAAVGKAGGDKWKSLSEAEKRPYVDKAEKRKVEYEKNMKAYNKRQAEGPQEDEEESEKSVSEVNDEEEDDDEGSGDEDDE

SEQ ID NO: 79340 - protein, 148 aa, Gossypium hirsutum
  Clone ID: GOSHI-09MAY01-C1769_3.pep
MKGGKSKSDTKSSRLAVNKKSSAKAGKKSGKAAKDPNKPKRPASAFFVFMEEFREQYKKEHPKNKSVAAVGKAGGDKWKSLSDAEKAPYIAKAEKRKVEYEKNMKAYTKRQTEAPKEEESESEKSVSEVNDEEDEDDEEGSGEEEDDD

SEQ ID NO: 79341 - protein, 60 aa, Gossypium hirsutum
  Clone ID: GOSHI-09MAY01-C1769_2.pep
RPKMDRCMTQQCSALLKALMKHPAGWVFNQPVDPKALQIPDYLSIIKNPMVLGTIKFKLG

SEQ ID NO: 79342 - protein, 142 aa, Gossypium hirsutum
  Clone ID: GOSHI-09MAY01-C1769_1.pep
MKGGKSKSDTKSAKLSVKSKAGKKSGKAAKDPNKPKRPASAFFVFMEEFREQYKKDHPKNKSVAAVGKAGGDKWKSLSEAEKAPYVAKAEKRKVEYEKNMKAYNKRQAEGPKDEDVESDKSVSEVNDEDDDEEGSGDEEDDE

SEQ ID NO: 79343 - protein, 74 aa, Gossypium hirsutum
  Clone ID: LIB3543-039-Q1-K1-E10.pep
KKGAPKKRKNGASPGKENWDPKKPPPLFFFFFFFFFFFFFFFFFFFFFFFFFFFSLPPFFFFFFFFFFLPIYNY

SEQ ID NO: 79344 - protein, 76 aa, Gossypium hirsutum
  unsure (1)..(76): unsure at all Xaa locations
  Clone ID: LIB3145-051-Q1-K1-B2.pep
KXYDVACLCFVCLYLYFFLFFFFFFFSQKDLSKPFNFKSKSTYRSRLSHLRALIITRSKGTDRLQRHISPLYGMRI

SEQ ID NO: 79345 - protein, 78 aa, Gossypium hirsutum
  Clone ID: LIB3135-006-Q1-K1-D10.pep
MKGGKSKSDTKSSMLAVIKKSIAKAGNKILNAVYDPNKPKRPAKAFFIFMEEFPVQYINEHPKNKIFAYCVQNSMNKN

SEQ ID NO: 79346 - protein, 104 aa, Gossypium hirsutum
  unsure (1)..(104): unsure at all Xaa locations
  Clone ID: uC-gsflmaxxa091f10b1.pep
MKGGKTKSDTKSAKLSVKTKAGKKSGKAAKDPNKPKRPARALHXCKEEFREQYKKEHPKNKSVGDDGKAGGEKRKSLPEAHKAPKGANAKKAEGGYEKNHEGPP

SEQ ID NO: 79347 - protein, 50 aa, Gossypium hirsutum
  Clone ID: LIB3083-065-Q1-L1-E3.pep
MKGGKSKSDTKGSRLAVNKKSSAKAGKKSGKAAKDPNKPKRPASAFFVFM

SEQ ID NO: 79348 - protein, 84 aa, Gossypium hirsutum
  unsure (1)..(84): unsure at all Xaa locations
  Clone ID: LIB3493-022-P1-M1-H11.pep
MKGGKSKSDTKGSRLAVNKKSSANSGKKSFYAVNVANKPKRPASAFFVFMEEFREQYMKEHPXIKSVPARGKAGGDKWNSLFFA

SEQ ID NO: 79349 - protein, 77 aa, Gossypium hirsutum
  Clone ID: LIB3148-054-Q1-K1-D7.pep
NQGPGKKFWFPNRPPLYFLFFLFFIFVLFYFSSFFFFFFFFFFFFFFFFFFYKKDLCKPFNFKSKVHIEADYPIYNY

SEQ ID NO: 79350 - protein, 78 aa, Gossypium hirsutum
  Clone ID: GOSHI-09MAY01-C1709_1.pep
SFATAYETKYKKKVSKGKRLILFLKLRNPCLLRGNRSLDEDCSQSRENFANLGPVRARLSPRLTSSVEYGDEGTVVKL

SEQ ID NO: 79351 - protein, 66 aa, Gossypium hirsutum
  Clone ID: GOSHI-09MAY01-C101712_1.pep
MQATQGSNEAKMDRNSRRLMIGSPAPTCPFNECRGCKYKCRAEQVPVEGNDPINSAYPYKCVCHRS

SEQ ID NO: 79352 - protein, 199 aa, Gossypium hirsutum
  Clone ID: GOSHI-09MAY01-C1729_1.pep
VAWADAWADAWGFHEGVGRLISRAVSQRQTCRSVAPSELISRRLMFSSSRTPSLLAVGNPSSVLSSNSESLASLPSLKWNHFIGQRRSMFIQTQSTPNPSSLMFYPGKAVMEVGSADFPNARSAMTSPLAKALYGIDGITRVFFGSDFITVTKSDDASWDLLKPEIFAAFVGFLSSGQPLFLDSKTASSMDTAIHEDDS

SEQ ID NO: 79353 - protein, 249 aa, Gossypium hirsutum
  Clone ID: GOSHI-09MAY01-C1699_1.pep
MARYDRAITVFSPDGHLFQVEYALEAVRKGNAAVGVRGTDIVVLGVEKKSAAKLQDSRSVKKIVNLDDHIALACAGLKADARVLINRARIECQSHRLTVEDPVTVEYITRYIAGLQQKYTQSGGVRPFGLSTLIVGFDPYSGVPALYQTDPSGTFSAWKANATGRNSNSIREFLEKNYKETSGQETIKLAIRALLEVVESGGKNIEVAVMTKEHGLRQLEETEIDAIAAEIEAEKEAAEAAKKAPPKEK

SEQ ID NO: 79354 - protein, 133 aa, Gossypium hirsutum
  Clone ID: GOSHI-09MAY01-C1689_1.pep
ASSSVLSKLLLPLFLTHIAVSISKTEAQVEDTRSKLVRDAFEWPLSMSFQGDLHDNEEGDEEVDDEVENGYSGRSLLWWKRMRYYISYGALSANRIPCPPRAGRSYYTHNCFKARGPVHPYTRGCSRITRCRR

SEQ ID NO: 79355 - protein, 97 aa, Gossypium hirsutum
  Clone ID: GOSHI-09MAY01-C1619_1.pep
MAKRLIPSFSRVLVEKIIPPSKTTSGILLPEKTSKLNSGKIVAVGPGARDKDGKFIPLNLKEGDTVLLPEYGGTEIKLGEKEYHLYRDDDILGTLHE

SEQ ID NO: 79356 - protein, 78 aa, Gossypium hirsutum
  Clone ID: GOSHI-09MAY01-C1199_4.pep
HNYSGIGPVPGDIPEVEAYCGTVCAAGGQVTEEGLKWLIDRGFKTIVDLRAETVKDNFYQSALDDAILSEKVDFLFCI

SEQ ID NO: 79357 - protein, 281 aa, Gossypium hirsutum
  Clone ID: GOSHI-09MAY01-C1199_1.pep
NGGACTSITTTIPADASKTKKADEKADYMNLPFPIPFEEIHREALMSLKPETFEGLRFDFTKGLNQKFSLSHSVSMGPTEIPSQSAETIKIPTSHYEFGANYIDPNLMLIGRVLTDGILNAIMKWDLTDNLTVKANAHLTNEPHMSHGMVNFDYKGKDYRSQFQMGNGALFGASYIQSVTPHLSLAGEVFWAGQHRKSGLGYAARYETDKMVAAGQVASTGMVALSYVQKVSEKVSLASDFMYNYMTRDVTASVGYDYILRQCRLRGKIDSNGCTTAYLEE

SEQ ID NO: 79358 - protein, 166 aa, Gossypium hirsutum
  unsure (1)..(166): unsure at all Xaa locations
  Clone ID: LIB3582-031-P1-K1-G12.pep
HASDSSLIRLIYQIIIPRNGLRITHSTTDVIAKFFPRQFYPVFLHPLTANSVVVVKVVPPSILSLRIVDSSPTRSPPPQSCLISFEISVKGLELLNKYIGASKQTVQEIFXFFDXFDSITPKRLHDNTRVTDRVVNQVSIFLLAAFYYFALTFYVFLIVILLSNNS

SEQ ID NO: 79359 - protein, 55 aa, Gossypium hirsutum
  Clone ID: LIB3585-021-P1-K1-B11.pep
MGNSALFGASYIQWIGPVPGDILEVEAYCRIFRATERLHTTVMETPCNPLTGECS

SEQ ID NO: 79360 - protein, 97 aa, Gossypium hirsutum
  unsure (1)..(97): unsure at all Xaa locations
  Clone ID: LIB3493-022-P1-M1-C6.pep
MAGLVPPGTSSDACKPAHSKADEKTDYMNLPCPIPYEELHREALMSLKPETFEGLRFDFTKGLNQKFSLSHSVFMGPTXIPSQSAETIKXPTAHYEI

SEQ ID NO: 79361 - protein, 130 aa, Gossypium hirsutum
  unsure (1)..(130): unsure at all Xaa locations
  Clone ID: LIB3149-031-Q1-K1-F11.pep
SEMKRCCESLNVALNNYLTPDDYLSLHVWRKSQRLKNACYDLGCPRKNYHSCHTLFANXQSFCWSTSKEEVESKDCEIEFWRGGQVTEEGLKWLIDRXFKTIVDLRAETVKDNFYQSTLDDAFLSEKVDF

SEQ ID NO: 79362 - protein, 242 aa, Gossypium hirsutum
  unsure (1)..(242): unsure at all Xaa locations
  Clone ID: GOSHI-09MAY01-C1159_1.pep
MKMKSLYLISVSQLSNMAVSSLVRNLPFLRSLTIAKCNGLQSLQIKETQGLHKLVVLDCPQLQSLSFEGCCLNYFRYGGHLVSFRFELYRKCNSSGGFHIRDRGLPQEDAMLDLRQCPLTEWTWDFKPSFSPYYHGLLDLERNDCECANKYKCFDSLLRTINGFRSLTICRWFFETSMCKKLPFSSRDPLFCLRKLKELWWIDCSMERESINALLCFLKLCPXLERLYITIDPKCYDMPSTA

SEQ ID NO: 79363 - protein, 263 aa, Gossypium hirsutum
  unsure (1)..(263): unsure at all Xaa locations
  Clone ID: GOSHI-09MAY01-C1149_1.pep
CIAAYEATGNQIHLTLERGLPSMSGDFISTHLPYPSLSFDTVHCAQCGIVWDKKQGIFLIEIDRVLKPGGYFVLTSPTSKPQGSSTSMKKRNMLTPLEQYTEKICWSLIAQQDDTFIWQKTADAHCYSSNKKNDVPLCKEGYDAPYYQALVPCISGTSSKRWIPIQNRSSSSDLSSAELEVHGVSPEDFFEDLQVWKLALKNYWSLLTPLIFSDHPKRPGDEDPLPPFNMVRNVMDMNAHYGGLNAAFLEEXSVWVMNVVPVR

SEQ ID NO: 79364 - protein, 97 aa, Gossypium hirsutum
  unsure (1)..(97): unsure at all Xaa locations
  Clone ID: LIB3196-036-P1-M1-B10.pep
QFPEKICWSLIAQQDETFIWQKTVDAQCYSSRKQNDVPLCKGHDASYYQALSPCIIGPSSKXWIPIQNRSSSSELSSAELALHGVSLEDFFEDLQGA

SEQ ID NO: 79365 - protein, 266 aa, Gossypium hirsutum
  Clone ID: GOSHI-09MAY01-C1179_2.pep
MAEKVTVMVLKVDLQCWRCYKKVKKVLCKFPQIRDQIYDEKTNTVTITVVCCNPEKLRDKICCKGAGSIKSIEIKPPPPPPKPKEPEKPKEPEKPKEPEKPKEPEKPKVPEKPKEPEKPKAPEKPKEPEKPKEPGKPKQPEKPKEPEKPKEPEKPKQPEKPKEPEKPKEPEKPKEPPPPPPPKVPEPCPPPPMAYPPIGCCCTECYHGVGGGPCYYGGPPPPLRPCYGTYGRPVYDSWGGGGGYSYCYTSRGECFSDENPNACSIM

SEQ ID NO: 79366 - protein, 245 aa, Gossypium hirsutum
  Clone ID: GOSHI-09MAY01-C1179_1.pep
MAEKVTIMVLKVDLQCWRCYKKVKKVLCKFPQIRDQIYDEKANTVTITVVCCNPEKLRDKICCKGAGSIKSIEIKPPPPPPKPKEPGKPKEPEKPKEPEKPKVPEKPKEPEKPKAPEKPKEPEKPKEPEKPKQPEKPKEPEKPKEPEKPKEPPPKPPAPAPKVPEPCPPPPMAHPPIGCCCTECYHGVGGGPCYYGGPPPPLRPCYQTYGRPVYDSWGGGGGYSYCYTSRGECFSDENPNGCSIM

SEQ ID NO: 79367 - protein, 129 aa, Gossypium hirsutum
  unsure (1)..(129): unsure at all Xaa locations
  Clone ID: LIB3584-025-P1-K1-D5.pep
PTRPVFLRTREIRDQIYDEXGNYLTITVVCCNPEKLRDKICCKGAGSIKSIEIKPSPTSSKPKEPGKPKEPEMPKEPEKPKVPXKPKEPEKPKAPEKPKELRXPKEPVKPKQPVKPXELEMPKEPEKLK

SEQ ID NO: 79368 - protein, 90 aa, Gossypium hirsutum
  Clone ID: LIB3146-040-Q1-K1-G4.pep
HASAHAFEHFYLTPLSRSRRTHRLAHIHAPQTPFHPCVNKTENTPPLRPCYQTYGMPVYDSWGGCCRYSYCYTSRGECFSDENPNVGLIM

SEQ ID NO: 79369 - protein, 71 aa, Gossypium hirsutum
  Clone ID: LIB3585-001-P2-M1-B4.pep
VTVMVLKVDLQCWRCYKKVKKVLCKFPQIRDQIYDEKTNTVTITGVCCNPEKLRDKICCKGAGSIKSIGIK

SEQ ID NO: 79370 - protein, 222 aa, Gossypium hirsutum
  unsure (1)..(222): unsure at all Xaa locations
  Clone ID: GOSHI-09MAY01-C1169_1.pep
MFGRAPKKSNNTRYYEILGVSNNASQDDLKKAYKKAAIKNHPDKGGDPEKFKELAQAYEVLSDPEKREIYDQYGEDALKEGMGGGAGAHDPFDIFSSFFGGSPFGGGSSRGRRQRRGEDVVHPLKVSLEDLYLGTSKKLSLSRNVICSKCNGKGSKSGASMTCPGCQGSGMKVSIRQLGPSMIQXMQHPCNECKGTGXINDKDRCPQCKGEKVVQEKEKFEV

SEQ ID NO: 79371 - protein, 96 aa, Gossypium hirsutum
  Clone ID: LIB3189-026-P1-K1-B8.pep
LEPSLFSLNLSHPLNNLSYKVYPKPKSFPSSNLSDSFFFLWPPKHLFFFSYFHSTINSTFFFTFFIFLYFYLLSLYIFLLFFLIFFLIPYSYLYIP

SEQ ID NO: 79372 - protein, 144 aa, Gossypium hirsutum
  Clone ID: GOSHI-09MAY01-C1119_1.pep
RDEVITVGSIFASTVLRGIKFLENHWHELCYDIKTGRLSDWITDSGCRNAASLVMKPNPEQAGLIENICNCKSWEGIVRKLWPKARYIGCVCTGVMRQYTAELEFYCRGLPLVSASYACSEAICGINLEPLCKPCDVSYTFLPN

SEQ ID NO: 79373 - protein, 129 aa, Gossypium hirsutum
  Clone ID: GOSHI-09MAY01-C1109_3.pep
QRTLKMERMLKREKTRKTVTRLHRMELQRKGHPFHLQKMAPPPLALLLIIPPLNKMPPPRPLPPRTKLLRNQRQQQPNCLQHIYHGCFLALFFFVFAQGFDFKLHCLLPWYFPGKDLVPLVTYTSTIPN

SEQ ID NO: 79374 - protein, 234 aa, Gossypium hirsutum
  unsure (1)..(234): unsure at all Xaa locations
  Clone ID: GOSHI-09MAY01-C1109_2.pep
MEGEEIHAAPNNHPFAVGDESYSNYGSYSNFTDDQLFTGDGGEVAVDDVTTSADIFGFGSSDPTPAYSQSPFATAIPVENGNGTNGFDLGNDGVFASDGPVLPPPTEMEPEEGFVLREWRRQNAILLEEKEKKEKELMSHIVEEAEXFKRAFYEKREKTIETNKTNYRGREKLYVANQEKFHKTADQQYWTALAELISREVPNIEKKRGRKTKITLITGFMTKTRKHCLYYRAF

SEQ ID NO: 79375 - protein, 337 aa, Gossypium hirsutum
  Clone ID: GOSHI-09MAY01-C1109_1.pep
MASFDAYGMEGEEVHAGAAPNNHPFDVDDDESYSNYGSYSNFTDNQQFPADGGDVAVDHLASSPEIFGFGSSDPSPAYSQSPFGTTIPVENGNGTNGFSGGNDDVFSSDGPVLPPPTEMAPEEGFLLREWRRQNAIQLEEKEKKEKELRNQIIEEAEEYKRAFYEKREKTIETNKTNNREREKLYVANQEKFHKTADTHYWTAIAELIPREVPNIEKRGKKDAEKKPSVFVVQGPKPGKPTDLSRMPHILVKLKHSPPPHMIPSPPAPAKDTKDGKDAKDGKDSKNVDKAASNGTAEKGATVSSAKDGAATSAEQDAAATTAPAKGQTVAEPEATAA

SEQ ID NO: 79376 - protein, 59 aa, Gossypium hirsutum
  Clone ID: LIB3148-054-Q1-K1-F4.pep
ETDVRNSYVLFEFSFFLDKFCNFASNIISPQSQFSKQNRAITVDVQSLEMFKKKKQKTN

SEQ ID NO: 79377 - protein, 189 aa, Gossypium hirsutum
  Clone ID: GOSHI-09MAY01-C1139_1.pep
MAMWVFGYGSLIWKAGFNYDDRLVGFIKDYRRVFYQGSTDHRGTPEYPGRTVTLEPAPGEVCWGAAYKISKEEDKEAAITYLEVREKQYDKKAYVDLFTDPLATTPAISGVMVYIASPDKKLNPNYLGPASIEDIAKQIVRAEGPSGPNREYLFQLEKALLQIGCKDKHLMDLANEARRILSESEHTAS

SEQ ID NO: 79378 - protein, 390 aa, Gossypium hirsutum
  unsure (1)..(390): unsure at all Xaa locations
  Clone ID: GOSHI-09MAY01-C1129_1.pep
MGFQRNILGFLFLILASLTSLSSSLPSEYSIVEHEIDAFLSEERVLEIFQQWKEKNQKVYRHAEEAEKRFENFKGNLKYILERNAMRKANKWEHHVGLNKFADMSNEEFRKAYLSKVKKPINKGITLSRNMRRKVQSCDAPSSLDWRNYGVVTAVKDQGSCGSCWAFSSTGAMEGINALVTGDLISLSEQELVDCDTSNYGCEGGYMDYAFEWVINNGGIDSETDYPYTGVDGTCNTTKEETKVVSIDGYQDVEQSDSALLCAVAQQPVSVGIDGSAIDFQLYTGGIYDGSCSDDPDDIDHAVLIVGYGSEGSEEYWIVKNSWGTSWGIDGYFYLKRDTDLPYGVCAVNAMASYPTKQSSSPSPYPSPSVXLTATSFNSTTTTTSISFTK

SEQ ID NO: 79379 - protein, 147 aa, Gossypium hirsutum
  unsure (1)..(147): unsure at all Xaa locations
  Clone ID: LIB3197-044-Q1-M1-H2.pep
GGTGPHYCLTNPSAHSSGKANKWEHGVXLNKLADMSNEEFRKAYLSKVKKPINKGISLSRNMRRKVQSCDAPSSLDWRNYGVVTAVKDTXSCESCWAFSLTGAMEGINALLTGDLISLSKQEPCDCDTSNYGCERRYMDYPFEWVIN

SEQ ID NO: 79380 - protein, 54 aa, Gossypium hirsutum
  Clone ID: LIB3197-008-P1-M1-G5.pep
HASAHASGKTMQIRLRKGHICLDDAFEFGNCVCHSSPVGYKNYYAFVYFFRLVS

SEQ ID NO: 79381 - protein, 55 aa, Gossypium hirsutum
  Clone ID: GOSHI-09MAY01-C1099_1.pep
HALGCSYVELLIIYSVHLLIMLCLNDTLSLDIVVWYPNFCGSCVFHFIRDLVNII

SEQ ID NO: 79382 - protein, 147 aa, Gossypium hirsutum
  Clone ID: GOSHI-09MAY01-C1089_1.pep
MILAVLFANSEGNILVERFNGVPAEERLHWRSFLVKLGADNLKGVKNEELLVASHKSVYIVYTVLGDVSVYVVGKDEYDELALAEVIFVITSAVKDVCGKLPTERLFLDKYGRICLTLDEIIWKGYLENTDKDRIRRLVRLKPPTEF

SEQ ID NO: 79383 - protein, 46 aa, Gossypium hirsutum
  Clone ID: uC-gsflnu33B091e09b1.pep
YHASYSALQIFFSSGLELMELLDGHCDILALIGYQRNVFLFFYLKP

SEQ ID NO: 79384 - protein, 159 aa, Gossypium hirsutum
  unsure (1)..(159): unsure at all Xaa locations
  Clone ID: GOSHI-09MAY01-C1049_7.pep
MAHNTSDPFFLFQLLLISVSLMIGSHTVSTAARRLFETQTTSSELPQLASKYEKQEESEYEKPEYKQPKYDEEYPKHEKPEIHKEEKQKPCKRNIXHEECHESHESKEHEEYQKEKPEFPKWEKPXKEHEKQDEDKEHKHEFPKHEKEEEKKPEKGRVP

SEQ ID NO: 79385 - protein, 278 aa, Gossypium hirsutum
  unsure (1)..(278): unsure at all Xaa locations
  Clone ID: GOSHI-09MAY01-C1049_5.pep
PRVRPRVRLASKYEKQEESEYEKPEYKQPKYDEEFPKLEKPKEHEEHEVEYPEIPEYKEKQDEGKEHKHEECHESHESKEHEEYEKEKPNFPKGEKPKEHEKHEVEYPKIPEYKDKQDEDKEHKNEEYHESRESKEHEEYEKEKPEFPKREKPKEHEKHEVEYSEIPEYKEKEDKSKKHKDEECQESHESKEHEEYEKEKPDFPKWEKPKGHEKHKAEYPKIPECKEKLDEDKEHKHEFPKHEKEEEKKPEKGIVPXWVKMPEWPKSMFTQSGSSTKP

SEQ ID NO: 79386 - protein, 349 aa, Gossypium hirsutum
  Clone ID: GOSHI-09MAY01-C1049_4.pep
MAHNFRHPFFLFQLLLITVSLMIGSHTVSSAARHLFHTQTTSSELPQLASKYEKHEESEYKQPKYHEEYPKHEKPEMYKEEKQKPCKHHEEYHESRESKEHEEYDKEKPDFPKWEKPKEHEKHEVEYPKIPEYKDKQDEDKEHKNEEYHESRESKEHEEYEKEKPEFPKLEKPKEHEKHEVEYPEIPEYKEKQDEGKEHKHEECHESHESKEHEEYEKEKPNFPKGEKPKEHEKHEVEYPKIPEYKEKQDEGKEHKHDECHESHESKEHEEYEKEKPNFPKGEKPKEHEKHEVEYPKIPEYKEKQDEGKEHKHEFQKHEKEEEKKPEKKAEYSEWPKYMFTQSGSGTKP

SEQ ID NO: 79387 - protein, 179 aa, Gossypium hirsutum
  Clone ID: GOSHI-09MAY01-C1049_3.pep
SATPWPDAWPDAWDEEYPKHEKPEMHKEEKKKPCKQHEEYEKEKPEFPKQEKPKEHEKHEVEYPKIPEYKEKQDEDKKHKHEEYHESYESKEHEEYEKEKPEFPKWEKSKEHEKHEVEYPKIHEYKEKQDEGKEHKHEFPKHEKEVEKKPEKKAEYPEWAKLPGSPTSLAFQPGSATKP

SEQ ID NO: 79388 - protein, 248 aa, Gossypium hirsutum
  Clone ID: GOSHI-09MAY01-C1049_2.pep
MAHSIRHPFFLFQLLLISVSLVTGSHTVSAAARRLFETQATSSELPQLASKYEKHEESEYEKPEYKQPKYHEEYPKLEKPEMQKEEKQKPCKQHEEYHESHESKEQKEYEKENLEFPKWEKPKEHEKHEVEYPKIPEYKVKQDEGKEHKHEEYHESRESKEHEEYEKEKPEFPKLEKPKEHEKHEVEYPEIPEYKEKQDEGNEHKHEFPKHEKEEEKKPEKKAEYLEWAKMPEWSKSMFTQPGSATKP

SEQ ID NO: 79389 - protein, 236 aa, Gossypium hirsutum
  Clone ID: GOSHI-09MAY01-C1049_1.pep
MAHNIRHPFFLFQLFLICVSPMIGSHTVSAAARRLFETQTTLSELPQLASKYEKHEEFEYEKSEYKQPKYHEEYPKHEKPEMHKEEKKKPCKQHEEYEKEKPEFPKQEKPKEHEKHEVEYPKIPEYKEKQDEDKKHKHEEYHESYESKEHEEYEKEKPEFPKWEKPKEHEKHEVEYPEIPEYKEKQDEGKEHKHEFPKHEKEEEKKPEKKAEYPEWAKMPEWPKSMFTQSGSGTKP

SEQ ID NO: 79390 - protein, 165 aa, Gossypium hirsutum
  Clone ID: LIB3584-054-P1-K2-B9.pep
MIGSHTVSTAARRLFETQTTSSELPQLASKYEKQEESEYEKPEYKQPKYDEEYPKHEKPEIHKEEKQKPCKQHEEYHESHKSKEHEEYQKEKPEFPKLEKPKEHEKHEVEYPKIPEYKEKQDEGKEHKHEFQKHEKEEEKKPEKKAEYSEWPKYMFTQSGSGTKA

SEQ ID NO: 79391 - protein, 137 aa, Gossypium hirsutum
  unsure (1)..(137): unsure at all Xaa locations
  Clone ID: LIB3584-016-P1-K1-G12.pep
PTRPPTRPPTRPPTRPPKEHERHEVEYPKIPEYKEKQDEGKEHKHDECHESHESKEHEEYEKEKPNFPKGEKPKEHEKHEVEYPKIPEYKEKQDEGKEHKHEFQKHEKEEEKQPEKKAEYSEWPKYMFTXSGSGTKP

SEQ ID NO: 79392 - protein, 115 aa, Gossypium hirsutum
  Clone ID: LIB3584-014-P1-K1-E2.pep
MGDNIRHPFFLFQLLLICVSPMIGSHTVSAATRRLFETQTTSSELPQLASKYEKHEESEYEKLEYKQPKYHEEYPKHEKPEMHEEKQKPCKQHEEYEKEKPEFPKREKPKEHEKH

SEQ ID NO: 79393 - protein, 102 aa, Gossypium hirsutum
  Clone ID: LIB3083-060-Q1-L1-D4.pep
MAHNTRRPLVLFQLLLISVSLMIGSHTVSTAARRLFETQTTSSELPQLASKYEKHEESEYEKPEYKRPKYDEKSPKNESPEFPRGENKNPASYLKKSPRYPN

SEQ ID NO: 79394 - protein, 98 aa, Gossypium hirsutum
  unsure (1)..(98): unsure at all Xaa locations
  Clone ID: LIB3083-060-Q1-L1-H7.pep
MSDPSAPPNIDHDQRRSLSRIYLRRWTVLLMIGSHTFSSAAGHLFQTQTSXSELSQLASKYEKLEXSEYKQSKYHEEYPKHEKPEMHKGEKQKPCKHH

SEQ ID NO: 79395 - protein, 143 aa, Gossypium hirsutum
  unsure (1)..(143): unsure at all Xaa locations
  Clone ID: GOSHI-09MAY01-C1079_6.pep
KLDKFNIALLAKQGWRLINFPDSLLARVLKAKYYPNACFLTAQLGNLRSLTWKSIXVGKRHSRXGLCWRVGKGDRISVWKDLFNAEVAKKILQIPLTTSANEDFQVWRGEPSGNFSVRSAYKLLQEGTQNPINLQTETKAGRV

SEQ ID NO: 79396 - protein, 166 aa, Gossypium hirsutum
  unsure (1)..(166): unsure at all Xaa locations
  Clone ID: GOSHI-09MAY01-C1079_5.pep
MPPKFDPTQVVDVFVRVTGGEVGAASSLAPKIGPLGLSPKKIGEDIAKETAKEWKGLRVTVKLTVQNRQAKVTVVPSAAALVIKALKEPERDRKKTKNIKHNGNISLDDVIEIAKVMKPXSMAKDLRGTVKEILGTCVSVGCTVDGKDPKDLQQEISDGEIDVPLE

SEQ ID NO: 79397 - protein, 168 aa, Gossypium hirsutum
  unsure (1)..(168): unsure at all Xaa locations
  Clone ID: GOSHI-09MAY01-C1079_3.pep
FQRNGNITLVSDLIDADSREKWKDDIITNTFNAEVAKKILQIPLATSANEDFQVWRGEPSGNFSVRSAYKLLQEGTQNPINLQTETKAFYKKLWNXQIPPKVKITIWGISWNYIPTFANLKIKCIVADARCPXCNQEEEDCNHIFRGCHGFLVEGQMNSANFSVVGFG

SEQ ID NO: 79398 - protein, 177 aa, Gossypium hirsutum
  Clone ID: GOSHI-09MAY01-C1079_2.pep
FCFGLWIIWQRHGVLRTVERCTRISVYFDAAFDQQNARSASGLIVRGEGGEILVSKSVIHTNIATPFAAEAHAGLQALELGRSMGLKDLQIMGDSKTIIKKCQSSEQDRSVIGAIIKDIQEIKTNFNSICFCYIPRTDNIFAHLVAIEALKKRAEHYLAGATPKTIRQAAERMNPRY

SEQ ID NO: 79399 - protein, 160 aa, Gossypium hirsutum
  Clone ID: GOSHI-09MAY01-C1079_1.pep
NPLFFFFHPSLFFYYYYFFIFFFFFFFAKKILQIPFATSVNEDFQVWRGEPSGNFSVRSAYKLLQEGTQNPINLQTETKAFYKKLWNLQIPSKVKITIWGISWNYIPTFANLKIKRIVADARCPRCNQEEEDCNHIFRGCHGFLVEGQMNSADFSVVGFG

SEQ ID NO: 79400 - protein, 68 aa, Gossypium hirsutum
  Clone ID: LIB3146-047-Q1-K1-B8.pep
KGICKIFLATSALKRSFQTEIRSPLPTLQQSPPSRMPFADQILFQLTKNPRHRRQKERRKLSRTKTGE

SEQ ID NO: 79401 - protein, 112 aa, Gossypium hirsutum
  Clone ID: LIB3582-048-P1-K1-C7.pep
TVPTFLLWALVIWTSRNRFIYENRQPTSRDISFKISDFISELKGIEERKLNLAGNGGPRTEERRTSVSVFFDAAFDQQHARSASGLIVRGEGGEILASKSVIHPNIATPFAA

SEQ ID NO: 79402 - protein, 87 aa, Gossypium hirsutum
  Clone ID: LIB3272-005-P1-K1-A8.pep
KLTLHYSMNDIRNLPSQALYWCGLLMSKPKSPLPHLEQSNLKQILLVADRKLHQRRPTHLFLFIQFSDHHLLPNDPKPTTKKSALII

SEQ ID NO: 79403 - protein, 60 aa, Gossypium hirsutum
  Clone ID: LIB3145-044-Q1-K1-A11.pep
GAPKKKLLLCKPGEEKFDSLKPPPLFFFFFFKFFFFFFFFFFFFFFFFFFFFFFFFSKSY

SEQ ID NO: 79404 - protein, 318 aa, Gossypium hirsutum
  Clone ID: GOSHI-09MAY01-C1019_1.pep
PPIPGQELGITSDEALSLEDLPKHAVVLGGGYIAVEFASIWRGLGANVDLFFRKELPLRGFDDEMRAVVARNLEGRGINLHPQTNLTELIKTDNGIKVTTDHGEELIADVVLFATGRLPNSKRLNLEAVGVELDNTGAVKVDEYSRTSIPSIWAVGDVTNRMNLTPVALMEGTCFAKTVFGKEPSKPDYSHVPCAVFSIPPLSVVGLSEEQAIEQANGDVLVFTSTFNPMKNTVSGRQEKTVMKLVVDAETDKVLGASMCGPEAPEIMQGIAVALQCGATKAQFDSTVGIHPSAAEEFVTMRSVSRRITCRGKPKTNL

SEQ ID NO: 79405 - protein, 444 aa, Gossypium hirsutum
  Clone ID: GOSHI-09MAY01-C1039_1.pep
PRVRELLSLHNKSYNRPTILVAKSVKGEEEIPDGTVAVLTPDMPDVLSHVSVRARNCKVCFATCFDPNILADLQAKKGKLLRLKPSSADVVYSEVKEGELVDSSSSNLKGDGPSVTLVRKQFVGKYAISAEEFTPEMVGAKSRNISYLKGKVPSWVGIPTSVALPFGVFEKVLADEANKEVDQKLQILKKKLGGGDFGALEEIRQTVLQLRAPSQLVQELKTKMLTSGMPWPGDEGEQRWEQAWTAIKKVWASKWNERAYFSTRKVKLDHDYLCMAVLVQEVINADYAFVIHTTNPSSGDTSEIYAEVVKGLGETLVGAYPGRALSFVCKKNNLNSPQVLGYPSKPIGLFIRRSIIFRSDSNGEDLEGYAGAGLYDSVPMDEEEKVVVDYSSDPLINDGKFQQAILSSIAGAGNAVEELYGSPQDIEGVIRDGKVYVVQTRPQM

SEQ ID NO: 79406 - protein, 242 aa, Gossypium hirsutum
  Clone ID: GOSHI-09MAY01-C1029_1.pep
PTRPVFWDLGSKTKTIQDLSNAMGSMYAAVLFLGIQNASSVQPVVAVERTVFYRERAAGMYSAMPYAIAQVLIEIPYIFVQASVYGLIVYAMIGFEWTVAKFFWYLFFMFFTLLYFTFYGMMAVAVTPNHYIAAIVSAAFYGVWNLFSGFIIPRPSMPIWWRWYYWICPVSWTLYGLGVSQFGDITHMLEDGNIETGGQYLRNFYDFRHDYLGLVAAVIVSFAVLFGAIFTVSIKMFNFQRR

SEQ ID NO: 79407 - protein, 169 aa, Gossypium hirsutum
  unsure (1)..(169): unsure at all Xaa locations
  Clone ID: AI055384.1.pep
LHIWPLQVLIEIPYIFVQASVYGLIVYAMIGFEWTVAKFFWYLFFMFFTLLYFTFYGMMAGAVTPNHYIAAIVSAAFYGVWNLFSGFIIPRPSMPIWGXWYYWICPVSWTLYGMGASQFGDITHMLEDGNMRQCXQYLRKFYXFMHDYLGLVAAVIVPLAVFWAILLGH

SEQ ID NO: 79408 - protein, 60 aa, Gossypium hirsutum
  Clone ID: GOSHI-09MAY01-C1399_1.pep
LSFYPWVQESSAAKMAESKLQENLRKLQGISLKTTEMQDNAKSFSSMARELLRTKEKEDK

SEQ ID NO: 79409 - protein, 174 aa, Gossypium hirsutum
  unsure (1)..(174): unsure at all Xaa locations
  Clone ID: GOSHI-09MAY01-C1389_2.pep
MRETLHVQGGQCGNQIGSKFWEVVCDEHGIDPTGRYIGSSDLQLERVNVYYNEASCGRFVPRAVLMDLEPGTMDSVRTGPYGQIFRPDNFVFGQSGAGNNWAKGHYTEGAELIDAVLDVVRKEAENCDCLQGFQXCHSLGGGTGSGMGTLLISKIXEEYPDRMMLTCSVFPSPK

SEQ ID NO: 79410 - protein, 447 aa, Gossypium hirsutum
  Clone ID: GOSHI-09MAY01-C1389_1.pep
MREILHVQGGQCGNQIGSKFWEVVCDEHGIDPTGRYIGSSDLQLERVNVYYNEASCGRFVPRAVLMDLEPGTMDSVRTGPYGQIFRPDNFVFGQSGAGNNWAKGHYTEGAELIDAVLDVVRKEAENCDCLQGFQVCHSLGGGTGSGMGTLLISKIREEYPDRMMLTFSVFPSPKVSDTVVEPYNATLSVHQLVENADECMVLDNEALYDICFRTLKLTTPSFGDLNHLISATMSGVTCCLRFPGQLNSDLRKLAVNLIPFPRLHFFMVGFAPLTSRGSQQYRALTVPELTQQMWDAKNMMCAADPRHGRYLTASAMFRGKMSTKEVDEQMINVQNKNSSYFVEWIPNNVKSSVCDIPPRGLSMASTFVGNSTSIQEMFRRVSEQFTAMFRRKAFLHWYTGEGMDEMEFTEAESNMNDLVSEYQQYQDATADEEGEYEDEEDLDEEHM

SEQ ID NO: 79411 - protein, 81 aa, Gossypium hirsutum
  unsure (1)..(81): unsure at all Xaa locations
  Clone ID: LIB3083-060-Q1-L1-G7.pep
SCGRFXPFSVLMDLEAGTVDIVRTGPYGQIFRPDNFVFGQYGAGNNLANXHYTVLSHSIDAVLDIVRKEASNWDWLLRFYA

SEQ ID NO: 79412 - protein, 245 aa, Gossypium hirsutum
  Clone ID: GOSHI-09MAY01-C1359_1.pep
MVVTDDIYTKDGTVDINKKPANKKKTGNWKACSFILGNECCERLAYYGMGTNLVNYLQEQLNQGNVTASNNVTNWSGTCYITPLIGAFVADAYLGRYWTIAIFSIIYFFGMTLLTLSSSIPGLKPSCTGDVCHPTQEQIAVFFVALYMIALGTGGIKPCVSSFGADQFDETDEVERKRKSSFFNWFYFSINIGALVASSVLVWIQMNVGWDWGFGIPAVAMAIAVVFFFAGSRTYRLQKPWGSPL

SEQ ID NO: 79413 - protein, 340 aa, Gossypium hirsutum
  unsure (1)..(340): unsure at all Xaa locations
  Clone ID: GOSHI-09MAY01-C1369_1.pep
MAKVKIGINGFGRIGRLVARVALKRDDVELVAVNDPFITTDYMTYMFKYDSVHGQWKHHELKVKDSKTLLFGEKPVTVFGIRNPEEIPWGETGAEYIVESTGVFTDKDKAAAHLKGGAKKVIISAPSKDAPMFVMGVNEKDYKPEYDIISNASCTTNCLAPLAKVIHDKFGIIEGLMTTVHSITATQKTVDGPSMKDWRXGRAASFNIIPSSTGAAKAVGKVLPALNGKLTGMAFRVPTVDVSVVDLTVRLEKAASYDEIKAAIKAASEGELKGILGYTDEDLVSTDFVGDSRSSIFDAKAGIALNENFAKLVSWYDNEWGYSTRVVDLIIHVDAVLKAK

SEQ ID NO: 79414 - protein, 132 aa, Gossypium hirsutum
  unsure (1)..(132): unsure at all Xaa locations
  Clone ID: LIB3826-002-Q1-K6-G10.pep
FFSTIIYTLPTLLEQHVMGVNEKDYKPEYDIISNASCTTNCLAPLAKAIHDKFGIIEGLMTTVHSITGKLGNRILTFKVTXYVLFILFCSYSATQKTVDGPSMKDWRGGRAASFNIIPSSTGAANVRIVSRL

SEQ ID NO: 79415 - protein, 168 aa, Gossypium hirsutum
  unsure (1)..(168): unsure at all Xaa locations
  Clone ID: LIB3585-062-P1-K2-A2.pep
TRSVELVSSTALDAYRRYEDKLVAGGDPFITTDYMTYMFKYDSVHGQWKHHELKVKDSKTLLFGEKPVTVFGIRNPEEIPWGETGAEYIVESTGVFTDKDKAAAHLKGGAKKVIISAPSKDAPMFVMGVNEKDYKPEYDIISNASCTTNCLAPLAKVIHDKXFGIIEG

SEQ ID NO: 79416 - protein, 128 aa, Gossypium hirsutum
  Clone ID: LIB3585-023-P1-K1-B9.pep
MRPRVTSTRPDKPKYDIISNASCTTNCLAPLAKVIHDKFGIIEGLMTTVHSITATQKTVDGPSMKDWRGGRAASFNIIPSSTGAAKAVGKVLPALNGKLTGMAFRVPTVDVSVVDLTVRLEKAAFYDE

SEQ ID NO: 79417 - protein, 141 aa, Gossypium hirsutum
  Clone ID: GOSHI-09MAY01-C1299_2.pep
FTNRSSGGEAWKKPTEAIELGAKWGRTSSTKEDAGALFHSLRSAYAATLVNLKIIDLYVGFAIFTALIQVVVYMAMVGSFPFNSFLSGVLSCVGTAVLAVCLRIQVNKENKEFKDLPPERAFADFVLCNLVLHLVIMNFLG

SEQ ID NO: 79418 - protein, 117 aa, Gossypium hirsutum
  Clone ID: GOSHI-09MAY01-C1299_1.pep
MARTSSSKENAQALFHSLRSAYAATPVNLKIIDLYVGFAVFTALIQVVYMASVGSFPFNSFLSGVLSCVGTAVLAVCLRIQVNKENKEFKDLPPERAFADFVLCNLVLHLVIMNFLG

SEQ ID NO: 79419 - protein, 81 aa, Gossypium hirsutum
  Clone ID: LIB3148-028-Q1-K1-C6.pep
IFIFFLYFCFFLFFYFYFLSSIIIFFLYSNVFCFSSSDLETLLAKDKISNSYYSSGSMLKLIMLHLRTSFHAKIMNHGRKL

SEQ ID NO: 79420 - protein, 112 aa, Gossypium hirsutum
  Clone ID: uC-gsronu33B121f03b1.pep
PLYRPRVREIRVELKWREHHPAKKMLKLYSILFALLMLPLQSISRSLICMWVPSLFFFSFLLSHFPPLLYILLFFFSFLFSSFYPLIPRIFPFFFFFPFSHYPFSPPTFLPL

SEQ ID NO: 79421 - protein, 43 aa, Gossypium hirsutum
  Clone ID: LIB3147-034-Q1-K1-F11.pep
NPHPSPPFFYFYNYFFFFVFIFFFFFFFFFFFFFFFFFFFFFF

SEQ ID NO: 79422 - protein, 147 aa, Gossypium hirsutum
  Clone ID: GOSHI-09MAY01-C1249_4.pep
MASTEQQVPSGIAAPTADVVGNAFVHQYYLILHQSPALVHRFYHDNSKLGRPEEDGGMSITTTMQAINEKILSLGYGEFLAEITTVDAQDSHNGGVIVLVTGHLTGKDKVKRKFTQSFFLAPQDKGYFVLNDVFRYIDEAKHQSGSQ

SEQ ID NO: 79423 - protein, 469 aa, Gossypium hirsutum
  Clone ID: GOSHI-09MAY01-C1249_3.pep
MASVEQQVPAGIATPTSDVVGNAFVHQYYLILHQSPELVHRFYHDSSKLGRPEENGGMSITTTMQAINEKILSLGYGEFTAEITTVDAQDSHNGGVLVLVTGYLTGKDKVKRKFTQSFFLAPQDKGYFVLNDVFRFVDDTKHQPGSQDPVNGFEASLTPEQDHSPVPENHIEQPAALPEECNGPEVYNSSENGDGSIEEEESPVAEVVDEIPDDSKMVSDSKPEMEELPKKSYASILKVLKENAVPVSAPTHPPVKPAVKSQEHPRIAAPPSAPMPASDAQVSSNNVTENGNNQDAEAEGPSIYVKGLPLNATPGMLENEFKKFGPIKSGGIQVRSQKGFCFGFVEFEMASSVQSAIEASPINVGGRKAVVEEKRSTSRGNKGRSSSVSGAGYRNEGARGRGNYGGGRGYSRGEFGNRSSNRGGYSSRGGDGYQRGEHMGGNGGRVSRSGEATFNASTKNVAPRVSAPA

SEQ ID NO: 79424 - protein, 293 aa, Gossypium hirsutum
  unsure (1)..(293): unsure at all Xaa locations
  Clone ID: GOSHI-09MAY01-C1249_2.pep
DLESEALATLILNKLRAGIKVCAIKAPGLGENRKAGLQDLAALTGGEVITEELGLDIEKVGAEVLGSCKKVTVSKDDTIILDGAGDKATIEERCDQIRSAIESSTSDYDKDKLQERLAKLSGGVAVLKIGGASEAEVGEKKDRVTDALNATKAAVEEGIVPGGGAALLYASKELENLETANFDQKIGVQIIQNALKMPVHTIASNAGVEGAVVVGKLLEQDNPDLGYDAAKGEYVDMVKAGIIDPLKVIRTALVDAGRARARMTTPEAIVTELPKDDKEGAATAGGXMGGLDY

SEQ ID NO: 79425 - protein, 346 aa, Gossypium hirsutum
  unsure (1)..(346): unsure at all Xaa locations
  Clone ID: GOSHI-09MAY01-C1249_1.pep
PTRPPTRPALMLGGVQELADAVKVTMGPKGRNVVLEQSFGAPKVTKDGVTVAKSIEFKDRVKNIGASLVKQVANATDAGAGDGTTCATVLTRAIFVEGCKSVAAGMNAMDLRRGITMAVDAVVTNLKSRARMISTSEEIAQVGTISANGEREIGELIAKAMEKVGKEGVITIADGKTLYNELEVVEGMKLDRGYISPYFITNQKNQKCELENPLILIHEKKISNLPALVKFLELSLTKQRPLLIVAEDLESEALATLILNKLRAGIKVCAIKAPGFGENRKAGLQDLAALTGGEVITEELGLDIEKVGXEVLGSCKKVTVSKDDTIILDGAGDKATLKKMRSIDQH

SEQ ID NO: 79426 - protein, 61 aa, Gossypium hirsutum
  Clone ID: AW187849.1.pep
MLRNNLIHHYTTNKLFDYSPLDYFLQAGTDTLGATFFVDALKVASPERLTRPPLPPMCSPL

SEQ ID NO: 79427 - protein, 134 aa, Gossypium hirsutum
  unsure (1)..(134): unsure at all Xaa locations
  Clone ID: LIB3543-053-Q1-K6-E3.pep
MASVEQQVPAGIATPTSDVVGNAFVHQYYLILHQSPELVHRFYHDSSKLGRPEENGGMSITTTMQAINEKILSLGYGEFTAEITTVDAQDSHNGGVLVLVTGYLTGKDKVKRKFTQSFFLAPQDXGYFVLNDVF

SEQ ID NO: 79428 - protein, 92 aa, Gossypium hirsutum
  Clone ID: LIB3825-034-Q6-N6-B6.pep
CIKSCFTRAAHTATVTPHVLTPLISITSTAGISWLLTADFTGDCVGADTGTAFSFKTFKIDAYDFFGSSSISGLESETIFESSGISSTTSAT

SEQ ID NO: 79429 - protein, 90 aa, Gossypium hirsutum
  Clone ID: LIB3493-004-P1-M1-D6.pep
RGNKGRSSSVSGAGYRNEGARGRGNYGGGRGYSRGEFGNRSSNRGYSNRGGDGYQRGEHMGGNGGRVSRSGEATFNASTKNVAPRVSVPA

SEQ ID NO: 79430 - protein, 72 aa, Gossypium hirsutum
  Clone ID: LIB3149-037-Q1-K1-C1.pep
IYVVCLIIFVYWALFFFFFFFFFFFWIFFFWNKSHSMYQIKKKKKGPSPCPVWGPKVKYSLVLISCLQGFII

SEQ ID NO: 79431 - protein, 98 aa, Gossypium hirsutum
  Clone ID: GOSHI-09MAY01-C2959_7.pep
MSSALEMSLDDLIKRSRKSGSGNSRGRGRGRGSGPLPARRFPNRRANRSTPYTTAKAPETSWQHDMYSDKGAAFLGQAGRASAIETGTKLCMSNLQYG

SEQ ID NO: 79432 - protein, 241 aa, Gossypium hirsutum
  unsure (1)..(241): unsure at all Xaa locations
  Clone ID: GOSHI-09MAY01-C2959_3.pep
MSSALEMSLDDLIKRNRKSGSGNPRGRGRGSGPGPARRFPNRGANRSAPYTSATAPETTWQHDMYSDKGAAFQGQAGRAAAIETGTKLYVSNLDYGVSNDDIKELFSEVGDLKRYAIHYDWTGGSKGTPELVFSRKAHPMKIGXKYNRPQLHGKPMKIEIVGTNIATPAAPTVANVAFGSSNGAPIGGRGRGGGFRKQRGVSGGRGFGRGRGHXNGPXEKVSAEHLDAHLXKYHTEAMQTN

SEQ ID NO: 79433 - protein, 241 aa, Gossypium hirsutum
  Clone ID: GOSHI-09MAY01-C2959_2.pep
MSSALEMSLDDLIKRSRKSGSGNSRGRGRGSTAGPARRIPNRRANRSAPYTAAKAPETTWQHDMYSDKGAALQGQAGRASAIETGTKLYISNLDYGVSNDDIKELFSEVGDLKRYAIHYDRSGRSKGTAEVVFSRRADAMAAVKRYNNVQLDGKPMKIEIVGTNIATPAAPSAANGAFGSSNGAPRGGRGRGGGFRRQRGGAGGRGFGRGRGQGRGRGEKVSAEDLDADLEKYHTEAMQTN

SEQ ID NO: 79434 - protein, 585 aa, Gossypium hirsutum
  Clone ID: GOSHI-09MAY01-C2959_1.pep
MAATTFSPSFSTPSVNSSSRAHKTLTNPNLGFLASVSRSLRSLKATRLTTDNACGSAMASRMVSVPAVQTHISLDFETFVFKKEKVSLAGQDEYIVRGGRDLFKLLPDAFKGIKQIGVIGWGSQGPAQAQNLRDSLADAKSDIIVKVGLRKGSRSFDEARAAGFSEENGTLGDIWETISGSDLVLLLISDAAQADNYEKIFSYMKPNSILGLSHGFLLGHLQSMGLDFPKNVSVIAVCPKGMGPSVRRLYVQGKEINGAGINSSFGVHQDFDGRATDVALGWSVALGSPFTFVTTLEQEYKSDIFGERGILLGAVHGIVECLFRRYTENGMSEDLAYKNTVECITGIISKTISTKGILAVYNSLSEEGKREFETAYSASYYPCMDILYECYEDVASGSEIRSVVLAGQRFYEKDGLPAFPMGKIDQTRMWKVGERVQKARPSGDLGPLYPFTAGVYVALMMAQIEILRKKGHSYSEIINESVIEAVDSLNPFMHARGVSFMVDNCSTTARLGSRKWAPRFDYILTQQALVAVDKGTPINQDLLSNFLSDPVHGAIEVCAQLRPTVDISVTPDADFVRPELRQSGN

SEQ ID NO: 79435 - protein, 156 aa, Gossypium hirsutum
  unsure (1)..(156): unsure at all Xaa locations
  Clone ID: uC-gsflnu33B026f09b1.pep
TEGAGTSSGSDLVLLLISAAAHADIYYXRFSYWRPXGILQLWHGSCHVRSLSKGLDFPKNISVIAVCPKGMGPSVRRLYVQGREINGAGINSSFGVHQDADGRATDVALGWTVALGSPFTFATTLEQEYKSDISGERSILLGAVHGLVETIVRRYT

SEQ ID NO: 79436 - protein, 143 aa, Gossypium hirsutum
  unsure (1)..(143): unsure at all Xaa locations
  Clone ID: LIB3165-048-Q1-K1-F2.pep
PRVRSSRPFSDPLSPLIPTPLTTHNCCGSAMASQTHISLDFHTCVFKKEKVSLAGHLEYIVRGGRDLFTLLPDAFKGIKQIGVIGWGSQGPAQAQNLRDSLADAKSNIIVKVGLRKGSPFFAEARAAGFSEENGXLGDMWETI

SEQ ID NO: 79437 - protein, 72 aa, Gossypium hirsutum
  unsure (1)..(72): unsure at all Xaa locations
  Clone ID: uC-gsflmaxxa009g07b1.pep
PLLYFTRRKPVGHFWEGGIPLGAVHGIVESLFRRYTENGMSEXDLAYKNTVECITGIISKTIXTQGMLAVYN

SEQ ID NO: 79438 - protein, 92 aa, Gossypium hirsutum
  Clone ID: uC-gsflmaxxa009g02b1.pep
TLIDNLIKHNRKFGSGNPRGRGRGSGPGPARRFPNRGTNRSAPYTVATAPETTWQHDMYSDKGGALQGQSRRAASIRTGTKLYVSNLDYGVS

SEQ ID NO: 79439 - protein, 103 aa, Gossypium hirsutum
  Clone ID: GOSHI-09MAY01-C102972_1.pep
FKETPTIGMVNAPNVTSSSVKQDPHGRDRMVSLNNESREMDIPDVESIVDPHSIVRATRFPNPYYQKLGEQEDDAKRINKRGKFCRKIASQDKVRESTCIKER

SEQ ID NO: 79440 - protein, 33 aa, Gossypium hirsutum
  Clone ID: GOSHI-09MAY01-C2919_1.pep
AAFPTSQFVIFCQLIKSPPLANLLQAFTSANCT

SEQ ID NO: 79441 - protein, 82 aa, Gossypium hirsutum
  unsure (1)..(82): unsure at all Xaa locations
  Clone ID: GOSHI-09MAY01-C2909_6.pep
KISAIIMFDVTARLTYKNVPTWHRDLCXSRVCENIPIVLCGNKVDAKNTQGKAKHVTLHRQKSRRYYEISAKSNYCVEKPFL

SEQ ID NO: 79442 - protein, 221 aa, Gossypium hirsutum
  Clone ID: GOSHI-09MAY01-C2909_2.pep
MALPNQQTVDYPSFKLVIVGDGGTGKTTFVKRHLTGEFEKKYEPTIGVEVHPLDFFTNCGKIRFYCWDTAGQEKFGGLRDGYYIHGQCAIIMFDVTARLTYKNVPTWHRDLCRVCENIPIVLCGNKVDVKNRQVKAKQVTFHRKKNLQYYEISAKSNYNFEKPFLYLARKLAGDPNLHFVESPALAPPEVHIDLAAQQQHEVELAAAASQPFPDDDDDAFE

SEQ ID NO: 79443 - protein, 221 aa, Gossypium hirsutum
  Clone ID: GOSHI-09MAY01-C2909_1.pep
MALPNQQTVDYPSFKLVIVGDGGTGKTTFVKRHLTGEFEKKYEPTIGVEVHPLDFFTNCGKIRFYCWDTAGQEKFGGLRDGYYIHGQCAIIMFDVTARLTYKNVPTWHRDLCRVCENIPIVLCGNKVDVKNRQVKAKQVTFHRKKNLQYYEISAKSNYNFEKPFLYLARKLAGDPNLHFVESPALAPPEVHIDLAAQQQHEAELAAAASQPLPDDDDDAFE

SEQ ID NO: 79444 - protein, 142 aa, Gossypium hirsutum
  Clone ID: LIB3825-031-Q6-K6-F12.pep
SCCSIHGQCAIIMFDVTARLTYKNVPTWHRDLCRVCENIPIVLCGNKVDVKNRQVKAKQVTFHRKKNLQYYEISAKSNYNFEKPFLYLARKLAGDPNLHFVESPALAPPEVHIDLAAQQQHEAELAAAASQPLPDDDDDAFE

SEQ ID NO: 79445 - protein, 75 aa, Gossypium hirsutum
  Clone ID: uC-gsflnu33B134h11b1.pep
DRGVSAITSIRFVKSYTTNSSSVTPPYLQFKYENESTHSDGSENEKAAEIVDGSLATQTPLYTNASSSSSGRGCQ

SEQ ID NO: 79446 - protein, 86 aa, Gossypium hirsutum
  Clone ID: uC-gsronu33B125b11b1.pep
SNYNIKISLKAAKPITTKSKSRKHDQRSTITTIIFVKSYTTNSSSVTPPYLQFKYENERAHIQTGVKMKKQQKLLMVLWQLKPLSN

SEQ ID NO: 79447 - protein, 69 aa, Gossypium hirsutum
  Clone ID: LIB3582-009-P1-K1-G3.pep
MALPNQQTVDYPSFKLVIVGDGGTGKTTFVKRHLTGEFEKKYEPTIGVEVHPLDFFTNCGKIRFYCWDT

SEQ ID NO: 79448 - protein, 81 aa, Gossypium hirsutum
  Clone ID: LIB3148-059-Q1-K1-F9.pep
SSRSRSAPFFFFFFFFFFFGKSNILVKNFIFKNILNNFHTRILLKAAKSIDIISKSRKHHQRSTITIIFENSHHLNCPICL

SEQ ID NO: 79449 - protein, 46 aa, Gossypium hirsutum
  Clone ID: uC-gsronu33B057f08b1.pep
TAISESREHHQRSTITTIIFENSYTTNSSSVTPPYLLFKYENFFKE

SEQ ID NO: 79450 - protein, 73 aa, Gossypium hirsutum
  unsure (1)..(73): unsure at all Xaa locations
  Clone ID: LIB3147-017-Q1-K1-G5.pep
FLSRISYSKTYRINYHTRILLKAAKSIDINKQKWKTPPKIHHNNNYIGKFLQYKIILCRASLNKIGGXENFFG

SEQ ID NO: 79451 - protein, 92 aa, Gossypium hirsutum
  Clone ID: GOSHI-09MAY01-C2939_1.pep
FCFMERLWLCKASEMERVRPFKIGDSVKIRVGLVTPRWGWGMETHASKGQVVGVDANGKLRIKFQWREGRPWIGDPADVILDDSSSGTANTS

SEQ ID NO: 79452 - protein, 190 aa, Gossypium hirsutum
  Clone ID: GOSHI-09MAY01-C2899_1.pep
PTRPACQQLENGSDIDDEDDTEHDEILMDAVSDLLPAFAKSMGDHFAPIFAKLFEPLMKFAKASRPPPDRTMVVACLAEVAQDMGAPIASYIDGLMPLVLKELASPSATNRRNAAFCAGELAKNGGETTLKYYNDILRGLYPLFGESKPDDAVRDNAAGAVARMIMVHPQSIPLNQVLPVFLRVLPLKED

SEQ ID NO: 79453 - protein, 145 aa, Gossypium hirsutum
  Clone ID: GOSHI-09MAY01-C2889_5.pep
AHASGVTALLFDGSNSDKQKEKSVDPDAVAKAFVDHYYSTFDANRAGLANLYQERSMLTFEGQKIQGSQSIVAKLTSLPFQQCKHNISTVDCQPSGAGGVLVFVSGTLQLAGEQHALKFSQMFHLMPTPQGSFYVLNDIFRLNYA

SEQ ID NO: 79454 - protein, 119 aa, Gossypium hirsutum
  Clone ID: GOSHI-09MAY01-C2889_4.pep
DAPPVPFVELYYTTFDANRAGLANLYQDGSMLTFEGQKIQGSQSIVAKLTSLPFQQCQHSITTVDCQPSGAGGMLVFVSGTLQLAGEQHALKFSQMFHLMPTPQGSFYVLNDIFRLNYA

SEQ ID NO: 79455 - protein, 73 aa, Gossypium hirsutum
  unsure (1)..(73): unsure at all Xaa locations
  Clone ID: GOSHI-09MAY01-C2889_3.pep
NRAGLANLYQDGLMLTFEGQKIQGSQSIVAKLISLPFQRCXHSITTVDCQPSSVGGMLVFVSGTLQLVSGFNS

SEQ ID NO: 79456 - protein, 128 aa, Gossypium hirsutum
  Clone ID: GOSHI-09MAY01-C2889_2.pep
RKKKGEMDPDAVAKAFVEHYYSTFDANRAGLANLYQEGSMLTFEGQKIQGSQSIVAKLTSLPFQQCKHNITTVDCQPSGSGGMLVFVSGNLQLAGEQHALKFSQMFHLMPTPQGSFYVLNDIFRLNYA

SEQ ID NO: 79457 - protein, 99 aa, Gossypium hirsutum
  unsure (1)..(99): unsure at all Xaa locations
  Clone ID: GOSHI-09MAY01-C2889_1.pep
HQNGSMLTFESQKIQGSQSIVAKLTTLXFQQCQHSITTVDCXPSGAGGMLVFVNGTLQLAGEQHALKFSQVIIFSLTSLFISIFRGFLKEALGFLCVGR

SEQ ID NO: 79458 - protein, 105 aa, Gossypium hirsutum
  Clone ID: AI727315.1.pep
MDPDAVAKAFVEHYYSTFDANRAGLANLYQEGSMLTFEGQKIQGSQSIVVKLTSLPFQQCKHNITTVDCQPSGSGGMLVFVSGNLQLVGEQHALKFSQRSSQCSL

SEQ ID NO: 79459 - protein, 135 aa, Gossypium hirsutum
  Clone ID: uC-gsflnu33B036b07b1.pep
PEYVIQHIKASLWCWHRIKHLAILESMLDTARSMCSMQDYKRATSVSWLPKAGESFALTTAQAIGRWSNKGAISAGDLLTSLGHHGMFLVDIALCGLVRFLCIEAAFNKSSASTVFARPIIDMFIVVVAVIIGGI

SEQ ID NO: 79460 - protein, 123 aa, Gossypium hirsutum
  unsure (1)..(123): unsure at all Xaa locations
  Clone ID: uC-gsflnu33B129f09b1.pep
KVDAHTVSLAIVGHYYFTFDANHCCIAKLEQKRIMKSLVGKKILGCQSNVGNITSLHLQQCKRSITTVDCQPAVAGGDLVFVSXTLQLCVEQHALKFSQMIDLMPTTQGSYYVLNDIFRLIYS

SEQ ID NO: 79461 - protein, 173 aa, Gossypium hirsutum
  Clone ID: GOSHI-09MAY01-C2869_1.pep
MALSNSLSFPSSNAVDLRRSTVPDSGIAPFFTSFDCSRFRCNFSQCGIRPNFSARKRIVSAANNGFNTVNSTSLGTGQDKDDYIPMPIVLIDQDSDSEATVVQLSFGDRLGALIDTMRALKDLGLDVAKGTVATEGPVKQTKFFITRLDNGRKVEDPDLLERIRLTIINNLLK

SEQ ID NO: 79462 - protein, 93 aa, Gossypium hirsutum
  unsure (1)..(93): unsure at all Xaa locations
  Clone ID: LIB3083-062-Q1-L1-A10.pep
TLSKIPAATFFQCGINPTFSARKRIVSAANNGFNTVNSTSLGTGQDEDDYIPMPIVLIDQDSDSXATVVQLSFGDRLGALIDTMRALKELGLD

SEQ ID NO: 79463 - protein, 188 aa, Gossypium hirsutum
  unsure (1)..(188): unsure at all Xaa locations
  Clone ID: GOSHI-09MAY01-C2599_2.pep
PGLARSTHADLRVWLEHVLDEHNARREGAEDYVAKDMADVLLQLSEDPNLEVKLERHGVKAFTQDMIAGGTESSAVTVEWAISELLKKPEILAKATEELDMVIGRERWVEEKDVVSLPYIDSIAKETMRLHPVAPMLVPRXARQDCGVAGYDIPRATRAFVNVWTIGRDPILWDNPNEFWPDRFMGMS

SEQ ID NO: 79464 - protein, 325 aa, Gossypium hirsutum
  unsure (1)..(325): unsure at all Xaa locations
  Clone ID: GOSHI-09MAY01-C2599_1.pep
TTHACEYTEGSGENEIVTPNEFKEMVDELFLLNGVLDIGDSIPWLTFLDLQGYIKRMKALSKKFDRFLEHVLDEHNARREGAEDYVAKDMVDVLLQLSEDPNLEVKLERHGVKAFTQDIIAAGTESSAVTVEWAISELLRKPEILAKAMEELDKVIGREQWVEEKDIGNLPYIKSIAKEAMRLHPVAPMLVPHVASQDCEIADYDIPKGTRALVNIWTIGRDPNLWDKPNEFWPDRFIGKSIDVKGHDFELLPFGAGRRMCPGYPLGIKVIQASLANVLHGFTWKLPNNTTXEDLNMEEIFGLSTPKKYPLEAIAEPRLPLHMYS

SEQ ID NO: 79465 - protein, 157 aa, Gossypium hirsutum
  unsure (1)..(157): unsure at all Xaa locations
  Clone ID: GOSHI-09MAY01-C102562_1.pep
SCEDSVHSASKKPHDDILAWSEESSGEFTVHSAXKLLQGIEIDPRAYALQSDYRKFYKKLWLFSLPCKIRITAWKISWNYLVIGVNIHYRKLSNNTICPRCGKEAETMNHLFRECPGFSNRLLHPSVGFFVVLYGQFGEKETREYMRRRADLVSSRR

SEQ ID NO: 79466 - protein, 201 aa, Gossypium hirsutum
  Clone ID: GOSHI-09MAY01-C2519_1.pep
MKDFLHFQSAANSIDDGGTNAPLEYPEPRCQSMLPFPMLSQPSNSNATACPDGPLEPDPSSRWVKRLKLSTSHPFASGTKISKMGEVSSCVKINKISKIMNCSKTSSEPTVGRSHVRSKLALDQHPVLLKSGESSSSGSGRKSQEISLSRTWIHRWCRRIAAPPNKKPDAAVLCEPQSSKAKSDKLQEKQFPSIAAMALMG

SEQ ID NO: 79467 - protein, 72 aa, Gossypium hirsutum
  Clone ID: GOSHI-09MAY01-C2509_2.pep
MRVVIKASSVPRHVHKTPPPPPPPCPPPPSFIYTTGPPGSLYPIDQNFGGASRNFQVGYLALLSGFMLLLAF

SEQ ID NO: 79468 - protein, 134 aa, Gossypium hirsutum
  Clone ID: GOSHI-09MAY01-C2509_1.pep
MSAKSTRFNPPAIAVTIFLVIATFAYPINGLKSRELDESGDQGVKCTPSCTQTPPPPPPPCPPPPSPPALSPPPTPKKPPTHCCPLPPTPPSIIYTTGPPGSLYPIDQNFGGASRNFQVGYLALLSGFMLLLAF

SEQ ID NO: 79469 - protein, 107 aa, Gossypium hirsutum
  unsure (1)..(107): unsure at all Xaa locations
  Clone ID: LIB3584-004-P1-K1-A2.pep
SPPLHTINGLKSRELDESGDQGVKCTPSCTQTPPPPPPPCPPPPSPPALSPPPKPKKPPTHCCPLPPTPPSIIYTSGPPGSLYPIDQNFGGACRYFQVGYLALLFXF

SEQ ID NO: 79470 - protein, 37 aa, Gossypium hirsutum
  Clone ID: GOSHI-09MAY01-C102462_1.pep
YLTTKTRGVYRMNNSLVTAFTGKPTILLKPHIKQSKP

SEQ ID NO: 79471 - protein, 316 aa, Gossypium hirsutum
  unsure (1)..(316): unsure at all Xaa locations
  Clone ID: GOSHI-09MAY01-C2459_1.pep
PTRPGKPTGITSDCAIPMDSASDIPRNKRSXPLYAQVVIVSSGTIKKWLTAQKVRVSYVKVLVFDEADHMLAEDGFEDDSLRIMRDIEKMSSHCQVLLFSATFSDTVKNFVSKIVKRDHNQLFVKTEELSLESVKQYKVNVPDELSKVMVIKDRILEFGERLGQTIIFVRTRNSASMLHKALVEFGYDVTTIQGALNQAERDKIVKEFKDGLTQVLISTDLLARGFDQQQVNLVINYDLPVKHDNRVEPDCEVYLHRIGRAGRFGRKGAVFNLLCGDMDQMIISKIENHFDSKIAEVPDWKNEEDFKTALRSAGLL

SEQ ID NO: 79472 - protein, 182 aa, Gossypium hirsutum
  Clone ID: LIB3582-055-P1-K1-G5.pep
RVGGRVGLEFGERLGQTIIFVRTRNSASMLHKALVEFGYDVTTIQGALNQAERDKIVKEFKDGLTQVLISTDLLARGFDQQQVNLVINYDLPVKHDNRVEPDCEVYLHRIGRAGRFGRKGAVFNLLCGDMDQMIISKIENHFDSKIAEVKPSLCVVLVQVHTFFFFCYHIHMIAFHNFVLGW

SEQ ID NO: 79473 - protein, 202 aa, Gossypium hirsutum
  Clone ID: GOSHI-09MAY01-C2479_1.pep
MDHAADAHRTDLMTITRFVLNEQSKYPESRGDFTILLNHIVLGCKFVCSAVNKAGLAKLIGLAGETNVQGEEQKKLDVLSNEVFIKALVSSGRTCILVSEEDEDAIIVEPSKRGRYCVVFDPLDGSSNIDCGVSIGTIFGIYMVKDDHEPTLADVLQPGKQMVAAGYCMYGSSCTLVLSTGKGVNGFTLDPSLGEFILTHPD

SEQ ID NO: 79474 - protein, 308 aa, Gossypium hirsutum
  Clone ID: GOSHI-09MAY01-C2469_1.pep
MVSGAAAPATSNPSARVRYLIRGLASEETRERARGVLCKNRLAYDNLAVLLWHSFGIMGVLLKIITSAYRPLLSDGLTENAVTQVCNAIALFQCVASHPDTRIPFIRATMPVYLYPFLNTMSNERSYECLRITSLGVIGSLAKVEDPEVIEYLLSTQIFPSCLRCMEVGKTLSRTVSTFIIYRILLSEKGLKYCFVLAERYLSVSQCLGKLVENLSEDDAENLPHLLKNIIGCYLRLSENERTRPQLSSYIPWKLLDGKYANIVRSDPMALADLRQLVCNLRTSKSCTAHCTDEPPASSDSPGTSFHD

SEQ ID NO: 79475 - protein, 151 aa, Gossypium hirsutum
  Clone ID: LIB3584-014-P1-K1-E1.pep
KKKKISPGVSIFCNVSSNLCSHPSSEKMVSGAAAPATSNPSARVRYLIRGLASEETREQSLDVLCKNRLAYDNLAVLLWHSFGIMGVLLKIITSAYRPLLSDGLTENAVTQVCNAIALFQCVASHPDTRIPFIRATMPVYLYPFLNTMSNE

SEQ ID NO: 79476 - protein, 90 aa, Gossypium hirsutum
  unsure (1)..(90): unsure at all Xaa locations
  Clone ID: GOSHI-09MAY01-C2419_12.pep
MSGRRDEDKKPGHQSAAHIILKVKGQDGNEVFFRIKWSTQLKKLMNAYCDRQSVDFNSIAFLFDGRRLRAXEMEDGDEIDAMLHQTGGTV

SEQ ID NO: 79477 - protein, 93 aa, Gossypium hirsutum
  Clone ID: GOSHI-09MAY01-C2419_9.pep
NFTRPSQEKKTQKQWFSLCHQQDGNEVFFRIKRNTQLKKLMNAYCDRQSVDFNSIAFLFDGHRLRGEQTSNELEMEDGDEIDVMLHQTGGTSA

SEQ ID NO: 79478 - protein, 76 aa, Gossypium hirsutum
  Clone ID: GOSHI-09MAY01-C2419_8.pep
RNPKTLGSTVEKNSSLERVKALHIWDMDVVVEPGIGWMELNEYLEPYGLFFPLDPGPGATIGGMCATRCSGSLAMM

SEQ ID NO: 79479 - protein, 58 aa, Gossypium hirsutum
  Clone ID: GOSHI-09MAY01-C2419_6.pep
NYKNSILTHIGIIFHISDQNNPNKQIKRYNLLKTRNSTSQHKKTPRIQNKKAISKYKK

SEQ ID NO: 79480 - protein, 100 aa, Gossypium hirsutum
  Clone ID: GOSHI-09MAY01-C2419_3.pep
IPGIFVALALRFDVSRGKGSQYFKSAFLGYTVGLVLTIVVMNWFQAAQPALLYIVPAVIGFLAAHCVWNGDVKPLLEFDELKTAVTSSDGSDDKSSKKVE

SEQ ID NO: 79481 - protein, 96 aa, Gossypium hirsutum
  Clone ID: GOSHI-09MAY01-C2419_1.pep
MSGQQEEDKKPGDQSAAHINLKVKGQDGNEVFFRIKRSTQLKKLMNAYCDRQSVDFNSIAFLFDGRRLRGEQTPDELEMEDGDEIDAMLHQTGGTV

SEQ ID NO: 79482 - protein, 71 aa, Gossypium hirsutum
  Clone ID: LIB3825-009-Q1-K6-F3.pep
NLFLGLILCQLGERFIIWIIFCVYCAFSLHFCIFYRLLLDSWLLTVYGMEMSNRFVLHPCLILSSIICLAW

SEQ ID NO: 79483 - protein, 112 aa, Gossypium hirsutum
  Clone ID: LIB3825-009-Q1-N6-F3.pep
FQGLATSRILHLRIGFNVYEMNHVQVLVKSKKMDSIPIEVHEDLMLDTNKNLENVGLIVFLNNDYSLVMVYDKFHYSALNIINEMIMVCICIWITIWLIGANMMCSYWSLTS

SEQ ID NO: 79484 - protein, 79 aa, Gossypium hirsutum
  Clone ID: uC-gsronu33B100a07b1.pep
ILFYFPSLLLSTLFHFLLYYLPFLIYSSTFIFLSLLLLPFHFSLPFFHFLLFLFQLPSLLSSYNFYLFIFYYHLPLHLF

SEQ ID NO: 79485 - protein, 112 aa, Gossypium hirsutum
  Clone ID: LIB3583-034-P1-K1-D9.pep
ENILQTRVKSKAFFWKLSYPFLYRKTFSFLLFSSKQIFFHIFISVHHLPSPSPSVISVDRWPYFYFEETVISVINGFFFLLIFTDLISRSGLVLAFFLLDGRSGLVLFFLDF

SEQ ID NO: 79486 - protein, 71 aa, Gossypium hirsutum
  Clone ID: uC-gsronu33B141e09b1.pep
PRVRVGLVLTIVVMNWFQAAQPALLYIVPAVIGFLAAHCIWNGEVGPLLEFDESKMAVVEGSEDKPSKKVE

SEQ ID NO: 79487 - protein, 94 aa, Gossypium hirsutum
  Clone ID: LIB3146-025-Q1-K2-B12.pep
FLYRKTFSFLLFSSKQIFFHIFISVHNLPSPSPSVISVDRRPYFYFEETVISVINSLHFCIFYRLLLDSWLLTVYGMEMSKPLFGVLTKLKDCG

SEQ ID NO: 79488 - protein, 77 aa, Gossypium hirsutum
  Clone ID: LIB3165-040-Q1-K1-E1.pep
ANFLPHLHLRGDLPSPSPSVISVDRWPYFYFEETVISVINGFFFLLIFTDLISRSGLVLAFFLLDGRSGLVLFFLDF

SEQ ID NO: 79489 - protein, 121 aa, Gossypium hirsutum
  Clone ID: uC-gsronu33B016d10b1.pep
PRVRPRVRHARICSIIRRSGKDVEELKNGTLVLEHKDERDLGLHLLQFAEVVEEACTNLLPNVVCDYLYSLSEIFSKFYSNPECKVIGSDKETSRLLLCEATAAVMRKCFNLLGITPIYKI

SEQ ID NO: 79490 - protein, 42 aa, Gossypium hirsutum
  Clone ID: LIB3828-012-Q1-K6-A12.pep
DGNEVFFRIKRSTQLKKLMNAYCDQQSVDFNSIVFLFDGHRQ

SEQ ID NO: 79491 - protein, 86 aa, Gossypium hirsutum
  unsure (1)..(86): unsure at all Xaa locations
  Clone ID: uC-gsflnu33B127b02b1.pep
RNPKKISSHSQEKKTQKQWFSLCHQQDGNEVFFRIKRSTQLKKLMNAYCDXQSVDFNSIAFLFDVRRLRGEQXPNELEIEDGDEID

SEQ ID NO: 79492 - protein, 97 aa, Gossypium hirsutum
  unsure (1)..(97): unsure at all Xaa locations
  Clone ID: LIB3149-032-Q1-K1-G4.pep
GHTLSLNGGVCIDMTLMKRVXKALHIWDMDVVVEPGIGWMELNEYLAPYGLFFPDDPGPGATIGGMCATRCSGSLAMMYVLLYYCLSLHSLSALLVC

SEQ ID NO: 79493 - protein, 68 aa, Gossypium hirsutum
  Clone ID: uC-gsronu33B061h03b1.pep
LCKMFSMFLYKYLFSIHQYLYTLFFNSLVFILLFSFLFSYTFYLLISTPFFFIISLYLYFFYPYLHFF

SEQ ID NO: 79494 - protein, 103 aa, Gossypium hirsutum
  Clone ID: GOSHI-09MAY01-C102432_1.pep
LLRNMVGPGEVDDELEDEVGSECAKYGTVTRVLIFEITEPNFPADEAVRIFIQFERSEDTTKALIDLDGRFFGGRVVKASFYDEERFSENELAPMPGEIPGFS

SEQ ID NO: 79495 - protein, 250 aa, Gossypium hirsutum
  Clone ID: GOSHI-09MAY01-C2439_1.pep
VFQAYIEAAEIMLDDDVATNKAIGSHGASFLQHQQNNSKRFSVLTHCNTGSLATAGYGTALGVIRALHAQGVLERAYCTETRPFNQGSRLTAFELVHEKIPATLVADSAAAALMKEGRVDAVVVGADRVTANGDTANKIGTYSLALCAMHHHIPFYVAAPLTSIDLSLSSGQEIVIEERSAKELLHTRGGLGEQVAASGISVWNPAFDVTPANLIAGIITEKGVITKNDMKDDAFDIKDFIEKATGKSTV

SEQ ID NO: 79496 - protein, 166 aa, Gossypium hirsutum
  Clone ID: GOSHI-09MAY01-C2429_2.pep
CLLGAAYFVAGADIGKFTMKTVDDIRTLNKSVHFRPACNFYNMNELAALWERKIRRTLPRVTVTEEDLLSAAAENIIPQSVVASFTHDIFIKGCQINFPIEGPNETEACSLYPNEPFRTLDDCFNDFLAKMKDENMKQSDENTKQSNEIPPPKPVVEAFAITATCA

SEQ ID NO: 79497 - protein, 203 aa, Gossypium hirsutum
  Clone ID: GOSHI-09MAY01-C2429_1.pep
MTVSVANGRVLIVGATGFIGRFVADASLDAGRPTYVLVRPSSGNQYSKDKVAKALRDRGAILLNGLANDKELMVKLLKEHQIEIVISALGGATILDQLSLVEAIHSAGTVKRFLPSEFGHDVDRADPVEPGLTMYKEKRQVRRLIEKLEIPYTYICCNSIASWPYHNNRHPSEVIPPLDHFEIYGDGSVKAYFVAGTDIGKFT

SEQ ID NO: 79498 - protein, 96 aa, Gossypium hirsutum
  Clone ID: uC-gsronu33B049h01b1.pep
HASGHDVDRADPVEPGLTMYKEKRQVRRLIEKLEIPYTYICCNSIASWPYHNNRHPSEVIPPLDHFEIYGDGSVKAYFFVGSHIGKFIIISCCLQF

SEQ ID NO: 79499 - protein, 81 aa, Gossypium hirsutum
  Clone ID: LIB3145-053-Q1-K1-H4.pep
GPTTTIGILPRSFHPWIILKTFGKGGVKLNLVAGPVLGKLPLKPVVDFRTLTKSVNFRPACNFYNMNKLAVCGKGKFREHF

SEQ ID NO: 79500 - protein, 263 aa, Gossypium hirsutum
  Clone ID: GOSHI-09MAY01-C2799_2.pep
PTRPRKFATLLHQCLNSIKKGSSKEISLASHTIGLLALTVGPGDNAREILEESMIPLSQAFKSGSDPSKTASLLECMAVITFVGGNDPEDTEKSMQIIWQVVHPKLGSNVVAVKPSAAVITAVVSAWSFLLTTMDGWRLSPKLWQESITYLSSLLDKDDRSVRIAAGEALAVIFEMGSLEKFAAETKGSSDGSASEGNKSKEGFSYIQGLKGKILNQVRDLSVEAGGKGSAKKDLNNQRNFFKDVLEFLEDCYSPNTSMKIGG

SEQ ID NO: 79501 - protein, 229 aa, Gossypium hirsutum
  Clone ID: GOSHI-09MAY01-C2799_1.pep
SKRPVNLEKLCRSITYLSSLLDKDDRSVRIAAGEALEVIFEMGSLEKFATEAEGSNNGSVSEGNKSKEGLLHIQGLRAKILNQVRDLSVEAGGKGSAKKDLNYQRSLFKDVLEFLQDGYCPETSMKIGGESLQTSTWSQLIQSNFLRRFLGGGFAKHMQENEFLQDVFGFTPKRNLVGGEHVSNNLKRMYKSPNSVINKARTQHLNKQRMLSEGKKIGHFAVNVGDEDS

SEQ ID NO: 79502 - protein, 95 aa, Gossypium hirsutum
  Clone ID: AI055631.1.pep
QPWMVGGLVPNFGKSKRTLHTLFFFSLIVYLLLNRLIHLEFKFNQFWDLKYLKDQVNEPCENYRYYGTTKENHNVEQLDWLNRLISLGHLCKSIT

SEQ ID NO: 79503 - protein, 127 aa, Gossypium hirsutum
  Clone ID: LIB3145-057-Q1-K1-H6.pep
DAWAVSQAFKSGYESSKIASLLECLAIITFVGGIEPEETEKSMQIMWQLVHPKLGSNVITVKPSAVVITAVGSAWSFLLTTMDRWSLSPKLWLDKPCEILMLPRYNELRDPSILRNYADPSHICLVC

SEQ ID NO: 79504 - protein, 219 aa, Gossypium hirsutum
  unsure (1)..(219): unsure at all Xaa locations
  Clone ID: GOSHI-09MAY01-C2789_1.pep
GFGSYLKRQTSRGSWMPRGDALKKLEERGVVVRFVIGRSANRGDSLDRHIDEENHRTKDFFILEGHEEAQEELPKKXKFFFSTAVQIWDAEFYVKVDDNIDVDLEGLIGLLEHRRRQDSAYVGCMKSGEVVSEEGKLWYEPDWWKFGDEKSYFRHASGSLFILSKNLAQYINAHSASLKTYAHDDTSVGSWMMGVQAIYIDDNRLCCSSIRQDKVCSVA

SEQ ID NO: 79505 - protein, 117 aa, Gossypium hirsutum
  unsure (1)..(117): unsure at all Xaa locations
  Clone ID: GOSHI-09MAY01-C102762_2.pep
LSQHCFTCCKGISSHSTLLSGILMFIITYASPMFILLSLVIYISMKNMAHLVIPEXSRSWRSSHDDAGFFMPHTAGHKFNSLDFIHGCIAVNAESLICLECFLTQVSSESHRKILGD

SEQ ID NO: 79506 - protein, 98 aa, Gossypium hirsutum
  Clone ID: LIB3829-026-Q6-K6-G12.pep
FLRKRSWRSSHDDAGFFMPHTAGHKFNSLDFIHGCIAVNAESLICLECFLTQVLVCLCYSRVHLYWRLYRCHNWILCLFCTGHAEAETIPLLATSQQH

SEQ ID NO: 79507 - protein, 235 aa, Gossypium hirsutum
  Clone ID: GOSHI-09MAY01-C2769_2.pep
MSTLDATRAELALIVLYLNKAEARDKICRAIQYGSKFLSNGQPGTAQNVDKSTSLARKVFRLFKFVNDLHGLISPVPRGTPLPLALLGKSKNALLSTFLFLDQIVWLGRTGIYKNKGRTELIGRISLFCWMGSSICTTLVELGELRRLSKSMKKLEKNLKDSDKYKSEEYCAKLQKSNERTLALVKAGLDIVVAVGLLQLAPKKVTPRVTGALGFATSLISCYQLLPSPSKSKVN

SEQ ID NO: 79508 - protein, 235 aa, Gossypium hirsutum
  Clone ID: GOSHI-09MAY01-C2769_1.pep
MSTLDATRAELALVVLYLNKAEARDKICRAIQYGSKFLSDGQPGTAQNVDKSTSLARKVFRLFKFVNDLHGLISPVPQGTPVPLVLLGKSKNALLSTFLFLDQIVWLGRTGIYKNKERAELIGRISLFCWMGSSICTTLVELGELGRLSASMKKLEKRLKDSDKYKNEEYRAKLQNSNERTLALVKAGMDIVVAVGLLQLAPKKVTPRVTGAFGFVSSLISCYQLLPSPPKSKTP

SEQ ID NO: 79509 - protein, 58 aa, Gossypium hirsutum
  Clone ID: LIB3135-009-Q1-K1-D4.pep
MHANGVFSLYQDKICRAIQYGSKFLSDGQPGTAQNVDKSTSLARKVFRLFKVSHNVKY

SEQ ID NO: 79510 - protein, 125 aa, Gossypium hirsutum
  Clone ID: LIB3135-019-Q1-K1-E10.pep
MGALEAGGAGLGRSSLLVITFGARVRIPGAIQYDSKVLSDGQAGTPQNVDKSTSLARKGIRLFKIVNDLHGLISPVPQRTPLPLVLLGKSKNALVSTFLFLDQIVWLGRTGIYKNKKRAELIGQI

SEQ ID NO: 79511 - protein, 102 aa, Gossypium hirsutum
  Clone ID: LIB3272-051-P1-K1-B8.pep
MSTLDATRAELALVVLYLNKAEARDKICRAIQYGSKFLSDGQPGTAQNVDKSTSLARKVFRLFKFVNDLHGLISPVPQGTPLPLVLLGKSKNALLSTFLFLD

SEQ ID NO: 79512 - protein, 274 aa, Gossypium hirsutum
  Clone ID: GOSHI-09MAY01-C2739_1.pep
GRVGGRVGDVHPITPSLDKLWDGHDGAKKEHLPNDKKPSSLLFPSSRRFAFADDGASDHPILDWKSSSMSQQDVTKSFTALESTPTPSSKSEETSITPPEAWGGEKISDKFAHLRQLPSRFGMPASGGLTTSSIYAGQDQSSMLSQTSSNLSYENLHTKDASSNQEASSLGFPEHFSSSSMSALSFGSKGITRAGSLDSPKLASLAPPRRFSTYAERISTTSAFSDGTSHLVASPKTKKTGAVTREELFNSRSRSDSLTAAASGVFPALYGGTF

SEQ ID NO: 79513 - protein, 173 aa, Gossypium hirsutum
  Clone ID: GOSHI-09MAY01-C2729_2.pep
MYNNLGAQPGVPRPPTNPQPNPFGNSFYGAGSGLIRGGLGAYGEKILGSSSEYVQSNISRYFSDPQYYFQVNDQYVRNKLKVVLLPFLHRGHWTRITEPVGGRLSYKPPIYDINAPDLYIPFMAFGTYVVLAGLSLGLQGKFSPEALNWLFVKGLFGWFLQVSLLKVTLLSLG

SEQ ID NO: 79514 - protein, 267 aa, Gossypium hirsutum
  Clone ID: GOSHI-09MAY01-C2729_1.pep
MYNNLGAQPGVPRPPVNPQPAPFGNAFYGAGSGLIRGGLGAYGEKILGSSSEYVQSNISRYFSDPQYYFQVNDQYVRNKLKVVLLPFLHRGHWTRITEPVGGRLSYKPPIFDINAPDLYIPFMAFGTYVVLAGLSLGLQGKFSPEVLNWLFVKGLFGWFLQVMLLKVTLLSLGSGEAPLLDIMAYAGYTFTGLCLAVLGRIVWRYSYYFLMPWTCLCMGVFLVKTMKRVLFAEVRSYDSSKHHYLLLFVALAQFPLFTWLGNISVNW

SEQ ID NO: 79515 - protein, 84 aa, Gossypium hirsutum
  Clone ID: LIB3585-028-P1-K1-D12.pep
SLNKQPVEYFGTKLSYKPPIFDINAPDFFMRFMAFGSYCGLAGLLLRAKGSFCPRVLAEVLIKVYVGRINPIYWSIHEGVVRLF

SEQ ID NO: 79516 - protein, 69 aa, Gossypium hirsutum
  Clone ID: GOSHI-09MAY01-C2699_4.pep
PRVREIVVSKALVAKIDRPMGIVCFQVAKDSNEILNSWASNLEKLLDLVERAGRPRPKETMVHKAALLV

SEQ ID NO: 79517 - protein, 132 aa, Gossypium hirsutum
  unsure (1)..(132): unsure at all Xaa locations
  Clone ID: GOSHI-09MAY01-C2699_3.pep
MLREVADLKLLADQCKSNPSIIHTPSLSFFKSYLLSLGAQIPTDPRTDRGGVKMEEPEQHSDDKKPYFSHEEDDDIIESDLELDNNGXVEPDNNPPQKMGDSSAEVTEDKRDAAQSEKLKAMDAISGGKLDE

SEQ ID NO: 79518 - protein, 100 aa, Gossypium hirsutum
  Clone ID: GOSHI-09MAY01-C2699_2.pep
EHNILVVSKYYSRITLKRLAVLLCLTIQEAEKHLSEMVVSKALVAKIDRPMGIVCFQVAKDSNEILNSRASNLEKLLDLVEKSCHQIHKETMVHKAALKV

SEQ ID NO: 79519 - protein, 443 aa, Gossypium hirsutum
  Clone ID: GOSHI-09MAY01-C2699_1.pep
MEGKNANLEAAIDQLLNVEKQMRFAGDVVGTKKAVSDILQLCFEAKDWKSLNEQIVNLSKKRGQLKQAVTAMVQQAMQYIDEAPDLETRIELIKTLNTVSAGKIYVEIERARLIRRLAKIKEEQGLIAEAADLMQEVAVETFGAMAKTEKIAFILEQVRLCLDRQDYVRAQILSRKISPRVFEVDTSKEKKKPKEGDNVVEEPPADIPSLLELKRIYYELMIRYYFHNNDYLEICRCYKAIYEIPSIREDPSQWIPVLRKICWYLILAPHDPMQSSLLNSTLEDKNLSEIPKFKLLLKQLVTMEVIQWTSLWNLYKDEFENEKNMLGGSLGDKAAEDLRMRIIEHNILVVSKYYSRITLKRLAELLCLTIQEAEKHLSEMVVSKALVAKIDRPMGIVCFQVAKDSNEILNSWASNLEKLLDLVEKSCHQIHKETMVHKAALKV

SEQ ID NO: 79520 - protein, 95 aa, Gossypium hirsutum
  unsure (1)..(95): unsure at all Xaa locations
  Clone ID: LIB3584-006-P1-K1-G1.pep
MEGKNANLEAAIDQLLNVEKQMRFAGDVVGTKKAVSDILQLCFVAKDWKSLNEQIVNLAKKXGQLKQAVTAMVHFVLHFIYVAPDLVTSFELXMT

SEQ ID NO: 79521 - protein, 328 aa, Gossypium hirsutum
  Clone ID: GOSHI-09MAY01-C2689_1.pep
LDARIVDVNGEILDRAAMGEDLVWAIRGGGGASPARPLAWKIKLVAVPETVAVFTVPKTLEQGATKILYRWQQVADKLDDDLFIRVVIQVTKTSQTGKRTVTTAYNALYLGDAERLLQVMDQSFPELGLARKDCIETSWIKSVLYIAGFPSETPPEVLLEGKSLFKNYFKAKSDFVQQPILETALEKLWEILLEEESPLMIWNPYGGMMANISDSAIPFPHRKGNLFKIQYVTSWYEGSKDATRKHMDWIKGLYDYMSAYVPTSPRAAYVNYRDLDLGMNHNNASFTEASVWGAMYFKGNFRRLVKIKSKVDPGNFFRHEQSIPVVLE

SEQ ID NO: 79522 - protein, 76 aa, Gossypium hirsutum
  Clone ID: GOSHI-09MAY01-C102682_1.pep
FSEIACQHDLQKILTDHAACMQFKRKPGRLPFHQLKFEQYPSPFQHQFRMPRYQNLSISQVNNSSPPPLVIRYHPA

SEQ ID NO: 79523 - protein, 289 aa, Gossypium hirsutum
  Clone ID: GOSHI-09MAY01-C2649_1.pep
HSRCQGSNDRVNHCSAIEIQLQLTAFKTFLDLAGNQLTGKDFTEAFDAACFPLTLFSSSFDAGWASGISATVIQGLLDMLVEGGADNVNQCFLEASRFGSTELVRILLQIAQRNSLDVDVDLALGFASHYCKIGTMECLVEEGNAMAFLGPLMRAAERGCMQVVQWFVKRGCRDMELCLALTAATSSSQVGVAAYLLPHVPKHVLTALSIEILKAAGERSGGSLDGVAFLLHSDFLGDAAATYAVADSIAKSDDEAVAPELRAFVQEHWSEAAFLDGLKQGQEHYMKLM

SEQ ID NO: 79524 - protein, 52 aa, Gossypium hirsutum
  Clone ID: uC-gsronu33B162a12b2.pep
RLTGADAACFPLTLFSSSFDAGWASGISATVIQGLLDMLVEGGANTVNQRET

SEQ ID NO: 79525 - protein, 302 aa, Gossypium hirsutum
  unsure (1)..(302): unsure at all Xaa locations
  Clone ID: GOSHI-09MAY01-C2619_1.pep
SKGAKATLNAQILDLPAPGRFXQVKWSGGDKLTLNLPISIRTEQIKDDRPEYASVRAILYGPYLLSGYSSGDWDIKTGSTGSDADWISPVPASYNNHLVTFSQESGESTFVLTNMNQSIRMEKFPKAGTDAAIRATFRLIFDDTSEAFAPRPPPVRGTGVLESFDFPGMVLVPQGTENNLVVTDPPNDTATSSFGIVHGLDGKDNRGGGGSVTQKGCYIYNGVNYSSSIGMKLSCNSSSSSSEAGFSQATSFTMNNGLSAYHPISFVAKGRNRNYLMXPLLSIRDESYSVYFNLHPWCFRFR

SEQ ID NO: 79526 - protein, 102 aa, Gossypium hirsutum
  Clone ID: LIB3584-054-P1-K2-A2.pep
TLVLTHMNQSIRMEKFHIARTDAAIRATFRLMFDDTSEKISRIEEAIGKTVMLESFDFSRMVLVPQGTENNLVVTDPANDTATSSFGIVHGLDGKDNSVSLE

SEQ ID NO: 79527 - protein, 223 aa, Gossypium hirsutum
  Clone ID: GOSHI-09MAY01-C2629_1.pep
VFVFLISAIPIAYIISEERAVPATHVFHYHSTGFFRECAKWDDQGRRFLVSFLEGGVGEILVPDDYAPGPGDVVLKEVTVVKDFDLAGNSSLGIAVDRLRNRLLVVVADLLGNRYSGLAAYDLSSWKRLFLTRLSGPSDEKSFADDVAIDADGNAYVTDAKASKIWKVGAHGELLSIIRNPLFTPRQWFKTLVALNGIVYHPAGYLLVLHPFRGVLRLVGLAQ

SEQ ID NO: 79528 - protein, 225 aa, Gossypium hirsutum
  Clone ID: GOSHI-09MAY01-C2149_1.pep
NSGGGGNIRTKKIFVGGLPPTLTEDGFRQYFEAYGHVTDVVIMYDQNTQRPRGFGFISFDSEEAVDRVLHKSFHDLNGKQVEVKPALPKDANPGGASRSMGGGAGGFGGYQGYGSSGGNSRSYDGRMDSNYMRAQGTGAGFPPYGSSGYAPGYGYGPASNGVGYGSYGNYGGAGAGYGAPAGAAYGNPNAGYASGPSGAPRSSWGTQTPSGYGAMGYGNAAPWGA

SEQ ID NO: 79529 - protein, 178 aa, Gossypium hirsutum
  Clone ID: GOSHI-09MAY01-C2179_2.pep
MVKFTAEELRAIMDRKHNIRNMSVIAHVDHGKSTLTDSLVAAAGIIAQEVAGDVRMTDTRADEAERGITIKSTGISLYYEMSDDSLKSYKGERQGNEYLINLIDSPGHVDFSSEVTAALRITDGALVVVDCIEGVCVQTETVLRQALGERIRPVLTVNKMDRCFLELQVDGEEAYQTF

SEQ ID NO: 79530 - protein, 352 aa, Gossypium hirsutum
  Clone ID: GOSHI-09MAY01-C2179_1.pep
MVKFTAEELRAIMDRKHNIRNMSVIAHVDHGKSTLTDSLVAAAGIIAQEVAGDVRMTDTRADEAERGITIKSTGISLYYEMSDDSLKSYKGERQGNEYLINLIDSPGHVDFSSEVTAALRITDGALVVVDCIEGVCVQTETVLRQALGERIRPVLTVNKMDRCFLELQVDGEEAYQTFQRVIENANVIMATYEDPLLGDVQVYPEKGTVAFSAGLHGWAFTLTNFAKMYASKFGVDESKMMERLWGENFFDPATRKWTTKNTGTATCKRGFVQFCYEPIKQIINTCMNDQKDKLWPMLQKLGVTMKSEEKDLMGKALMKRVMQTWLPASSALLEMMIFHLPSPSVAQKYRVE

SEQ ID NO: 79531 - protein, 122 aa, Gossypium hirsutum
  unsure (1)..(122): unsure at all Xaa locations
  Clone ID: uC-gsflmaxxa002d07b1.pep
MVKFTAEELRAIMDRKHNIRNMSVIAHVDHGKSTLTDSLVAAAGIIAQEVAGDVRMTDTRADEAERGITIKSTGISLYYEMSEDSLKSYKGERHGNEYLINLIDSPGHVDXSSEVTAALRIL

SEQ ID NO: 79532 - protein, 66 aa, Gossypium hirsutum
  Clone ID: LIB3135-046-Q1-K1-D2.pep
YFKNLNLGLLLLIRDDKLALSPADPLVLGDCAFSYLVLLLYEHYWAFCYVIIFGVIAFLSNDRIPN

SEQ ID NO: 79533 - protein, 62 aa, Gossypium hirsutum
  Clone ID: LIB3583-022-P1-K1-E1.pep
LFSLRILWFLGDCAFSYLVLLLYEHYWAFCCVKKKKKKKKKKKKKKKKKRGKSKKKIRLTRG

SEQ ID NO: 79534 - protein, 120 aa, Gossypium hirsutum
  Clone ID: GOSHI-09MAY01-C2109_1.pep
MPRTTIYFDGAFDSSSFTSATGLVVRDMTGNLMALKSIIHNNISSSFAAEAHACLEGIKLGISLGLQSATIMGDSKTIIKKSQTTSPDKSVIGAIINDIQNRKRCFQEIIFQHIHRSGNS

SEQ ID NO: 79535 - protein, 95 aa, Gossypium hirsutum
  Clone ID: LIB3582-029-P1-K1-C2.pep
VFKRGNDIQCRLFCYALWLIWFSRTTVYCDAAFDSSSSTSATGLVVQDLTGSLMALKSTIHNSISSPFAAEAYACLGYKIRDLTRFTIGKNHGRL

SEQ ID NO: 79536 - protein, 65 aa, Gossypium hirsutum
  Clone ID: LIB3148-044-Q1-K1-C4.pep
EDMPRTTIYFDGAFDSSSFTSATGLVVRDMTGNPLALKAIIHHKISSSFAAGRVGGRVGPARLFR

SEQ ID NO: 79537 - protein, 59 aa, Gossypium hirsutum
  Clone ID: LIB3145-022-Q1-K1-B2.pep
SSTSATGLVVQDLTGSLMALKSTIHNSISSPFAAEAYACLGYKIRDLTRFTIGKNHGRL

SEQ ID NO: 79538 - protein, 373 aa, Gossypium hirsutum
  Clone ID: GOSHI-09MAY01-C2129_1.pep
PASAHASEMTTPVCPFVKAARPDDNGSAKKSTVGGSEATRKDSGDSATVSPKCPFGYDSNNFKLGPLSCMICQALLFDCTKCIPCSHLFCKVCISRFKDCPLCGADIEKLEADTNLQSMVDRFIEGHARIKRAHVGVNGEGEQVSNDHKKVIYEDVSLDRGAFLVQQAMRAFRAQNIESAKSRLIMCAEDIRDQLEKMGNTSELCSQLGAVLGMLGDCCRAMGDAAAAINYFEESVEFLTKLPADDLEITHTLSVSLNKIGDLKYYDGDLQASRSYYFRSLGVRRDVIKNHPGVASQILDVAVSLAKVADVDRTLGKEDVAVDGFQEGIKLLESLTLKSEEAGLEPRRLSVLAFLKSQLEEKQHEATASSVSS

SEQ ID NO: 79539 - protein, 217 aa, Gossypium hirsutum
  unsure (1)..(217): unsure at all Xaa locations
  Clone ID: GOSHI-09MAY01-C102082_1.pep
GVEFYDAWDELSSNNAPHTFVRDIEAELREIRLNLLVEIEKRKKAXETLGEMRCKWQRISQEFAVAGLALPVDPVDATDDELVKPVEELRQQESVARLVSLSVGRGVARAEMQMEMDSQIKLKNFEVARLLARLPYYKAVNQEMSQRTQEAIEMARRDSQRKKRSQKWVWGSIAAAITLGMTALAWSSLPSGKASSGFSARITQAPVSDDAIPKPAK

SEQ ID NO: 79540 - protein, 244 aa, Gossypium hirsutum
  Clone ID: GOSHI-09MAY01-C2059_1.pep
RAALCKSPYMLVKGWHRLFHDLVGREGPFLETICVPFAGLAILLWPLAVIGAVLGSMVSSIFLGAYAAVIGYQESSFWYGLCYIVASLSIYDEYSTDVLDMPEGSCLPRPRYRRHRNESFSKSDSFRPPARIDSLTNARLDLKPLELLEGLFKECHVHGEKMVSEGLITSKDIDDAKSIKGSRVVSIGLPAYCFLQALLRSVDANRLGILLSDNTEITATNRPKDAFFDWFLNPFLILKEQIRA

SEQ ID NO: 79541 - protein, 354 aa, Gossypium hirsutum
  Clone ID: GOSHI-09MAY01-C2049_1.pep
MTSHNGVCVSQEQSDWRTQTQVVENTSSEVEEDVLSFDNQRIKDPEVISHSSYLPNSTVSLHLSDHSRAHSLQHSETFGAVNMNADTPLVDNKVRDNLHPHGSRISSLSNEYPEKYISSGISSDITSGGFLPLLNEEQGKQMGKPLGNAECNTGKDTGENSIISNILSLDFDTWDESLTSPQNLAKLLGDTDKESNSLKLSSSWKALNNNQSRFLFARQEDSKYNSFDADSSFGVFGQMLRNHPSSQDFAESRDLYPNKFGISNGFSSRNFKDSDKFTSSPSVFSSNKLSVVSRTQISAPPGFSVPSKAPPPGFSYHERVDPVFDTVSENHLMDSSSLLRNSYQARTSVGIGGP

SEQ ID NO: 79542 - protein, 315 aa, Gossypium hirsutum
  Clone ID: GOSHI-09MAY01-C2069_2.pep
KKYDIKLIIAILAEEKHLPMYQEMASKPNVEYIAGGATQNSIKVAQWMLQIPGATGYIGCIGKDKFGEEMKKNSKAAGVNVQYLEDETAPTGTCAVCVVGGERSLIANLSAANCYKSEHLKKPENWALVEKAKYFYIAGFFLTVSPESIQLVAEHAAAKNKVFSMNLSAPFICEFFKDAQEKALPYMDFVFGNETEARTFSKVHGWETDDVAEIALKISQWPKASGTYKRTTVITQGADPVIVAEDGKVKQFPVILLPKEKLVDTNGAGDAFVGGFLSQLVQGKSIEDCVRAGCYASNVIIQRSGCTYPEKPEFK

SEQ ID NO: 79543 - protein, 233 aa, Gossypium hirsutum
  Clone ID: GOSHI-09MAY01-C2069_1.pep
MAYEGILLGMGNPLLDISLVVDEEFLKKYDIKLNNAILAEEKHLPMYQEMASKPNVEYIAGGATQNSIKVAQWMLQIPGATGYIGCIGKDKFGEEMKKNSKAAGVNVQYLEDETAPTGTCAVCVVGGERSLIANLSAANCYKSEHLKKPENWALVEKAKYFYIAGFFLTVSPDSIQLVAEHAAAKNKVFSLYLSAPFCLIHNSYVAIIMLYVMSLFRYSTLLINLILMMLITY

SEQ ID NO: 79544 - protein, 144 aa, Gossypium hirsutum
  unsure (1)..(144): unsure at all Xaa locations
  Clone ID: LIB3583-021-P1-K1-H4.pep
MFISIVFPHKSSLIANLSPANCYKSEHLMNLINXTNEMECLTHIYYMTQFLTVSPESIQLVAEHASAKNKVFSMNLSAPFICEFFKDAQEKALPYMDFVFGNETEARTFSKVHGWETDDVAQIALKISQWPKASGTYKRTTVIT

SEQ ID NO: 79545 - protein, 95 aa, Gossypium hirsutum
  unsure (1)..(95): unsure at all Xaa locations
  Clone ID: LIB3828-034-Q6-K6-B5.pep
TGADSSRNNRRTTEKTQGAKPEREADQGKAKHXPVIFXPXGLLDPIGAGNAPDGGVLSQLAQGKSIEDCVRAGCYASNVIIQXSGCTYPEKPELK

SEQ ID NO: 79546 - protein, 139 aa, Gossypium hirsutum
  unsure (1)..(139): unsure at all Xaa locations
  Clone ID: LIB3146-026-Q1-K2-A6.pep
IKXNNAILAEEKXLFFFFFFFFCXXXMYIAGGATQNSIKVAQWMLXIPGATGYIGCIGKDKFGEEMKKNSKAAGVNVQYLEDETAPTGTCAVCVXGGERSLIANLSAANCYKSEHLKKPENXWRLVERPITFYFAGFFL

SEQ ID NO: 79547 - protein, 62 aa, Gossypium hirsutum
  Clone ID: LIB3083-099-Q1-L1-C12.pep
IKVAQWMLQIPGATGYIGCIGKDKFGEEMKKNSKAAGVNVQYLEDETAPTGTCAVCVVGGER

SEQ ID NO: 79548 - protein, 79 aa, Gossypium hirsutum
  Clone ID: LIB3189-005-P1-K1-F2.pep
SGKKNYIYKWSERERDLFQFHTALAEWLCTSAMSIDLPLSGCIFILSCNFVFLKIDLELRIMVLLMLYDHVKSGSISRG

SEQ ID NO: 79549 - protein, 82 aa, Gossypium hirsutum
  unsure (1)..(82): unsure at all Xaa locations
  Clone ID: LIB3584-002-P1-K1-E3.pep
ENSKAAGVNVQYLEDETAPAXTCAVCVVGGXRIMMLESIYVLSTGIARFKLGSICRSLIANLSAANCYKSEHLKKPDNWAFG

SEQ ID NO: 79550 - protein, 55 aa, Gossypium hirsutum
  unsure (1)..(55): unsure at all Xaa locations
  Clone ID: LIB3083-076-Q1-L1-C11.pep
GGEKGIPPLQKIITSSPHXYDFFFKKNHPKKTFTTIHKLISTISLLNETIGSFHE

SEQ ID NO: 79551 - protein, 222 aa, Gossypium hirsutum
  Clone ID: LIB3583-021-P1-K1-C12.pep
VKFQLPDDDLDESDCDFDEFGDEFDDEFDDEFDDDDDDEGEFGHGHGYGHGHGHCHGHQMQNKMVPMMGKGHGSYGPNGMVNGPPMNGKKGGGNGKKGDAFDIPIVMKGMGENKDGKHGNGGKIGGGEKNKGGKQNKGGGGKKGGGGLLGFFKKSKGGKDCNHKKGKNEWDGKNKGAYKGNGGKNGGGNNNGNGAKKGGGRNGGGSHEMNKLKMVGFMTLMY

SEQ ID NO: 79552 - protein, 182 aa, Gossypium hirsutum
  Clone ID: LIB3829-005-Q6-K6-G7.pep
MMMMMMKGNLVMVMDMDMDMAIAMGTKCKTRWYMMGKGHGSYGPNGMVNGPPMNGKKGGGNGAKKGGGRNGGGSHEMNKVKNGGFHDIDVINHGKKGGGGGGAGAGAGAGGSKNMGQMGQMGRQMGQMGGQMGYNMDQMGRMGNYPISQMGNFPAVQGLPAAAAAAATAMNGVGWRILPKDG

SEQ ID NO: 79553 - protein, 144 aa, Gossypium hirsutum
  Clone ID: GOSHI-09MAY01-C102362_1.pep
MSSAAVAAAKGGRGRGRGKPTAKAVSRSSKAGLQFPVGRVARFLKKGRYSERVGSGSPVYLSAVLEYLAAEVLELAGNAARDNKKNRIIPRHIQLAVRNDEELSRLMGGVTIANGGVLPNINQSLLSRKAGKGKVETGSASQAF

SEQ ID NO: 79554 - protein, 273 aa, Gossypium hirsutum
  Clone ID: GOSHI-09MAY01-C2379_1.pep
RFVDSSLSSSRYIFSTYLSLLFPRYFYTSERFHLTHYLSNDINGYFYVFPLFHRRYKDKKEDAAEPEVDPERDQRTVFAYQISLKASERDVYEFFSRAGKVRDVRLIMDRNSRRSKGVGYIEFYDVMSVPMAIALSGQPLLGQPVMVKPSEAEKNLVQSTTSASAGQTGPYAAGGRKLYVGNLHFNITEDQLRQVFEPFGSVELVQLPLDETGHSKGFGFVQFARLEDATNALNLNRQLEIGGPLINVSTVTDQGVSQDFGTNASAADLDDDD

SEQ ID NO: 79555 - protein, 216 aa, Gossypium hirsutum
  unsure (1)..(216): unsure at all Xaa locations
  Clone ID: LIB3543-001-Q1-K1-D11.pep
RTRVIERKXRDRESERDRERERERERSRRSRSRSEREPDKSRDMEFREREKEREPRERDRGSRRYKDKKEDAAEAEVDPERDQRTVFAYQISLKASERDVYEFFSRAGKVRDVRLIMDRNSRRSKGVGYIEFYDVMSVPMAIALSGQPLIGQPVMVKPSEAEKNLVQSTTSASAGQTGPYAAGGRKLYVGNLHFNITEDQLRQVFEPFGSVELVQL

SEQ ID NO: 79556 - protein, 89 aa, Gossypium hirsutum
  unsure (1)..(89): unsure at all Xaa locations
  Clone ID: GOSHI-09MAY01-C2369_2.pep
MDGGDVGMAAPESTEADLDDMKRRXNETVDEAPALREMQAKVEKEMGSGQDPAAAATSQANRQEADSRSXFVGNADYSCTXPEEVQQHF

SEQ ID NO: 79557 - protein, 195 aa, Gossypium hirsutum
  Clone ID: GOSHI-09MAY01-C2369_1.pep
MEGDDVDMAAAESTEADLDDMKKRLKEMEEEAAALREMQAKVEKEMGSVQDPAAAAATSQANREEVDSRSVFVGNVDYSCTPEEVQQHFQTCGTVNRVTIRTDKYGQPKGYAYVEFVEAEAVQEALLLNESELHGRQLKVTAKRTNIPGMKQYRPRRSNPFMRPRGPFMAPYFFAPYGYGKVPRLKMATRYSPYY

SEQ ID NO: 79558 - protein, 116 aa, Gossypium hirsutum
  Clone ID: LIB3083-082-Q1-L1-C3.pep
SLEFFFFFFSVRGFSPYFKKTLILCNVQDLDDMKKRLKEMEEEAAALREMQAKVEKEMGSVQDPAAAAATSQANREEVDSRSVFVGNVDYSCTPEEVQQHFQTCGTVNRVTIRTDK

SEQ ID NO: 79559 - protein, 169 aa, Gossypium hirsutum
  unsure (1)..(169): unsure at all Xaa locations
  Clone ID: GOSHI-09MAY01-C2339_3.pep
MPYGEEWRSAALTRIRELVSFRPGCKPKKCRQECKXKSCLSVVKTLGNLCIEGYPPASKIGFQISEELCIGCGICVKKCPFEAIQIINLPRDLDKDTTHRYGPNTFKLHRLPVPRPGQVLGLVGTNGIGKSTALKVLAGKLKPNLGRFNNPPDWQEILTYFRGSELQNY

SEQ ID NO: 79560 - protein, 97 aa, Gossypium hirsutum
  Clone ID: GOSHI-09MAY01-C2339_2.pep
HASGFILHALKTAFVVEHELGMATYLADRVIVYEGKPSVDCIANAPQSLLTGMNLFLSHLDITFRRDPTNYRPRINKLDSTKDREQKSAGSYYYLDD

SEQ ID NO: 79561 - protein, 533 aa, Gossypium hirsutum
  unsure (1)..(533): unsure at all Xaa locations
  Clone ID: GOSHI-09MAY01-C2339_1.pep
MAPNTFKLHRLPVPRPGQVLGLVGTNGIGKSTALKVLAGKLKPNLGRFNNPPDWQEILTYFRGSELQNYFTRIPARPLKAIIKPQYVDHIPKAVQGNVGQVLDQKDEREMKAELCADLELNQVIDRNVGDLSGGELQRFAIAVVAIQNAEIYMFDEPSSYLDVKQRLKAAQVIRSLLRPNSYVIVVEHDLSVLDYLSDFICCLYGKPGAYGVVTLPFSVREGINIFLAGFVPTENLRFRDESLTFKVAETPQESAEEIETYARYKYPTMTKTQGNFKLKVMEGEFTDSQIIVMLGENGTGKTTFIRMLAGLLKPDNVKGSDVEIPEFNVSYKPQKISPKFQSTVRHLLHQKIRDSYMHPQFVSDVMKPLLIEQLMDQEVVNLSGGELQRVALCLCLGKPADIYLIDEPSAYLDSEQRIVASKVIKRFILHAKKTAFVVEHDFIMATYLADRVIVYEGKPSVDCIANAPQSLLTGLNPFLSHRDIXFRGNPPXFRTKTHQLDPPRDRNQNSPGSFFSPNNGLTLLRAVGHCEKN

SEQ ID NO: 79562 - protein, 343 aa, Gossypium hirsutum
  unsure (1)..(343): unsure at all Xaa locations
  Clone ID: GOSHI-09MAY01-C2329_1.pep
RLLTSSWGWPKTHGFNSTLTEPVDTSGNRTDQITKKNPNLHPELKEHLTALCDDKKTTLVVLSGSKSEVLDKNFAEYDMXLPAENGMFLRHTKADWMTTMPEHLNMEWVDSLKHVFEYFTERTPTSQFEIRTTSLVWNYKYADVEFGRLQARVMLQHLWTGPISNASVDVVQGSRSVEVRPVGVTKGAAIDRILGEIVHNTSMTTPIDYVLCVGHFLGKDEDVYTFFEPELPSDVNMAKCKPIDAPKLPTEKKAPSKLPAAKSGPKSSQTKTPKPSPAPDKRTGNNHSGGSSRRASPEKVKEKEKMAWSVLDLKGDNYFSCAVGRKRTSARYLLGSSDDVVSF

SEQ ID NO: 79563 - protein, 107 aa, Gossypium hirsutum
  unsure (1)..(107): unsure at all Xaa locations
  Clone ID: uC-gsronu33B121b04b1.pep
FPVRPTAFYLILGEIVHNTSMTSPIDYVLXVGHFLGKDDDVYSFFDPFFPYFFFFYYFIFNIFFSIFFLVILYSDFIKYALFIFFLLYFLFIILILFLSLSYIFFIS

SEQ ID NO: 79564 - protein, 123 aa, Gossypium hirsutum
  Clone ID: GOSHI-09MAY01-C2259_1.pep
VDSLASMGICLVALAKLHLLTPAHSISAPLLAGFICPFVVKLAFRFRIVRRVYIDMLYATRLFFFQLSQIAFDAGGDRQPSPGDGERWQRALRLVSERITHVRRSPVADSDEDSFHTLTVLSL

SEQ ID NO: 79565 - protein, 107 aa, Gossypium hirsutum
  Clone ID: LIB3583-025-P1-K1-H2.pep
RGDKSGEYTEQSAYKWLISKNPHLHNYITDQTITKEFYSKIWNLPILSKIRIHLWRVVNNFIPTLSILKFRRLRNNAECLVCLFGEETVEHIFRDCGFINPRVRPRV

SEQ ID NO: 79566 - protein, 86 aa, Gossypium hirsutum
  Clone ID: LIB3196-024-P1-M1-E6.pep
RGDKSGEYTEQSAYKWLISKNPHLHNYITDQTITKEFYSKIWNLPILSKIRIHLWRVVNNFIPTLSIHKIDSIGSWDGFLAIKHKT

SEQ ID NO: 79567 - protein, 90 aa, Gossypium hirsutum
  Clone ID: GOSHI-09MAY01-C2279_1.pep
LRSFFFCFPRKNVNLILFFLKKQNKFHIYSNKTLISLDPRPHLCISEMFGAFHRRQSRFPPFNTRTKYANQSKKIKNKSGIPLSNFGLDF

SEQ ID NO: 79568 - protein, 105 aa, Gossypium hirsutum
  Clone ID: LIB3147-032-Q1-K1-H10.pep
IVSQINPNKVQIVYLQPLINTKLILAPKIKKQIWSNARIAQTYTEAQRPISLSPICKKAQTRKNPKGESQQPKALGVSRTHQCCNHGFHERFSPYERFSILCKFA

SEQ ID NO: 79569 - protein, 265 aa, Gossypium hirsutum
  unsure (1)..(265): unsure at all Xaa locations
  Clone ID: GOSHI-09MAY01-C102252_1.pep
MEAVPIQSENFKLGFIGAGKMAESIARGVVQSGVSPPQRISTASHSNPSRGAPFQSLGISVYRHNTDVVDASDVIILSGKPQVVKTVVLQLRPLLSKKKHLXSIAAGVKLQDLEEWAGHGRFIRVMPNTPSAVGMGASAMSLGGAATEQDGELVGKLFGAVGKTWKADEKLFDAVTGLSGSGPAYIYLAIEALADGGVTAGLPRELALGLASQTVLGAAAMAVQSGKHPGQLKDDVTSPGGTTIAGIHELEKNGFRGTLMNAVVA

SEQ ID NO: 79570 - protein, 247 aa, Gossypium hirsutum
  Clone ID: GOSHI-09MAY01-C2219_4.pep
EKNSKQDCFFVFPLDLFYFWPIKGPLKSVKGTEGPRGRRGAEIRKEFFLSIEAACAAHPTADVFINFASYRSAAASSMSALKQPTIRVVAIIAEGVPESDTKQLIAYARSNNKVVIGPATVGGIQAGAFKIGDTAGTIDNIVHCKLYRPGSVGFVSKSGGMSNEMYNTIARVTDGIYEGIAIGGDVFPGSTLSDHILRFNNIPQVKMMVVLGELGGRDEYSLVEALKQGKVNKPVVAWVSGTCARLF

SEQ ID NO: 79571 - protein, 62 aa, Gossypium hirsutum
  Clone ID: GOSHI-09MAY01-C2219_3.pep
AEFLGPRARVTTRPTTRAVEMGYLNGLFVLARSIGLIGHTFDQKRLKQPLYRHPWEDVLYTK

SEQ ID NO: 79572 - protein, 248 aa, Gossypium hirsutum
  Clone ID: GOSHI-09MAY01-C2219_2.pep
QREEPCYAGVPMSSIVEQGLGVGDVISLLWFKRSLPRYCTKFIEICIMLCADHGPCVSGAHNTIVTARAGKDLVSSLVSGLLTIGPRFGGAIDDAARYFKDAYDRGLTPYEFVESMKKKGIRVPGIGHRIKRGDNRDKRVELLQLFARTNFPSVKYMEYAVQVETYTLSKANNLVLNVDGAIGSLFLDLLAGSGMFTKQEIDEIVEIGYLNGLFVLARSIGLIGHTFDQKRLKQPLYRHPWEDVLYTK

SEQ ID NO: 79573 - protein, 535 aa, Gossypium hirsutum
  unsure (1)..(535): unsure at all Xaa locations
  Clone ID: GOSHI-09MAY01-C2219_1.pep
MATGQLFSRTTQALFYNYKQLPIQRMLDFDFLCGRDTPSVAGIINPGAEGFQKLFFGQEEIAIPVHSTIEAACAAHPTADVFINFASYRSAAASSMSALKQPTIRVVAIIAEGVPESDTKQLIAYARSNNKVVIGPATVGGIQAGAFKIGDTAGTIDNIVQCKLYRPGSVGFVSKSGGMSNEMYNTIARVTDGIYEGIAIGGDVFPGSTLSDHILRFNNIPQVKMMVVLGELGGRDEYSLVEALKQGKVNKPVVAWVSGTCARLFKSEVQFGHAGAKSGGEMESAQGKNQALRDAGAVVPTSYEALEATIKETFEKLVEEGKITPVKEVKPPQIPEDLNSAIKSGKVRAPTHIISTISDDRGEEPCYAGVPMSSIVEQGLGVGDVISLLWFKRSLPRYCTKFIEICIMLCADHGPCVSGAHNTIVTARAGKDLVSSLVSGLLTIGPRFGGAIDDAARYFKDAYDRGLTPYEFVEGMKKKGIRVPGIGHRIKRGDNRDKRVELLQLFARTNFPSCDXMVYVLSVETLLLHATTLPK

SEQ ID NO: 79574 - protein, 148 aa, Gossypium hirsutum
  Clone ID: AI055310.1.pep
MATGQLFSRTTQALFYNYKQLPIQRMLDFDFLCGRDTPSVAGIINPGAEGFQKLFFGQEEIAIPVHSTIEAACAAHPTADVIINFASYRSAAASSMSALKQPTILVVAIIAEGVPESNTKHLIAYAPFNNKVVIGPSTVRGIQPEALI

SEQ ID NO: 79575 - protein, 182 aa, Gossypium hirsutum
  unsure (1)..(182): unsure at all Xaa locations
  Clone ID: AI726866.1.pep
MATGQLFSRTTQALFYNYKQLPIQRMLDFDFLCGRETPSVAGIINPGAEGFQKLFFGQEEIAIPVHSTIEAACTAHPTADVFINFASFRSAAASSMAALKQPTIRVVAIIAEGVPMSDTKQLIAYARSNKIVVIGPXTVGGIQAGAFKIGDTAGTIDNIVQCKLYRPXSVGFVSXSGGMFNE

SEQ ID NO: 79576 - protein, 49 aa, Gossypium hirsutum
  Clone ID: LIB3585-052-P1-K1-G12.pep
YPQPRQQIISYLPKFPFFIFPCKNIEYVYILNVLYLPFMFKASTLLLSH

SEQ ID NO: 79577 - protein, 89 aa, Gossypium hirsutum
  unsure (1)..(89): unsure at all Xaa locations
  Clone ID: uC-gsronu33B042g09b1.pep
LYQEALEATSKETYEQLREEGXITPVKEVKPAQIPEDLNSAIKSGXARAPTHIFYTIFEDRPEELFHVSLSLDFRSIILLLYYYIVFFY

SEQ ID NO: 79578 - protein, 74 aa, Gossypium hirsutum
  unsure (1)..(74): unsure at all Xaa locations
  Clone ID: LIB3083-006-Q1-L1-F1.pep
MATGQLFSRTTQALFYNYKQLPIQRMLDFDFLCGRETPSVAGIINTGAEGFQKLFFGQEEIXAIPVHSTIEAAC

SEQ ID NO: 79579 - protein, 205 aa, Gossypium hirsutum
  unsure (1)..(205): unsure at all Xaa locations
  Clone ID: GOSHI-09MAY01-C2239_1.pep
QIVKEVLKLGPVAMPILARIQPMDLSATKSVFISAVRFATSIGGSCPPFGDELKTSAQEQVEFMLGGDEDTPLVTADDEVKSVVKSGLSQVCSLFENELSSFLLVPDITAETAETRILQCLSDVEWMCNILPKMDLMKDFVCSWXEMSRKILEIVEDKKLDNAMWVXKVKLIEVTGKVLEAVXGYGNVILPAPGRVQLLETWLPY

SEQ ID NO: 79580 - protein, 173 aa, Gossypium hirsutum
  unsure (1)..(173): unsure at all Xaa locations
  Clone ID: GOSHI-09MAY01-C102212_1.pep
TDARVTDFIDPSNRIWKEEVIKSTFLEDVAEKILSIPLSETPHEDFQVWRAEASGDYTVRSAYKLLQGNADNPSAYAIQEDYKSFYKKLWLLDIPYKIKITVXKSSWNFLATRANMVIKKLSNTTVCPRCGLGEENMDHLFRKCPGSSRRARYPSVGSSAAHYGLSREIGMRA

SEQ ID NO: 79581 - protein, 194 aa, Gossypium hirsutum
  unsure (1)..(194): unsure at all Xaa locations
  Clone ID: GOSHI-09MAY01-C3989_1.pep
HASADAWAKMDQLYLTMASTLRPLQVNLLSNTSDTIEDLQRLCVVFEHVEKLLILAASLHRRFRQVPRISEAIFSNYYNFYLPTMGIGLADVDTQKEFDMKLQLSQNERQVVSNMFTPPTANQSWRKVLSMGNHLNGHEPILREIIFSMHDNASDNHYASSSHRDYXQDTETYRMYTCGTSNDLRVALSIISYD

SEQ ID NO: 79582 - protein, 323 aa, Gossypium hirsutum
  Clone ID: GOSHI-09MAY01-C3979_1.pep
TLMASSAATLPSKMKAWTYPEYGKSSDVLKLQSDVVVPQPRDDQVLLQVVAAGINPIDFKRMLGMFKNSDSPLPIIPGYDVAGVVVKVGSQVKKFKEGDQVYGDINEKAMDHPTQFGTIAQYTVVAEKLLALKPKNLSFVEAASLPLVIETAYEGLERCHFSAGKSILVLGGAGGVGTMIIQLAKQVYGASKIAATASTGKLDLLKSLGADLPIDYTNQNFEDLPEKFDVVYDAVGQCERAVKAVREGGDVVTIYGAVVPPATTFILTSNGAILEKLEPFLESGKVKPMIDPNGIFPFSETPQAFAYLETGRVTGKVVISIIP

SEQ ID NO: 79583 - protein, 154 aa, Gossypium hirsutum
  unsure (1)..(154): unsure at all Xaa locations
  Clone ID: LIB3585-068-P1-K1-F2.pep
PTRPGGVGTKNIQLAKQVYGASKIAATARTGKLDXLQSLRADLPIDYTNQNFEDLPEKYDVIYDATRQCERATKADRDSGDVVTIYGAEDTPATTFMLTSNGAIVEKLEPFLERGKVKPMIEPKGIYPFXETSQAYTYLETSRETGKVVISINP

SEQ ID NO: 79584 - protein, 407 aa, Gossypium hirsutum
  Clone ID: GOSHI-09MAY01-C3939_1.pep
MRGSLWQLGQSITRRLSQADKKAVARRYFASEADLKKTVLFDFHVAHVGKMVPFAGWSMPIQYKDSIMDSTVNCRENGGLFDVSHMCGLSLKGKDSVSFLEKLVIADVAGLAPGTGTLTVFTNEKGGAIDDSVITKVKDDHIYLVVNAGCRDKDLAHIEEHMKAFKAKGGDVSWHIHDERSLLALQGPLAAPVLQHLTKDDLSKIYFGEFRILDINGATCFLTRTGYTGEDGFEISVPSENALDLAKAILEKSEGKVRLTGLGARDSLRLEAGLCLYGNDMEQHISPVEAGLTWAIGKRRRAEGGFLGAEVILKQLAEGPSIRRVGFTSTGPPPRSHSEIQDEKGNNIGEITSGGFSPCLKKNIAMGYVKSGLHKAGTKAKILVRGKAYDGVVTKMPFIPTKYYKPS

SEQ ID NO: 79585 - protein, 57 aa, Gossypium hirsutum
  Clone ID: LIB3149-033-Q1-K1-D11.pep
SILGWNLRFQLLSFPALFHLQSNANALFLFEQNTSNKQQHVHVMSCQLKEKQGIGIT

SEQ ID NO: 79586 - protein, 141 aa, Gossypium hirsutum
  Clone ID: GOSHI-09MAY01-C3889_2.pep
MVFQYKARTRRLPPGPGKLPIIGNLHQLGDSSHKSIQRLSQQYGPMMFLQLGAVPTLVISSADAAMAIFKGPGGGHDLAFSGRPTNLYVAKKLSYEYNGLTVAPYGESWWEMREIALTDLLSAKRGQSFPTITEGRSCIKC

SEQ ID NO: 79587 - protein, 128 aa, Gossypium hirsutum
  unsure (1)..(128): unsure at all Xaa locations
  Clone ID: GOSHI-09MAY01-C3889_1.pep
MVFQYKARTRRLPPGPWKLPIIGNLHQLGDSSHKSIQRLSQQYGPMMFLQLGAVPTLVISSADAAMAIFKGPGGXHDLAFSGRPTNLYVAKKLSYEYNGLPFAPYGELLGEMGKFPFPHLRLKKAQSF

SEQ ID NO: 79588 - protein, 100 aa, Gossypium hirsutum
  Clone ID: LIB3825-033-Q6-N6-C3.pep
IKAHSAMHQGMLPSSQRPVDTRSGARFDQGCFGMPIFMEDEEVDLYWPGSFRQVNEERVGSNQAMELGQNPTQSSNIGFIAMATPPRADASSQLDLTLKL

SEQ ID NO: 79589 - protein, 67 aa, Gossypium hirsutum
  Clone ID: LIB3272-059-P1-N1-A8.pep
FLKFTCQFHPNLILIMLAHSCTVRCISNSCYLLSLFLLDSFNLITFFFFKPLSVPMFAADQLSLVMK

SEQ ID NO: 79590 - protein, 230 aa, Gossypium hirsutum
  unsure (1)..(230): unsure at all Xaa locations
  Clone ID: GOSHI-09MAY01-C3869_1.pep
MASTMVNAPCTVPSVKGFETQNYVGLRPISSLRFNSGRTSTSGRSRGLFVVRACERHDGHVKKIEMSIEECEAAVVAGNAPEAPPVPPKPAAPVGTPVIKPYQLTRRPRRNRKSPALRASFQETSISPANFVYPLFIHEGQEDTPIGAMPGCYRLGWRHGLVEEVAKARDVGVNSIVLFPKVPDALKXSTGDEAYNDNGLVPRTIRLLKDKXPDPVIYTDVALDPYSSKW

SEQ ID NO: 79591 - protein, 205 aa, Gossypium hirsutum
  Clone ID: GOSHI-09MAY01-C3839_1.pep
LELSLDTPDNVCFPDKHVRRIHRALESDDVELLRMLLKEGHTNLDEAYALHYAVAYCDAKTTTELLDLGLADVNHRNSRGYTVLHVAAMRKEPKIIVSLLTKGARPSDLTIDGRKALQISKRLTRAADYYKSTEEGKASPKDRLCIEILEQAERRDPWHGEASLSLAMAGDDLRMKLLYLENRSGLAKLLFPMEAKVVMDIAQVD

SEQ ID NO: 79592 - protein, 281 aa, Gossypium hirsutum
  Clone ID: GOSHI-09MAY01-C3829_1.pep
DGADVTMRDITNDTKGSQLDPSESTFLGLDDNRLCQWDMRDRKGVVQNIATSDSPVLHWSQGHQFSRGTNFQCFASTGDGSIVVGSLDGKIRLYSKTSMRQAKTAFPGLGSPITHVDVTYDGKWVLGTTDTYLVLICTLFTDKDGKPKTGFSGRMGNKIPAPRLLKLTPLDSHLAGNNNKFHGGHFSWVTENGKQERHLVATVGKFSVIWDFQQVKNSAHECYRNQQGLKSCYCYKIVLKDESIVESRFMHDNFAVSNSPEAPLVVATPMKVSSISLSGRR

SEQ ID NO: 79593 - protein, 330 aa, Gossypium hirsutum
  Clone ID: GOSHI-09MAY01-C3559_1.pep
FYAGTGNLLCKSEDTVCIFDLQHRLILGDLQTPFVKYVVWSSDMESVALLSKHSIIITSKKLVHQCTFHETIRVKSGAWDENGVFIYTTLNHIKYCLPNGDSGIIRTLEVPIYITKVSGNTIFCLDRDGKNKTLVIDATEYIFKLSLLRKRYDHVMSMIRNSQLCGEAMIAYLQQKGFPEVALHFVKDEKTRFNLAIESGNIQIAVASAKEIDDKDHWYRLGVEALRQGNAAIVEYAYQRTKNFERLSFLYLINGNLEKLSKMLKIAEVKNDVMGQFHNALYLGDIQERVKILENAGHLPLAYVTASVHGLHDVAERLAAELRDDCPFFP

SEQ ID NO: 79594 - protein, 419 aa, Gossypium hirsutum
  Clone ID: GOSHI-09MAY01-C3549_1.pep
DSWAPGKFFGSQYNTSMVPSFGGGVLCAKASMLLQSVPPALLVRFLREHRSEWADYGIDTYSASCLKPNPYTVPCARPSGFPSSQVILPLAHTVEHEEFLEVVRLEGQAFTPEDVALARDMYLLQLCSGIDENAVGACAQLVFAPIDESVADNAPLLPSGFRVIPLDSKPVMDGPGAARTLDLASTLEVGPGSNRSTGDGEPNSYNLRPVRPIAFQFTFENHLRDDVASMARQYVRSVVGSVQRVAMAIAPSRISPGLGPKSLPGSPEALTLARWICRSYRIHTGGELLRADSQSGDTLLEQLWNHSDAIMCCSLKTNASPVFTFANQAGLDMLETTLVALQDIMLDKILDEAGRKSLCTEFSKIMQQGFAHLPAGICVSSMGRPVSYEQAIVWKVVDDDNDDAANHCLALMFVNWSFV

SEQ ID NO: 79595 - protein, 164 aa, Gossypium hirsutum
  Clone ID: GOSHI-09MAY01-C3519_1.pep
KLFIFLLNCYLSQLRRFRLNNGNRLNMCIFFHFIFFLFFSYYLSFFFLLVIGSFLSYYFSISFFYFSFSLFLCLFQYVCSSISISFVLCYLILFFICVLFFFLFLFIFVLSWFLYSFFFCSFFPIFCSFSLYLFFLFFFFSLFFFFSSFFVTFLFFFFSFFFFF

SEQ ID NO: 79596 - protein, 57 aa, Gossypium hirsutum
  Clone ID: LIB3147-023-Q1-K1-A4.pep
CSFVGFYLTLFADLEMWEELFIFLLNCYLSQLRRFRLNNGNRLNMKDLLNKLKKKKK

SEQ ID NO: 79597 - protein, 592 aa, Gossypium hirsutum
  Clone ID: GOSHI-09MAY01-C3499_1.pep
MDRIRAFLVAVAVVAICGVPQVRSTASDHRYKAGDEVPLYANKVGPYHNPSETYRYFDFPFCSSAPVKEKKEALGEVLNGDRLVSAPYKLEFLTEKEAEIACKRKLTRDEVVKFRKAVSKDYYFQMYYDDLPIWGFLGKVEKEGKTDPADYKYYLFKHLVFEIHHNKDRVIEVTVRSDPNALVDLTEDVPVDVDLMYTVKWKETNTPFEKRMDKYSLSSSLPHHLEIHWFSIINSCVTVLLLTGFLATILMRVLKNDFIKYAHDEESADDQEESGWKYIHGDVFRYPKHKSLFAAALGSGTQLFTLTSFIFILALVGVFYPYNRGALFTALVVIYALTSGIAGYTAASFYCQLEGTNWVRNLLLTGSLFCGPLFVTFCFLNTVAIAYKATAALPFGTIVVIFLIWALVTSPLLVLGGIAGKNSKAEFQAPCRTTKYPREIPPLPWYRKTIPQMAMAGFLPFSAIYIELYYIFASVWGHRIYTIYSILFIVFIILLIVTAFITVALTYFQLAAEDHEWWWRSFLCGGSTGLFIYAYCLYYYNARSDMSGFMQTSFFFGYMACICYGFFLMLGAIGFRASLLFVRHIYRSIKCE

SEQ ID NO: 79598 - protein, 47 aa, Gossypium hirsutum
  Clone ID: uC-gsflnu33B113d06b1.pep
QHENDCVITKVRPRSMHLNIQHVFTPTKIYFILSCHISSSFSFFFFF

SEQ ID NO: 79599 - protein, 278 aa, Gossypium hirsutum
  unsure (1)..(278): unsure at all Xaa locations
  Clone ID: GOSHI-09MAY01-C3479_1.pep
FILFSTAAGGGVKKIQEEWKILEKDLPDTIFVRVYESXMDLLRAVIIGVEGTPYHDGLCGFDVFFPASYPKEPPHVYYHSGGLRLNPNLYDCGKVCLSLLNTWSGKKNERWIPGMSTMLQVLVSIQALILNQKPYFNEPGWERLSGTPSRPRGSRQYNEETFILSLKTMIYSMRRPPXHFEDFVVGHFYTRAQDILLACKAYMDGAQVGCPVKGGIQDVEEGEKSCSPKFKVSMAGCVNMLVKEFTVLGVKDCEKFLVAPESRNNGVDSMPMAAANMN

SEQ ID NO: 79600 - protein, 156 aa, Gossypium hirsutum
  Clone ID: uC-gsflnu33B005d02b1.pep
GTPYHDGLFFFDVFFPASYPKEPPHVYYHSGGLRLNPNLYDCGKVCLSLLNTWSGKKNERWIPGMSTMLQVLVSIQALILNQKPYFNEPGWERLSGTPKGELMSRQYNEETFILSLKTMIYSMRRPPRHFEDFVVGHFYTRAQDILLACKAYMDGA

SEQ ID NO: 79601 - protein, 179 aa, Gossypium hirsutum
  Clone ID: GOSHI-09MAY01-C3789_1.pep
MAERKRRKLKLLAETINLDEKKATEEEESLKLQTWADLPVELLELILCRLTLEDNVRASAVCRRWHKVAVAVRVVNQSPWLMYFPKYGSLYEFYDPAERKTYSLELPELQGSRACYTKDGWLLLYRPRNHGVFFFNPFNRHMIKLPRFELTYQMVAFSDAPTSDLCVVFTIKHISPTVV

SEQ ID NO: 79602 - protein, 213 aa, Gossypium hirsutum
  Clone ID: GOSHI-09MAY01-C3759_2.pep
HLTLILQRIWIHCRTRLFILDKSAMDCELPELVVGYKESTYHVVKDICIDEGVPTQDMFLFESSVDEKSECNFSYPKKDQDNELMKEMSETDMPMQDISFSPEENQSGKDIDNEGGSNKKLDADTYMQDIALSLEENKSNKGISNEWDPRDLLVTRDMKDDAMEMMSNDGSKEVFTLGDILSLPELTTLKSEPVPPDCKSDRIEQQSFENSSK

SEQ ID NO: 79603 - protein, 205 aa, Gossypium hirsutum
  Clone ID: GOSHI-09MAY01-C3759_1.pep
MKLDSEQVLCHSTVGLKSDSKPYSFIDSKPFKNKEKPLDSVGLNAEGFVKDDLNRVMHDIKGNDGDTDPMLYLEKTGDGWPASKLNCSMSVNDFSNGNEKEARDFVPPNSHSLKNMGSFQDSVFYLDKSVMECALPELVVCYKESAYHVVKDICIDEGVPTQDKFLFDSGVDKKSDCNFLPSEEDQDSKLLKEKPESDISMQAGS

SEQ ID NO: 79604 - protein, 137 aa, Gossypium hirsutum
  Clone ID: LIB3146-060-Q1-K1-F11.pep
PTRPLDNVQVICHSTIGYKNDSKPYSFLVDTKPFENKEKSSDATELSTDDTVKENQNGVMHDIKSDELDSDFSIYSENTRDEWTASELDCSNSVHDFSNGNEKEVRDIVTFNSHSSKNMDSFQDSVFYLDKSVMDCE

SEQ ID NO: 79605 - protein, 310 aa, Gossypium hirsutum
  Clone ID: GOSHI-09MAY01-C3709_1.pep
MALSISRRVVRSFGSLSALGFREYPTVAGRSFQASDLSGRIAGDNLLHAECFSLSKGGPSFLGFRRFSTTILTPDSNGGAFPSDLLSSKTVLTPDRTIGLYEHLVVPVTNFHNEDHGLMVLAGDVFDVPIRKDIIHRVVRWQLAKRQQGTHSTKTISEVRGTGRKPWQQKGLGRARHGSLRGPQFRGGATMHGPKPRSHAFKLNKKVRRLGLKIALTACAAEGKLLVLEDLEVPTHKTKNIVNYVNQMENTKKLLLVDGGPINEKLKLATHNLHYVNVLPSIGLNVYSILQHDTLVMSRDAVNMIVERMH

SEQ ID NO: 79606 - protein, 55 aa, Gossypium hirsutum
  Clone ID: LIB3120-022-Q1-K1-A11.pep
HTLPPFSKTDALNRGHTPSTGSGLISAGRFPPRSSFGKLHKPDEVWAVDEQVTLS

SEQ ID NO: 79607 - protein, 71 aa, Gossypium hirsutum
  Clone ID: GOSHI-09MAY01-C3739_1.pep
LQIFVRINEVLVSWLLKYGIFGFREMKKSCPGLLVVYRLSQPEGINFLFDTKFITLQVLCDKNAKESKENL

SEQ ID NO: 79608 - protein, 307 aa, Gossypium hirsutum
  Clone ID: GOSHI-09MAY01-C3729_2.pep
MSSRSSRTLYVGNLPGDVREREVEDLFYKYGPIAQIDLKIPPRPPGYAFVEFEEARDAEDAIRGRDGYDFGGHRLRVELAHGGRGRSSIDRHSSYSSGRGRGPSRRSEYRVLVTGLPSSASWQDLKDHMRRAGDVCFSQVFRDGSGTTGIVDYTNYDDMKYAIKKLDDSEFRNAFSRAYVRVKEYDSRRDSSRSPSRGRSLSRSRSRSRSRSRSKSRGRSYSRSKSRSKSPKAKPSRKSPEKSRSRSPRSRSASRSRSLSRSPSRSRSPLPSRQKGRSKSPKRRSVSRSPSGSRSRSRSRSKSVSGS

SEQ ID NO: 79609 - protein, 188 aa, Gossypium hirsutum
  Clone ID: GOSHI-09MAY01-C3729_1.pep
MVSASEIATKLNLASHPEGGFFSETFRDSSVMLSTSQLPPQYKVDRAVSTSIYFLLPAGSVSHLHRIPCAETWHFYLGEPLTVLELDEKDGQVKLTCLGPDLLNNQKVQYTVPPNVWFGAFPTKDFNISTDGAVTKNDPRDAESHYSLVGCTCAPAFQFQDFELAKRSELVTRFPKHEHLISLLTYPD

SEQ ID NO: 79610 - protein, 175 aa, Gossypium hirsutum
  unsure (1)..(175): unsure at all Xaa locations
  Clone ID: LIB3543-065-Q6-K6-D12.pep
KESSRSSRTLYVGNLPGDVREREVEDLLGKMGPXXQIDLKIPPRPPGYAFVEFEEARDAEDAIRGRDGYDFGGHRLRVELAHGGRGRSSIDRHSSYSSGRGRGPSRRSEYRVLVTGLPSSASWQDLKDHMRRAGDVCFSQVFRDGSGIVDYTNYDDMKYAIKKLDDSEFRNAFSR

SEQ ID NO: 79611 - protein, 130 aa, Gossypium hirsutum
  unsure (1)..(130): unsure at all Xaa locations
  Clone ID: uC-gsronu33B079g04b1.pep
MSSRTSRTLYVGNLPGDDREREVEDLLYKYGPIAQIDXKIPPRPTGYAYEETEEARDAEDAIRGRDGYDFGGHRLRAELAHGGRGRSSIDRHSSYSSGRGRGPSRRTEYRELGTGXPSSAAWQDLKDHMR

SEQ ID NO: 79612 - protein, 74 aa, Gossypium hirsutum
  Clone ID: LIB3135-053-Q1-K1-C2.pep
DLLNNQKVQYTVPPNVWFGAFPTKDFNISTDGAGAGARVYPGLDLKLLCCLFTGEMLLRGVSGAEDAYEAFMFG

SEQ ID NO: 79613 - protein, 280 aa, Gossypium hirsutum
  unsure (1)..(280): unsure at all Xaa locations
  Clone ID: GOSHI-09MAY01-C3689_1.pep
PQAQIDDQGPPSSVGRRSTGFSSPDSAPPPSYDSVPPPLDGIEMAKQRAQEIAARLTAASAGSEAKRPRVENGSGGGWGXEKGFMSAPSDIKHMSSSAPSAIPASYGSYHGTSKKIDIPQNRVGVIMGKAGETIKYLQLQSGAKIQVQRDMDADPNSVTRPVELMGTAEQIAKAEQLINDVLAEAEAGGSGIVSRRLTGHAGSEHFEMKIPYNKVGLLIGKGGETIKNMQARTGARIQVIPLHLPPGDTSTERTLHIDGTSEQIKTARELVDEVISENRM

SEQ ID NO: 79614 - protein, 188 aa, Gossypium hirsutum
  Clone ID: GOSHI-09MAY01-C3629_1.pep
MNFNLQSMNPSSSFVATRDQALSVFNHPFSQSHSFLVSNFKNGSFLSPINTHTRRPKTHTSFTTPKRFQPITGCLGERNTPAKALRQILESPGAHQGPACFDGLSAKLVERAGFQYCFTSGFSISAARLGLPDTGFISYGEMVDQGQQITQAVSIPVIGDGDNGYGNAMNVKRTVKGYIRAGFAGIIL

SEQ ID NO: 79615 - protein, 363 aa, Gossypium hirsutum
  unsure (1)..(363): unsure at all Xaa locations
  Clone ID: GOSHI-09MAY01-C3199_1.pep
EFQGRPLADHPAVKNGRPPGALTIPRELLDASTVAEAISVISCWYEDKTEWGHRVGWIYGSVTEDVVTGYRMHNRGWRSVYCVTKRDAFRGTAPINLTDRLHQVLRWATGSVEIFFSRNNALLASPRMKILQRIAYLNVGIYPFTSIFLIVYCFLPALSLFSGQFIVQTLNVTFLTYLLIITVTLCLLAVLEIKWSGIELEEWWRNEQFWLIGGTSAHLAAVLQGLLKVIAGIEISFTLTSKSAGDDLDDEFADLYVVKWTSLMIPPITIMMVNLIAIAVGFSRTIYSVIPQWSRLLGGVFFSFWVLAHLYPFAKGLMGRTGRXTPTIVFVWSGLMAITISLLWVAINPPSTTNQIGGSFQFP

SEQ ID NO: 79616 - protein, 155 aa, Gossypium hirsutum
  Clone ID: GOSHI-09MAY01-C3079_3.pep
IQRSKEINDRRYHAFHLRSISIYSSSPLLLSHHTIFPDHQHKVTLTSQELGYMNFSVRLNSNYFEVAHAVGMETTGPVSSPPQENCALGNVDVQHHYHTFQHYDSSCGHGHQFYGDHPNLQDFDCDFFPCHNYHGNHDCRETHDHMCVLHFSHAS

SEQ ID NO: 79617 - protein, 348 aa, Gossypium hirsutum
  unsure (1)..(348): unsure at all Xaa locations
  Clone ID: GOSHI-09MAY01-C3079_2.pep
GTKGPQLREIERGVDIVVATPGRSQRPPEMKRISLHQVSYLVLDEADRMLDMGFEPQIRKIVKEVPTRRQTLMFTATWPKEVRXKIAADLLVNPVQVNIGNIDELVANKSITQYVEVLSPMEKHRRLEQILRSQEPGSKIIVFCSTKKMCDQLARNLTRQFGAAAIHGDKSQADRDFVLSQFRTGRSPVLVATDVAARGLDIKDIRVVINYDFPTGVEDYVHRIGRTGRAGATGLAYTFFVDQDSKHASDLIKVLEGANQLVPAELRDMASRGGLMGRPRRWAPSSGGFGRGRGGRTDLGYGGWDSGRGGRGISTSSTWLEKSGGRRGNDHESRDRYNRGFHGSNDRR

SEQ ID NO: 79618 - protein, 363 aa, Gossypium hirsutum
  Clone ID: GOSHI-09MAY01-C3079_1.pep
PRVRDELVANKSITQYVEVLSPMEKHRRLEQILCSQESGSKIIVFCSTKKMCDQLARNLSRQFGAAAIHGDKSQADRDFVLSQFRTGRSPVLVATDVAARGLDIKDIRVVINYDFPTGVEDYVHRIGRTGRAGATGLAYTFFGDQDSKHASDLIKVLEGANQRVPAELRDMASRGGGRGMPRRWAPSSGGRDEGRGGRAGSGYGGREGGRGGRGISTSSSSWHERSGGRRYDRESRDSRGFRDSYDKGRSRSRSPAGWGDRHKTGVRDRSWSRSAERYDSGAGRQRSPTRSFLEVGMYPDPFSPSPLPWARPKEFEFALKAGMPFSPWLENSRSLCAGYGEECVVRPPRERVSCAVARRPSRG

SEQ ID NO: 79619 - protein, 177 aa, Gossypium hirsutum
  unsure (1)..(177): unsure at all Xaa locations
  Clone ID: GOSHI-09MAY01-C3069_1.pep
MSAAESATAIHRNQVDLLDFIDWSGVECLNQSSSHPLPNALKQGYREDEGLNLESDADEQLLIYIPFTQVIKLHSIVVMGSEEDGPKTVKLFANREHMGFSNVSDFPPSDTCXLSQDNLKGKPVVVKYVKFQNVRSLTIFIEDNQSGSEITKVQKIALYGSTVETTDMKGLKKIEDH

SEQ ID NO: 79620 - protein, 153 aa, Gossypium hirsutum
  unsure (1)..(153): unsure at all Xaa locations
  Clone ID: LIB3543-043-Q6-K6-F1.pep
LDFIDWCWIECLNQSSSHPLPNALKXGYREDEGLNLESDADEQLLIYIPFTQVIKLHSIVVMGSEEDGPKTVKLFANREHMGFSNVSDFPPSDTAVLSQDNLKGKPVVVKYVKFQNVRSLTIFIEDNQSGSEITKVQKIALYGSTVETTDMKG

SEQ ID NO: 79621 - protein, 180 aa, Gossypium hirsutum
  Clone ID: GOSHI-09MAY01-C3019_1.pep
MELSIQKIEALIRLSTIVMLVLTACLIGLDSQTKVIFYVQKKASFKDLRALVGLLYITSLAAAYNLLQLCCSSFSASYKGTSLQSYAYLAWLRYILDQAVVYAVFAGNLAALEHSFLVLTGEENFQWLKWCNKYTRFCTQIGGSLLCGFVASLLMFSIASISAFNLFRLYSPTKFMHLKL

SEQ ID NO: 79622 - protein, 106 aa, Gossypium hirsutum
  unsure (1)..(106): unsure at all Xaa locations
  Clone ID: LIB3135-020-Q1-K1-D10.pep
RQNRVYLLHPNRRILALRLRCRLTNVFHRFHLRIQLVQAVFPHQVHALETLIINYGXKKKPLILTRYYINTRIRRGEKALFLPPKDISCPTNHAENIKKKKKGAPF

SEQ ID NO: 79623 - protein, 120 aa, Gossypium hirsutum
  unsure (1)..(120): unsure at all Xaa locations
  Clone ID: GOSHI-09MAY01-C3009_2.pep
MAGPTRPPTRPVGHLEEHKRQLQKERDRRVEDSTKHLNSVKSEVLSKRCELEARQXKVEDVVAEVDSITLRASLPRESGAAKVQHLISKCEEIVKQFQQNSSSIGLLLPVDGNGTKTTFE

SEQ ID NO: 79624 - protein, 370 aa, Gossypium hirsutum
  Clone ID: GOSHI-09MAY01-C3009_1.pep
LTLSRGRPRRVEFSALEQIENPDLLIGSFQVMNLYCRLREVMASLNCPMQFNLRDLIKPDPRRTEHFLSGILNFCLYKETKMNLLRPIVEELALLDDQRKEWEAKISQLNAEIAGYSEAREREFPLVQEVESKVKELREMIAGLNSNQMSLRTSFRNLKEKTGQMDEKISKAEFDLVQSVQENANLRSKIVQSPDKLQRALEEKKLARDEAKYAERSAIQSFQEKTATVEVYSKALKKMSKHFAMMQAIHEQVNSAKSVEKECKGLKAKLSDDVVLDKSLEAKLIEREGKVGQLEEHKRQLQKERDLKFEESTKHLNSVKSEVLSKRCELEARQKKVEDVVAEVDSITIKTSMVRESGAAKVQQLISKCE

SEQ ID NO: 79625 - protein, 73 aa, Gossypium hirsutum
  Clone ID: LIB3146-030-Q1-K1-A12.pep
IQLAYRPHHTVIGSPYEISSNRRSNQYILLLRTNNNLQSSGFLKLKLKPGYSNSIKCCLCSIPIHWQEEPNRG

SEQ ID NO: 79626 - protein, 398 aa, Gossypium hirsutum
  Clone ID: GOSHI-09MAY01-C3039_1.pep
PRVRVNVVDGLKLYEKLFDEKEVSDLVSLINDLRAAGKRGHFQVQTYVASKKPMKGHGREMIQLGLPIADAPLDAETAARTSKDRKIEAIPSLLQDAIERLVDLQVINAKPDSCIIDVYNEGDHSPPRMWPPWFGNPTFVLFLTECDITFGRVIGVDHPGDFKGSLKLSLSPGSLLVMEGKSADFAKHALPSVRKHRMLVIFTKYQPKKSVADNQRPPSPSVSQSSQWGPPSSRPPSRFRHSAGPKHFAAIPTTGVLPAAAIRPQIPPANVVQPLFVPAPAIPFPAPVPIPPGSTGWSAAAGQRHFPPHLPIPGTGVFLPPPGSNSSSQQLSTIATELNVPMETISPLENSNGSGKLTHHKTSPRGKCDRPSPKQGCNGSVDETGNGSAMMKEEQQCA

SEQ ID NO: 79627 - protein, 166 aa, Gossypium hirsutum
  unsure (1)..(166): unsure at all Xaa locations
  Clone ID: LIB3584-002-P1-K1-C3.pep
HASERTVADNQRPPSPSFESYNGVHHLSITQPFSPFCWPXHFAAIPTTGVLQLQQFGHKFHPXMCSTIICACTCYSFPAPVPIPPGSTGWSAAAGQRHFPPHLPIPGTGVFLPPPGSNSSSQQVATIATELKVPMETISPLENQIGSGKLTHHILFSYVKWFSWFV

SEQ ID NO: 79628 - protein, 104 aa, Gossypium hirsutum
  Clone ID: GOSHI-09MAY01-C3029_1.pep
SCRSCYDFEALFGSLQTDTASVLLQAMEYIQFLHEQVKVLSAPYLQTSPTNNMQEQEHYSLRSQGFGLVPLSYTMGVVHSNGADIWAPIKTASPKFDKPFSQFN

SEQ ID NO: 79629 - protein, 77 aa, Gossypium hirsutum
  Clone ID: GOSHI-09MAY01-C3339_3.pep
MGINMDLNFNLLETGSLALCIIAVAFTLQDGTSHPRVRLVLLLLYIVIGACFFVSKTPLNQVNITNSGAELATILRA

SEQ ID NO: 79630 - protein, 190 aa, Gossypium hirsutum
  Clone ID: GOSHI-09MAY01-C3339_2.pep
EESDNDENGGGGEEEPGFWRGFIWLVGMTAAISLLSEYVVQTIEDASDSWGISVSFISIILLPIVGNAAEHAGAIIFAFKNKLNISLGVALGSATQTSMFVVPLYVITAWIMGIKMDLNFNLLETGSLALSIIAVAFTLQDGTSHYMEGLVLLLLYIVIGACFFVSKTPLNQVNITNSGAKLAIDTIFRA

SEQ ID NO: 79631 - protein, 330 aa, Gossypium hirsutum
  Clone ID: GOSHI-09MAY01-C3339_1.pep
GPTVGGLLNATCGNATELIIAIFALSQHKIDVVKYSLLGSVLSNLLLVLGTSLFCGGIANIAREQSRTRGQADVNSLLLLLGLLCHSLPLLFRMSGASAALTADPTLQLSRASSIVMLIAYVSYIVFQLFTHRQLFEAPEEAEGDDDGISEEEPVIGFWSGFIWLVGMTVVISLLSEYVVETIEDASDTWGISVSFISIILLPIVGNAAEHAGAIIFAFKNKLDISLGVALGSATQISMFVVPLCVLAAWIMGINMDLNFNLLETGSLALSIIAVAFALQDGTSHYMKGLVLLLLYIVIGACFFVSKTPLNQLSTINSGTKAAIDTIFRA

SEQ ID NO: 79632 - protein, 136 aa, Gossypium hirsutum
  Clone ID: GOSHI-09MAY01-C3289_1.pep
IPLTKSTHEDFQVWRGEPSGNFSVRSTYKLLQDTTMNPSNYAQAETKNFYRKLWRLNMPSKIKITVWKISWNYMPTFSNPKLRRVTVEDRCVRCHQGEEDTNHVFRLCLGFSIKGRMSNADFFVADFGSSGRIGTR

SEQ ID NO: 79633 - protein, 55 aa, Gossypium hirsutum
  Clone ID: LIB3146-018-Q1-K1-D4.pep
KSSWVDFVSGIYSIFLAISVGNVRTIKSLFHVRLSSSIKSDTNLMFEKKQNGDGE

SEQ ID NO: 79634 - protein, 179 aa, Gossypium hirsutum
  Clone ID: GOSHI-09MAY01-C3259_1.pep
HASAFVQLIFPPLRFPLKMGFAGVLLLGFLAMVSSGHGYDGGWINARATFYGGSDASGTMGGACGYGNLYSQGYGTNTAALSTALFNDGLNCGSCYEIKCMNGDVKWCLRGSIVVTATNFCPPNDAGGWCNPPQHHFDLSQPVFQHIARYKAGIVPIAYRRVPCKRNGGIRFTINGNFY

SEQ ID NO: 79635 - protein, 123 aa, Gossypium hirsutum
  Clone ID: LIB3583-028-Q6-K1-C9.pep
MKMGFAGVLLLGFLAMVSSGHGYDGGWINARATFYGGSDASGTMGGACGYGNLYSQGYGTNTAALSTALFNDGLNCGSCYEIKCMNGDVKWCLRGFIVVTATNFCPPNDAGRWCNPPQHHFDL

SEQ ID NO: 79636 - protein, 183 aa, Gossypium hirsutum
  unsure (1)..(183): unsure at all Xaa locations
  Clone ID: GOSHI-09MAY01-C3239_2.pep
KKADLREEHGNPIQLTDEHGNPVQLTDEHGNPIYVTGIATKHPTTTTSLSGLMGYGTXVPPSPLISXTTAAAATASAANTAAALRGFRQGXKIQRSSSSSSSSSSSSSEDDGMGGRRKKGLKEKVKEKLTSGKKEDQSQTKTSAVKTTASTTTTTTDPPPGQHHEKKSVIEKIKEKLPGHHAH

SEQ ID NO: 79637 - protein, 180 aa, Gossypium hirsutum
  unsure (1)..(180): unsure at all Xaa locations
  Clone ID: GOSHI-09MAY01-C3239_1.pep
MADLRDEHGNPIQLTDEHGNPVQLTDEHRNPIYVTGIATKHPTTTTSLSGLMGYGTGSAVATXSVTTAAAATASAANTAAALRGFRQGXIQRSSSSSSSSSSSSSEDDGMGGRRKKGLKEKVKEKLTSGKKEDQSQTKTSAVKTTASTTTTTTDPPPGQHHEKKSVIEKIKEKLPGHHAH

SEQ ID NO: 79638 - protein, 104 aa, Gossypium hirsutum
  Clone ID: LIB3825-030-Q6-N6-F8.pep
GEYERGLFAHTDKPAWSNGRLKSVNHRVMMSGDKDRYSIAAFVIPNEGTIIKTPKEFIDDQHPRLFKDLDFMEFFLYAFSDPARHIDNGELLHVFAGLSPPVSN

SEQ ID NO: 79639 - protein, 139 aa, Gossypium hirsutum
  Clone ID: LIB3831-001-Q1-K6-C4.pep
ISVSVKLFLHQPNGFSYILFLGVRAFVPSGLLLQPSASGYGIRKLSGRYYQGQLMQMTMMATPNINKELQYLNKEDRLLRWLLVKHRDSKYGLEFLNEDDGELELSKLSRGNIYEEDIDDDDDDDDDEYDENPGNGGKL

SEQ ID NO: 79640 - protein, 178 aa, Gossypium hirsutum
  Clone ID: LIB3582-052-P1-K1-E2.pep
MVRNKSACVVLLFSLFLSFGLLCSAKDFPGRRGDDDPSKRYEDCRRRCEWDTRGQKEQSSYEEEEEEDEEEEQEQEEERRSGQYRKIRSRLSRGDIFVVPANFPVTFVASQNQNLRMTGFGLYNQNINPDHNQRIFVAGKINHVRQWDSQAKELAFGVSSRLVDEIFNSNPQEAYFVS

SEQ ID NO: 79641 - protein, 173 aa, Gossypium hirsutum
  Clone ID: LIB3582-033-P1-K1-F10.pep
MVRNKSACVVLLFGVFLSFGLLCSAKDFPGRRGDDDPPKRYEDCRRRCEWDTRGQKEQQQCEESCKSQYGEKDQQQRHRPEDPQRRYEECQQECRQQEERQSSFEEEEEQQQEQEQEEERRSGQYRKIRSQLSRGDIFVVPANFPVTFVASQNQNLRMTGFGLYNQNINPDHN

SEQ ID NO: 79642 - protein, 127 aa, Gossypium hirsutum
  Clone ID: LIB3543-022-Q1-K1-C4.pep
MATLTTSHFVSTCSHFSSHGADTKANLAQVGARNQAMTHNGLRSLNKVDRLQMRTTNAKAVVTKAMKQADHRPLGKIICGIGMNIVFVSAECGPWSKTGGLGDVLGGLPPAMAAKGHRVMTVCPRYD

SEQ ID NO: 79643 - protein, 102 aa, Gossypium hirsutum
  unsure (1)..(102): unsure at all Xaa locations
  Clone ID: LIB3543-045-Q1-K6-G8.pep
NRQITGPLGKIISGIRMNIVFVPADRGPWSXTGGLGDVLGGLATAMAAKGHRVMTECPRYDQYKDAWDTSVILDLKVRDKVVTARLLHCYKRRGDRVFVDHP

SEQ ID NO: 79644 - protein, 142 aa, Gossypium hirsutum
  unsure (1)..(142): unsure at all Xaa locations
  Clone ID: LIB3582-013-P1-K1-B10.pep
SVREHQLLSLCLSLALLSSGKDXPGRRSEDDPQQRYEDCQKRCQSXTRGQTEHDMSEDTCETQLKEEHHRDREDPQRXRYQDCLLHCQHEERQLRSHSQQSSLEQYEKQPTQQAHXQFKESEQRCQWQEQTPERKQQCVKEC

SEQ ID NO: 79645 - protein, 124 aa, Gossypium hirsutum
  unsure (1)..(124): unsure at all Xaa locations
  Clone ID: LIB3048-008-Q1-L1-F3.pep
KTGGLGDVLGGRPSGMAGKGHRVMTVCPCYDQYQGSWDTSGLIDLKGRDKGGTGRVFQLVQTGSDRGLVDHPMVLGKGWGKNSIQXIYGPQSRFWNYEDNQLRFSLLCQAALEAPRVLNLNSSK

SEQ ID NO: 79646 - protein, 129 aa, Gossypium hirsutum
  Clone ID: LIB3083-015-Q1-L2-B1.pep
FTRIYEIGPRSKTGGQGEILRGLPPAMAAKGHRDMTVCPHYDQYKDTWDTSVLIDLKIGDKVVTVQLFHCYKRAIHRIFVEHPMFLEKGWGKTAFKIYGPRASLDYEDNQLQFKLLIQTEFEAPRNLNL

SEQ ID NO: 79647 - protein, 111 aa, Gossypium hirsutum
  Clone ID: LIB3048-045-Q1-L1-D4.pep
VMCLGVTFGTRNGMPRGHSLLLTSVVPRIFDQYIRMHGDTTSCYVESIKSRDKCCNLFWFFHLLHNVELISVFRRSPPCSLEKVWGKTASKIYGPRAGFGLPRQINLRSDC

SEQ ID NO: 79648 - protein, 111 aa, Gossypium hirsutum
  unsure (1)..(111): unsure at all Xaa locations
  Clone ID: LIB3582-002-P1-K1-E7.pep
HEAFLRVFFNSGRGVIASSPKISRKRTRMIPTEYEDCRKRCQLETRGQTEQDKCEDRCETHFKDEQHRDFXXPHTRYQQFLQHCPHEXKRLRPHCXQNCMEQYQKQHHSPL

SEQ ID NO: 79649 - protein, 133 aa, Gossypium hirsutum
  unsure (1)..(133): unsure at all Xaa locations
  Clone ID: LIB3583-015-P1-K1-D3.pep
SVFVVLLFSLFLSLGXLCSAIDFPGCXCVDVPRLKYVVCLRRSLSETRGLSVLVKCDVWSVWLFLGGAXRVGDVPQRXYLDCRLLCLLVDSRLRPLCVLCCQVLFVRLLQLLPDKRFKESLHRCLRLELGPVR

SEQ ID NO: 79650 - protein, 141 aa, Gossypium hirsutum
  unsure (1)..(141): unsure at all Xaa locations
  Clone ID: LIB3583-015-P1-K1-D11.pep
VIKERNKSVFVVLLFSLFLSLGLLCSAKDFPGXDAXDDPRLKYVDCXERSLSETRGLSVLDXSVDWCEWLFKVVLLRDGDDPQRXRYLDCRLLCQLDDRRLRPLSVQSCLVLFVRLLLLLPDKRFKESLHRCLRLELGPVR

SEQ ID NO: 79651 - protein, 67 aa, Gossypium hirsutum
  unsure (1)..(67): unsure at all Xaa locations
  Clone ID: LIB3583-015-P1-K1-B11.pep
VLLRDSDDPQRXYLDCRLHCQLDERRLRPHCVHSCXVHFVILLLLLPDKQFKECLLRCQRLEHKPVR

SEQ ID NO: 79652 - protein, 101 aa, Gossypium hirsutum
  unsure (1)..(101): unsure at all Xaa locations
  Clone ID: LIB3583-015-P1-K1-B1.pep
RRVSVVSELLLKFFPYYFHSRSFLVRFXRLYMAISESSREFAAKHHLLKGINEFRIAILEANPNTFVLPHHCDAENIYVVSIGRSSISFVTHEYKESYNVA

SEQ ID NO: 79653 - protein, 151 aa, Gossypium hirsutum
  unsure (1)..(151): unsure at all Xaa locations
  Clone ID: LIB3583-015-P1-K1-F9.pep
RSRGAISESSRELADLHHFLXGINVFRIAIFDAFPFSFVLPLHXVAVFIYVVSIGXSTVSFVSHVNIVSYYVVPGVVVCIPASCSEYLAILVYWVXLTIAVLHRPVYNPGQFLKFFPAGLENPQSYLRIFSREILEAVFNSRRELLVELFG

SEQ ID NO: 79654 - protein, 119 aa, Gossypium hirsutum
  unsure (1)..(119): unsure at all Xaa locations
  Clone ID: LIB3582-004-P1-K1-G5.pep
MVRNKSAFVVTVFTLFLSFGLLCSAKDXPGRRSEDDPQQTYEDCHKRCQLVTRGRTVHDTCEDRCETHMKEEQQRDGEDTHRRYQDCRPHCQQEERRLRAHCEHSCWEQYEKQLPRQPD

SEQ ID NO: 79655 - protein, 132 aa, Gossypium hirsutum
  unsure (1)..(132): unsure at all Xaa locations
  Clone ID: LIB3582-059-P1-K1-A2.pep
LSLLILSLGLLSSAKNFLXAIIYDYPPQMYYDCQMRCHTKTHGQTEQDKCEDRCERHFKEDQQLVXDNPQRRYHDCRQHCQQEERRLRAQCEQSCQEQYERHQQXQPDKRFKECQHRCQRXEQGPERKLXCV

SEQ ID NO: 79656 - protein, 162 aa, Gossypium hirsutum
  unsure (1)..(162): unsure at all Xaa locations
  Clone ID: LIB3583-015-P1-K1-E5.pep
GGELIVIKERNKSVFVVLLFSLFLCXGXLCSAKDFPGRRSEDDPQQKYVDCRKRSQLETRGQTVQDKSEDWSETQLKVSAXRDREDPQRRYQDCRQHCQQEERRLRPHCEQSCXEQYEKQLQLQPDKQFKESQQRCQRQEHKPVRXQQCVXECKDQFLEVPW

SEQ ID NO: 79657 - protein, 109 aa, Gossypium hirsutum
  Clone ID: AI055596.1.pep
ENISLEHLKKKFRTWVSMLRLSFQSFSSVHQIWSEGPMDGAVCARGFERLARLLAVSRVVYEKISTKVREETFGLMKELVEVPLERKQKTLVPCLTMDGLDHAFRFFVV

SEQ ID NO: 79658 - protein, 144 aa, Gossypium hirsutum
  unsure (1)..(144): unsure at all Xaa locations
  Clone ID: LIB3583-026-P1-K1-G10.pep
LFSMFLSLGLLCSAKDFPGRRSEDDPRQKFEDCXERSQSETRGLTELDXSDDRCVRLFKEVLLRDRDDPQRRYQDCRQHCQQEERKLRPQSEQSCQEQFVRQLLQLPDKRFKECQHRCQRQEQGPVRXQQCVKECKVQFLEVPW

SEQ ID NO: 79659 - protein, 179 aa, Gossypium hirsutum
  unsure (1)..(179): unsure at all Xaa locations
  Clone ID: LIB3583-026-P1-K1-F6.pep
RELDLSHFPFHFHXRSFQSRFXEEHGFFXVLQRVSFKSILFFEGIYVFRLSIFDANPNSFVLPHHXDAVLIYLVSNGRRTLTFLTHEFIESYNIVPGVVVXVPARCTVYLAXLSSRFXLIIAVLHRPVYNPGQFEEFFPAGSQRPQSYLRAFSREILEPAFNSRREQLDELLGGRLSRR

SEQ ID NO: 79660 - protein, 168 aa, Gossypium hirsutum
  unsure (1)..(168): unsure at all Xaa locations
  Clone ID: LIB3583-018-P1-K1-D1.pep
PLVREGCNWGTAVSGSHRQGVPRARQEEHGAFTVLHRWAAKHHXLRGMNELRMAIEQADPCTSVLSHHRDAEEMYHVTNGSCTMTFVTHAYNQSYNAATAVVVRLPAGSTEYLANQDIRVELTIAALHRAVNDRGQFQKCFPCGQENPQSYVRTLSREILEAXVFNTR

SEQ ID NO: 79661 - protein, 150 aa, Gossypium hirsutum
  unsure (1)..(150): unsure at all Xaa locations
  Clone ID: LIB3583-026-P1-K1-A2.pep
IVVESDLLCSAKDFPGXRSEDDPRQKYEDCLRRCQSETRGQTVQDXCEDRCERLFKVELLRDGDDPQRRYQDSRLHCLQEERKLRPQSKRGGLLQDQRLQQLHPDKRFKESQHRCQRQEQGPERXLQCVXECSVQYQEDPWXGERENKWR

SEQ ID NO: 79662 - protein, 107 aa, Gossypium hirsutum
  unsure (1)..(107): unsure at all Xaa locations
  Clone ID: LIB3166-055-P1-K1-C1.pep
AGDTAVTVRFFHCYKRGVGRVYGDHPNFLEKVWCETAFKIYGPRAGLDYQDNQLRITLVCQAALEAPIVLNLNGRXNFSRPYGADVGSIAHDWLTALIACYLKSNVH

SEQ ID NO: 79663 - protein, 130 aa, Gossypium hirsutum
  unsure (1)..(130): unsure at all Xaa locations
  Clone ID: LIB3583-026-P1-K1-B3.pep
GIFVFRIAIFVAFPNSFVLPLHCVAVIIYVVSIRXRSVTFVSHVNLESYYVVPGVVVXIPARCSEYLAFXSSRXLLSIAVLHRPVYNPGQFQXFFPAGQEYPQSYLRIFSREILEAVFNSRSEQLDELFG

SEQ ID NO: 79664 - protein, 116 aa, Gossypium hirsutum
  unsure (1)..(116): unsure at all Xaa locations
  Clone ID: GOSHI-09MAY01-C19_27.pep
RAQLSTGDLLVVPAXHPVTFVSLRNRETLDXLGFGLYYGLDNKRXIFEAGKTNXSDQRDRLAKELAFGEESWLEEXVFNNNPQESYFESGQSRRGFVVRRGCFFPLSPFLDFARLF

SEQ ID NO: 79665 - protein, 47 aa, Gossypium hirsutum
  Clone ID: GOSHI-09MAY01-C19_28.pep
NHLPSVQDHNVKPLNCKVRYEDQHPLFISKRQQRRNPLSWSCCFGNY

SEQ ID NO: 79666 - protein, 121 aa, Gossypium hirsutum
  Clone ID: GOSHI-09MAY01-C19_29.pep
MGVDAELAIPVIEFRTGSRDLERGTEGWHHLCKRVREACETYGCFEVVYEKISREVREETFELLNELVEVPLERKQLNVNPKPYHSYFGPCSQAFLYEGFGIEDAPNYDSVNNFAQLMWSD

SEQ ID NO: 79667 - protein, 107 aa, Gossypium hirsutum
  Clone ID: GOSHI-09MAY01-C19_30.pep
MGESMRMIDVEKLISYSDDVVEVLKDKRDINNLTQCFQHFNDLRSHCDADSNEVHRLLREYEEKIEACKKKTEQAKLEVADGAEMEYLQKEYQEELEKERGLEEELR

SEQ ID NO: 79668 - protein, 132 aa, Gossypium hirsutum
  Clone ID: GOSHI-09MAY01-C19_31.pep
MKREEEEEEEDKEEEQEQEEERRSGQYRKIRSRLSRGDIFVVPANFPVTFVASQNQNLRMTGFGLYNQNINPDHNQRIFVAGKINHVRQWDSQAKELAFGVSSRLVDEIFNSNPQGSPPLHRSPFLFHYMPA

SEQ ID NO: 79669 - protein, 161 aa, Gossypium hirsutum
  unsure (1)..(161): unsure at all Xaa locations
  Clone ID: GOSHI-09MAY01-C19_32.pep
MARTDLEMQIEGLKEELAYLRKNHEEVRLLLASGVGGWFGGVARCTQGQERSLLSXLPPAIPSQEMLALRGQSGGDVNVEMDAAPGVDLSRILNEMRDQYEQMAEKNRRDAEAWFLSKTEELNKEVASNSELVQSSRTEVTELRRVFQGLEIELQSQLSMV

SEQ ID NO: 79670 - protein, 191 aa, Gossypium hirsutum
  unsure (1)..(191): unsure at all Xaa locations
  Clone ID: GOSHI-09MAY01-C19_33.pep
PRVREERVEAAXVFKSGGFGDVLTDKTVDKAKLIDDVRQALYASKICSYAQGMNLIRAKSIEKGWDLKLGELARIWKGGCIIRAIFLDRIKKAYDRNPDLANLLVDPEFAKEIIDRQSAWRRVVCLAINSGISTPGMSASLAYFDTYRRERVPANLVQAQRDYFGAHTYERVDMEGSFHIEWFKTAKQLKN

SEQ ID NO: 79671 - protein, 213 aa, Gossypium hirsutum
  unsure (1)..(213): unsure at all Xaa locations
  Clone ID: GOSHI-09MAY01-C19_34.pep
LECLAVLERVLLRVSVVPQRRYQVCRLHCLLEDRXLRPQCVHSCLVQFVRLLLLQPDKRFXESQHRCLQLELRARSVASLCVEYARFCSLRVPWLGVSVFXWCVVVVEVSVVSVLLLKFIPYYFHRRSFLVRFXVVHGYFRVLQKLADKHHLLKGIYVFRIAILDANPNSFVLPHHCDAEXIYVVSISRRSVSFVTHENXESYKVVPGVVVSI

SEQ ID NO: 79672 - protein, 156 aa, Gossypium hirsutum
  unsure (1)..(156): unsure at all Xaa locations
  Clone ID: GOSHI-09MAY01-C19_35.pep
MGVQAEIEFPVIEFRSADLERGTDGWHRLCKRVREACETFGCFEVAYKKISTEVREETFGLMKELIEVPVERKQKNASPMPYHGWVGPCNQVSLLYEGFGLGDASTMTXVKSFAQLMWPDGHPRFCTTIHTIGTQIRELDKLIWLMLIDSYGSGEK

SEQ ID NO: 79673 - protein, 288 aa, Gossypium hirsutum
  unsure (1)..(288): unsure at all Xaa locations
  Clone ID: GOSHI-09MAY01-C19_36.pep
SVFVVMLXSLFLSFGLLCSDKDFHGRRSEDDPQQRXRTVRKRCLLETRGQTEQDTCDDRCETHLKDEQQRDENHPHRRYQDRRQHCQQEERRLDPHCEHSCMXQYEKQQQQLADKQFKECQQRCQWQEQMPERKQHCVKECRVQYLEVPWNGESENKREKIEACKKKTEQAKLEVADGAEMEYLQKEYQEELEKERGLKEELRAVSNEIIELERQRVSIEERKKNLRKYEQDKLKEQRKLSMYASITNIIPDLEDQSRISGHIVDRDKKVIKKFEFDTSKMTAFDACD

SEQ ID NO: 79674 - protein, 180 aa, Gossypium hirsutum
  unsure (1)..(180): unsure at all Xaa locations
  Clone ID: GOSHI-09MAY01-C19_37.pep
KVFDGHLLLASIQRYYRSHSSPNDSIKATFVVLYTHRIGHIEMVCPYLSRQISHWLYREDDEQEEHEVERRSGQYKRVRAQLSTGDLLVVPASHPVTFVAFQNXEDLGLLGFGLYNGQDNKRICVAGKTNNVRQWDRQAKRMTVGGDSKVIHEDKRSNSSEKKVVKVTMARKINSNAADL

SEQ ID NO: 79675 - protein, 123 aa, Gossypium hirsutum
  Clone ID: GOSHI-09MAY01-C19_38.pep
ICFEQICTIEVQDCGHQMCAQCTLALCCHNKPNPTTASLTPPACPFCRSTIVRLVVAKIKNHDDVDHDIGEVSSSKLRKTRKSRNFSEGSSSFKSLSAVGSFSKISGRGSGRIAAENECIDKP

SEQ ID NO: 79676 - protein, 64 aa, Gossypium hirsutum
  unsure (1)..(64): unsure at all Xaa locations
  Clone ID: GOSHI-09MAY01-C19_39.pep
SCDHGYNKPNKGKKIXNWMKAGILESHKVLTVSPYYALELVSGENKGVERGHIISKTGITGIAN

SEQ ID NO: 79677 - protein, 358 aa, Gossypium hirsutum
  Clone ID: GOSHI-09MAY01-C19_40.pep
MHGKISCVKRLIEAGANILMFDSLHGRICLHYAAYYGHSDCLQAILSAAQSSPVAVSWGYARFVNIIDGRGATPLHLAARRKQPECVHILLYNGALVCASTGRYGFPGSTPLHLAARGGSLDCIRMLLAWGADRLQRDASGRISFVVALKHKHGACAALLNPSSAEPLVWPATLKFITELNEEAKSLLEQALMEANREREKNILKGTAYSLPSPSHSDSGLDDSVSEASDTEVCCICFEQLCTIEVQDCGHQMCAQCTVALCCHNKPNPVTASLTTLVCPFCRCTIVRLVVAKMKCYDNTNRSTGEDSTSKPRKSRKPRNFSEGSSSFKSLSAIGSFSKIGGLSSGRIAAENEWIDKT

SEQ ID NO: 79678 - protein, 429 aa, Gossypium hirsutum
  unsure (1)..(429): unsure at all Xaa locations
  Clone ID: GOSHI-09MAY01-C19_41.pep
QCRPTRARSRGLDLSHFPFLFHRSSFLSRFKEDLGFFWVLLRLASRHPILRGIYVFRLSILVAYPNSFVLPLHXDAEIIFLVSFGRSTLTFLTHVYKESYYIVPGSRVXVPASCTEYLAILVFKVXLIIAELHRPVNIPGQFEXEFFPAGSQRPQSYLRAFSREILEPAFNTRREQLDVLLGGXLSLRKLLGLGKFRKASHDHIXGLXSQDTTSPKVNRGVRFAFNLLYQTPRYSNQNGRFYEASPREFRLLKDINVTVSALQLNQGSIFVPHYNSKATFVVLVYERNGYVEMVSPHLPRQSSFEEEEEHLLDLDLVEDRSCGLFWNIKSQLSRGDIFVVPANFPVTFVASQNQNLRMTGFGLYNQNINPDHNQRIFVAGKINHVRQWDSQAKELAFGVSSRLVDEIFNNNPHETMWLLLPLTLLVLDR

SEQ ID NO: 79679 - protein, 322 aa, Gossypium hirsutum
  unsure (1)..(322): unsure at all Xaa locations
  Clone ID: GOSHI-09MAY01-C19_42.pep
LAFLERVYCVAFGLCFGPFGCFFVCWYARFCSLWFLGWVCVFSSGVLLLLWFVSLVCFFFEFFPYYFHRSSFLVRFXVVHGYFXVLQKFAVYHHLLWGIYVFRIAIFVAFPFSFVLPXPLESRSLFSLVSIGSSSVSFVSLVFFVSFYVVPGVVVCFPASCSEYLAFLVFWVXLSIAVLHRPVYNPGQFLIFFPAGLDYPXSYLIVSSARVILRELVFNSXEEMLLVVLXRRVSIAIRKLLGLGKFRLASQVLIKALSQRATSPKGXGSEGYAFNLLNQTPRYSNHNGRFYEXACPRYFQQLLREVDSSIVAFVIFIRSIFV

SEQ ID NO: 79680 - protein, 313 aa, Gossypium hirsutum
  Clone ID: GOSHI-09MAY01-C19_43.pep
MGVNAENKFPAIEFRSSDLKRGTDGWRNLCKKVQEACEKFGCFEVVYDTISTKVREESFGLMKELVEVPVERKQKNTSPMPYHGWVGPCEQVSLLYEGFGIGNASNYDSVKSFTQLMWPEGHPHFCDTIHTIGTQMEELNKLIWLMLIDSYGLGDDSLKLNYTTLVRMMKYMAPPPGEYERGLFAHTDKPVSTLICEDQVSGLEIEVNDGQWIKLTNLSPSSFCFVVGDPLKAWSNGRLKAVNHRVMMSGDKDRLSLAAFAIPVEGTIIKAPRELIDEQHSQLYKDFNFMDFFLFAFSDPAKHIDSGEQLQLL

SEQ ID NO: 79681 - protein, 323 aa, Gossypium hirsutum
  Clone ID: GOSHI-09MAY01-C19_44.pep
MNMAIDAEIEFPTIELRSSDLKRGTEGWNRLCKRVREACETFGCFDVVYKKISTKIREDAFELQKELVEVPVERKQKNTSPLPCHGWVGPCEQVSMLYEGFGVADASNYDSVNNFAQLMWPNGQPRFTDTIHTLATQMEELNKLIWLMLTDSYGLQEDSLKMNYKTLVRMMKYLAPPPGEYERGFFAHTDKPISTLICEDKSGLEIEVNNDQWIKLTNLSPSSFVFIGGDPLKAWSNGRLKPVNHRVMMSGDKDRYSIAAFIIPNEGTIIKAPKELIDEKHPQLFKEFDFMDFFLYAISDPAKHIDSGELLHAYASLSPPVSN

SEQ ID NO: 79682 - protein, 323 aa, Gossypium hirsutum
  unsure (1)..(323): unsure at all Xaa locations
  Clone ID: GOSHI-09MAY01-C19_45.pep
ELAVDAEIELPTIEFXHRILKRGTEGWNRLCKRVREACETFGCLDVEYKRISTDIREDAFELLKELVEVPVERKQKNTSPLPYHGWVGPCEQVSVLYEGFGVGDASNYDSVKSFAQLMWPNGHPRFTETIHTLTTQMEELNKLIWLMLTDSYGLREDSLKMNYTTLVRMMKYLAPPPGENKRGLFAHTDKPVSTLICEDKISGLEIEVSDGQWIKLTNLSPSSFVFMVGDPLKAWSNGRLKSVNHRVMMSGDKDRYSIAAFVIPNEGTIIKAPKELIDDQHPQLFKEFDFMDFFLYAFSDPAKHIDNGQLLYSYASLSPPVSH

SEQ ID NO: 79683 - protein, 159 aa, Gossypium hirsutum
  Clone ID: GOSHI-09MAY01-C19_46.pep
MGVNAEIVVPVIEFLSSDLERGTDGWHHLCKRVREACETYGCFEVVYERVSKKVREEMFGLVKELVQVPLERKQKNASPLPYHGWVGPCSQVSLLYEGFGLGDASNYDSVKRFAQLMWPDDHPRFCDTVHTLATQMEELNKLIWLMIFESYGLGEKLSH

SEQ ID NO: 79684 - protein, 417 aa, Gossypium hirsutum
  unsure (1)..(417): unsure at all Xaa locations
  Clone ID: GOSHI-09MAY01-C19_47.pep
MPLFVPGWLYGTFPVPGRVGGRVGGRVGECRQQEERQQPQCQQRCLKRFEQEQQQSQRQFQECQQHCHQQEQRPEKKQQCVRECREKYQENPWRGEREEEAEEEETEEGEQEQSHNPFHFHRRSFQSRFREEHGNFRVLQRFASRHPILRGINEFRLSILEANPNTFVLPHHCDAEKIYLVTNGRGTLTFLTHENKESYNVLPGVVVRVPAGSTVYLANQDNKEKLIIAVLHRPVNNPGQFEEFFPAGSQRPQSYLRAFSREILEPAFNTRSEQLDELFGGRQSHRRQQGQGMFRKASQEQIRALSQEATSPREKSGERFAFNLLYQTPRYSNQNGRFYEACPREFRQLRDINVTVSALQLNQGSIFVPHYNSKATFVVLVNEGNGYVEMVSPHLPRQSSFEEXEEQQHEQEQEDER

SEQ ID NO: 79685 - protein, 267 aa, Gossypium hirsutum
  Clone ID: GOSHI-09MAY01-C19_48.pep
LHSVFSEWNKGELLSFLIEITADIFGIKDDKADGYLVDKVLDKTGMKGTGKWTVQQAADLSIAAPTIAASLDSRFLSGLKEERVEAAKVFKSGGFGDVLTDQVVDKARLIDDVRQALYASKICSYAQGMNLIRAKSIEKGWDLKLGELARIWKGGCIIRAIFLDRIKKAYDRNSDLANLLVDPEFAKEIIDRQSAWRRVVCLAINSGISTPGMSASLAYFDTYRRERVPANLVQAQRDYFGAHTYERVDMDGSFHTEWFKIAKKLKD

SEQ ID NO: 79686 - protein, 445 aa, Gossypium hirsutum
  Clone ID: GOSHI-09MAY01-C19_49.pep
MGQGLSCGASQENVLFSAVQVGDLETVEAYVKRESNLLHHTTVYDRHSALHIAAAYGQIEILAMLLEKSVNPDVVNRQKQTPLMLAAMHGNISCVKKLIEAGANILMFDSIHGRTCLHYAAYYGHSDCLQAILSAARSSPVAVSWGYARFVNIRDAKGATPLHLAARQRRPDCVHILLDNGALVCASTGGYGCPGSTPLHLAARGGSLDCIRKLLAWGADRLQRDASGRIPYVVALKHKHGACAALLNPSSAEPIVWPAPLKFISELNEEAKTLLEQALMDANREREKNILKGTAYSIPSPSQSDSGLDDNISEASDTELCCICFEQICTIEVQDCGHQMCAQCTLALCCHNKPNPTTASLTPPACPFCRSPIVRLVVAKIKNHDDVDHDIGDVSSSKLRKTRKSKNFSEGSSSFKSLSAVGSFSKISGRGSGRIAAENEWIDKP

SEQ ID NO: 79687 - protein, 327 aa, Gossypium hirsutum
  Clone ID: GOSHI-09MAY01-C19_50.pep
MSVDAKIEFPVIEFRSSDLERGTNGWYRLCKKVREACEIFGCFEVVYDTISTKVREEMFRLMKELVEVPVERKQKNTSPLPYHGWVGPCTQVSLLYEGFGLGDVSNYDSVKNFAQLMWPEGHPRFCDTIHTMGTQLEVLNKLILLMIIDSYGLSEDSLKINYTTSMRMMKYTTPPPGEYETGLFAHTDKPVSTIICEDQIPGLEIEVNDGQWIKLTNLSPSSFVFMVGDPLKAWSNGRLKSTNHRVMMSGDKDRFSIAAFIMPNEGTIIKTPKELIDEEHPQLFKDFDFMKFFFFAFSNPARHIDSGQLLYDFAALSPPVSNGHMDK

SEQ ID NO: 79688 - protein, 84 aa, Gossypium hirsutum
  Clone ID: GOSHI-09MAY01-C19_51.pep
NVECDEVDPSDVIKVVKTVKRALATYGTQALKEMIQNCMAQDFSWKGPSRLWEKMLLSLGVAGSEPGIEGEEIAPLARENVATP

SEQ ID NO: 79689 - protein, 177 aa, Gossypium hirsutum
  unsure (1)..(177): unsure at all Xaa locations
  Clone ID: GOSHI-09MAY01-C19_52.pep
MVIMVRNKSVFVVLLFSLFLSFGLLCSAKDFPGRRSEDDPRQRYEDCQRRCQSETRGQTEQDKCEDRCERQFKEEQQRDGDDPQRRYQDCRQHCQQEERRLRPQCEQSCQEQYERQQQQQPDKRFKECQHRCQRQEQXPDRKQQCVKECREQYQEDXPWKGERENKWREEEEEESDE

SEQ ID NO: 79690 - protein, 323 aa, Gossypium hirsutum
  Clone ID: GOSHI-09MAY01-C19_53.pep
MPGVNPEIEFPAIEFRSSDLKRGTEGWNRLCKRVQRACETFGCFEVVYEKVSTKLREDAFGLMKEMVELPVETKQKNNSPMPYHGWVGPCKQVSVLYEGFGVGDASNYDSVKSFAQLMWPNGHPHFSDTIHTLATQMEDLNKLIWLMLIDSYGLGDDSLKMNYTTLVRMMKYMAPPPGEYERGLFAHTDKPVSTLICEDQISGLEIEVNDGQWIKLTNLSPSSFVFVVGDPLKAWSNGRLKSVNHRVMMSGDKDRYSIAAFVIPNEGTIIKTPKEFIDDQHPRLFKDLDFMEFFLFAFSDPARHIDNGELLHVFAGLSPSVSN

SEQ ID NO: 79691 - protein, 325 aa, Gossypium hirsutum
  unsure (1)..(325): unsure at all Xaa locations
  Clone ID: GOSHI-09MAY01-C19_54.pep
MGVTINAEIEFPAIEFRSSDLKRGTDGWRHLCKKVQEACEKFGCFEVVYDTISTKVREETFGLMKELVEVPVERKQKNTSPMPYHGWVGPCEQVSLLYEGFGIGNASNYDCVKSFTQLMWPEGHPHFCDTIYTMGTQMEELNKLIWLMLIDSYGLGDDSLKLNYTTLVRMMKYMAPPPGEYERGLFAHTDKPVSTLICEDQVSGLEIEVNDGQWIKLTNLSPSSFVFVVGDPLKAWSNGRLKSVNHRVMMSGDKDRYSIAAFVIPKXGTYXSGTPEELIDDQHPRLFKDFDFMDFFLFAFSDPAKHIDNGELLHVFAGLSPPVSN

SEQ ID NO: 79692 - protein, 324 aa, Gossypium hirsutum
  unsure (1)..(324): unsure at all Xaa locations
  Clone ID: GOSHI-09MAY01-C19_55.pep
MGVNAKIEVPVIEFCSSDLERGTDGWRHLCKRVREACETYGCFEVVYQRVSKKVREEMFGLVKELVQVPLERKQKNASPLPYHGWVGPCSQVSLLYEGFGLGDASNYDSVKRFAQLMWPDGHPRFCDTVHTLATQMEELNKLIWLMIFESYGLGEKFESLMINYKTLVRMMKYMAPXTREYESGLFAHTEKPVSTVICEDQVSGLEIEVKDGQWIKLSNLSPSSFVFVVGDPLKAWSNGRLKAVNHRVMMSGDKDRYSIAAFAIPGEGTIIKAPKELIDEQHPQLYKDFNFMDFFRFAFSDRAKNIESGQQLHAFASLSPPISD

SEQ ID NO: 79693 - protein, 440 aa, Gossypium hirsutum
  Clone ID: GOSHI-09MAY01-C19_56.pep
MGQGLSCGASQENGLFSAVKVGDFETVEALLKREPSLLHHTTVYDRHSALHIAAANGQIEILAMLLDKSMNPDAVNRNKQTPLMLAAMHGKISCVKKLIEAGANILMFDSLHGRTCLHYAAYYGHFDCLQAILSAAQSSPVAVSWGYARFVNIRDARGATPLHLAARQRRPECVHILLDNGALVCASTGGYGCPGSTPLHLAARGGSLDCIRKLLAWGADRLQRDATGRIPYIVALKYKHGACAALLNPSSAEPLVWPAPLKFISELNDEAKVLLEQALMDANREREKNILKGTAYSLLSPSPSRSDSGLDDSISEVSDAELCCICFEQICTIEVQDCGHQMCAQCTLALCCHNKPNPTTASVTPPVCPFCRSTIVRLAVAKIKDCDGDVGEDGSSPKVRRRRKSRNFSEGSSSFKSLSAVGSFNKMGRIAAENEWIDKP

SEQ ID NO: 79694 - protein, 360 aa, Gossypium hirsutum
  Clone ID: GOSHI-09MAY01-C19_57.pep
MTTCSRQFTSSSSMKGSCGIGGGIGGGIGGGSSRISSVLAGGSCRAPSTYGGGLSVSSSRFSSGGAYGLGGGYGGGFSSSSSFGSGFGGGYGGGLGSGLGGGFGGGFAGGDGLLVGSEKVTMQNLNDRLASYLDKVRALEEANADLEVKIRDWYQRQRPAEIKDYSPYFKTIEDLRNKILTATVDNANVLLQIDNARLAADDFRTKYETELNLRMSVEADINGLRRVLDELTLARADLEMQIESLKEELAYLKKNHEEEMNALRGQVGGDVNVEMDAAPGVDLSRILNEMRDQYEKMAEKNRKDAEEWFFTKTEELNREVATNSELVQSGKSEISELRRTMQNLEIELQSQLSMKASLEN

SEQ ID NO: 79695 - protein, 235 aa, Gossypium hirsutum
  Clone ID: GOSHI-09MAY01-C19_58.pep
MQVMKAKPLLKEALQAEVGLPCDGDVPLIGFIGRLEEQKGSDILAEAIPKLVAENCQIVVLGTGKKAMEKQIEQLEIQYPDNVRAVAKFNVPLAHMIIAGADYILVPSRFEPCGLIQLHAVRYGTVSIVASTGGLVDTVKEGFTGFQMGAFNVECDEVDPSDVIKVVKTVKRALATYGTQALKEMIQNCMAQDFSWKGPSRLWEKMLLSLGVAGSEPGIEGEEVAPLAKENVATP

SEQ ID NO: 79696 - protein, 345 aa, Gossypium hirsutum
  Clone ID: GOSHI-09MAY01-C19_59.pep
MTTCSRQFTSSSSMKGSCGIGGGIGGGSSRISSVLAGGSCRAPSTYGGGLSVSSSRFSSGGACGLGGGYGGGFSSSSSFGSGFGGGYGGGFGGGFGAGGGGLGGGLGGGLGGGFGGGFAGGDGLLVGSEKVTMQNLNDRLASYLDKVRALEEANADLEVKIRDWYQRQRPSEIKDYSPYFKTIEDLRNKIIAATIENAQPILQIDNARLAADDFRTKYEHELALRQTVEADVNGLRRVLDELTLARTDLEMQIEGLKEELAYLRKNHEEEMLALRGQSGGDVNVEMDAAPGVDLSRILNEMRDQYEQMAEKNRRDAEAWFLSKTEELNKEVASNSELVQSSRTEV

SEQ ID NO: 79697 - protein, 324 aa, Gossypium hirsutum
  unsure (1)..(324): unsure at all Xaa locations
  Clone ID: GOSHI-09MAY01-C19_60.pep
MPGVNPEIEFPAIEFRLSDLKRGTEGWNRLCKRVQEACETFGCFEVVYEKVSTKLREDAFGLMKEMVEXLPVETKQKNNSPMPYHGWVGPCKQVSVLYEGFGVGDASNYDSVKSFAQLMWPNGHPHFSDTIHTLGTQMEELNKLIWLMLIDSYGLGDDSLKMNYTTLVRMMKYMAPPPGEYERGLFAHTDKPVSTLICEDQISGLEIEVNDGQWIKLTNLSPSSFVFVVGDPLKAWSNGRLKSVNHRVMMSGDKDRYSIAAFVIPNEGTIIKTPKEFIDDQHPRLFKDLDFMEFFLYAFSDPARHIDNGELLHVFAGLSPPVSN

SEQ ID NO: 79698 - protein, 317 aa, Gossypium hirsutum
  unsure (1)..(317): unsure at all Xaa locations
  Clone ID: GOSHI-09MAY01-C19_61.pep
MPRPSKLLSAPALNPALTMSLRLQSSSASYGGGFGGGSCQLGGGRGVSSCSTRFVSGGSAGGYGGGVTCGFGGGAGSGFGGGYRGGLGGGFGGGLXLVGFVDFGACDGGLLTGNEKITMQNLNDRLASYLEKVRALEEANADLEVKIRDWHLKQSPASPERDYSPYHKTIEELRDKILTATIENNRVILEIDNARLAADDFRLKYENELALRQSVEADINGLRRVLDELTLSKTDLEMQIESLNEELAYMKKNHEEEMKEFSNQVVGQVNVEMDATPGIDLTRVLAEMREQYEAMAERNRRDAEEWFHAKSAELNKE

SEQ ID NO: 79699 - protein, 415 aa, Gossypium hirsutum
  unsure (1)..(415): unsure at all Xaa locations
  Clone ID: GOSHI-09MAY01-C19_62.pep
GELDLSHFPFHFHRRSFLSRFXEDHGFFWVLLRXASRXPILWGIYVFRLSIFDAFPFSFVLPLLXDAEFIFLVSFGXSSLSFLTHVYFESFYIVPGVVVXVPASCSEFXLSLSSRFXLIIAVLHRPVNIPGLFEVFFPAGSLRPQSYLRPLSXKSXPAFNTRSEQLDELXGGRQSLEAAGQGMFRKXSQEQIRALSQNYLPRXESGERFAFNLLSQTPRYSNQNGRFFEACPREFRQLRDINVTVSALQLNQGSIFVPHYNSKATFVILVTEGNGYAEMVSPHLPRQSSYEEEEEEDEEEEQEQEEERRSGQYRKIRSRLSRGDIFVVPANFPVTFVASQNQNLRMTGFGLYNQNINPDHNQRIFVAGKINHVRQWDSQAKELAFGVSSRLVDEIFNSNPQESYFVSRQRQRASE

SEQ ID NO: 79700 - protein, 618 aa, Gossypium hirsutum
  unsure (1)..(618): unsure at all Xaa locations
  Clone ID: GOSHI-09MAY01-C19_63.pep
MVRNKSVFVVLLFSLFLSFGLLCSAKXDFPGSKQARHDPQQRYEDCXRKRCQLETRGQTEQDKCEDRCETQLKEEQQRDGXEDPQRRYQDCRQHXCQQEERRLRPXHCEQSCREQYEKQQQQQPDKQFKECQQRCQWQEQRPXNGKQQCVKECRXQYQEDPMGGEREENKWXKKKKRESDEGEQXQQRNNPYYFHRRSFQERFRXEEHGNFRVLQRFADKHHLLRGINEFRIAILEANPNTFVLPHHCDAEKIYVVTNGRGTVTXFVTHENKESYNVVPGVVVRIPAXGSTVYLANQDNREKLTIAVLHRPVNNPXGQFQKFFPAGQXENPQSYLRIFSREILEAVFNTRSEQLDELFGGRQSHRRPAGXRGMFRKASQEQIRALSQGATSPRGKGSEGYAFNLLSQTPRYSNQNGRFYEACPRNFQQQLREVDSSVVAFEINKVLKSQTTLSFPPXFHYNTSLHTNQNHPFFLQGSIFVPHYNSKATFVVLVTEGNGHVEMVCPHLSRQSSHWSSREQEEQEEQEEQEDERRSGQYKRVRAQLSTGDIFVVPAGHPVTFVAYQNKNLRLLGFXSTTGQDNKKIFVAGKTNIVRQWDRQSKKLSFGVESTFEDDVFNN

SEQ ID NO: 79701 - protein, 279 aa, Gossypium hirsutum
  Clone ID: GOSHI-09MAY01-C19_64.pep
NKNGDLCKGGDRYAGRLCDAGACDGGLLTGNEKITMQNLNDRLASYLEKVRALEEANADLEVKIRDWYQRQAPGPARDYSQYHRTIEELQNKILTATVDNANILLQIDNARLAADDFRTKFETEQALRLSVEADINGLRRVLDELTLARADLEMQIENLKEELAYLKKNHEEEMNALRGQVGGEINVEMDAAPGVDLSRILNEMRDQYEKMAEKNRKDAEDWFFSKTEELNREVATNSELVQSGKSEISELRRTMQALEIELQSQLSMKASLEGSLAET

SEQ ID NO: 79702 - protein, 625 aa, Gossypium hirsutum
  unsure (1)..(625): unsure at all Xaa locations
  Clone ID: GOSHI-09MAY01-C19_65.pep
MVIMVRNKSVFVVLLFSLFLSFGLLCSAKDFPGRRSEDDPRQRYEDCQRRCQSETRGQTEQDKCEDRCERQFKEEQQRDGDDPQRRYQDCRQHCQQEERRLRPQCEQSCQEXQYERQQQQQPDKRFKECQHRCQRQEQGPERKQQCVKECREQYQEDPWKGERENKWREEEEXEESDEGEQQQRNKPXYYFHRRSFQERFRXEEHGNFRVLQRFAAKHHLLRGINEFRIAILEANPNTFVLPHHCDAEKIYXVVTNGRGTITFVTHXENKESYNVAPGVVVRIPAGXSTVYLANQDNRXEKLTIAVLHRPVNNPGQFQEILPXGQENPQSYLRIFSREILEAVFNTRSEQLDELFGGRQSHRRQQGQGMFRKASQEQIRALXQEATSPRGKXGSEGYAFNLLSQTPRYSNQNGRFYEACPRNFQQQLREVDSSVXVAFEINKGSIFVPHYNSKATFXVVLVTEGNGHVEMVWPHLSRQSSHWSSREEEDKKNKXEQEEQEDERRSGQYKRVRAQLSTGDIFVVPAGHPVTFVASQNKNLGLLGFGLYNGQDNKRIFVAGKTNNVRQWDRQAKELAFGVESRLVDEVFNNNPQESYFVSGQNRRGFDERRGSNNPLSSFLDFARLF

SEQ ID NO: 79703 - protein, 72 aa, Gossypium hirsutum
  Clone ID: GOSHI-09MAY01-C9_6.pep
VQHIMMDKAADIWNRISKGGYLYVCGDAKGMARDVHRTLHTIIQEREDVDSSLAESTAKKLQMDGRYLRDVW

SEQ ID NO: 79704 - protein, 76 aa, Gossypium hirsutum
  unsure (1)..(76): unsure at all Xaa locations
  Clone ID: GOSHI-09MAY01-C9_4.pep
GIVQHKXMDKAAXIWNLISKGGYLYVCRDAKGMARDVHRTLHTIIQEQETVDSSKAESMVVRNIQMCTGTHYPPLG

SEQ ID NO: 79705 - protein, 106 aa, Gossypium hirsutum
  unsure (1)..(106): unsure at all Xaa locations
  Clone ID: GOSHI-09MAY01-C9_3.pep
MARCGGGFKFLGASVFDALYVSISRRGYSGAPPAAVTASFGRPGAMGKVERPRARKESSSSXTHGRYSSAWAPDPVTGYYRPENCGAEIDAADLREMMLHHRVRSQ

SEQ ID NO: 79706 - protein, 105 aa, Gossypium hirsutum
  Clone ID: GOSHI-09MAY01-C9_1.pep
MARSVSSFKFLGASVFDALYVSISRRGYSGAPPAAVTASFGRPGAMGKVERRYAMKESSSSETRAYSSAWAPDPVTGYYRPENCGAEIDAADLREMMLNHRVRSQ

SEQ ID NO: 79707 - protein, 100 aa, Gossypium hirsutum
  unsure (1)..(100): unsure at all Xaa locations
  Clone ID: AI054479.1.pep
MARSVSSFKFLGASVFDALYVSISRRGYSGAPPAAVTASFGRPGAMGKVERRYAIKKSSSSETRAYSSAWAPDPVXXYYRPENCGLEIERRISEMMLNHS

SEQ ID NO: 79708 - protein, 105 aa, Gossypium hirsutum
  Clone ID: LIB3135-002-Q1-K1-A10.pep
MARSVSSFKILGASVFDALYVSISRRGYSGAPPAAVTASFGRPGAMGKVERRYAMKESSSSETRAYSSAWAPDPVTGYYRPENCGAEIDAADLTEMMLNHRGRSQ

SEQ ID NO: 79709 - protein, 97 aa, Gossypium hirsutum
  Clone ID: GOSHI-09MAY01-C99_11.pep
MAGGTAPPRGSAAAAASMRRRRTTSGAASGGAAGTMLQFYTDDAPGLKISPNVVLVMSIGFIAFVAVLHVMGKLYFVRREARKEFVGQKKKISTGFI

SEQ ID NO: 79710 - protein, 143 aa, Gossypium hirsutum
  Clone ID: GOSHI-09MAY01-C99_10.pep
GWGNFWKGDSGGAFFFLPHLGKRGFFPKGLNLGTPGFFPVPRFLNPGPWNLIWGPQKKNFFFASPGEENLVLLKKGPPLFFFFFFFFFFFFFFFFFFFFFFFFFFFFFFFFFFYFFFFFFFFSSKKTYFIHTIRDTINISYTS

SEQ ID NO: 79711 - protein, 63 aa, Gossypium hirsutum
  Clone ID: GOSHI-09MAY01-C99_9.pep
HLIRMVTKRDSYMDIGLSYPILFFVCIDVENIHVHTCWIYMCNSTCFILFHLILFLLMRFRFN

SEQ ID NO: 79712 - protein, 90 aa, Gossypium hirsutum
  Clone ID: GOSHI-09MAY01-C99_8.pep
MGLKEEFEEYAEKAKTLPQNTTNDDKLILYGLYKQATVGPVNTSRPGMFNMKEKYKWDAWKAVEGKSKEEAMNDYITNVKQLQEAAAASS

SEQ ID NO: 79713 - protein, 130 aa, Gossypium hirsutum
  unsure (1)..(130): unsure at all Xaa locations
  Clone ID: GOSHI-09MAY01-C99_7.pep
KGDVYSYGVVLLELLTGRRPTDSVDFGDNNLAGWVKQHAKLKISDIFDLELMKEEPSLEIELLQHLNVACACLDDRPWRRPTMIQVMAKFKEIQAGSGLESQSTIATDDGGFSAVEMVGMXIKEIPEGKQ

SEQ ID NO: 79714 - protein, 126 aa, Gossypium hirsutum
  unsure (1)..(126): unsure at all Xaa locations
  Clone ID: GOSHI-09MAY01-C99_6.pep
KNHVLLEGSVEAVDEEDELKRTKSLTGDDLDELKGCLDLGFGFSYEEIPELCNTLPALELCYSMSQKYLDDHQHHASQTPPLPXEPVANWKPSRPAHASXEDVKARLKFWAQACGLHCQTVQLKDS

SEQ ID NO: 79715 - protein, 59 aa, Gossypium hirsutum
  Clone ID: GOSHI-09MAY01-C99_5.pep
YQNVTFNTTLTYAKMSHLSGMRVICSLPFREKENPNNSHQDSYWLQESVYLKIQGIRDR

SEQ ID NO: 79716 - protein, 180 aa, Gossypium hirsutum
  unsure (1)..(180): unsure at all Xaa locations
  Clone ID: GOSHI-09MAY01-C99_4.pep
MVGFSSQTESWVATRNSIYESQKEADSFELDLKRLDLIKIDQEDENNNINSQDKISTTKKNKKKNQVLLEGYVEAVDEEDELKRTKSLTGDDLDELKGCLDLGFGFSYEEIPELCNTLPALELCYSMXSQKYLDDHQHHASPDTTAAPEPVANWKISSPVDHVSLFSFLPSFFGLFFYLP

SEQ ID NO: 79717 - protein, 114 aa, Gossypium hirsutum
  Clone ID: GOSHI-09MAY01-C99_3.pep
MGLKEEFEEYAEKAKTLPENTTNDDKLILYGLFKQATVGPVNTSRPGMFNMKEKYKWDAWKAVEGKPKEEAMNDYITKVKQQPQACVGGEPQVVQPQEGLLGPCFNFTRMMHQV

SEQ ID NO: 79718 - protein, 89 aa, Gossypium hirsutum
  Clone ID: GOSHI-09MAY01-C99_2.pep
MGLKEEFEEHAEKVKTLPAAPSNDDMLILYGLYKQATVGPVNTGRPGMFNMRERYKWDAWKAVEGKSKEEAMGDYITKVKQLFEAAGSS

SEQ ID NO: 79719 - protein, 157 aa, Gossypium hirsutum
  Clone ID: GOSHI-09MAY01-C99_1.pep
MASSDLIGKLETDVEIDISPEKFHHMWCHRPHHVHHTSSEKVQGCDLHEGEFGTPGVVICWRYVHDGKAKTAKQVVEVMDHEKKSITFKMLEGDLMEEYKSFVITIQTSPKSDGKGSIVHWTLDYEKLHEGIGHPESLLQFFIELTADMAAHLRKET

SEQ ID NO: 79720 - protein, 85 aa, Gossypium hirsutum
  Clone ID: LIB3147-034-Q1-K1-E10.pep
TMASSDLVGLLETDVEIDISPEKFHHMWCHRPHHVHHTSSEKVHTGDSPGRKISTNGVLVMSIGFIAFDADLHVMGKLYFVRREA

SEQ ID NO: 79721 - protein, 94 aa, Gossypium hirsutum
  Clone ID: uC-gsflnu33B055f12b1.pep
KTFNLQARGSKLWSFKTAPPFFLIFYFFFFFFFFFFFFFFFFPFFFFFFFFFFFFFFFFTQIKAHSRFNSLHKNRTLRSPTHNSIIKPSIQIFK

SEQ ID NO: 79722 - protein, 126 aa, Gossypium hirsutum
  unsure (1)..(126): unsure at all Xaa locations
  Clone ID: LIB3543-053-Q1-K6-F10.pep
MSRSIFSRKVPPYVVPQAAPCPPHXSSEKVQGCDLHEGEFGTPGVVICWRYVHDGKAKTAKQVVEVMDHEKKSITFKMLEGDLMEEYKSFVITIQTSPKSDGKGSIVHWTLDYEKLHCQTVQLKDS

SEQ ID NO: 79723 - protein, 76 aa, Gossypium hirsutum
  Clone ID: uC-gsflnu33B126a01b1.pep
HTNIQMQTQYKAASFILRSVLIVIVIADDSTWDFLAMVYPLIKFGRVAERVDERVDARVDGRVAARVVGRVAGRKK

SEQ ID NO: 79724 - protein, 68 aa, Gossypium hirsutum
  Clone ID: LIB3828-030-Q6-N6-A11.pep
IIVGRLHGRSSKQATVGPVNTSRPGMFNMKEKYKWDAWKAVEGKSKEEAMNDYITNVKQLQEAAAASS

SEQ ID NO: 79725 - protein, 65 aa, Gossypium hirsutum
  Clone ID: uC-gsronu33B156b02b1.pep
AVCDPRKDGKQATVGPVNTSRPGMFNMREKYKWDAWKAVEGKSKEEAMGDYITKVKQLFEAAGSS

SEQ ID NO: 79726 - protein, 84 aa, Gossypium hirsutum
  Clone ID: LIB3828-008-Q1-K6-D11.pep
IQRKAGGTAPPRGSAAAAASMRRRRTTSGAASGGAAGTMLQFYTDDAPGLKISPNVVLVMSIGFIAFVAVLHVMGKLYFVHREG

SEQ ID NO: 79727 - protein, 91 aa, Gossypium hirsutum
  Clone ID: LIB3147-013-Q1-K1-C8.pep
EKVKTLPAVPSNDDMLILYGVYKQATVGPMNTGRAGMVNMRERCKWDSWKAVERKSKEEAMGGFISQRKQMFLAFRETLCVCVLATKIVLY

SEQ ID NO: 79728 - protein, 146 aa, Gossypium hirsutum
  Clone ID: GOSHI-09MAY01-C89_2.pep
MSMKGLKLLGTKSNFMIFFKALKILKDCICEIHPLKTLKHKNIMKFYTSWVDTARFWAAYLDDKWFPSLRAIGMAEGEDARKAAIGQVEEGLMLLEEAFDKCSQGQAFFGKDQIGYLDITFGCFLGWLKVTEKMSRIKLLNEINTP

SEQ ID NO: 79729 - protein, 281 aa, Gossypium hirsutum
  unsure (1)..(281): unsure at all Xaa locations
  Clone ID: GOSHI-09MAY01-C89_1.pep
MQLETYWMLQMKAVTSVRKCEVSSLGFSFNLYINTCRVKTFVTLKRNXTMATSDAEVKVLGTWASPFVMRVRIAMNIKSVAYEFHQERLWEGKSELLLKSNPVHRKVPVLIHGDDTICESLIIVQYIDEVWPSAPILPSDPHERATARFWAAYLDDKWFPSLRAIGMAEGEDARKAAIGQVEEGLMLLEEAFGKCSQGQAFFGKDQIGYLDITFGCFLGWLKVTEKMSGIKLLNEINTPALLKWANRFCNDAAVKDVMPETEKLAEFAKMLRGRVRATPTS

SEQ ID NO: 79730 - protein, 136 aa, Gossypium hirsutum
  Clone ID: LIB3189-023-P1-K1-H5.pep
KKLTMATSDAEVKVLGTWASPFVMRVRIAMNIKSVAYEFHQERLWEGKSELLLKSNPVHRKVPVLIHGDDTICESLIIVQYIDEVWPSAPILPSDPHERATARFWAAYLDDKWFPSLRAIGMAEGEDARKAAIGQV

SEQ ID NO: 79731 - protein, 149 aa, Gossypium hirsutum
  Clone ID: LIB3197-020-Q1-M1-F10.pep
PTRPAKSDAEVKVLGTWASPFVMRVRIALNIKSVAYEFLQERLWEGKSELLLKSNPVHRKVPVLIHGDDTICESLIIVQYIDEVWPSAPILPSDPHERATARFWAAYLDDKWFPSLRAIGMAEGEDAIVSFPVFLNKSMAFLPQKKKQK

SEQ ID NO: 79732 - protein, 123 aa, Gossypium hirsutum
  Clone ID: LIB3197-020-Q1-M1-G9.pep
AKSDAEVKVLGTWASPFVMRVRIALNIKSVAYEFLQERLWEGKSELLLKSNPVHRKVPVLIHGDDTICESLIIVQYIDEVWPSAPILPSDPHERATARFWAAYLDDKVYAFVLYSYKKKLFFM

SEQ ID NO: 79733 - protein, 43 aa, Gossypium hirsutum
  Clone ID: LIB3197-059-Q1-M1-G9.pep
PALLKWANRFCNDAAVKDVMPETEKLAEFAKMLTGRVRATPTS

SEQ ID NO: 79734 - protein, 199 aa, Gossypium hirsutum
  Clone ID: GOSHI-09MAY01-C59_1.pep
HASIPTARFIKCVTVGDGAVGKTCMLISYTSNTFPTDYVPTVFDNFSANVVVDGSTVNLGLWDTAGQEDYNRLRPLSYRGADVFLLAFSLISKASYENIYKKWIPELRHYAHNVPVVLVGTKLDLRDDKQFLIDHPGATPISTSQGEELKKMIGAVTYIECSSKTQQNVKAVFDAAIKVALRPPKPKRKPCKRRTCAFL

SEQ ID NO: 79735 - protein, 182 aa, Gossypium hirsutum
  unsure (1)..(182): unsure at all Xaa locations
  Clone ID: LIB3584-056-P1-K2-A7.pep
LPSEFFSLLLDLNYTSDTYRTDYGPXTVFDNFSANVVVDGSTVNLGLWDTAGQEDYNRLRPLSYRGADVFLLAFSLISKASYENIYKKWIPELRHYAHNVPVVLVGTKLDLRDDKQFLIDHPGATPISTSQGEELKKMIGAVTYIECSSKTQQNVKAVFDAAIKVALRPPKPKRKPCKRRTC

SEQ ID NO: 79736 - protein, 60 aa, Gossypium hirsutum
  Clone ID: LIB3543-030-Q1-K6-E12.pep
KKTIFGRKREVKLDSFKKGRPFFFFFFFFFFFFFFFFFFFFFFFFFFFFFFKLRKLKSIH

SEQ ID NO: 79737 - protein, 139 aa, Gossypium hirsutum
  unsure (1)..(139): unsure at all Xaa locations
  Clone ID: GOSHI-09MAY01-C49_6.pep
MSTAGQVIRCRAAVAWESGKPLSIEEVEVAPPQKDEVRIKILFTSLCHTDVYFWDAKGQNPLFPRIXSHEAGRIVESVGEGVTDLKASDHVLPXFTGESMSVPLVLLENACGNNLLESSARLEMINAGKSRFSFNGKPF

SEQ ID NO: 79738 - protein, 151 aa, Gossypium hirsutum
  unsure (1)..(151): unsure at all Xaa locations
  Clone ID: GOSHI-09MAY01-C49_5.pep
HASAHASAHASADAWVDPRIHGRVGQEDIAEMTGGGVYRKVECTGSIHAMIYAFECVHDGWXVAELVEVPNKDDAFKTHTVNLLNERTFKGTLFGNYKHXTDIPAVGERYMNKDLELDKLMSHSVPFSEINGACEFMLAGEGLRCMIRMDA

SEQ ID NO: 79739 - protein, 218 aa, Gossypium hirsutum
  Clone ID: GOSHI-09MAY01-C49_2.pep
MFNRLFGKPKQEANALTTLDKLNETLEMLEKKEKVLAKKAAAEVEKAKEFAKGRNKRAAIQCLKRKRLYEQQIEQLGNFQLRIHDQMIMLEGAKATTETVDALRTGAAAMKAMQKATNIDDVDKTMDEINEQTENMKQIQEALSTPIGAAADFDEDELEAELEELEGAELEEQLLQPATTAPAAPIHVPAGRQPARPIPQKHTAEEDELAALQAEMAL

SEQ ID NO: 79740 - protein, 379 aa, Gossypium hirsutum
  Clone ID: GOSHI-09MAY01-C49_1.pep
MSTAGQVIRCKAAVAWESGKPLSIEEVEVAPPQKDEVRIKILFTSLCHTDVYFWDAKGQNPLFPRILGHEAGGIVESVGEGVTDLKPGDHVLPIFTGECKECPHCLSEESNMCDLLRINTDRGEMINDGKSRFSINGKPIYHFLGTSTFSEYTVVHVGQVAKINPEAPLDKVCVLSCGMSTGFGATVNVAKPKKGQSVAIFGLGAVGLAAAEGARVSGASRIIGVDLNPSRFELAKNFGVTEFVNPKDHNKPVQEVIAEMTGGGVDRSVECTGSIQAMISAFECVHDGWGVAVLVGVPNKDDAFKTHPVNLLNERTLKGTFFGNYKPRTDIPAVVERYMNKELELDKFITHSVPFSEINKAFEYMLAGEGLRCVIRMDA

SEQ ID NO: 79741 - protein, 66 aa, Gossypium hirsutum
  unsure (1)..(66): unsure at all Xaa locations
  Clone ID: LIB3147-040-Q1-K1-C8.pep
ELTVLLKKAAAEVEKAKXFAKARYKRAAIQCLKRKRLYEQQIEQLGNFQLRVHDQMIMLESAKATP

SEQ ID NO: 79742 - protein, 98 aa, Gossypium hirsutum
  Clone ID: LIB3166-017-P1-K1-G9.pep
MYRSLCLFLYHSNPNSLIFTEDRGFNWRESTMCNRLLLKLKQEANALTTLDKLNETLEMLEKKEKVLAKNAAAEVEKAKEFAKGRHKRAAIQCLKRKR

SEQ ID NO: 79743 - protein, 130 aa, Gossypium hirsutum
  unsure (1)..(130): unsure at all Xaa locations
  Clone ID: LIB3582-022-P1-K1-B10.pep
TEKYTRKKKQVILIFVSCILEDDGFSTAGQVIXCKAAVAWESGKPLSIEEVEVAPPQKDRLNFFKLYIALCHTNVYLWDAKGQNPLFPLILGHEAGGIVDSCXEGVTDLNPGEHFLPIFTGECKECPNCL

SEQ ID NO: 79744 - protein, 74 aa, Gossypium hirsutum
  Clone ID: LIB3135-050-Q1-K1-D4.pep
QKALHPWPANPYASMRITHLRPSPASMYSNALLISFNLSNVVRAFASCLGFPKSLLNMVDSLRLNRRSSVKIKE

SEQ ID NO: 79745 - protein, 352 aa, Gossypium hirsutum
  unsure (1)..(352): unsure at all Xaa locations
  Clone ID: GOSHI-09MAY01-C69_7.pep
MDSAIAQKTWELENNILTVETPDPSSDSIFYYDEAAQAKFQQEKPWANDPHYFKRVKISALALLKMVVHARSGGTIEVMGLMQGKTDGDAIIVMDAFALPVEGTETRVNAQADAYEYMVDYSQTNKQAGRLENVVGWYHSHPGYGCWLSGIDVSTQMLYQQFQEPFLPVVXDPTRTVSAGKVEIGAFRTYPEGYKPPDDPISEYQTIPLNKIEDFGVHCKQYYALDITYFKSSLDCHLLDLLWNKYWVNTLSSSPLLGNGDYVAGQISDLAEKLEQAENQLAHSRIGPLGPPRKKLQEESQLAKITRDSAKITVEQVHGLMSQVIKDILFNSVRQSSRSQNDQSGPEPMMET

SEQ ID NO: 79746 - protein, 365 aa, Gossypium hirsutum
  unsure (1)..(365): unsure at all Xaa locations
  Clone ID: GOSHI-09MAY01-C69_6.pep
CVKKIQWAEPGTEFGRRRSARQESCDVFSGKWVFDNQSYPLYKESDCPYMSDQLACHRXKHGRSDLQYQYWRWQPHNCNLKRWNVTEMWEKLRGKRLMFVGDSLNRGQWISMVCLLQSVIPADKKSMTPNAQLTIFRAEEYNATVEFLWAPLLVESNSDDPVNHRLSERIIRPDSVLKHSSQWEHADILIFNSYLWWRQGPVKLLWSSEENGNCERPDGLGAMELAMGAWADWVASKVVPQKKRVFFVTTSPTHFWSQEWEPGSEGNCYNQMRPITLEGYWGSGSDLPTMRMVDKVLSGLGSKVSVINITQLSEYRKDGHPSIYRKFWETLGPQQLANPASYSDCIHWCLPGVPDVWNELIFPFL

SEQ ID NO: 79747 - protein, 187 aa, Gossypium hirsutum
  Clone ID: GOSHI-09MAY01-C69_4.pep
QRPASSLLFVYSLDYARTRLANDAKAAKKGGERQFNGLVDVYRKTLKSDGIAGLYRGFNISCVGIIVYRGLYFGMYDSLKPVVLTGKMQDSFFASFALGWLITNGAGLASYPIDTVRRRMMMTSGEAVKYKSSLDAFSQILKNEGAKSLFKGAGANILRAIAGAGVLAGYDKLQLIVFGKKYGSGGA

SEQ ID NO: 79748 - protein, 377 aa, Gossypium hirsutum
  Clone ID: GOSHI-09MAY01-C69_2.pep
MDQIQHPTVMQKVAGQLLSSSISRDFQGYDGSFRRPALYQGHFAYGNYSNAGMHYPIVPSTATAICVQAPAEKGFTSFAIDFLMGGVSAAVSKTAAAPIERVKLLIQNQDEMIKTGRLSEPYKGIADCFKRTMKDEGVVSLWRGNTANVIRYFPTQALNFAFKDYFKRLFNFKINRDGDWKWFAGNLTSAGAAGASSLLFVYSLDYAQPLGGGAGAALFGGERQFNGLVDVYRKTSKSDGIAGLYRGFNISCVGIIVYRGLYFGMYDSLKPVLLTGDLQDSFFASFALGWLITNGAGLASYPIDTVRRRMMMTSGEAVKYKSSLDAFSQILKNEGAKSLFKGAGANILRAIAGAGVLAGYDKLQLIVFGKKYGSGGA

SEQ ID NO: 79749 - protein, 386 aa, Gossypium hirsutum
  Clone ID: GOSHI-09MAY01-C69_1.pep
MDQVQHPSIMQKVAGQLLRSSHSQDFQGYNGSFRSPALYQRRAAYGNYSNAALQHPVRACGDLSMVPSTASAICVQAPAEKGFTSFAIDFLMGGVSAAVSKTAAAPIERVKLLIQNQDEMIKSGRLSEPYKGIGDCFKRTIKDEGFGSLWRGNTANVIRYFPTQALNFAFKDYFKRLFNFKKDRDGYWKWFAGNLASGGAAGASSLLFVYSLDYARTRLANDAKAAKKGGERQFNGLVDVYRKTLKSDGIAGLYRGFNISCVGIIVYRGLYFGMYDSLKPVLLTGSMQDSFFASFALGWLITNGAGLASYPIDTVRRRMMMTSGEAVKYKSSLDAFSQILKNEGAKSLFKGAGANILRAIAGAGVLAGYDKLQLIVFGKKYGSGGA

SEQ ID NO: 79750 - protein, 60 aa, Gossypium hirsutum
  Clone ID: uC-gsronu33B137b05b1.pep
YASARRARSHGVGHGGLGRLGSIESHSPEETCLFCYNVTNTFLVRVYTPNLNCSMFLSVG

SEQ ID NO: 79751 - protein, 133 aa, Gossypium hirsutum
  unsure (1)..(133): unsure at all Xaa locations
  Clone ID: AI054449.1.pep
MDQVQHPSIMQKVAGQLLRSSHSQDFQGYNGSFRSPALYQRRAAYGNYSNAALQHPVRAFGDLSMVPSTASAICVQAPAEKGFSSFAIDFLWVGVSAAVSKTAAAPMERGKXLIQNQDXMIXSGRLSEPSRYW

SEQ ID NO: 79752 - protein, 104 aa, Gossypium hirsutum
  Clone ID: LIB3493-049-P1-M1-F2.pep
MDQIQHPTVMQKVAGQLLSSSISRDFQGYDGSFRRPALYQGHFAYGNYSNAGMHYPIVPSTATAICVQAPAEKGFTSFAIDFLMGGVSAAVSKTAAAPIERVKL

SEQ ID NO: 79753 - protein, 63 aa, Gossypium hirsutum
  Clone ID: LIB3272-056-P1-N1-C10.pep
GEAVKYKSSLDAFSQILKNEGGKSLFKGAGANILRAIAGAGVLAGYDKLQLIVFEKKYGSGGA

SEQ ID NO: 79754 - protein, 90 aa, Gossypium hirsutum
  unsure (1)..(90): unsure at all Xaa locations
  Clone ID: LIB3145-053-Q1-K1-G12.pep
RTRGLQDSFFASFALGWLITNGAGLASYPIXTWRRKMIKTFGETGKSKXSLDAFSQILKNEGAKFLFKGAGANILRAIAGAGVLAGYDKF

SEQ ID NO: 79755 - protein, 52 aa, Gossypium hirsutum
  Clone ID: LIB3165-014-P1-K1-H12.pep
NRKIVWRATPQSPLNLNYFNEIFAKINLSGLQSFSSPSKPDAWTYASDERVW

SEQ ID NO: 79756 - protein, 142 aa, Gossypium hirsutum
  Clone ID: uC-gsflmaxxa038a03b1.pep
MDSAIAQKTWELENNILTVETPDPSSDSIFYYDEAAQAKFQQEKPWANDPHYFKRVKISALALLKMVESNSDDPVNHRLSERIIRPDSVLKHSSQWEHADILIFNSYLWWRQGPVKLLWSSEENGNCEELDGLGAMACFHYS

SEQ ID NO: 79757 - protein, 117 aa, Gossypium hirsutum
  Clone ID: uC-gsflmaxxa046f02b1.pep
MDQIQHPTVMQKVAGQLLSSSISRDFQGYDDPISEYQTIPLNKIEDFGVHCKQYYALDITYFKSSLDCHLLDLLWNKYWVNTLSSSPLLGNGDYVAGQISDLAEKLEQAENQLAHSR

SEQ ID NO: 79758 - protein, 82 aa, Gossypium hirsutum
  Clone ID: GOSHI-09MAY01-C39_1.pep
KYPSIFTTSCNICRIIMKTRDCQGKTNSVQGASTWISVSSFGASSSASSYASSSTWLSSRLALCTRIYDDLFRMVTRRAERK

SEQ ID NO: 79759 - protein, 80 aa, Gossypium hirsutum
  Clone ID: uC-gsronu33B090c12b1.pep
GCLKTPFNLHNFITHMQDNYEAKGLQGKTNSVQGASTWISVSSLGASSSASSYASSSTWLPPRLALCTTIYDDLFRMLKS

SEQ ID NO: 79760 - protein, 59 aa, Gossypium hirsutum
  Clone ID: uC-gsronu33B007e01b1.pep
GCLKIPFNVHNFMQHMQDNYEAKALSGHNLCSTCEYWWIVYPLFSESPPGMSQALGFKL

SEQ ID NO: 79761 - protein, 71 aa, Gossypium hirsutum
  Clone ID: LIB3148-042-Q1-K1-A7.pep
KYPSIFTTSSNICRIIMKTRDCQGKTISVQGASTWISVSSFGASFSASSYASSSTEKHKIVEHLVSNGRVG

SEQ ID NO: 79762 - protein, 337 aa, Gossypium hirsutum
  Clone ID: GOSHI-09MAY01-C29_1.pep
MGPTFSGFLISAMVFLTQLLSLTDGRDIGVCYGLNGNNLPSPGDVINLYKTRGVNNIRLYQPYPEVLEAARGSGISLSMGPRNEDIQSLAKDQSAADAWVNTNIVPYKDDVQFKLITIGNEAISGQSSSYIPDAMNNIMNSLALFGLGTTKVTTVVPMNALSTSYPPSDGAFGSDITSIMTSIMAILARQDSPLLINVYPYFAYASDPTHISLNYALFTSTAPVVVDQGLEYYNLFDGMVDAFNAALDKIGFGQITLIVAETGWPTAGNEPYTSVANAQTYNKNLLNHVTQKGTPKRPEYIMPTFFFEMFNQNLKQPTVEQNFGFFFPNMNPVYPFW

SEQ ID NO: 79763 - protein, 86 aa, Gossypium hirsutum
  Clone ID: GOSHI-09MAY01-C989_1.pep
DAWADAWADAWAAVRALRSNGGILHVHGNVKDTEVELWANHVSKSISEIARSEGHRWEVTIDHVEKVKWYAPHIRHLVADVKCRRI

SEQ ID NO: 79764 - protein, 227 aa, Gossypium hirsutum
  Clone ID: GOSHI-09MAY01-C969_1.pep
NDVRDALGSLSRRGLEVRLPGHHKGKSNGSVLELNDEPMVIQNSRWASLPPELLRDVIKRLEASESNWPARKHVVACAAVCRSWREMCKEIVRCPEFSGKITFPVSLKQPGSRDGTIQCFIKRDKSNLTYHLFLCLSPALLVENGKFLLSAKRTRRTTCTEYVISMDADNISRSSSTYIGKLRSNFLGTKFIIYDTQPPYTNAQLSPPGRSRRFYSKKVSPKGPYPE

SEQ ID NO: 79765 - protein, 72 aa, Gossypium hirsutum
  Clone ID: LIB3196-013-P1-M1-B12.pep
MSRSRIAASTHAFRKFLRSAKRTRTTTCTEYVISMDADNISRSSSTFIGKLMCNFFVTKSIIYDTLPLYNIA

SEQ ID NO: 79766 - protein, 211 aa, Gossypium hirsutum
  Clone ID: GOSHI-09MAY01-C919_1.pep
LSLTPVLSSPEMEEKEAEVVEAPKPADWFNTLLSLQADLLYNCFTTLSSPFFTLLSAAFESYRRAEETTANVETAVQNLPSSITHGSTVLLKRVGLGLFGAAQMCMVLVFLMVLAAFVGIGLVQLWAEEPVFVREKLFFDYTEVNPTAVFCAGGGGFDGSCYRKKQMGVPVGHTFHVYLLLLMPESDFNREIGMFQLNAELLSINGHVIGE

SEQ ID NO: 79767 - protein, 399 aa, Gossypium hirsutum
  Clone ID: GOSHI-09MAY01-C939_1.pep
RTRGRTRGRTRGRTRGVGKHNITIFAPRNEALERQLDPEFKRFLLEPGNLKSLQSLLMFHIIPKRVGSHQWPDPKTGPVKHNTLCNDHIRLTSQSTGKKTVDSAEWARPADGIRPVGVFPGIQQLLIPRSVIEDFNRRRNLRSITAVLPEGAPEVDPPTHRLKKPAPVPVGAPPVLPIYDAMAPGPSLAPAPAPGPGGPRHHFDGESQVKDFIQTLLHYGGYNEMADILVNLTSLATEMGRLVSEGYVITVLAPNDEAMAKLTTDQLSEPGAPEQIIYYHIIPEYQTEESMYNAVRRFGKVKYDTLRLPHKVVAHEADGSVKFGHGEGSAYLFDPDIYTDGRISVQGIDGVLFPEEETQTVKKPAAVKVASKPRRGKLLEVGCWMLGSLGGGSGFRWCQ

SEQ ID NO: 79768 - protein, 142 aa, Gossypium hirsutum
  unsure (1)..(142): unsure at all Xaa locations
  Clone ID: uC-gsflmaxxa061a11b1.pep
MGSSIYGVSSSHISLFLFFSFLSLSTAALPQNPSGKSSPSGQINSNSVLVALLDSHYTELAELVEKALLLQTLEEAVGKHNITIFAPRNEAVERQLDPEFKRFLLEPGNLKSLQTLLMFHIIPXRGGSHQWPDPITGPVMHN

SEQ ID NO: 79769 - protein, 68 aa, Gossypium hirsutum
  Clone ID: LIB3146-049-Q1-K1-F4.pep
HNLNPKTADEMRMHVFTRKKYCSPPHYQFLFIFIDTIGILSPLQDCQASNIPLPTTYLLYQLPNTVNV

SEQ ID NO: 79770 - protein, 339 aa, Gossypium hirsutum
  Clone ID: GOSHI-09MAY01-C849_1.pep
MASLAQQFTGLRCPPLSSSRFSVKPKQTQKVGAFASPIVSAVAVSNAQTKDRLELKKMFEDAYERCRTAPMEGVAFTVEDFQNALEKYDFDSELGTKVKGTVFCTDGNGALVDITAKSSAYLPVQEASIHKIKHVEEVGIVPGLREEFMIIGENEADDSLILSLRSIQYELAWERCRQLQAEDVVVKGKVVGANKGGVVALVQGLRGFVPFSQISSKSTAEELLDKELPLKFVEVDEEQSRLVFSNRKAMADSQAQLGIGSVVLGTVQSLKPYGAFIDIGGINGLLHVSQISHDRVSDIATVLQPGDTLKVMILSHDRERSRVSLFTKKLEPTLGDMIR

SEQ ID NO: 79771 - protein, 167 aa, Gossypium hirsutum
  unsure (1)..(167): unsure at all Xaa locations
  Clone ID: uC-gsflnu33B062a07b1.pep
RSAIPELPDAPTRSTTRPPTRPWRATVDITAKYSAYLPVQEAIHSHNLTCXEVGIVPGLREEFMIIGENEADDSLILSLRSIQYELAWERCTQLQAEDAVSKGKDXGANNGGXVALEEGLRGYVPFSQISSIATAEELXNEELPLKVVXVDEEQSQLVFSNPKAMAD

SEQ ID NO: 79772 - protein, 96 aa, Gossypium hirsutum
  Clone ID: GOSHI-09MAY01-C869_1.pep
PREGVSAKQREHALARLRLSYLDDDLGNLVINLSGITLCKYIILVNNFHSILFRELNWFSYYFNKKSLENFRNFFKNLVDSYFSYFNILSEILVST

SEQ ID NO: 79773 - protein, 207 aa, Gossypium hirsutum
  unsure (1)..(207): unsure at all Xaa locations
  Clone ID: GOSHI-09MAY01-C809_3.pep
VYCSVLTPNRNTVDGDPHWCCTYLLNPSDPLFVEIGEAFIKMPSMEYGDVTDIYNCDTFNENSPPTNDTTYISSLGAAVYKAMSNGDKDAVWLMQGWLFYSDSTFWKPPQMKALLHSVPVGKMIVLDLFADGKPIWAXSSQFYGTPYVWCLLHNFGGNIEMYGTLDAISSGPVDARISKNSTMVGVGMCMEGIEQNPVVYEFMSEMA

SEQ ID NO: 79774 - protein, 252 aa, Gossypium hirsutum
  Clone ID: GOSHI-09MAY01-C809_2.pep
ILHCLSDIEEIYVSVICSDTFNENSPPTNDTIYISSLGAAVYKAMSNGDKDAVWLMQGWLFYSDSTFWKPPQMKALLHSVPVGKMIVLDLFADVKPIWATSSQFYGTPYVWCLLHNFGGNIEMYGTLDAISSGPVDARISKNSTMVGVGMCMEGIEQNPVVYELMSEMAFRKEKVQVLEWLKTYTHRRYGKSVQQIKEAWAILYHTVYNCTDGIADHNIDFIVKFPDWDPSINFGSRPSKLNSMHTFRLRTQ

SEQ ID NO: 79775 - protein, 85 aa, Gossypium hirsutum
  Clone ID: LIB3582-049-P1-K1-E12.pep
EWLKTYTHRRYGKSVQQIKEAWAILYHTVYNCTDGIADHNIDFIVKFPDWDPSINFGSRPSKLNSMHTFRLRPEQKISFRTYLIC

SEQ ID NO: 79776 - protein, 86 aa, Gossypium hirsutum
  Clone ID: GOSHI-09MAY01-C839_1.pep
MVCIACLLPLFLVPIVNILPLLFDFVMGKIYRLLGWEYRKPERAPPACPYKPAAKLENNSKVTPETEPGAPESSSKPVGMTNGKQD

SEQ ID NO: 79777 - protein, 76 aa, Gossypium hirsutum
  Clone ID: GOSHI-09MAY01-C829_5.pep
FGGKFKLGRKIGSGSFGELYLGVNVQTKEEVAVKLESAKTKHPQLHYESKLYMLLQGGSKSMFVLHSPNLTMVFSW

SEQ ID NO: 79778 - protein, 69 aa, Gossypium hirsutum
  Clone ID: GOSHI-09MAY01-C829_2.pep
MDNVIGGKFKLGRKIGSGSFGELYLRVNVQTKEEVAVKLESAKTKHPQLHYESKLYMLLQRGTGIPHLK

SEQ ID NO: 79779 - protein, 456 aa, Gossypium hirsutum
  Clone ID: GOSHI-09MAY01-C829_1.pep
MDRVIGGKFKLGRKIGSGSFGELYLGVNVQTGEEVAVKLESVKTKHPQLHYESKLYMLLQGGTGIPHLKWFGVEADYNVMVIDLLGPSLEDLFNYCSRKLSLKTVLMLADQLINRVEYMHSRGFLHRDIKPDNFLMGLGRKANQVYVIDYGLAKKYRDLQTHKHIPYRENKNLTGTARYASVNTHLGIEQSRRDDLESLGYVLMYFLRGSLPWQGLKAGTKKQKYDKISEKKVSTPIEVLCKSYPSEFVSYFHYCRSLRFEDKPDYSYLKRLFRDLFIREGYQFDYVFDWTVLKYPQIGGSSRGRHSSGRAGLAAGPAIEKPERISVGREIRDRFSGAVEAFSKRNGSSPSPRRDHSRHKTAEGGALSKHTHPDSDKRYSSSRYGSTSRKAVVTSRPGSSSELNDIPQNRQVSSSSRMSTTQRLLAFESKTSNRSATVKVAVTITLFEFWAPLVRK

SEQ ID NO: 79780 - protein, 89 aa, Gossypium hirsutum
  Clone ID: uC-gsronu33B047b01b1.pep
SIIPIPQGAYLSYSSLGIESNSVFIAQALKIQWIYQIETLPPPIDQLFKRGKKRGAKNQRKKKKDFNLNPRKVKLYFFQKGPSFLYCIN

SEQ ID NO: 79781 - protein, 66 aa, Gossypium hirsutum
  Clone ID: LIB3583-007-P1-K1-B3.pep
MDHLIGGKFKLARKIGSGSFGELYLGVNVQTGEDVAVKLEPVKTKHPQLHYESKLYMLLQGGTGIP

SEQ ID NO: 79782 - protein, 80 aa, Gossypium hirsutum
  unsure (1)..(80): unsure at all Xaa locations
  Clone ID: LIB3829-024-Q6-K6-F10.pep
EKINRVEYMHSRGFLRRDIKPDNFLMGLGRKANQRNXKNLTGTARYASVNTHLGIEQSRRDDLESLGYVLMYFLRGRMCI

SEQ ID NO: 79783 - protein, 118 aa, Gossypium hirsutum
  Clone ID: LIB3147-013-Q1-K1-E12.pep
AFSKRNISSTSPHLDHSRHKTVDDGALSKHALPDSDKRCSSSRYGSTSRRAVVASRPSSSVEANDASQNRLTSSGGRMSTTQRIQLAFESKTSSRATPVRGSRDDHPLRKFEFLSIRK

SEQ ID NO: 79784 - protein, 222 aa, Gossypium hirsutum
  Clone ID: GOSHI-09MAY01-C589_2.pep
MVPKSLIYAFVSRGGVILAEYTEYSGNFNSIALQCLQKLPSSNNKFTYNCDGHTFNYLVDNGYTYCVVADESAGRQVPIAFLERIKDDFVSKYDNGKAATAPANSLNKEFGPKLKEHMQYCVEHPEEISKLAKIKSQVSEVKGVMMENIEKVLDRGEKIELLVDKTENLHQQAQDFRNTGTKIRRKMWLQNMKIKLIVLGILIALILIIVLSVCHGFNCGGK

SEQ ID NO: 79785 - protein, 231 aa, Gossypium hirsutum
  Clone ID: GOSHI-09MAY01-C589_1.pep
MVHKSLIYAFVSRGEVILAEYTEFSGNFNSIAFQCLQKLPSSNNKFTYNCDGHTFNYLVDNGYTYCVVADESAGRQVPIAFLERVKEDFVSKYGSGKAATAPANSLNKEFGPKLKEHMQYCMEHPEEISKLAKVKAQVSEVKGVMMENIEKVLDRGEKIELLVDKTENLHQQAQDFRSTGTKIRRKMWLQNMKIKLIVLGILIALILIIVLSVCHGFNCGKKINAILRRLY

SEQ ID NO: 79786 - protein, 77 aa, Gossypium hirsutum
  unsure (1)..(77): unsure at all Xaa locations
  Clone ID: LIB3584-019-P1-K1-G4.pep
MHYHFLYNMFTYNCYCHTFNYLVDNGYTYCVVADELAGRQVPIAFLERVKEDFVXKYGSGKAATAPANILNKEFWPK

SEQ ID NO: 79787 - protein, 146 aa, Gossypium hirsutum
  Clone ID: LIB3146-024-Q1-K1-B4.pep
PRVRPRVRTSSSGRVGGHTFNYLVDNGYTYCVVADESAGRQVPIAFLERIKDDFVSKYDNGKAATAPANSLNKEFGPKLKEHMQYCMEHPEEISKLAKVKAQVSEVKGVMMENIEKVLDRGEKIELLVDKTENLHNQAQDFRSTGT

SEQ ID NO: 79788 - protein, 147 aa, Gossypium hirsutum
  Clone ID: GOSHI-09MAY01-C509_7.pep
CGSSNVLGGPVPVEGNAGNYSVNGSNSGSNHSSNGPHGSSTIADTVGTNIESDNGIAGKSGSGGSGDASGAGSGSGSGSNVDQSKSARREAALTKFRQKRKDRCFRKEVRYPGAWAVARPRPRVRGQFVRQTVNTNDPLSEANSSDK

SEQ ID NO: 79789 - protein, 319 aa, Gossypium hirsutum
  unsure (1)..(319): unsure at all Xaa locations
  Clone ID: GOSHI-09MAY01-C509_6.pep
YLCFFFFFLQNSWTKQAIEVDSPRLVSPPDQVAECPDSTCAQVVHSNAELSGKKWVPVAAAKGCQEQDEQLDNVAVGKDLDIGMPRNLDLQLECPVEVPMRTVGAKQINLLDMSSSKFSEQIGKRQLDLNSESPSNKQNSEAANQTGTTSKTTDLKKEIAENEDSNRLSKIPDGNDKTINDSKEAPSVELGLKRLRGVKDAGTVVRXDERNVLRRSDSSAFSRYNTASNANKVPVVNIGSSSALDSNLELTRKGSVCNNESHLVNELPNQSSNVGSNNIDMGSTTNNAFAKAAVDKNKSAASSTCQIFAPILHSPANAK

SEQ ID NO: 79790 - protein, 305 aa, Gossypium hirsutum
  unsure (1)..(305): unsure at all Xaa locations
  Clone ID: GOSHI-09MAY01-C509_3.pep
GSSSALDSNLELTRKGSVCDNQSHLVNYLPNQSSNVGSNNIDMGSTTNNAFAKAAVDKNKSAASSTVRSLHPSSIFQPMKNDLLSATQKVVFDKADDVTTTAELAQARGIHHELQMLHPSNHYDQHHHLTHGMQKQQQRQPPEHDDLSLKKLAADAPLCGSSNVLGXAWVEGNAANYSVNGSASGSNHGSNGPNGSSNAVNTVGTNMESDNGIAGKSGSGDASGSGSGSGSGSGSGSKADQSKSAHREAALTKFRQKRKERCFXKKVRYQSRRRLAEQRPRIRGQFVRQTVNNNDPASNVNSCDK

SEQ ID NO: 79791 - protein, 316 aa, Gossypium hirsutum
  unsure (1)..(316): unsure at all Xaa locations
  Clone ID: GOSHI-09MAY01-C509_2.pep
LFGLLKYNTASDANKVSVVNTGSSSARDSKLELTRKGSVCDVQSPLVNDLPNQCSNVGSNNIDMASTTDNAFAKPAVLKNKSASSSAFRSGHPSSAFQPMKNDLLNAARKPVLDKADGVTTKAGLKQPRLTHQELDMQDRLQHQQPTDHDTLSLKKMAADAPHCGSSNVLGGPVPVEGNAGNYSVNGSNSGSNHASNGPHGSSTLADTVGTNIESDNGIAGKSGKRGSGDASXSGDASGTGSPPRPATRAVQFKSARREAALAKFRQMRYDRCFRKEVRYQCTIWLAQHRPRIRGQFVRQTVNTNDPSSEANSLDK

SEQ ID NO: 79792 - protein, 184 aa, Gossypium hirsutum
  Clone ID: GOSHI-09MAY01-C509_1.pep
PVAAAKGRHEGGEEQDEEAVGKDLDIGMPRNLDLQLECPVEVPIRTVGAKQINLLDMSSSKFSEQIEKRQLDLNSESPSNKQKSEAANQTGTTSKTTDLKKEIAENEVSNRLSKIPDVNDKTINDSKELPSVELGLKRLRGVKDAGTVVRDERNVLRRSDSSAFSRYNTASNANKVRCHIEAAD

SEQ ID NO: 79793 - protein, 138 aa, Gossypium hirsutum
  Clone ID: AI054482.1.pep
LSKGAVDFLVKPIRKNELKNLWQHVWRRCHSSSGSGSGSESGTRTQKSEKSESVENSDNSGSNDEEDNENIGLNVGDGSDDGSGTQSSWTKQAAEIESPRPVSPQDRVAECPDSTCAQVIHSNAEASGDMGVAIKLQL

SEQ ID NO: 79794 - protein, 187 aa, Gossypium hirsutum
  Clone ID: LIB3583-011-P1-K1-F10.pep
MPSLSGLVLLSKIMSHKTRKNVPVIMMSSQDSMNLVFKCLSKGAVDFLVKPIRKNELKNLWQHVWRRCHSSSGSGSESGTQTQKSVRSKSVEKSDNNSGSNDEENNGSIGLNIGDGSDDGSGTQNSWTKQAIEVDSPRLVSPPDQVAECPDSTCAQVVHSNAELSGKKWVPVAAAKGCQEQDEQLDN

SEQ ID NO: 79795 - protein, 81 aa, Gossypium hirsutum
  Clone ID: LIB3148-004-Q1-K1-H8.pep
VAVVPSACSVVGAKQNQSKSAHREAALTKFRQKRKERCFQKKVRYQSRKRLAEQRPRIRGQFVRQTVNNNDPASNVNSCDK

SEQ ID NO: 79796 - protein, 141 aa, Gossypium hirsutum
  unsure (1)..(141): unsure at all Xaa locations
  Clone ID: LIB3148-014-Q1-K1-H11.pep
RTRGRTRGQQPPEHDDLSLKKLAADAPHCGSSNVWGGLVEGNAANYSVNGSASGSNHGSNGPNGSSNAVNTVGTNMESDNGIAGKSGSGDVSGSGSGSGSGSKADQSKSAHREAALTKFRQKKKERCXQKKVRYQSRKRLA

SEQ ID NO: 79797 - protein, 100 aa, Gossypium hirsutum
  Clone ID: LIB3197-058-Q1-M1-C2.pep
LRSPSSIFQPMKNDLLSATQKVALDKADDVTTTAELAQARGIHHELQMLHYSNHGDAHHHLTHGMQKQQQRQPPEHDDSSLKKLAADAALSGSSNCMGGL

SEQ ID NO: 79798 - protein, 143 aa, Gossypium hirsutum
  Clone ID: GOSHI-09MAY01-C499_4.pep
KITITNDKGRLSKEEIEKMVQEAEKYNSRVREHKKKVEAKNALENYAYNMRNTVKDEKIGSKLDPADKKKIEDAIDGAIQWLDGNQLAEADEFEDKMKELESICNPIIAKMYQGAGADMGGGMDEDAPPTGGSSAGPKIEEVD

SEQ ID NO: 79799 - protein, 151 aa, Gossypium hirsutum
  unsure (1)..(151): unsure at all Xaa locations
  Clone ID: GOSHI-09MAY01-C499_2.pep
DLGRENNDGAMTDMIPRNTTIPTKKEQALSTDPDNQPGGWIQAYEGERARTRDNNLVGKCELSXGIPPAPRGVPQITVCFDIDANGILNASAEDMTTGQKNKITITNDKGRLSKEEIEKMVQEAEKYKSEDEEHKNLRGRIRRILVGTPEH

SEQ ID NO: 79800 - protein, 468 aa, Gossypium hirsutum
  Clone ID: GOSHI-09MAY01-C499_1.pep
AAAIAYGLDKKATSSVGEKDVLIFDLGGGTFDVSLLTIPEGIFEVKATAGDTHLGGEDFDNRMVNHFVQEFKRKNKKDISGNPRALRRLRTACERAKRTLSSTAQTTIEIDSLYEGIDFYTTITRARFEELNMDLFRKCMEPVEKCLRDAKMDKSSVHDVVLVGGSTRIPKVQQLLQDFFNGKELCKSINPDEAVAYGAAVQAAILSGEGNEKVQDLLLLDVTPLSLGLETAGGVMTVLIPRNTTIPTKKEQVFSTYSDNQPGVLIQVYEGERARTRDNNLLGKFELSGIPPAPRGVPQITVCFDIDANGILNVSAEDKTTGQKNKITITNDKGRLSKEEIEKMVQEAEKYKSEDEEHKKKVEAKNSLENYAYNMRNTIKDEKIGSKLDPADKKKIEDAIDGAIQWLDGNQLAEADEFEDKMKELESICNPIIAKMYQGAGADMGGGMDEDAPPTGGSGAGPKIEEVD

SEQ ID NO: 79801 - protein, 110 aa, Gossypium hirsutum
  unsure (1)..(110): unsure at all Xaa locations
  Clone ID: AI054924.1.pep
VYEGERARTRDNNLLGKFELSGIPPAPRGVPQITVCFDIDANGILNXXSAEDKTTGQKNKITITNDKVGLSKEEIEKMVQEAXKYKSEDEEHRRRLKPELLETMPHMRNL

SEQ ID NO: 79802 - protein, 67 aa, Gossypium hirsutum
  Clone ID: LIB3543-058-Q6-K6-H2.pep
PTRAARVHLQSYHCSTCTKVQGADMGGGMDEDAPPTGGSSAGPKIDEVDYNNSFCWRYILFFLKPML

SEQ ID NO: 79803 - protein, 334 aa, Gossypium hirsutum
  unsure (1)..(334): unsure at all Xaa locations
  Clone ID: GOSHI-09MAY01-C489_1.pep
MATPLSSHFPLSFFPSQSPSLGKPFLFSSSISFPALRFLSYTNLTKLPRTSLLAFSSNNSGSSPFNDASGPNPTPSKKSVLTNLIQEIEPLDVSLIQKDVPPTTVGAMKRTISGMLGLLPSDRFQVFIEALWEPLSKLLVSSMMTGYTLRNAEYRLCLERNLGCEGDLENQTSEKANFDLQEMLLDSTKINEFSEKNDLSSESEKTIEDQFEDIDFQGLGEMPLENRKYILHLKARLTSVKKELHEIKRKNAALQMPQFVGEEKNDLLXDYLRSLQPEKVAELPAPTSPGLKETIHSVVHGLLATLSPRMHSKVPPLSENTTTGTVNIGXEDCA

SEQ ID NO: 79804 - protein, 172 aa, Gossypium hirsutum
  Clone ID: LIB3583-053-P1-K6-E9.pep
MAAPLSSHFRPLCFSSQSCSIPKPNLFPSSLSFPPLRSLSPSNAKKFSKSPLLAFSSSDFDASHFNDGFGPNPTPSKKSVLTNLIQEIEPLDVSLIQKDVPPTTVDAMKRTISGMLGLLPSDRFQVFIEALWEPLSKLLVSSMMTGYTLRNAEYRLCLERNLGCEGDLENQT

SEQ ID NO: 79805 - protein, 103 aa, Gossypium hirsutum
  Clone ID: LIB3120-026-Q1-K1-A3.pep
PRRPRVRPRVRSHFNDGFGRNPTPSKKAVLTNLIQEIEPLDVSLIQKDVPPTTVDAMKRTISGMLGLLPSDRFQVFIEALWEPLSKLLVSSMMTGYTLRNAEY

SEQ ID NO: 79806 - protein, 156 aa, Gossypium hirsutum
  Clone ID: GOSHI-09MAY01-C459_3.pep
MSRRQVSSTRRFVDSGNFPFSGALHSKARSSPILSIALVVVGAILLIGYAYSGSGKFRGEAVSRIEGDYTCSLEVQRAIPFLKKAYGDSMHKVLHVGPDTCSVVSKLLKEEDTEALGVEPYDIEDVEESCKSLVGKGIVRVADIKYPLPYKPKSFL

SEQ ID NO: 79807 - protein, 260 aa, Gossypium hirsutum
  Clone ID: GOSHI-09MAY01-C459_1.pep
MSRRQVSSTRRFVDSGNFPFSGALHSKSRSSPILSIALVAVGAILLIGYAYSGSGKFRGEAVSRIEGDYTCSLEVQRAIPFLKKAYGDRMHKVLHVGPDTCSVVSKLLKEEDTEAWGVEPYDIEDVEESCKSLVGKGIVRVADIKYPLPYRPKSFSLVIVSDALDYLSSKYLNKTLPELARVASDGLIIFAGTPGHQKAKVAELSKFGRPAKMRSSSWWIRFFDQSSLKENETAVKKFEQATSKSSYLPACQVFHLNPYH

SEQ ID NO: 79808 - protein, 94 aa, Gossypium hirsutum
  unsure (1)..(94): unsure at all Xaa locations
  Clone ID: LIB3583-042-Q6-K7-C6.pep
GCVFIECNVENQLFLVIFVGDYTCSLEVQRAIPXXKKAYGDSMHKVLHVGPDTCSVVSKLLKEEDTEAWGVEPYDIEDVEESCKSXVGKGIVXC

SEQ ID NO: 79809 - protein, 52 aa, Gossypium hirsutum
  Clone ID: LIB3148-006-Q1-K1-A12.pep
KRCWYQWVNALNITGLIFINSIDGENYTYLLWTWIYLVILFSECGSKSSFLL

SEQ ID NO: 79810 - protein, 67 aa, Gossypium hirsutum
  Clone ID: LIB3145-025-Q1-K1-B2.pep
HASAHASAHASAHASDQDQISIIFVVICIEGEVKISSALIQHVLCWGTKFGKSDVGINGLMPLTLQV

SEQ ID NO: 79811 - protein, 372 aa, Gossypium hirsutum
  unsure (1)..(372): unsure at all Xaa locations
  Clone ID: GOSHI-09MAY01-C469_1.pep
KGQRAGRSCLVLATAAPVSKEVSANPRSGSDQSPNDSSKPQRVMVIGGDGYCGWATALHLSNKGYKVAIVDSLVRRLFDHQLGLDSLTPISSIHNRLRCWKAITGKTIELYIGDICDFEFLSETFNSFEPDAVVHFGEQRSAPYSMIDRSRAVFTQKNNVIGTLNVLFAMKEFREECHLVKLGTMGEYGTPNIDIEEGYITISHNGRTDTLPYPKQASSFYHLSKVHDSNNIAFTCKAWGIRATDLNQGVVYGVKTDETSMHEQLYNRLDYDGVFGTALNRVCVQAAGGHPLTVYGKGGQTRGYLDIRDTAQCVELAIANPAKPGEFRVFNQFTEQFXSVNELAALVTKAGQKLGLDVHTIFVANPRIEAEE

SEQ ID NO: 79812 - protein, 290 aa, Gossypium hirsutum
  Clone ID: GOSHI-09MAY01-C439_2.pep
HQQALAQVTAQAALVQSHVHAQPEYQTLSAAGSLEPSIPPSSGNPEETSQQMLSSDPQSSAMEYLEASQFDKKSQPCVAVDKPTEDGYNWRKYGQKQIKGCEYPRSYYKCTHPSCPVKKIVERSAEGLITEIIYKSTHNHEKPPPNKQPKGGSDGNTNSQGNPELGSLAVAGNSNNLSEGKNHESTQAVELPGFSDCEEGCDEESREERDDDEPNPKRRNSTGEAAVVLSHKAVADAKIIVQTRSEVDLLDDGYRWRKYGQKVVKGNPHPRSYYKCTSAGCNVRKHVERA

SEQ ID NO: 79813 - protein, 384 aa, Gossypium hirsutum
  unsure (1)..(384): unsure at all Xaa locations
  Clone ID: GOSHI-09MAY01-C439_1.pep
QSPFGISHRQALAQVTAQAALAQSQVHPQTEYQALTVSAPSESLIRHPSFTPEETSQLMPPLASEPQGSAIEYSGASQSDRKNQLPIAVDKPAEDGYNWRKYGQKPIKGCEYPRSYYKCTYLNCPVKXMVERSAYGQITEIIYKGAHNHVMPQQNKPSKGVVVMGNANSQAYPEFGSQVAALNSNKLSETMSSHSILXKTSESTQAAELPGSSDSEGGCDEQSREERDDDEPNLKRRNTAPEAAVVLSHKTVTEPKIIVQTRSEVDLLDDGYRWRKYGQKVVKGNPHPRSYYKCTSAGCNVRKHVERASTDPKAVITTYEGKHNHDVPAARNSSHNMVNNSLSQTKPHKVVAENQNHSLLKAMDFGNNGQGPAVLRLKEEQIRV

SEQ ID NO: 79814 - protein, 76 aa, Gossypium hirsutum
  unsure (1)..(76): unsure at all Xaa locations
  Clone ID: LIB3584-030-P1-K1-D5.pep
THTRCPVKKIGIRFADGLISEIIYKIAHNHEKPSSNKQLKGGSDGNTNXQGNPELGSLAVSGNSNNLGEWKNIDST

SEQ ID NO: 79815 - protein, 77 aa, Gossypium hirsutum
  Clone ID: GOSHI-09MAY01-C429_18.pep
ETRPRTRPPTRPPTRALGYVHEDSVSTDSVGDSRGSIFDAKAVIALNDNFVKLVAWYDNEWGYSSRVIDLIRHMASA

SEQ ID NO: 79816 - protein, 90 aa, Gossypium hirsutum
  unsure (1)..(90): unsure at all Xaa locations
  Clone ID: GOSHI-09MAY01-C429_14.pep
SLDTPSTITHSIKAAIKAESEGNLKGILGYVDEDLVSTDFIGDSRSTIFDAKAGIALSDNFVKLVXWYDXNEWGYSSRVIDLIRHMASVN

SEQ ID NO: 79817 - protein, 105 aa, Gossypium hirsutum
  Clone ID: GOSHI-09MAY01-C429_12.pep
VVHDVERSTIGINGFGRIGRLVARVALQSDDIELVAVNDPFITTEYMTYMFKYDSVHGQWKHHELKVEDSKTLLFGEKPVTGFGLRYPGGIPWAEAGAEWVAVYG

SEQ ID NO: 79818 - protein, 62 aa, Gossypium hirsutum
  Clone ID: GOSHI-09MAY01-C429_9.pep
KKKKKKKKKKKKKKKKKKKKKKKKKKKKKKKKKKKKKKKKKKKKKKKKKKKKRGGRFKKKKF

SEQ ID NO: 79819 - protein, 179 aa, Gossypium hirsutum
  Clone ID: GOSHI-09MAY01-C429_8.pep
MAKIKIGINGFGRIGRLVARVALQSNDIELVAVNDPFITTDYMTYMFKYDSVHGQWKHHELKVKDSKTLLFGERPVTVFGIRNPEEIPWGETGADYVVESTGVFTDKDKAAAHLKGGAKKVVISAPRKDAPTFVVGVNEKEYKSDLNIVSNASCTTNCLAPLAKVIHNNFGIVEGLMTT

SEQ ID NO: 79820 - protein, 140 aa, Gossypium hirsutum
  Clone ID: GOSHI-09MAY01-C429_6.pep
DWRGGRAAYFNIIPSSTGAAKAVGKVLPALNGKLTGMALRVPTGDVSVGDLTVRLEKKASYEDIKAAIREASQTTMKGILGYVDEDLVSTDFVGDSRSSIFDAKAGIALNDNFTKLVAWYDNEWGYSSRVIDLVRHMASC

SEQ ID NO: 79821 - protein, 275 aa, Gossypium hirsutum
  Clone ID: GOSHI-09MAY01-C429_5.pep
MATEEPTVAVESAPEPAEENPAEATANPKSGKAKKAKEPKAKKAAAPRKPRASPAHPPYEEMVKDAIVTLKEKTGSSQYAITKFIEEKQKNLPGNFKKLLLFHLKKLVAAGKLVKVKNSYKLPSAKASKPATTASAPAKKKPAAKSKPASKAKEGKRAKTTSKSPSKTKAKAAAKPKAAPKAKSTATKTKAVAAVKPKASASAKPKTVAKSKAKPKEKPAKASRTSTRTSPGKKAAVPKATPKKAAAPKKAPSKSAKPKSVKSPAKKATTRRGKK

SEQ ID NO: 79822 - protein, 272 aa, Gossypium hirsutum
  unsure (1)..(272): unsure at all Xaa locations
  Clone ID: GOSHI-09MAY01-C429_4.pep
DSKTLLFGEKPVTVFGIRNPEEIPWGETGADYVPASTGFXTDRDKAAAHLKGGAKKVIISAPSKDAPMFVVGVNEKEYKPDLHIVSNASCTTNCLAPLAKVIHDKFGIVEGLMTTVHSITATQKTVDGPSMKDWRGGRAASFNIIPSSTGAAKAVGKVLPSLNGKLTGMAFRVPTVDVSVVDLTVRLEKKASYEDIKATIKAESETNLKGILGYVDEDLVSTDFVGDSRSSIFDAKAGIALNDNFVKLVAWYDNEWGYSSRVIDLIRHMASA

SEQ ID NO: 79823 - protein, 340 aa, Gossypium hirsutum
  unsure (1)..(340): unsure at all Xaa locations
  Clone ID: GOSHI-09MAY01-C429_3.pep
MGKIKIGINGFGRIGRLVARVALQSEDVELVAVNDPFITTDYMTYMFKYDSVHGQWKHHELKVKDSKTLLFGEKPVTVFGIKNPEEIPWGEAGAEYVVESTGVFTDKDKAAAHLKGGAKKVIISAPSKDAPMFVVGVNEKEYKPDLDIVSNASCTTNCLAPLAKVIHDKFGIVEGLMTTVHSITATQKTVDGPSMKDWRGGRAASFNIIPSSTGAAKAVGKVLPALNGKLTGMAFRVPTVDVSVVDLTVRLEKAASYEDIKAAIKKESETNLKGILGYVDEDLVSTDFVGDXSRSSIFDAKAGIALSDNFTKLVAWYDNEWGYSSRVIDLVRHHGFLLTE

SEQ ID NO: 79824 - protein, 210 aa, Gossypium hirsutum
  unsure (1)..(210): unsure at all Xaa locations
  Clone ID: GOSHI-09MAY01-C429_2.pep
MGKIKIGINGFGRIGRLVARVALQSEDVELVAVNDPFITTDYMTYMFKYDSVHGQWKHHELKVKDSKTLLFGEKPVTVFGIRNPEEIPWGETGADYVVESTGVFTDKDKAAAHLKGGAKKVIISAPSKDAPMFVVGVNEKEYKPDLHIVSNASCTTNCLAPLAKVIHDKFGIVEGLMTTVHSITATQKTVDGPSMKDWRGGRAAXFNIIP

SEQ ID NO: 79825 - protein, 336 aa, Gossypium hirsutum
  Clone ID: GOSHI-09MAY01-C429_1.pep
MGKIKIGINGFGRIGRLVARVALQSDDIELVAVNDPFITTEYMTYMFKYDSVHGQWKHHELKVKDSKTLLFGEKPVTVFGIRNPEEIPWAEAGAEYVVESTGVFTDKDKAAAHLKGGAKKVIISAPSKDAPMFVVGVNEKEYKPDLNIVSNASCTTNCLAPLAKVINDKFGIVEGLMTTVHSITATQKTVDGPSMKDWRGGRAASFNIIPSSTGAAKAVGKVLPALNGKLTGMAFRVPTVDVSVVDLTVRLEKKATYDEIKAAIKAESEGNLKGILGYVDEDLVSTDFIGDNRSSIFDAKAGIALNDNFVKLVTWYDNEWGYSSRVIDLIRHMSKA

SEQ ID NO: 79826 - protein, 118 aa, Gossypium hirsutum
  Clone ID: uC-gsronu33B004d05b1.pep
MGKIKIGINGFGRIGRLVARVALQSDDIELVAVNDPFITTEYMTYMFKYDSVHGQWKHHELKVKDSKTLLFGEKPVTVFGIRNPEEIPWAEAGALYFDESIGRFTVLGSGFYSIDCFR

SEQ ID NO: 79827 - protein, 78 aa, Gossypium hirsutum
  Clone ID: LIB3135-002-Q1-K1-B12.pep
EIKAAIKAESEGNLKGILGYVDEDLVSTDFIGDNRSSIFDAKAGIALNDNFVKLVTWYDNEWGYSSRVIDLIRHMSKA

SEQ ID NO: 79828 - protein, 194 aa, Gossypium hirsutum
  unsure (1)..(194): unsure at all Xaa locations
  Clone ID: LIB3583-050-P1-K6-E2.pep
RVPASASFTSVLLPSYFFSEIVFFRFFRIWGRSXSXINGFGRIGRLVARVALQSEDVELVAVNDPFITTDYMTYMFKYDSVHGQWKHHELKVKDSKTLLFGEKPVTVFGIRNPEEIPWGETGADYVVESTGVFTDKDKAAAHLKGGAKKVIISAPSKDAPMFVXGVNEKEYKPDLHIVSNASCTTNCLAPLAKV

SEQ ID NO: 79829 - protein, 150 aa, Gossypium hirsutum
  Clone ID: uC-gsflmaxxa042e12b1.pep
IDTPTSVFQWPLRNQLSPWNLRLSRRKRTPLRLQPIPNLAKQRKLNCLAPLAKVIHDKFGIVEGLMTTVHSITATQKTVDGPSMKDWRGGIAASFNIIPSSTGAAKAVGKVLPSLNGKLTGMAFRVPTVDVSVVDLTVRLEKKASYEDIK

SEQ ID NO: 79830 - protein, 94 aa, Gossypium hirsutum
  Clone ID: LIB3197-026-Q1-M1-G1.pep
MGNYNIPIKALEKIRPLVSRIAFPNHNIELARDNDPFITTEYMTYMFKYDSVHAQWKHHELKVKDSKTLLFGEKPVTVFGIRNPKEIPWPEAGT

SEQ ID NO: 79831 - protein, 100 aa, Gossypium hirsutum
  Clone ID: LIB3584-045-P1-K2-E8.pep
QIHGAISAVDLTVRLEKKATYDEIKAAIKAESEGGLKGILAYVDQDLASTDFIGDNRSSIFDAKAGIALNDNNVELATLNDIEWRYSFRGIDLIQQMSTD

SEQ ID NO: 79832 - protein, 102 aa, Gossypium hirsutum
  Clone ID: uC-gsflnu33B110a10b1.pep
KRCYERINELYGAYFCVKKGCLSFITQVLECFKFHCSCSSTLMHMLRLWFLYLNEIMVGPTKVINKKVADKLLEPYKNCTRWKCPGATFLMGPNLLREGADR

SEQ ID NO: 79833 - protein, 46 aa, Gossypium hirsutum
  Clone ID: uC-gsronu33B124b05b1.pep
KRCYERINELYGAYFCVKKGCFSFITQVLECFKFHCSCFSTLMHTW

SEQ ID NO: 79834 - protein, 69 aa, Gossypium hirsutum
  Clone ID: LIB3149-057-Q1-K1-D9.pep
NNPSSHKNMLRTIRLFSHNISSKLKIAKAWIHKAQSLTHLSLRHVSDQVHNTGTVTPFVIITSHKLNKV

SEQ ID NO: 79835 - protein, 88 aa, Gossypium hirsutum
  unsure (1)..(88): unsure at all Xaa locations
  Clone ID: LIB3584-025-P1-K1-A7.pep
GPPRWEARTTAAHLKGGAKKXIISAPSKXAPNXSVGATHNEYKPDLHIESNASCTTNCLAPLAKVIHDKFGIVEGLMTTVHSITATQK

SEQ ID NO: 79836 - protein, 67 aa, Gossypium hirsutum
  Clone ID: LIB3147-046-Q1-K1-A8.pep
RRVVSVLLPKYLNGGGSLQLVFYFNAYVVIMVSLLKLISCDYVKKKKKKKKTKKTHTKTKKQKKNKN

SEQ ID NO: 79837 - protein, 151 aa, Gossypium hirsutum
  unsure (1)..(151): unsure at all Xaa locations
  Clone ID: LIB3825-022-Q1-K6-B5.pep
MDSSLVFSSKLKLHHHSLPLQTHFQRRPLLTSSHFRLAAAKKPPRKVLCEFEPKVNGALSPDPDSRFLDRQKALEAAMNDINSSFGKGSVTRLGSAGGALLSLLWVETFPSGCLTLDLALGGGLPKXKNVEVYGPESSGKTTLALHAIAEV

SEQ ID NO: 79838 - protein, 179 aa, Gossypium hirsutum
  Clone ID: LIB3582-049-P1-K1-C12.pep
MDSSLVFSSKLKLHHHSLPLQTHFQRRPLLTSSHFRLAAAKKPPRKVLCEFEPKVNGALSPDPDSRFLDRQKALEAAMNDINSSFGKGSVTRLGSAGGALVETFPSGCLTLDLALGGGLPKGRIVEVYGPESSGKTTLALHAIAEVQKLGGNAMLVDAEHAFDPAYSKALGVDVENLDV

SEQ ID NO: 79839 - protein, 228 aa, Gossypium hirsutum
  unsure (1)..(228): unsure at all Xaa locations
  Clone ID: GOSHI-09MAY01-C759_1.pep
PTKAGLKRLPSDRLEEIAAKRLKKLSQLKSLAAEKKGNLRASEAPKVEVKEQPTTGPPARPTKKPDSLRKVESLPRAVEPTMLVMKFPPQVSLPSVAELKARFGRFGSLDQSAIRVFWKSSTCRVVFRHKIDAQAAYRYANGTNSLFGNVNVRYHLRSVEAPTAEALDSDKARGDETGSETIRVKDPVVERPAAPVVAHQPLXQTTVQLKSCLKKPTSEKARQASGGN

SEQ ID NO: 79840 - protein, 221 aa, Gossypium hirsutum
  unsure (1)..(221): unsure at all Xaa locations
  Clone ID: GOSHI-09MAY01-C779_1.pep
PRVRKKKKKKREKNKKKGGGRTMASIGLNIXPASTSEAWTMFTARVCLTHFTSDPSLGDEKPAFFSIKAFVSLIRPEQAMWYRACITCNKKVTEAAGSGYWCEGCQNNDEECNLRYIMVSKISDTRGEAWVSAFNEQAEKIVGCSADELDKLKSEQGDIDGYQKKLKEATWVPHLFKVSVTQNEYNNEKRQRITVRAVAPINFAEESRFLLEEIKKMRNPQ

SEQ ID NO: 79841 - protein, 151 aa, Gossypium hirsutum
  Clone ID: GOSHI-09MAY01-C769_1.pep
MGEQETKTKVPDPVANGTSLPEKSSEVVAEKKEEEDNGVKEMEEDKKNDEKVETEKMDEDQPVKDDTESKETEKEEKEEPKTEAMEEETNAKEDVRKVADDENKDEEEKVDELKEEDEEEQEEKAEEEPKEEEDEEEHEEKDGDDEEKGWG

SEQ ID NO: 79842 - protein, 88 aa, Gossypium hirsutum
  Clone ID: GOSHI-09MAY01-C719_3.pep
NPLLGFLFPSTSELLLFPCFYYLFCSFHTIWWAFALLWCVLVVKPLTSRVYTKYPYPQNSRKKTPFVNLLFFLFGLSCESPCRISYCW

SEQ ID NO: 79843 - protein, 156 aa, Gossypium hirsutum
  Clone ID: GOSHI-09MAY01-C719_2.pep
MASSSGNSNSSGSTLLQISGSEEDLHQLMEERKRKRMESNRESARRSRMRKQKYLDDLMAQLTLLRKDNNQILTSINFITHHYFNIEAENSVLRAQFMELSQRLDSLNHILNYLNDPTLNNGIWVYETEPFETSADSFTNFTLNQPIVASADIFQY

SEQ ID NO: 79844 - protein, 164 aa, Gossypium hirsutum
  Clone ID: GOSHI-09MAY01-C719_1.pep
MAWGSGNSNSSSSSQLQNSGSEEDLHQQNMMDQRKRKRKESNRESARRSRMRKQQHLDELVAQVAQLSKENNQILNSINFTTHHYLNIQAENSVLRAQMMELSQRLDYLNQILSYLNTMSASELVYETDQCFETSTCDHGFTKPFHLPYLNQPIMASPDMFQYY

SEQ ID NO: 79845 - protein, 189 aa, Gossypium hirsutum
  unsure (1)..(189): unsure at all Xaa locations
  Clone ID: LIB3582-060-P1-K1-G4.pep
RHRSGFDREPSPKXSRRDGKPQTERQVSSADVGDRPDQEEKQRRRLQDAVPLEAAPTPPDSSKIETVIVGKDSDRKNNGQHEGTKHSSDPTEVPRSRSYFQHDERGIAAQAGRSYGRRVASERGERGWWRDAKDHHSERETRTYDTRQRDEKPQARGDSKDDWRHDRFFEMEADPPAQPPPXRKRPAFS

SEQ ID NO: 79846 - protein, 117 aa, Gossypium hirsutum
  Clone ID: LIB3582-047-P1-K1-B6.pep
DTSTQYDKHLRQVQYASPIEADHTPSDSSKIETETDGYDSDRRNNAQHERTKHSSDPTKLPLSLSYARAHERFIDVHSDPKHGRRVAIERVKRGWMMYAYDHHTERASRTYYTRHRD

SEQ ID NO: 79847 - protein, 132 aa, Gossypium hirsutum
  Clone ID: LIB3585-001-P2-M1-G6.pep
KLEEKRVGLDSDSRRHRSGFDREPSPKRSRRDGKPQTERQVSSADVGDRPDQEEKQRRRLQDAVPLEAVPTPPDSSKIETVIVGKDSDRKNNGQHEGTKHSSDPTEVPRSRSYFQHDERGFAAQAGRSYGRR

SEQ ID NO: 79848 - protein, 101 aa, Gossypium hirsutum
  Clone ID: uC-gsflnu33B115f09b1.pep
HYPHVFQMGFQSCLILSKDLILFMLFSPKRSRRDGKPQTERQVSSADVGDRPDQEEKQRRRLQDAVPLEAAPTPPDSSKIETVIVGKDSDRKNNGQHEGSQ

SEQ ID NO: 79849 - protein, 52 aa, Gossypium hirsutum
  Clone ID: LIB3197-035-Q1-M1-G9.pep
MTVFQNIAMSRREGRDSDSRRHRSGFDREPSPKRSRRDGKPHTERQASLVDR

SEQ ID NO: 79850 - protein, 171 aa, Gossypium hirsutum
  Clone ID: GOSHI-09MAY01-C699_1.pep
MQDTIGIPACFSSGEKPADDPTAVTRSGQSVFMSVFRTKIADQCRLVTITWCKDLLLHGLSVSVEGPRGESQYGCKVELKPWCFWRKQGSKRFVIDGKPVDVFWDLKAAKFNGETDPISEYYVAVVCDKEVVLLVGDLKKEAYRKTGCRPALIDPILVSRKKHIFGKKKFS

SEQ ID NO: 79851 - protein, 122 aa, Gossypium hirsutum
  Clone ID: GOSHI-09MAY01-C689_1.pep
SKYLTNPKNQQPVFIHLTNPFLFSHFLHFISREIRLTNQENNDSDIPSEREFIPKIVTLVCEQIKSDTVIVKTFLFPNLQMTQYGRSRFTIFLSYRRWFLIPNWNSSIMFSFHRIYLPRQPG

SEQ ID NO: 79852 - protein, 265 aa, Gossypium hirsutum
  Clone ID: GOSHI-09MAY01-C649_1.pep
MKRSPSCSSSSNSCFALPSPSSSSSSPSPSSSSSSSSCENPHDLSEKPKAKRGRKHQNTDNNACLNNANNNGGRRSSIYRGVTRHRWTGRFEAHLWDKSSWNNIQNKKGRQVYLGAYDSEEAAARTYDLAALKYWGAETILNFPKERYEKEMEEMKKVTKEEYLATLRRRSSGFSRGVSKYRGVARHHHNGRWEARIGRVFGNKYLYLGTYNTQEEAAAAYDMAALEYRGANAVTNFDISHYIETLEAEREFCYVDRTGVTNSQP

SEQ ID NO: 79853 - protein, 94 aa, Gossypium hirsutum
  Clone ID: LIB3582-042-P1-K1-G6.pep
YTSGGEKKNERHRVVFFFNSCLHCITIIISSSPSPSASSSSSSCENPHDLSEKPKAKRGRKHHNTDNNAWLNNANNNSGRRSSIYRGVTRHRWT

SEQ ID NO: 79854 - protein, 247 aa, Gossypium hirsutum
  unsure (1)..(247): unsure at all Xaa locations
  Clone ID: GOSHI-09MAY01-C669_3.pep
FSRFAACRSMPTSAALDVVAKNLNLKFFEVPTGWKFFGNLMDAGLCSICGEESFGTGSDHIREKDXIWAVLAWLSILAFKNKENLNGDKLVTVEDIVRQHWAIYGRHYYTRYDYENVDAGAAKDLMAYLVKLQSSLDEINSSVKGARSDVSNVVNADEFEYKDPVDGSVSKHQGIRFLFEDGSRLVFRLSGTGSEGATIRLYIEQYEKDSSKTGRDSQEALAPLVVVALKLSKMLEFTGRSAPTVIT

SEQ ID NO: 79855 - protein, 296 aa, Gossypium hirsutum
  unsure (1)..(296): unsure at all Xaa locations
  Clone ID: GOSHI-09MAY01-C669_2.pep
MVFEVMKVPTTTFEGQKPGTSGLRKKVKVFVQPHYLQNFVQATFNALTPEKVKGATLVVSGDGRYFSKDAVQIIIKMSAANGVRRVWVGQNGLLSTPAVSAVIRERVGADGSKATGAFILTASHNPGGPNEDFGIKYNMENGGPAPEALTDKIFENTKTIKEYLIADELREVDISTIGVTNFSGPDGPFDVEXVFDSASDYVKLRKSIFDFELIRKLLXPKFTFCYDALXGVAGAYANDFCGEELGAQQSSLLNXTRKRFGGGHXDPNLTYAGYWLTAWMGKSTCVLNTEFVLLLM

SEQ ID NO: 79856 - protein, 582 aa, Gossypium hirsutum
  Clone ID: GOSHI-09MAY01-C669_1.pep
MVFKVSKVSTTPIDGQKPGTSGLRKKVKVFIQPHYLQNFVQSTFNALTPEKVRGATLVVSGDGRYFSKDAIQIIIKMSAANGVRRVWVGQNGLLSTPAVSAVIRERVGVDGSKATGAFILTASHNPGGPHEDFGIKYNMENGGPAPEAITDKIFENTKTITEYLIAEDLPNIDISTIGVANFSGPEGQFDVEVFDSASDYVKLMKSIFDFELIRKLLLSPKFTFCYDALHGVAGAYANRIFVEELGAQQSSLLNCTPKEDFGGGHPDPNLTYAKELVERMGLGKSNSGVEPPEFGAAADGDADRNMILGKRFFVTPSDSVAIIAANAVGAIPYFSSGLKGVARSMPTSAALDVVAKSLNLKFFEVPTGWKFFGNLMDAGQCSICGEESFGTGSDHIREKDGIWAVLAWLSILAYKNKDNLNGDKLVTVEDIVRQHWATYGRHYYTRYDYENVDAGGAKDLMANMVKRMSSLDEVNTIVKGARSDVSKVVNADEFEYKDPVDGSVSKHQGIRFLFEDGSRLVFRLSGTGSEGATIRLYIEQYEKDPSKIGRDSQEALAPLVEVALKLSKMQEFTGRSAPTVIT

SEQ ID NO: 79857 - protein, 100 aa, Gossypium hirsutum
  unsure (1)..(100): unsure at all Xaa locations
  Clone ID: LIB3543-031-Q1-K6-F11.pep
GGATLVVSGDGVVISQRECCSDNXSRMSAANGVRRVWVGQNGLLSTPAVSALIRERVGADGSKATGAFILTASHNPGGPNEDFGIKYNMENGGPAPEALT

SEQ ID NO: 79858 - protein, 175 aa, Gossypium hirsutum
  Clone ID: LIB3543-052-Q1-K1-D1.pep
RIFVEELGAQESSLLNCVPKEDFGGGHPDPNLTYAKELVARMGLGKSDSAVDPPEFGAAADGDADRNMILGKRSMPTSAALDVVAKNLNLKFFEVPTGWKFFGNLMDAGLCSICGEESFGTGSDHIREKDGIWAVLAWLSILAFKNKENLNGDKLETAEDIDRQHWAIYGRHYYT

SEQ ID NO: 79859 - protein, 89 aa, Gossypium hirsutum
  unsure (1)..(89): unsure at all Xaa locations
  Clone ID: LIB3147-013-Q1-K1-B1.pep
FDGQKPGTFGLRKKVKVFGQPHYSQNFAQATFNALTPEKVKGATLVVSGDGRYFSKDAVQIIIKMSAVNXVRQVWFDKTGFFITPFEPV

SEQ ID NO: 79860 - protein, 82 aa, Gossypium hirsutum
  Clone ID: LIB3146-044-Q1-K1-H9.pep
PTRPPTRPSTRPPTRPGSQLVFRLSGTGSEGATIRLYIEQYEKDSLKTGRDSQGALAPFGEVALKLSKMLEFTGRSAPTVIT

SEQ ID NO: 79861 - protein, 87 aa, Gossypium hirsutum
  Clone ID: GOSHI-09MAY01-C619_6.pep
HHFMFWQVCKAGVLGIEDRRLVICLLYLFLIRRRYVLPTMRALYRYSDMYLMSTCFENGARREIHTGICRFFPLVYDYFHLLLVCCL

SEQ ID NO: 79862 - protein, 124 aa, Gossypium hirsutum
  Clone ID: GOSHI-09MAY01-C619_4.pep
VGELHCMVGDGGGYEEFWLQFCIFTNSYNRTVDERSFHHIMFWQVFKVRVLGIEDRRLVICLLYLFLIRRRYVLPTMRAVYRYSDMYLMSTCKENGAQLEIHTGICRFFPLVYDYFHLLLVCRL

SEQ ID NO: 79863 - protein, 91 aa, Gossypium hirsutum
  Clone ID: GOSHI-09MAY01-C619_3.pep
VGELHCVAGDGGGYVEFWHLRKAIAKQERLKACPPRLGKYKFQAAPPQVLLSEELTGSLRKLKGCATLARDRFKSLEKRGLIPPSARSGRK

SEQ ID NO: 79864 - protein, 363 aa, Gossypium hirsutum
  Clone ID: GOSHI-09MAY01-C619_2.pep
MGKKSNTSRRGKKAWRANISTEDIHDFFEKSTKDALSGGSLTSAPTESLFFIDKSQDLSVKKKIEKKREKVLRVDSMLKKNPFVEAVPSSKQKSSKKKKKEALNAKDVVQDVPKDETVPDSGMVPIWGDEGQHSCKARQVSKQSIIPAVEVEPPGCSYNPTFDSHQDSLAQAVAEEMQKAYKIELGPQPVPLTVMGEVVDEDDKYFIEADDGNDDQMDEENLSEDDKATEKRPLKTKRVTRVELNKRARRKEQQKKEAETKKAVEFSKDIDNLPDILQEIAKEDEEKQKRHLRKAIAKQERLKSCPPRLGKYKFQPAPPQVLLSEELTGSLRKLKGCATLARDRFKSLEKRGLIPPSAKSGRK

SEQ ID NO: 79865 - protein, 413 aa, Gossypium hirsutum
  unsure (1)..(413): unsure at all Xaa locations
  Clone ID: GOSHI-09MAY01-C619_1.pep
GHSRSCDMGRGAETVLNPILVCSGCKVAVHLDCYRNVKESTGPWRCELCEELFSSRSXGGSSLNVWEKPXSCCKCGLCGGTTGAFRKSLDGQWVHAFCAEWVLESTFRRGQVNPVEGMHLASRGVDVCCICGCKRGACIKCGYGHCQITFHPSCARSAGFWMNGKLCGGKMHQKTYWEQHSVEQRAKVETHKHGIEELKNMKQIRVELERLRLLCERIIKRAQXRPRGRFAAHEILACKRDHVTRSVLVHSPLLHPDVSSESATTSLKGHTDDNKSCSEAMRSDDVTVDSTLSVKHQAKVPVPVDNYQRTDNSSTSQSLCVLKPNERVPFSGKQIPHRYSLASRNALDNAEWNSKSRKPIETFEKELVMTSDEASMKNSRLPKGYCYVPVDCLPKEKHFTRDTTSDGQLEHNG

SEQ ID NO: 79866 - protein, 176 aa, Gossypium hirsutum
  Clone ID: LIB3585-016-P1-K1-H7.pep
VLESTFRRGQVNPVEGMHLASSGVDVCCICCCKRGACIKCGYGHCQITFHPSCARSAGFCMNVKLGGGKLHHKAYCEQHSVEQRAKAETQKHGIEELKNMKQIRVELERLRLLCERIIKREKLKRELVLCSHEILACKRDHVTRAVLVHSPFFHPDVSSESATTSLKGHTDDNKSC

SEQ ID NO: 79867 - protein, 128 aa, Gossypium hirsutum
  Clone ID: LIB3585-024-P1-K1-E5.pep
MGKKSNTSRKGKKAWRANISTEDIHDFFEKSTKDALSGGSLTSAPTESLFFIDKSQDLSVKKKIEKKREKVLRVDSMLKKNPFVEAVPSSKQKSSKKKKKEALNAKDVVQDVPKDETVPDSGMVPIWG

SEQ ID NO: 79868 - protein, 218 aa, Gossypium hirsutum
  Clone ID: GOSHI-09MAY01-C609_1.pep
MAGYRAEDDYDYLFKVVLIGDSGVGKSNLLSRFTRNEFSLESKSTIGVEFATRSLNVDGKVIKAQIWDTAGQERYRAITSAYYRGAVGALLVYDVTRHSTFENVERWLRELRDHTDPNIVVMLIGNKSDLRHLVAVPTEDGKSFAEKESLYFMETSALEATNVENAFAEVLTQIYHIVSKKAMETADEGTASTVPSKGEKIDVGKDISAMKKGGCCSS

SEQ ID NO: 79869 - protein, 61 aa, Gossypium hirsutum
  unsure (1)..(61): unsure at all Xaa locations
  Clone ID: GOSHI-09MAY01-C629_1.pep
VWRLLTNFFFLGNFSMNFGIRLLMIARYGVQLEQGPFXRRTADFLWMMIFGAISLLALSIG

SEQ ID NO: 79870 - protein, 178 aa, Gossypium hirsutum
  Clone ID: GOSHI-09MAY01-C169_4.pep
HASAHASADKDFRVEVEAIGHVRHKNLVRLLGYCIEGTQRMLVYEYVNNGNLEQWLRGDMCHKGYITWDARMRILLGTAKALAYLHEAIEPKVVHRDVKSSNILIDENFDAKISDFGLAKLLGDGKSHIATRVMGTFGYVAPEYANSGLLNEKSDVYSFGVVLLEAITGRYPVDYGRP

SEQ ID NO: 79871 - protein, 184 aa, Gossypium hirsutum
  unsure (1)..(184): unsure at all Xaa locations
  Clone ID: GOSHI-09MAY01-C169_3.pep
MPPRRYQFGRADEATHPDSMRATLAEFLSTIIFGFAGEGSILALGTTICSNQYXNSFYSMFTYREXFVADKMYKDTSATPARLVMIALAHGLSLFAAVASSVNVSGGHVNPAVTFGALLGGRISLVRALYYWIAQLLGSIVACLLLRLTAGMRPGGFALASGVGELRGLILEIVLTYGLVYTVY

SEQ ID NO: 79872 - protein, 256 aa, Gossypium hirsutum
  Clone ID: GOSHI-09MAY01-C169_1.pep
MPPRRYQFGRADEATHPDSMRATLAEFLSTIIFVFAGEGSILALDKMYKDTSATPARLVMIALAHGLSLFAAVASSVNVSGGHVNPAVTFGALLCGRISLVRALYYWIAQLLGSIVACLLLRLTAGMRPGGFALASGVGELRGLILEIVLTYGLVYTVYATGIDPKRGSVGTIAPLAIGLIVSANILVGGPFDGAAMNPARAFGPALVGWRWNHHWIYWVGPLIGGGLAALIYEYMVIPAAEPAHPTHQPLAPEDY

SEQ ID NO: 79873 - protein, 164 aa, Gossypium hirsutum
  unsure (1)..(164): unsure at all Xaa locations
  Clone ID: LIB3583-036-P1-K1-D9.pep
MPPRRYQFGRADEATHPDSMRATLAEFLSTIIFVFAGEGSILALDKMYKDTSATPARLVMIALAHGLSLFAAVASSVNVSGGHVNPAVTFGALLGGRISLVRALYYWIXQLLGSIVAGLLLRLTAGMRPXGFALASGVGEXRGLILEIVLTYGLVYTVYATGID

SEQ ID NO: 79874 - protein, 115 aa, Gossypium hirsutum
  Clone ID: LIB3583-009-P1-K1-H8.pep
MPPRRYQFGRADEATHPDSMRATLAEFLSTIIFVFAGEGSILALDKMYKDTSATPARLVMIALAHGLSLFAAVASSVNVSGGHVNPAVTFGALLGGRISLVRALYYWIAQLLGSI

SEQ ID NO: 79875 - protein, 117 aa, Gossypium hirsutum
  unsure (1)..(117): unsure at all Xaa locations
  Clone ID: GOSHI-09MAY01-C109_5.pep
DTYIWLHCETLHSGMASTNMASLAFHGXDRHEARNYSYSLEVGAHGRKLIWEGAPRSIRDSHRKVTDSHDGLIIQRNMALFFSGGDRKELKLRVTXGRIWKEQQNPDAGVCIPNLCS

SEQ ID NO: 79876 - protein, 139 aa, Gossypium hirsutum
  Clone ID: GOSHI-09MAY01-C109_3.pep
MEFDNIQCVSTTDGMNEDEIHHHNLQHPHPHHAHHQFSSSKPHNATNTTNNGNTTTNNIVGPTAIAPATSVHELLECPVCTNSMYPPIHQCHNGHTICSSWKTRVQHRCPTCRQELGDIRCLALEKVAESLEMPCKYYN

SEQ ID NO: 79877 - protein, 336 aa, Gossypium hirsutum
  Clone ID: GOSHI-09MAY01-C109_1.pep
MESDTIECVSSIDEIVEDHEIPHHNLLHHPHPRHAPHHQFSSSKPHHNGTNNVNSISNIVGPTAIAPAASVHELLECPVCTNSMYPPIHQCHNGHTLCSTCKIRVHNRCPTCRQELGDIRCLALEKVAESLELPCKYYKLGCPETFPYYSKLKHEGICIYRPYNCPYAGSECSVVGDIPFLVAHLRDDHKVDMHTGCTFNHRYVKSNPREVENATWMLTVFHCFGQYFCLHFEAFQLGMAPVYMAFIRFMGDETEARNYSYSLEVGANGRKLIWESAPRSIRDSHRKVRDSHDGLIIQRNMALFFSGGDRKELKLRVTGRIWKEQQNPDANMCIPN

SEQ ID NO: 79878 - protein, 128 aa, Gossypium hirsutum
  Clone ID: LIB3582-059-P1-K1-A6.pep
MEYDNIECVSSIDGLNEDEIHHHNLHHPNPHHGHHPFSSSKPHNATNNANNSNMANNSNMANNIVGATGITPATSVHELLECPVCTNSMYPPIHQCQNGHTLCSTCKARVHNQCPTCRSELGDIRCLA

SEQ ID NO: 79879 - protein, 82 aa, Gossypium hirsutum
  Clone ID: LIB3585-018-P1-K1-C5.pep
MESDSIECVSSIDEIVEDHEILHHNIQHHPHPRHAPHHQFSLSKPHHNGTNNVNSISNIVGPTAIASAASVHEMLECPVCTN

SEQ ID NO: 79880 - protein, 206 aa, Gossypium hirsutum
  unsure (1)..(206): unsure at all Xaa locations
  Clone ID: GOSHI-09MAY01-C139_3.pep
MEERKRKMKITALLVLKCMPDGADPIILANACDVSHFGFFQRSSVREFIVFVSRTVAKRTPPGQRQSVQHEEYTVHSYNRNGLCVTGFMDDHYPVRSAFSLLNQVIDEYQKNFGESWRTAQADSTEPWPYLDNALTKYQDPAEADKLLKIQRELDETKIILHQTIDSVLARGEKLDSLVEKSSDLSAASQMFYSQAKKTXQCCSIL

SEQ ID NO: 79881 - protein, 157 aa, Gossypium hirsutum
  Clone ID: GOSHI-09MAY01-C139_2.pep
MKITSLLVLKCNPEGSDPIILANATDVSHFGYFQRSSVREFIVFVARTVAKRTPPGQRQSVQHEEYKVHAYNRNGLVALGFMDDHYPVRSAFSLLNQVLDEYLKNFGESWRTVHADSAQSWPYLEEALVKFQDPAEADKLLKIQRELDETKIILHKT

SEQ ID NO: 79882 - protein, 199 aa, Gossypium hirsutum
  Clone ID: GOSHI-09MAY01-C139_1.pep
MKITSLVVLKCNPEGSDPIILANTTDVSHFGYFQRSSVKEFIVFVSRTVAKRTPSGQRQSVQHEEYKVHAYNRNGLCALGFMDDHYPVRSAFSLLNQILDEYQKNFGESWRNAQADSTQPWPYLNDALTKFQDPAEADKLLKIQRELDETKIILHKTIDSVLARGERLDSLVEKSSDLSAASLMFYKQAKKTNQCCTIL

SEQ ID NO: 79883 - protein, 74 aa, Gossypium hirsutum
  unsure (1)..(74): unsure at all Xaa locations
  Clone ID: LIB3083-011-Q1-L1-E11.pep
KKKKKKKKKIKKNNKKRKKKIKKIKKKKKKKNKKKKXTKKKKKIKKKKKKKKKKKNKKRIKNKKKEKLKIKNEK

SEQ ID NO: 79884 - protein, 44 aa, Gossypium hirsutum
  Clone ID: GOSHI-09MAY01-C129_7.pep
KPPKPPVYVPPKKEKPGPGRPFYEHPKKPPYGHYPGHPPLGKPQ

SEQ ID NO: 79885 - protein, 119 aa, Gossypium hirsutum
  unsure (1)..(119): unsure at all Xaa locations
  Clone ID: GOSHI-09MAY01-C129_5.pep
AEPTPPVYTPPKKEKPEPKPRGIXPPKKEKPEPKPPVYTPPKKEKPEPKPPVYGPPKKEKPPAYKPPKNPPVYEPKPPKPPVYTPPKKEKPVPKPPVHESPKKPPDGHYPGHPPLGKPQ

SEQ ID NO: 79886 - protein, 235 aa, Gossypium hirsutum
  Clone ID: GOSHI-09MAY01-C129_4.pep
MMSTTHLLIFLLGVAALATPSFGTYESPNYGKPPTPVYKPPKVKPPPYEHKPPVYEPPKKEKPEPKPPVYTPPKKEKPEPKPPMYEPPKKEKPEPKPPVYTPPKKEKPEPKPSVYEPPKKEKPEPKPPVYTPPKKEKPEPKPPVYEPPKKEKPEPKPPVYTPPKKEKLEPKPPVYEPPKKEKPEPKPPVYAPPKKEKPEPKPPVYQPPKKPPVYEPKPPKPPVYTPPKKEKLNPY

SEQ ID NO: 79887 - protein, 175 aa, Gossypium hirsutum
  Clone ID: GOSHI-09MAY01-C129_3.pep
HASEKPEPKPPVYTPPKIEKPEPKPPVYEPPKKEKPEPKPKPPVYTPPKKEKPEPKPPVYEPPKKEKPEPKPPVYTPPKKEKPEPKPPVYEPPKKEKPEPKPPVYAPPKKEKPEPKPPVYKPPKKPPVYEPKPPKPPVYTPPKKEKPEPKPPVHESPKKPPYGHYPGHPPLGKPQ

SEQ ID NO: 79888 - protein, 234 aa, Gossypium hirsutum
  Clone ID: GOSHI-09MAY01-C129_2.pep
PRVRPRVRPPARPSIMSTTHLLILLLGVVALATPSFGTYESPNYGKPPTPVYKPPKVKPPPYEHPVYKPPKVKPPPYEHKPPVYEPPKKEKPEPKPPVYTPPKKEKPEPKPPVYEPPKKEKPEPKPPVYTPPKKEKPEPKPPVYEPPKKEKPEPKPPVYTPPKKEKPEPKPPVYGPPKKEKPPAYKPPKKPPVYEPKPPKPPVYTPPKKEKPEPKPPVHESPKKPWCVQYTLHL

SEQ ID NO: 79889 - protein, 210 aa, Gossypium hirsutum
  Clone ID: GOSHI-09MAY01-C129_1.pep
PRVRPRVRPRVRATTHLLILLLGVVALATPSFGTYESPNYGKPPAPVHNPPKLKPPPYEHKPPVYEPPKKEKPEPKPPVYTPPKKEKPEPKPPVYEPPKKEKPEPKPPVYTPPKKEKHEPKPPVYEPPKKEKPEPKPPVYAPPKKEKPEPKPPVYKPPKKPPVYEPKPPKPPVYAPPKKEKPEPKPPVYESPKKPPYGHYPGHPPLGKPQ

SEQ ID NO: 79890 - protein, 91 aa, Gossypium hirsutum
  Clone ID: LIB3135-009-Q1-K1-G4.pep
ASAHAFMSTTHLLILLLGVVALGTPSFGTYKSPNYWKPPTPVYKPPKVKPPPYEHKPPVYEPPKKEKPEPMAAAFLGARVLPCFQTLGHLG

SEQ ID NO: 79891 - protein, 129 aa, Gossypium hirsutum
  unsure (1)..(129): unsure at all Xaa locations
  Clone ID: LIB3048-015-Q1-L1-A10.pep
KVKPPPYEHKPPVYEPPKREKPEPKPPVYTPPKKEKPEPKPPVYEPPKKEKPEPKPKPPIYTPPKKEKPEPKPTVYEPSKKGKPXPKPPIYIPPKKGNPKPKPTMYEPTKKEKPXPNPPIYSPSKEEKP

SEQ ID NO: 79892 - protein, 102 aa, Gossypium hirsutum
  Clone ID: uC-gsflnu33B064b04b1.pep
TTHLLILLLGVVVIATPCLATYESPNYGKPPTPDHKPPKVKPPPYEHPRDKPPKVKPPPYEHKPPDYEPPKKEKPEPKAPIYTPTKKEKPEPKPPVYEPLKN

SEQ ID NO: 79893 - protein, 67 aa, Gossypium hirsutum
  Clone ID: uC-gsflnu33B075f10b1.pep
MCIVKQGPHYFCLCVFVFFFLFFFLFFFYFFVFFCFFFFFFFFFFFFFFFFYFFFLFVEIRILLIEK

SEQ ID NO: 79894 - protein, 46 aa, Gossypium hirsutum
  Clone ID: uC-gsronu33B028e01b1.pep
KPLPKLYKPKQPITETRNRNPSPHTSLQRSHQCMSLSHQSHRFTRH

SEQ ID NO: 79895 - protein, 77 aa, Gossypium hirsutum
  Clone ID: GOSHI-09MAY01-C399_1.pep
AGLDRVQGFLQGMLRERFWYQDWFCMMMMGLCLQQRPLCSHGRCKRGGNGFVRGNNRGGFINNDNDNNNNILVKYIR

SEQ ID NO: 79896 - protein, 181 aa, Gossypium hirsutum
  Clone ID: GOSHI-09MAY01-C389_1.pep
SVSQKQPRRAPPKHDSRAGYPLSQNLPFDFPNAQIYYPYPICVPGSYLHYPPNHQNGARLITSPMAQISTVRGPYPSHLSGKKQRYNTRFQANLSRSYPQCGGIMAPHGSLYGSAGIPLLHHPYPHPHLLHEQRRTQPHRANQHERGDQQQGGNPFSVLDMKDVTQQHQFELSGTTGRPLI

SEQ ID NO: 79897 - protein, 131 aa, Gossypium hirsutum
  Clone ID: GOSHI-09MAY01-C309_1.pep
MADHYLQNTQPMTHQMVKAATAATAGGSLLILSGLILAGTVIALTIATPLFVIFSPVLVPALIATALLATGFVASGGFGVAAVTVLSWIYRYVTGRHPPAADQLDSAGMKLASKAREMKDRAAQLTGAAAS

SEQ ID NO: 79898 - protein, 119 aa, Gossypium hirsutum
  Clone ID: LIB3582-016-P1-K1-A1.pep
MADHYLQNTQPMTHQMVKAATAATAGGSLLILSGLILAGTVIALTIATPLFVIFSPVLVPALIATALLATGFVASGGFGVAAVTVLSWIYRSFIFSSFLMISKNTMKFPVLFLLFLFKK

SEQ ID NO: 79899 - protein, 91 aa, Gossypium hirsutum
  unsure (1)..(91): unsure at all Xaa locations
  Clone ID: LIB3583-031-Q6-K7-G4.pep
LFSPIPIXLSLPLLLLSNFTFISLHFLPLSLXPXSHXLFXXXSTPPPXXFLXYLXXXPPPPPPIFVPXXIKPERXRREPPAVAAVAAFTIW

SEQ ID NO: 79900 - protein, 417 aa, Gossypium hirsutum
  Clone ID: GOSHI-09MAY01-C329_1.pep
MMGQRQHVVLLIFSAFLLFQTSNAHNITRLLAKHPSLSTFNHYLTLTHLAPEINRRTTITVLALDNAAMSSLLDKNPSIYTIKNILSLHVLLDYFGAKKLHQIRNGTALAATMFQATGVAPGVSGFVNITDFKGGKVGFGAEDNGGSLNSFFVKSVEELPYNISVIQISKALPSVVAEAPTPGPSELNITGIMSAHGCKVFADTLLANPEAMGTYEDNVNGGLTVFCPMDDPFKAFLPKYKNLTASKKASFLEFFGVPVYQSLSMLKSNNGLMNTLATDGASKFDFTVQNEGEEVTLKTRVNTVKITGTLIDEQPVAIYTIDKVLMPKELFKAALSPAPAPAPEEAADAPKGSKSKTKSKSKTKSKAAPTPDSDSPAESPDDDPADQVADDDNAAMCFGAERLAVVGLSFLLVFFLL

SEQ ID NO: 79901 - protein, 196 aa, Gossypium hirsutum
  Clone ID: LIB3543-051-Q6-K6-D1.pep
MQRRHPLLLLLIFSVFLNFQTSNGHNITRLLAKHPSLSTFNHYLTLTHLAQEINRRTTITVLALDNAAMSSLLNKNPSIYTMKNILSLHVLLDYFGAKKLHQITNGTALAATMFQATGVAPGVSGFVNITDFKGGKVGFGAEDNGGDLDSFFVKSVEELPYNISVIQISKALPSAIAEAPTPGPSELNITGIMSAH

SEQ ID NO: 79902 - protein, 185 aa, Gossypium hirsutum
  Clone ID: GOSHI-09MAY01-C249_1.pep
MSSPSKRREMDVMKLMMSDYNVETINDGLNEFNVKFHGPKESLYEGGVWKIRVELPDAYPFKSPSIGFVNKIFHPNVDELSGSVCLDVINQSWSPMFDLLNIFEVFLPQLLLYPNPSDPLNGDAASLMMKDRKQYDQKGKEYCERYAKKEDITKSAADKETDDEDDITDEDTGSSDDEIAGHAHP

SEQ ID NO: 79903 - protein, 149 aa, Gossypium hirsutum
  Clone ID: GOSHI-09MAY01-C279_2.pep
RFSRSICCAKLNQLSTLETLFSNLKLRPYATPLIGPLQTCESRIYSREKAEYANVNWDELGFALTKTDYMYVMNFTEEEQKFFNGTLTRFGNIEMCPSSGILNYGQGLFEGLKAYRKEDEGILLFRPQENALRMKIGADRMCMPSPTVD

SEQ ID NO: 79904 - protein, 351 aa, Gossypium hirsutum
  Clone ID: GOSHI-09MAY01-C279_1.pep
MGSLSKQEQVECREKAEYANVNWDELGFALTKTDYLYVMNFTEEEQKFFNGTLTRFGNIEMCPSSGILNYGQGLFEGLKAYRKEDEGILLFRPQENALRMKMGADRMCMPSPTVDQFIDAVKKTVLANKRWVPPYGRGSLYVRPLLMATGRNLGVKPSSDYTFLVYASPVGNYHKGDLNLMVEDNVHRAIPGGTGGIKAVTNYSPVYKPLTEAKAKGFSNLLFLDALTGSNIEEGSACNIFILKGNVISTPTTHGTILPGITRKSIMEIASDFGYQVEERAIQIKEVFDAEEVFCTGTAMVVKSVASITYQGKRIGYKLGAETLAQKLHATLTGIQTGLIEDKLGWTTLID

SEQ ID NO: 79905 - protein, 102 aa, Gossypium hirsutum
  unsure (1)..(102): unsure at all Xaa locations
  Clone ID: LIB3583-015-P1-K1-D2.pep
VYWDELGFALTKTDYLYVKNFTEEEQKFFKGTLTRFGNIVMSPSSGILNYGQRLFEGLXRIGRLSXGILLFRPQENALRMXMGAVRLCMPSPTVDQFIDAVK

SEQ ID NO: 79906 - protein, 178 aa, Gossypium hirsutum
  Clone ID: GOSHI-09MAY01-C219_2.pep
MVKYSKESDNPTKSCKARGSDLRVHFKNTRETAFAIRKLPLGKAKRYLEDVMAHKQAVPFRRFCGGVGRTAQAKNRHSNGQGRWPVKSAKFILDLLKNAESNAEVKGLDVDALYISHIQVNQAQKQRRRTYRAHGRINPYMSSPCHIELILSEKEEPVKKEPETQLAASKSKKSQVSV

SEQ ID NO: 79907 - protein, 178 aa, Gossypium hirsutum
  Clone ID: GOSHI-09MAY01-C219_1.pep
MVKYSKEPDNPTKSCKARGSDLRVHFKNTRETAFAIRKLPLVKAKRYLEDVMAHKQAIPFRRFCGGVGRTAQAKNRHSNGQGRWPVKSAKFILDLLKNAESNAEVKGLDVDALHISHIQVNQAQKQRRRTYRAHGRINPYMSSPCHIELILSEKEEPVKKEPETQLAASKSKKSQASS

SEQ ID NO: 79908 - protein, 176 aa, Gossypium hirsutum
  Clone ID: GOSHI-09MAY01-C209_1.pep
MARTDQEAIETFINITGASEAVAIEKLEEHGGDLNAAVNAHFSEGDRNTTRSTSTVVPVDDAMDIDDPIEAVPSRPAFPLLPPSRTMNAFSLLDPNFRRSFFDGVSDFTTREPLVTHPREVREVPIEVNDSSEPSRRSGHAPLIEDVSETAPGHEPITNETIIVDEVDEDSTMLPS

SEQ ID NO: 79909 - protein, 206 aa, Gossypium hirsutum
  Clone ID: GOSHI-09MAY01-C229_2.pep
MGIFSFNAIALAFLLAIISGAVNACPSSDREALLALSSSLKEPYLGIFDSWKGTDCCSNWYGISCDPTTHRVTDVSLRGESEDPILQKTGHSSSGYMTGTINPSICQLDRVTTLIIADWKGIAGEIPSCLASLPNLRVLDLIGNSLSGKIPDQIGNLQKLTVLNLADNKINGEIPSSIVQLSSLKHLDLSNNLLTGEVPANFGNLK

SEQ ID NO: 79910 - protein, 281 aa, Gossypium hirsutum
  Clone ID: GOSHI-09MAY01-C229_1.pep
DPLTIKQAARTSPARTYTARPTRPFNHCCWKGIAGEIPSCLASLPNLRVLDLIGNSLSGKIPDQIGNLQKLTVLNLADNKINGEIPSSIVQLSSLKHLDLSNNLLTGEVPANFGNLKMLSRALLSGNQLTGTIPISISNMYRLADLDLSRNKIQGQIPAQLGKMKVLATLDLGSNMLTGEVPPAVLGSTGLGILNLSRNSLEGNIPDVFGPKSYFMALDLSFNNLKGPVPGSLSSAKFVGHLDLSHNHLCGTIPVGTPFDHLEASSFDSNDCLCGNPLKTC

SEQ ID NO: 79911 - protein, 62 aa, Gossypium hirsutum
  unsure (1)..(62): unsure at all Xaa locations
  Clone ID: LIB3493-045-P1-M1-H6.pep
DCCSNWYGISCDPTTHRVTDVSLRGESEDPILQKTGHSXRYMTGTINPSICQLDRSLLNHCD

SEQ ID NO: 79912 - protein, 63 aa, Gossypium hirsutum
  Clone ID: uC-gsflmaxxa012d03b1.pep
MGIFSFNAIALAFLLAIISGAVNACPPSDREALLALSSSLKEPYLGIFDSWKGTDCCSNWNGI

SEQ ID NO: 79913 - protein, 57 aa, Gossypium hirsutum
  Clone ID: uC-gsronu33B031b08b1.pep
FYVFFFYLFLWFLFFFFFNNQRQPSILLLFLIITQNKTFYYNLIPHAQLLISLSKYY

SEQ ID NO: 79914 - protein, 227 aa, Gossypium hirsutum
  unsure (1)..(227): unsure at all Xaa locations
  Clone ID: GOSHI-09MAY01-C134762_1.pep
MDYPNNIAFKLHETVSHKECEDIVSDFERCATVLLNCKILTLRTCYEFEPEALRVLSKIHQKPIIVPLGLLPPPLTSVDDKGDENWEALKKWLDSKQEKSVFYVALGSEVSLSQESMHELAFGIEKSGLPFIWVVRKPPLVEEQFAEDMIPPEFEERVSNXGMVLRGWAPQLRILAHSSVGGFLTHCGWSSVIESLGLGKPLILFPRGSANLGLIARLMLWKKVDSK

SEQ ID NO: 79915 - protein, 185 aa, Gossypium hirsutum
  Clone ID: GOSHI-09MAY01-C134382_1.pep
MDRLNGPPRLMIVSDLDFTMVDHEDPKNLSLLRFNALWEAYYRHDSLLVYSTGRSPTIYKQLRNEKPLLTPDITIMSVGTEIAYGEPMVPDYDWEQHLNLNWDRDIITQETAKFPQLIPQSGTEQRPHKVSFFLEKPNSLEVIKALSKSLEKHKLDVKIIYSHGTALDVLPKGADKGQRLHICRE

SEQ ID NO: 79916 - protein, 277 aa, Gossypium hirsutum
  unsure (1)..(277): unsure at all Xaa locations
  Clone ID: GOSHI-09MAY01-C135042_1.pep
RNGDSSNLSCEHSSDLGEVERERVRQIFREWMNSGGRDRTSNVSCKNNSSRAQWLGETEQERVRIIREWMQMNGQQRGACVDSREDQAADVGAQIDRVLDGLVINQNEGRTELVRRGIRKLCGRQALLDMLKKAERERQTELQALLEHRAVSNFAHRNRIQSLLRGTFLRNDRMGEGNRSTSVAASELGLLRQKQTVSGLREGFFSRLDNSGSGPAXSNHSDTSSNADTNANRNEQNQVNNSEHENEQTDNQMFLHGITDLGDDVEDVRWQETSARV

SEQ ID NO: 79917 - protein, 175 aa, Gossypium hirsutum
  Clone ID: GOSHI-09MAY01-C135242_1.pep
MTENLDCSASNLLCSENASSCFDGDLDFNALNEFGASPACHHLLKNQIFNPHDPFLINNRSTSLMGCPGFALQSDDRIKAMVEKEVEHLPGDDYLKRLRSGDLDLSATREALDWIWKASAYFGFGPVSLCLSINYLDRFLSVYDLPRGKTWTVQLLAVACLSIAAKMEETKVPSS

SEQ ID NO: 79918 - protein, 330 aa, Gossypium hirsutum
  unsure (1)..(330): unsure at all Xaa locations
  Clone ID: GOSHI-09MAY01-C136922_1.pep
FRKFTLEQLKNATSGFAVENIVSEHGEKAPNVVYRGKLENHRRIAVKRFNRMAWPDSRQFLEEARSVGQLRNNRLANLLGCCCEGDERLLVADYMPNETLAKHLFHWETQPMKWAMRLRVVLYLAQALEYCTNKGRALYHDLNAYRVLFDEDGDPRLSTFGLMKNSRDGKSYGTNLAFTPPEYLRTGRVTPESVIFSFGTLLLDLLAGKHIPPTHALGFMRDRNLQMLTDSCLEGQFSDNDGTELVRLASRCLQYEPRERPNPKSLVAALTPLQKETEVPSHVLMGIPHSASFTPLSPVGQACSRRDLTAIHEILKNLGYXDDERVVNEL

SEQ ID NO: 79919 - protein, 188 aa, Gossypium hirsutum
  unsure (1)..(188): unsure at all Xaa locations
  Clone ID: GOSHI-09MAY01-C137912_1.pep
MLPQLFVGPKIGEGAHAKVYEGKYKDETVAIKVVRRGETPEEIARREGRFAREVAMLSKVQHTNLVKFIGACKEPIMVIVTELLQGGTLRKYLLNLRPKCLDLRVSIGFALDIARAMECLHSHGIIHRDLKPENLILTXNHKTVKLAHFGLXREESLXTEMMTAENRDLSLGWLPDLYNTGPLRPGRE

SEQ ID NO: 79920 - protein, 88 aa, Gossypium hirsutum
  Clone ID: GOSHI-09MAY01-C131422_1.pep
MHTRVLKQADVDNSGTIDYGEFVAATLHLNKIEREDHLFAAFSYFDKEGSGYITPDELQQACEEFGIGDVRLEEMIHEVDQDMVSSSF

SEQ ID NO: 79921 - protein, 179 aa, Gossypium hirsutum
  unsure (1)..(179): unsure at all Xaa locations
  Clone ID: AI054675.1.pep
KSIISESVEMSQLKPLKELQKLIDEQSEMYPLGPYIAITYLSVLKDCEVHCTKEGSEVKRLGGLHVIGTSLHESRRIDNQLRGRAGRQGDPGSTRFMVSLQDEMFQKFNFDXEWAVKLISKITNDEDIPIEGDAIVKQLXALQSMREVLSYIRKSLLSSXEVLEVQKAVYDLSIDLTVR

SEQ ID NO: 79922 - protein, 129 aa, Gossypium hirsutum
  unsure (1)..(129): unsure at all Xaa locations
  Clone ID: AI054676.1.pep
DVPSWPLYCDYIFGRGFRVTLVSRQSRHFAGXRYLKXGVNDRXRVAMDVETEQIILDEEGWFLQGEMSSXVGRIRGSIPFFWSQNXQGFSPNLVLYTEGFDPTYQXTHWHFEGLGKRYGHHWDLIYQDC

SEQ ID NO: 79923 - protein, 152 aa, Gossypium hirsutum
  unsure (1)..(152): unsure at all Xaa locations
  Clone ID: AI054677.1.pep
PYDNIFVWNAYLTQAIRSRCSNTIWTIALVHGHFKQIRLSIFGRDFSVTLVSRRSRHFAGXRYLKRGVNDQXKVANDVETEQIILDEKXGFLQGKMNSWCAKCLGSIPLFXAQRLSKGLIPYPDIIFQRXMNPXYQATQLHFEGLGKKYGNP

SEQ ID NO: 79924 - protein, 137 aa, Gossypium hirsutum
  unsure (1)..(137): unsure at all Xaa locations
  Clone ID: AI731003.1.pep
METQRIIKFPHNNMDKRPRKRPRLTWDMPPPLPPPKVLPTIHCSQEFGNGGISNFSYPNNMFHRGIPHNGSPPWRPDDKDGHYVFAVGESLTPRYKILNKMGEXTFGQVLECFDNERQKIVAIXIVRSIHKYREAAM

SEQ ID NO: 79925 - protein, 81 aa, Gossypium hirsutum
  unsure (1)..(81): unsure at all Xaa locations
  Clone ID: AI055339.1.pep
MNGIFAGTFGQVLECFDNERQEVVAIKIVRSIHKYREAAMIEIDVLRRLARHDMSGARCVQIRXWFDYRIILKYYCIYLIN

SEQ ID NO: 79926 - protein, 582 aa, Gossypium hirsutum
  unsure (1)..(582): unsure at all Xaa locations
  Clone ID: GOSHI-09MAY01-C132502_1.pep
MPVVDFVCVFLVSVVMFNLRVSTEPVEDKQALLAFISGIRHADRVKWNSSTSACDWFGVQCDANRSFVYTLRLPGAALIGSIPPNTIGRLNRLRVLSLRANRLSGEIPADFYNLTQLRSLYLQGNEFTGPFPPSVTRLTRLTRLDLSSNNFTGPIPLGVNNLTQLTRLFLQNNKFSGSLPSIDSDGLNDFNVSNNNLKGSIPDSLSKFPESSFAGNIGLCGGPLRPCNPFPPSPSPTEPIPPKTSGQSSKSLPTGAIIAIAVGSAIVALLLLLFLIICFRKWKRKSPRRQKAIPSTTHAVPVEEAGTSSSKDDITGGSTEIERMMNNKLMFFKGGVYSFDLEDLMRASAEMLGKGSTGTSYRVVLAVGTTVAVKRLKDVAVSKREFVMKMGMLGKIMHENVVPLRAFYYSDEEKLLVYDYMHGGSLFALLQGSRNSVRTPLEWDHRIKIALSVARGLAHLHSSQNMIHGNIKSSNILLRPDHEACISEFGLNSLFNTNTPPSRIGGXYQAPEVLQTHKVTVKSDVYSFGVLLLELLTGRAPIQPSITEERFDLPRWVQSVVREEWAAEVFDAKLMAYHNIED

SEQ ID NO: 79927 - protein, 184 aa, Gossypium hirsutum
  unsure (1)..(184): unsure at all Xaa locations
  Clone ID: GOSHI-09MAY01-C132772_1.pep
MFWREREMENKELNGGPPCGQIKVLVVGDSGVGKTSLVHLIVKGSSTARPHQTIGCTVGVKHTTYGCPGSSSSSLKGDAERDFFIELWDVSGHERYKGCRSLFYSQLNGVIFVHDLSQRRTKTSLQKVGSXEFAASGTFSVPLGSGGSKGLPVPYIVIGXNKLNIASKEGTKSFPGHPGDATRH

SEQ ID NO: 79928 - protein, 123 aa, Gossypium hirsutum
  Clone ID: GOSHI-09MAY01-C132732_1.pep
MFLRRLAVIVPRSTRFFSSKGSLDLGSTIAELNKEMESVFGEPPPKGLANSGNKSCMAQDAHHNSHVILGSTNDKFAAQELSSISHHLGENKPGLSHVGSTGKAQMVDVSPKENSSRTAIACC

SEQ ID NO: 79929 - protein, 223 aa, Gossypium hirsutum
  Clone ID: GOSHI-09MAY01-C132332_1.pep
KEGERINEEEYVNDADPSILRFLLASREEVSSLQLRDDLLSMLVAGHETTGSVLTWTLYLLSKDPSALVKAQQEVDRVLEGRNPTYEDIKDLKFLTRCITESLRLYPHPPVLIRRAQVDDVLPGDYKVKAGQDIMISVYNIHHSSQVWERAEKFVPERFDLESSVPNESNTDYRFIPFSGGPPKCVGDQFALLEAIVALAIFLQRLNFELVPDQNISMTTGAT

SEQ ID NO: 79930 - protein, 202 aa, Gossypium hirsutum
  unsure (1)..(202): unsure at all Xaa locations
  Clone ID: GOSHI-09MAY01-C133192_1.pep
QKKKKKNLISCDVCAIFGVIFISFQDGLAMAVGMFIXDLPARQIRRPKTVMLGNIPGTDIIRDLHQYKESMEIPGFIILSIEAHINFANSTYLNERILRWIEEYEAEDHKKQSSLQFVVLVMSAVSAIDTSGVSIFKELKKTVEKKGAELVLVNPLGEVMEKLQKSDEAGDFMRPDCLFLTVGEAVATLTATIKSQVSNHVV

SEQ ID NO: 79931 - protein, 71 aa, Gossypium hirsutum
  Clone ID: GOSHI-09MAY01-C129542_1.pep
NKTHIANKLQLCNSLEQFLGQCIVKERALVLHGRLANAKPSCIRCVQLVRVFYPNILKFFFLNTYIGCQLN

SEQ ID NO: 79932 - protein, 138 aa, Gossypium hirsutum
  unsure (1)..(138): unsure at all Xaa locations
  Clone ID: AW187169.1.pep
MHGRGGXXXXXXXXXXWXXPTPSAAVLSGDGGASLSSSSSSSAVYFFSQDGLHITLGDCALFKPPEDSPPFLRIIRCLTAGRQRHRSSCVNWLYPPAEVQLGPRLPLEAAPGEIVCSFRRDDIPPSSLLRPCSVSFLP

SEQ ID NO: 79933 - protein, 144 aa, Gossypium hirsutum
  unsure (1)..(144): unsure at all Xaa locations
  Clone ID: AW187392.1.pep
GGGIDGTPRGKCKAIHGRGGGXXXXXXMWTVPTRSTAVLSGDGGASLSSSSSSSTVNFFSKDAPYIPLRDCALFKPPXDSPPFISIIPCLPAAKQNQFHSSLNRLHRPPYVQLATGLLLHPAPNDLFYSFPTDHIPPAPLLRPF

SEQ ID NO: 79934 - protein, 68 aa, Gossypium hirsutum
  Clone ID: GOSHI-09MAY01-C125272_1.pep
TCFCQLSGCFIGQMLVYIVQGESAHRDRRCSALIRNGLHRIYRTCTFLAILTRRAMIYRDVAEDDLLM

SEQ ID NO: 79935 - protein, 109 aa, Gossypium hirsutum
  unsure (1)..(109): unsure at all Xaa locations
  Clone ID: GOSHI-09MAY01-C120322_1.pep
PSLGPETIKPLGAALTFHQFFEGMGLGGCISQASFKGRSAAIMXLFFSLTTPVGIALGIXITNAYDENSPTALIVEGLLNAASSGILIYMALADPSAPALMYPTIPYHC

SEQ ID NO: 79936 - protein, 167 aa, Gossypium hirsutum
  Clone ID: GOSHI-09MAY01-C121492_1.pep
AIPPHILQTPNQTNRDAPPGTRISPTKALGSDKSLSIHRHSTSIPAQSGSECGSSNPSSNNDDAQNHHHQRIYILRQQPIRSSPTQSLRKRSRSLSVSSKRHRTKQEAWLRKPRSTPTRKDPPIFSYSPLLSSPPPNAKPKKNDNVETVKAQKRRKRKEKIGIPLLC

SEQ ID NO: 79937 - protein, 191 aa, Gossypium hirsutum
  Clone ID: GOSHI-09MAY01-C121662_1.pep
IGGKLIFTYVMHQKKSEVQIGKESSGVSSGFNPKPSTGHHHHHHHHHQHFNYHHRLQQLSDTTAPAGTGTSPVYVFPQIITQTSSGNDAIAPPPSSSSTSPTPYKRPLLTQTPSLTKSPTLYRFTPPPQFNSRNTASFFSFSVAAKSSFYRILHRFKHLRRLRVYLRLILLLSLPFLYFLLSPPSHSLLLD

SEQ ID NO: 79938 - protein, 115 aa, Gossypium hirsutum
  unsure (1)..(115): unsure at all Xaa locations
  Clone ID: uC-gsronu33B037c05b1.pep
MEKRVCEVWKGSNKFILGGRLIFGPDAKSLLVTLLLITVPVIIFCVFVARHLRHAFSPYNAGYAILAVAIVFTXYVLILLFLTSARXPXIIPRNSHPRRKFAMIFCLAEVGVGKH

SEQ ID NO: 79939 - protein, 75 aa, Gossypium hirsutum
  unsure (1)..(75): unsure at all Xaa locations
  Clone ID: uC-gsronu33B101f01b1.pep
MEKRVCEVWKGSNKFILGGRLIFGPDAXSLLVTLLLITVPVIIFWVFAAWHLSFPFFSHIYASIFHFLSVHISFY

SEQ ID NO: 79940 - protein, 208 aa, Gossypium hirsutum
  unsure (1)..(208): unsure at all Xaa locations
  Clone ID: GOSHI-09MAY01-C123432_1.pep
SIVLTRAGKLFALHTGDGRIVWSHLLRSLHKSEACQSPIGLNLYQWQVPHHHAMDENPSVLVVSRCGPSSDTPGVLSFVDTYTGKELSSLSLDHAVVQVIPLPYTDSTEQRLHLLINADKHAHLYPKTSEALXIFKREFLNIYWYSVEDQNGIIKGHALKCKCTGEVADEFCFDTRDLWSVVFPSESEKIVATVTRKLNEVVHTQAKV

SEQ ID NO: 79941 - protein, 202 aa, Gossypium hirsutum
  Clone ID: AI729027.1.pep
FPFLLLIPAICFTICDANSNLLCIPSEREALLKFKNHLIDPSNRLSSWVEGGDCCKWIGVVCHNLTGHVHQLHLAAPLSPYEQSALGGKINPSLLELNHLSTLDLSNNNFSSIHIPKFFGLLESLTYLNLSRAQFQGAIPHNLGNLSKLQYLDLRGNDLKSKSLHWVSGLSSLQYLDLSYANLSKATDWLQEIYQTTLATWS

SEQ ID NO: 79942 - protein, 128 aa, Gossypium hirsutum
  Clone ID: uC-gsflnu33B018e05b1.pep
LIYLFVKCLRFMITSLSGLPVRHANNNLHCIEREREALLKFKNDLIDPSNRLSSWDEGGHRCKGECKAPLIDTLNYMAGPRFNHYPILKSVGIQLLIALLYIPLSPVGVISSSPLIFDLSYNLPILNG

SEQ ID NO: 79943 - protein, 106 aa, Gossypium hirsutum
  Clone ID: GOSHI-09MAY01-C58889_1.pep
RVQGLEILNKNGEWININPSPNSFVVMLGESFSVWLNGRLPSAYHRVLMEGNEARYSIGLFARPRGGYLVKVPKELVDDKNPMLFKPFDLEEFLKTFLPPGCSRSC

SEQ ID NO: 79944 - protein, 57 aa, Gossypium hirsutum
  unsure (1)..(57): unsure at all Xaa locations
  Clone ID: LIB3149-055-Q1-K1-G7.pep
SFSVWLNGRLPSAYHRLMMKGNETRYSIGXFARPRGGYLVKVPKELVDDKNPMLLNP

SEQ ID NO: 79945 - protein, 150 aa, Gossypium hirsutum
  Clone ID: GOSHI-09MAY01-C58479_1.pep
GGGAVKVVFPNGNIQMYTISVKAADLMVENPGQFVCDSGGLKVGFRVHGLTADEELERRRLYFLLPMELLYSVLTEEEMSCLSCKADKALKHASFNIGKILPVFNEFCIFPFEAKSPPQNAVNDGAKDSVVVRFSKQRSWKPALETIVES

SEQ ID NO: 79946 - protein, 163 aa, Gossypium hirsutum
  unsure (1)..(163): unsure at all Xaa locations
  Clone ID: GOSHI-09MAY01-C58799_2.pep
MTVAAGIGYALVALGPSLSLFIAFISKKPFLILTLLSSTLVWLISLIILSGIWRAFLPLNSTTWWPFAILIFSSIAFQEGLRLLFWKVYKRLEDILDAFADRVSKPRLYLTDKMQIALAGGLGHXVAHAVFFCLSLLTPAFGPATYFVDRCSQIPFFLVSAIM

SEQ ID NO: 79947 - protein, 57 aa, Gossypium hirsutum
  Clone ID: LIB3829-010-Q6-K6-G2.pep
WVSKPRLYLTDKMQIALAGGLGHGVAHAVFFCLSLLTPAFGPATYFVDRCSQIPFFL

SEQ ID NO: 79948 - protein, 112 aa, Gossypium hirsutum
  Clone ID: GOSHI-09MAY01-C58649_1.pep
ARSGKLSSDFVHLSSGFDSTLSLSKFLTAGVERNYRKMKGSTHVVATLLAASTVALSSSSSPGIHNVSFPPTSSDQGTRNGASRNLTATERENFTPRFDGLRFIETLITAHR

SEQ ID NO: 79949 - protein, 122 aa, Gossypium hirsutum
  Clone ID: GOSHI-09MAY01-C58609_1.pep
MEEQDRSSQPRPPHVLICPLPLQGHINTMIKLAELLPIAGFKLTFLNSHHNHKRSVRVNNIAAHFERYPGFEFKTITDGLPLDHPRSGSWFLDMFEETMEPKMKQSLREVLVNSSPPVDCVI

SEQ ID NO: 79950 - protein, 186 aa, Gossypium hirsutum
  unsure (1)..(186): unsure at all Xaa locations
  Clone ID: GOSHI-09MAY01-C58629_1.pep
RDQVEPHKPSVVIRPPADKDKDQPQKKIIIKRPNEVIDLDQLSQEGGTYPEYRKTKXIVELSSFEKHGKQESLRLMEPKARRKAKEERRWWEEEEKRRNVERIREDRARKLYEEEMRLLEERERFAEITRYTEDIRREREEEERQKAKKKKKKKAEIKEDYLEDYRTRRNDRRAPERDRGAKRKPV

SEQ ID NO: 79951 - protein, 57 aa, Gossypium hirsutum
  Clone ID: GOSHI-09MAY01-C58159_1.pep
ARVEQELCTLFTLQKKKMQRPFLYYLMRLSDQCLSFPQFLTCASARAEVDVAVPQSA

SEQ ID NO: 79952 - protein, 155 aa, Gossypium hirsutum
  Clone ID: GOSHI-09MAY01-C58399_2.pep
LRGLKFMQRAAQREEKVKKEEEVKPEGISTITRKGVVIIEGDPRPGATVGRMSFRSFNPSIDKLNEEASNVSQPDASGGRTLSSENGSASEATHSKVGTDKHEGNGDLKRKQSVMVSEPEYPNKSPKNGYGIQSTPSSGKASSKKQSKREKLDWN

SEQ ID NO: 79953 - protein, 156 aa, Gossypium hirsutum
  Clone ID: GOSHI-09MAY01-C58399_1.pep
MAKRELSSTLRGLKFMQRAAQREETVKKEEEVNPEGISTITRKCVVIIEGDPHPGATVGRMSFRSFNPSIDKLNEEASNVSRPDASGGRTLSSENGSASEATHSKVGTDKHEGNGDLKRKQSDIQSTPSSGKASSKKQSKREKLDWNVLRPPKPNR

SEQ ID NO: 79954 - protein, 144 aa, Gossypium hirsutum
  Clone ID: LIB3196-016-P1-M1-G6.pep
RGQKSTLVPGRNFRDVSQNLGTNLPELGQPSLTGPPNSEHPQPALDPRSNDLARAPLKLSMPPSDGLPPTGGSAVHRWPLSGRLPAEYSWPPEDPWLMMAAAAADRLGEALPEELSYLSSAAALAPCRGPLPGESSPDATDLSP

SEQ ID NO: 79955 - protein, 125 aa, Gossypium hirsutum
  Clone ID: LIB3196-003-P1-M1-G10.pep
MRGRVAGSCAPLGLLLVCLRLPGLFARSIGAVEEKVSQNLGTNLPQLGQPSLTGPPNSEHPQPALDPRSNDLARAPLKLSMPPSDGFPPAGGSAVQRWPPSGRLPAMYSWPPEDPWLMMAAAAAD

SEQ ID NO: 79956 - protein, 98 aa, Gossypium hirsutum
  Clone ID: GOSHI-09MAY01-C59489_1.pep
MSYGRPPPDVEGMTSLKVDNLTYPTSPDTLRRVFEKYGRVGDVYIPRDRYTKESRGFAFVRFHDKRDAEDAMDAMDGAVLDGRELRVQMARYGRPPDS

SEQ ID NO: 79957 - protein, 96 aa, Gossypium hirsutum
  Clone ID: GOSHI-09MAY01-C59729_3.pep
PRVRRVRVFLIVAISLVLQATVPPTALAARNEVMSSAAVSKVANDSNGLAVVFEKVGPGCKPKGSFCLFDLTSCCRPCGCLAGWCYNYDHECNEYT

SEQ ID NO: 79958 - protein, 90 aa, Gossypium hirsutum
  Clone ID: GOSHI-09MAY01-C59729_2.pep
SHASMERCKKFAFLMVAMALLLQSMVPPTALAARNNVMEYNPLASVFSREGPGCIAKGGFCLFDLTSCCRPCGCLAGWCYNIDHDCNEYT

SEQ ID NO: 79959 - protein, 122 aa, Gossypium hirsutum
  unsure (1)..(122): unsure at all Xaa locations
  Clone ID: LIB3543-032-Q1-K1-H11.pep
KFILVNTLPQFDGKTWPIYMSKGRNRPTKNMISEQELRVSDRKPRSGNEGVILVITKPNWSRHEFMALQVKCVAGFQPTPDCLFSSWQRTHRSLFFHPYQCQLQQGSRLLFFHXXRVMSLFN

SEQ ID NO: 79960 - protein, 69 aa, Gossypium hirsutum
  unsure (1)..(69): unsure at all Xaa locations
  Clone ID: LIB3582-052-P1-K1-H12.pep
GAFQEVRFPDVGMNLLLQSMVPPTALAARNNVMEYNPLASVFSREGPGCIAKGGFFLGEGSXXXIHXDA

SEQ ID NO: 79961 - protein, 192 aa, Gossypium hirsutum
  Clone ID: GOSHI-09MAY01-C59059_1.pep
MACTIDFRRLDEGFGGKTYKRKRQESQIVANDDEAAPAAASMDVDDSCPPPAKRSAVPSSDDPNKPTFGQPTYDGVIAGKVSGRNWKQPRKQRASAKHVSIRRTSLEERERQKEIKRAYRERINELKEEIRQNKVEKRKKREEREKKKKENILRSGTKFQKITNPNTLKKIAKFKHKKLLQVVPDEFLHKNK

SEQ ID NO: 79962 - protein, 143 aa, Gossypium hirsutum
  Clone ID: GOSHI-09MAY01-C59079_1.pep
MGIRFILMVNKQGQTRLAQYYEWLTLEERRALEGEIVRKCLARNEQQCSFVEHRNYKIVYRRYASLFFLVGVDNDENELAILEFIHLLVETMDRHFGNVCELDIMFHLEKAHFMLEEMVMNGSIVETSKANILSPIQLMDKAS

SEQ ID NO: 79963 - protein, 190 aa, Gossypium hirsutum
  Clone ID: GOSHI-09MAY01-C59069_1.pep
MAVSTFSFALSLAIFSIWAVDAAHHHATAPSPSSSSSSSSSSTVDCSTLILNMADCLSFVSSGSEVSKPEGSCCSGLKTVLKTGPECLCEAFKSSASMGVSLNVTKASTLPAACKVSAPSSTNCAASVTPAGAPDVEPSATAGAPTTFSAANEVAPTPAPGISGSAVLSVSAGSIVVGIISMLVSGYVLR

SEQ ID NO: 79964 - protein, 52 aa, Gossypium hirsutum
  Clone ID: uC-gsronu33B179e05b1.pep
FCGAFGFGRIYGGMQYKYGGLGLRTTLKTLRIIGHEREREREREREREIIVY

SEQ ID NO: 79965 - protein, 103 aa, Gossypium hirsutum
  Clone ID: GOSHI-09MAY01-C59349_1.pep
MKLRKGEYFGNAYRGDPGVPHAGPDRFVNIWIGSAAFSVLTWFNPYMWQLTNQFNWHDKAMIFEHYHWKKAKAKNQPYKFKWNEYMDKDHRDSYYFNWPVYFP

SEQ ID NO: 79966 - protein, 85 aa, Gossypium hirsutum
  Clone ID: GOSHI-09MAY01-C59289_1.pep
RNRIWIGEKRKLSTSSPVPFYDVRDYGFMLRARESSEELITLLTVFGIIEVNFRIYGMYRLEFTFEMFNFGYILKAMRKWLNYFV

SEQ ID NO: 79967 - protein, 98 aa, Gossypium hirsutum
  Clone ID: uC-gsronu33B116e11b1.pep
MKKGGKRRRKRSKKEMIQMTSMVYRVMKFYVAEVLLVLEYLHMLGIIYRDLKPENVLVREDGHIMLSDFDLSLRCTDSPTLVKTSSLESEPLRKNPVY

SEQ ID NO: 79968 - protein, 137 aa, Gossypium hirsutum
  unsure (1)..(137): unsure at all Xaa locations
  Clone ID: LIB3165-039-Q1-K1-E5.pep
FYAYTPFEPEKFSCXXMEFCPXGDLXXLGRSNQETFSGQAVKFYVAEVLLVLEYLHMLGIIYRDLKPENVLVREDGHIMLSDFDLSXLRCXLLSPTLVKTSSLESEPXRKXNPVYCVQPACIEPSCIQPACVVPTTC

SEQ ID NO: 79969 - protein, 221 aa, Gossypium hirsutum
  Clone ID: GOSHI-09MAY01-C54749_1.pep
EFVHESDKRSHLMDLLHAQRANGVQGKQALTFLLVRPRVRADSLEHWLRMNGFPATTIHGDRSQQEREQALRSFNTRAPPILVATDVAARGLDIPHVAHVVNFDLPNDIDDYVHRIGRTGRAGKTGLATAFFNENNTNMAKALADLMQEANQEVPAWLTRYAARSFGARNRRPGGGGRFGGRDFRRDSSYNRGGSDYYSGGNNNSGGYGGGYGANVASAWD

SEQ ID NO: 79970 - protein, 136 aa, Gossypium hirsutum
  unsure (1)..(136): unsure at all Xaa locations
  Clone ID: LIB3165-037-P1-K1-A7.pep
KIVEQIYIPPPGVRQTMLFSATFPREIQRLASDFLANYIFLAVGRVGSSTDLIVQRVEFVHESDKRSHLMDLLHAQRANGVQGKQALTLVFVETKKGADSLEHWLCMNGFPATTIHGDRSQXEREQALRSFKTGAT

SEQ ID NO: 79971 - protein, 87 aa, Gossypium hirsutum
  unsure (1)..(87): unsure at all Xaa locations
  Clone ID: GOSHI-09MAY01-C54179_1.pep
TACASATVLKTLPMIDTTEWMKGRNLRHPPGRFVRXHATSDAFTVRASSYADELAKTAETAASTGRGIWAMDESNAACGARLASIGL

SEQ ID NO: 79972 - protein, 61 aa, Gossypium hirsutum
  Clone ID: GOSHI-09MAY01-C54249_1.pep
IPHSNCRFTSTNSNQYIQAWRDDFLALRSPFGFNFNEAKRDLWHIRKVRLLFLFSFYFQTQ

SEQ ID NO: 79973 - protein, 249 aa, Gossypium hirsutum
  unsure (1)..(249): unsure at all Xaa locations
  Clone ID: GOSHI-09MAY01-C55409_1.pep
AKRTYIXHVDKSNMPETFTDHALWYDTSLKSVSDSASVLYRYEHVVHGYSTMLTTEEAAALGEQPGILSVLPEVIYELHTTRTPEFLGLGKSTTLFPTSDSMGEVIVGVLDTGVWPELKSFDDSGLGPVPSRWKGECQVGKNFSASSCNRKLIGAKFFSKGYEVAFGPIDETMESRSPRDDDGHGTHTATTAAGSVVPSANLLGYASGTARGMASHARVAVYKVCWLGGCFGSDIVAAMDAACADGVDV

SEQ ID NO: 79974 - protein, 134 aa, Gossypium hirsutum
  Clone ID: GOSHI-09MAY01-C55159_1.pep
MAETCDFLATKRCAVVSGGNKGIGLEICKQLASKGVTVVLTARDEKRGLQALDKLKESGLSHNLVFHQLDVTNPLSVASLAAFINTQFGKLDILVNNAAIAGANVNYEILTTAVEKASDWPVGEEVWNEIITSE

SEQ ID NO: 79975 - protein, 126 aa, Gossypium hirsutum
  Clone ID: LIB3165-042-Q1-K1-F12.pep
MAETCDFLATKRYAVVSGGNKGIGLEICKQLASKGVMVVLTARDEKRGFQALDKLKESGLSHNLVFHQLDVANPISVASLAIFLNTQFGKLDILPLGEEVWNEIITSETYDMVQDCLKTNYYGMKS

SEQ ID NO: 79976 - protein, 137 aa, Gossypium hirsutum
  Clone ID: GOSHI-09MAY01-C55079_2.pep
MESFSAEDLSTIGGIATVSLLHSFIPTHWLPFSIVGRAQKWTLSRTLFVTAFGAVLHVISTSLLGITAITMANTIAGEETVHKLASLLLIVLGGSYILLFLSGKGGHSHSHNQPMEKMAVAGLVLVPALSPCATLFR

SEQ ID NO: 79977 - protein, 149 aa, Gossypium hirsutum
  unsure (1)..(149): unsure at all Xaa locations
  Clone ID: GOSHI-09MAY01-C55079_1.pep
MEGFGAEDLSTIGGIATVSLLHSFIPTHWLPFSIVGRAQNWTLSRTLFVTAFGAVLHVISTSLLGIAAITMANTIAGEETVHKLASLLLIVLGGSYILLSLSGKGGHSHSHNQPMEKMAVAGLVLVPALSPCATTLPVFLXVGNSSSMM

SEQ ID NO: 79978 - protein, 161 aa, Gossypium hirsutum
  Clone ID: GOSHI-09MAY01-C56919_1.pep
NITGPATSETVTPKKLRRIRRKRASGFGDSVLSPQAVLNAYGPKHGKRIGPVWFSLVASEDQEGGAPLPRIPAIYLRIKDGNMPVSFIQKYLIKKLDLTDEAEVEIKCMGQPVLPTLQLYNLVDLWLQTTSTSQRVAASVGSCAKDFVMVLAYARKVSGQQ

SEQ ID NO: 79979 - protein, 182 aa, Gossypium hirsutum
  unsure (1)..(182): unsure at all Xaa locations
  Clone ID: GOSHI-09MAY01-C56899_1.pep
CAQYTFVAAICVLILSHSLISVVKATTFTIVNECNYVVWPGILSNARVPTLPTTGFALQSGETKAITAPASWGGRFWGRTHCSEDSTGKFSCLTGDCGSGKVECSGNGAAPPASLAEFTLDGAGGLDFFDVRLADXGYNIPMLVVPQGGTGQNCTNTGCVVDLNGSCPSELKVMSTDGTDGV

SEQ ID NO: 79980 - protein, 110 aa, Gossypium hirsutum
  Clone ID: GOSHI-09MAY01-C56859_1.pep
MESLTSSPVCNLGILISLDNDSVQEILQSYDGFCTAANSLLKISGDLSLEHDFVSHVHTLCKHGLHILSRDYFLRLLEEAFEKNGASRFWRYFEDYSIDLSDTVFVALHG

SEQ ID NO: 79981 - protein, 73 aa, Gossypium hirsutum
  Clone ID: LIB3149-023-Q1-K1-B2.pep
KWFNKNTRTKTLSHENENNSFKSFKKKSTHQITIHEEQQRLYYLDLCLIFLLFLFNLLIRFFFHLALMVNLWF

SEQ ID NO: 79982 - protein, 217 aa, Gossypium hirsutum
  unsure (1)..(217): unsure at all Xaa locations
  Clone ID: GOSHI-09MAY01-C56879_1.pep
PSLKKLEHLEVLSVAGLESVTDSFIKEFLIARGDGIKELILMDCWKLTDSSLNIIAETCSNLRALDIGNISKLTDTSFGYLASGCRSLQSLKLCHNAFSDDAIAAFLEMSGEVLKELALNNVGKVGLNTALSLARRSRNLVSLDLSWCRNLTHEATGLIVDSWLSLRVLXLFGCSQITDVFLYGHSNAKVEIIGLKLSPFLEHIKTPAQGPFQYSSV

SEQ ID NO: 79983 - protein, 130 aa, Gossypium hirsutum
  Clone ID: GOSHI-09MAY01-C56569_1.pep
MSGKGAKGLITAGKSTKDKDKDKKKPVSRSSRAGLQFPVGRVHRLLKTRVSANGRVGATAAVYTAAILEYLTAEVLELAGNASKDLKVKRITPRHLQLAIRGDEELDTLIKGTIAGGGVIPHIHKSLINK

SEQ ID NO: 79984 - protein, 165 aa, Gossypium hirsutum
  Clone ID: GOSHI-09MAY01-C56669_1.pep
MMRAVIYLLPLTFIFFTIADGKRILPLLQPQPLESFKVNATQNVGSCTYTVSIRTSCSSTTYTRDQISLAFGDAYGNQVYAPRLDDPCSRTFESCSTDTFQIKGPCTYQICYLYLYRSGYDGWKPESATVYGYYTKAATFNYNVFIPNGVWDGFDFWYGRGSASA

SEQ ID NO: 79985 - protein, 61 aa, Gossypium hirsutum
  Clone ID: LIB3543-047-Q6-K6-D1.pep
RIGCAIIQIKVSDPINRLSLENSVRDNLQTCAALHGESFNSAIAKIHPAAFAQLKQALKMP

SEQ ID NO: 79986 - protein, 92 aa, Gossypium hirsutum
  Clone ID: LIB3149-016-Q1-K1-B1.pep
VILGGTDDLTEEESSGDNMSYGRSHDEDLLPSKELRRRQIKVSDPINRLSLENSVRDNLQTCAALHGESFNSAIAKIHPAAFAQLKQALKMP

SEQ ID NO: 79987 - protein, 176 aa, Gossypium hirsutum
  Clone ID: GOSHI-09MAY01-C56349_1.pep
GRVGGRVGKFRADWNAIKAVKNELRIPVLANGNIRHMDDVRNCLEETGADGVLSAETLLENPALFAGFRTSNWVADNEKDSIDGKLDQADLVVQYLKLCEKYPVPWRMIRSHVHKMLGDWFRVQPQVREELNAQSRLTFEFLYGLVDQLRELGVRVPLHQKDGASATGNLAEVIGI

SEQ ID NO: 79988 - protein, 161 aa, Gossypium hirsutum
  Clone ID: LIB3829-036-Q1-K6-E10.pep
PRVRPRVRDDVRNCLEETGADGVLSAETLLENPALFAGFRTSNWVVDNEKDSIDGKLDQADLVVQYLKLCEKYPVPWRMIRSHVHKMLGDWFRVQPQVREELNAQSRLTLEFLYGLVDQLRELGVRVLLHQKDDASATGNLAEVIGIDYPDQCELSRRCLE

SEQ ID NO: 79989 - protein, 69 aa, Gossypium hirsutum
  Clone ID: GOSHI-09MAY01-C56309_1.pep
MADWAPVLVGVVLFVLLSPGLLFSFPGNGKQLEFGSMKTNGMAIAIHTLLFFAIYAVLIMAVHLHIYTG

SEQ ID NO: 79990 - protein, 270 aa, Gossypium hirsutum
  Clone ID: GOSHI-09MAY01-C57539_2.pep
SITMSSLFLLLLSTAITAAVASIPAYPSVSTDCTVSAEDDNPVPVRREVYGDGRIFDVSHRYTVDMPSWGSKDGLGQFLWLPSSMKNGSRSNNSLMKLQSVHSGTHVDAPGHMVDSYFDAGFDVDTLDLDVLNGPALLVDVPRDSNITAKVMESLNIPKGVRRVLFRTLNTDRRLMFKKEFDSSYVGFTTDGARWLAKNTDINLVGIDFLSAACYDHSVPAPLEFFEGRELILVEGLKLDHVPVGIYNAHCSPLRLLGSEGSPIRRILIK

SEQ ID NO: 79991 - protein, 229 aa, Gossypium hirsutum
  unsure (1)..(229): unsure at all Xaa locations
  Clone ID: AI726017.1.pep
MTKTMFLPLLLLHLSTAAASTSVSTECTVSTMDDYPVPVRREVYGDGRIFDISHRYTMDMPSWERKDGLGRFLWLXASMKNGSLANNSLMKLPTHSGTHVDAPGHMIDRYFDAGFDVDTLDLEILNGPALLVDVPXDSNITAKVMESLKIPXGVRRVLFRTLXTDRRLMFKSEYNSXYVGFTTERARWLVKNTDIXLVGVDFLSVACEESXXSAHLEFFESKVKKFLTI

SEQ ID NO: 79992 - protein, 151 aa, Gossypium hirsutum
  Clone ID: GOSHI-09MAY01-C57429_1.pep
VFIVRGRIKRIQSLSKGVVATSLIEPGGFLGDELLSWCLRRPFIDRLPASSATFVCVEPIEAFSLDSNHLKYITDHFRFKFANERLKRTARYYSSNWRTWAAVNIQLGWRRYRTRTRGPMISAAENGNSSDRRLLQYAAMFMSIRPHDHLE

SEQ ID NO: 79993 - protein, 57 aa, Gossypium hirsutum
  Clone ID: LIB3149-035-Q1-K1-D8.pep
TNNKSHNNKKKPIIEDPLRQMHADHASMFLLGSFSCLLKPSNKNSENNKNMAHVFRK

SEQ ID NO: 79994 - protein, 58 aa, Gossypium hirsutum
  unsure (1)..(58): unsure at all Xaa locations
  Clone ID: LIB3149-053-Q1-K1-C2.pep
XXENMSXXLGGXHXXLFEGVSKQLKDPSRNMLAWSACICLSGSSIIGFFLLLCDLLFV

SEQ ID NO: 79995 - protein, 69 aa, Gossypium hirsutum
  Clone ID: GOSHI-09MAY01-C57609_1.pep
IGNTFYIYLSIYLSIYIIIFVEKSVNRSFFMLVIYVQYPMIMAAHLEMKLIVFVCLLFLLEDWITLKKK

SEQ ID NO: 79996 - protein, 170 aa, Gossypium hirsutum
  Clone ID: GOSHI-09MAY01-C57199_1.pep
PRVRTKEQFHRHLMLEAERRQLRPIIENKSRIILVHTSSGYKHSLREVLDAPNVMSMIKDTKAAQEVRALKDFFNMLSNDPARACYGPKHVEVAHERMAVQTLLITDDLFRNSDVITRQKYVSLVNSVKNSGGTAHIFSSMHVSGEQLAQLTGIAAILRFPLPDLEDIEM

SEQ ID NO: 79997 - protein, 100 aa, Gossypium hirsutum
  Clone ID: LIB3825-032-Q6-N6-B1.pep
DAINIAVRCKVPIQVNKSLAYSDGMCVIEPGKLSTQSPASDGLLFTELDQPSGQHCLDTEEFNIVCDLNKAINQERYKDAADLRDKLGQFRAQRNLKKYT

SEQ ID NO: 79998 - protein, 50 aa, Gossypium hirsutum
  Clone ID: LIB3149-025-Q1-K1-C1.pep
PSGQHCLDTEEFNIVCDLNQAMNQERYKDAADLRDKLGQFRAQRNLKKYT

SEQ ID NO: 79999 - protein, 197 aa, Gossypium hirsutum
  unsure (1)..(197): unsure at all Xaa locations
  Clone ID: GOSHI-09MAY01-C50839_1.pep
MSAALKKSSSNGSDKSVTTEEQHAKISEIRKLIGPLPEKLAMXCSDAALTRYLRARNWNVKKATKMLKETLKWRAEYKPEEIRWEEVAHEAETGKIYRSNYIDKHGRTVLVMRPSCQNTKSTKGQIRYLVYCMENAILNLPPDKEQMVWLIXFNGYNLSHTSVKVTRETAHILQDHYPKRLGLAILYNPPKFFEPFL

SEQ ID NO: 80000 - protein, 169 aa, Gossypium hirsutum
  Clone ID: GOSHI-09MAY01-C50559_2.pep
VPIGVAVSAPSSVLSNRRISVRFSEFRGLKIKPRLASLTQSTRSAIQDRRRVGRVVCEAQNTAVDVPAIKDETWQSLVLECELPVLVEFWAPWCGPCRMIHPIIDELSKQYAGKLKCYKVNTDESPNIATRYGIRSIPTVMIFKRGEKKDAVIGAVPKSTLTTCIERLL

SEQ ID NO: 80001 - protein, 174 aa, Gossypium hirsutum
  Clone ID: GOSHI-09MAY01-C50559_1.pep
MASSTVPIGVAVSAPSSVLSNRRISVRFSEFRGLKIKPRLASLTQSTRSAIQDRRRVGRVVCEAQNTAVDVPAIKDETWQSLVLECELPVLVEFWAPWCGPCRMIHPIIDELSKQYAGKLKCYKVNTDESPNIATRCGIRSIPTVMIFKRGEKKDAVIGAVPKSTLTTCIERLL

SEQ ID NO: 80002 - protein, 96 aa, Gossypium hirsutum
  Clone ID: LIB3582-017-P1-K1-D7.pep
EGIPRTRIYFDAAFDSKTFSSATGLVGWDLRGNLMVLKTVIYRNVPSPFAVEAYACPEGAKLGSSLSIQSVCLMGDSKTVIKNVKQLQMTSQLSEP

SEQ ID NO: 80003 - protein, 122 aa, Gossypium hirsutum
  Clone ID: LIB3146-021-Q1-K1-B11.pep
HVFHECTGFSREATMVSVSYSGTLYGCCGTRTRIYFDAAFDSKTFSSATGLVGWDLRGNLMVLKTVIYRNVPSPFAVEAYACPEGAKLGSSLSIQSVCLMGDSKTVIKNVKQLQMTSQLSEP

SEQ ID NO: 80004 - protein, 55 aa, Gossypium hirsutum
  Clone ID: GOSHI-09MAY01-C50199_1.pep
AQANTSRNFEEFFYCMIPGYTSPSKKRKKLSSPSPSIYCFKLRFCVKKRIAKLIR

SEQ ID NO: 80005 - protein, 124 aa, Gossypium hirsutum
  Clone ID: GOSHI-09MAY01-C50099_1.pep
PRVRHPQQQEEEEEEEEEEEEERVRPRVRKMENGGNHGKDMLLDHLGDDIVAASATMEQHEEAPSAEEMQERMDQFTYIMQQKFLSGEDYEYLDYSKIDDDETLDDHWLREANHDAEEKYFAED

SEQ ID NO: 80006 - protein, 99 aa, Gossypium hirsutum
  Clone ID: GOSHI-09MAY01-C50329_1.pep
SKPSPTLTSLAQLVFLVYETSPYLNLAQLVFLVYETSPYLITISNYVDHLMPLHDLSQTTKFLSLINIMMCVGFHFLYNIAPSVHKTSCIQEQLSRCSH

SEQ ID NO: 80007 - protein, 247 aa, Gossypium hirsutum
  unsure (1)..(247): unsure at all Xaa locations
  Clone ID: GOSHI-09MAY01-C50259_1.pep
ALYFDDKLVDGHDHQGPLATTSSVVRGLTVFAAVTDERLNIPSNKILGLANFFLGIGVPGDAKDLFNQIDSLACLESNRVSIPLILSLPSTVLSVTKEDSLQVNVNTVLGSNAPPLTVKLVGVFTSGSKAASLVESQELLFDDGTGMYNLNNLPKSIDVGSYTFVFEIVLHEPEHEKIYVTGGHKKVPIFVSGLIKIENAEIAVLDSDLGSIETQKKLDLAXKNAVSLSANHLQKLRVSFKLTTPHG

SEQ ID NO: 80008 - protein, 120 aa, Gossypium hirsutum
  Clone ID: GOSHI-09MAY01-C50229_1.pep
SHHFRDCRHFPRDSNLEPVGGSIDLTRYSGYDELKQDLARRFGIEGQLEDRGRVGWKLVYVDHENDVLLVGDDPWEEFINCVRCIKILSPQEVQQMSVDGEFGNSVLPNQACSSSGNGNA

SEQ ID NO: 80009 - protein, 164 aa, Gossypium hirsutum
  Clone ID: GOSHI-09MAY01-C51999_1.pep
SQITFFLLLPCIQYASIVAVLCVRILSQRNLLQRLKLWLYSRKERGKINEKQKIQCFFFLFFFAVVACLSPCRCGCAGARVQVVREGCTEVRRGSYGGVLEARAAVFLAARGLPWFSNLGPLGLIGYWATRFGLEGLFWACNRTLTKWTFFGLVMYFYSFWFCV

SEQ ID NO: 80010 - protein, 62 aa, Gossypium hirsutum
  Clone ID: LIB3146-037-P1-K1-H4.pep
EEKVTKKQKIQCRSLLVLFADGAWLTSCQSGCACARVPVGRESPTEVLKGSYRGYGCSVPCC

SEQ ID NO: 80011 - protein, 91 aa, Gossypium hirsutum
  Clone ID: GOSHI-09MAY01-C51929_1.pep
SKFKPKLLNYFSRKKLNPSSSFFGAAATAHVAAPVSTHVQQTPPPTMHVLHQKRRAVDIFASLRPNRSWKGGVWLENRGEGGAVLVVAADA

SEQ ID NO: 80012 - protein, 194 aa, Gossypium hirsutum
  unsure (1)..(194): unsure at all Xaa locations
  Clone ID: GOSHI-09MAY01-C51809_1.pep
MKEQKSESGGGFVRADQIDLKSLDEQLQRHLSRAWTMEKNKNRKEEGEDGGGGGERLRSPSNTGRRQEWEIDPSKLIIKSVIARGTFGTVHRGMYDGQDVAVKLLDWGEEGHRSEAEIASLRAAFTQEVAVWHKLNHPNVTKFIGATMGSSDLNIQTENGQIGMPIWCVIVEXYCPGGALKSYLIKNRRRKLAF

SEQ ID NO: 80013 - protein, 82 aa, Gossypium hirsutum
  Clone ID: LIB3825-012-Q1-K6-B4.pep
PLLGADISSFGFLGQIPRNFSLSDLTADFSQSSDILESYPRSPFLAPDNETFLDSREREHQGDNKRLDTISEGLSYDDFRSE

SEQ ID NO: 80014 - protein, 122 aa, Gossypium hirsutum
  Clone ID: LIB3146-030-Q1-K1-G5.pep
QGMNGKMIKPEAGYSGGAPYMFGAESNVLEARPTIGDTSFSTVESSTQPLNEPLLDADISSFGFLDQIPRNFSLSDLTADFSQSSGLFLSVGLCGDMHVHHTTYTYCLHASMCLCIDILVVS

SEQ ID NO: 80015 - protein, 143 aa, Gossypium hirsutum
  unsure (1)..(143): unsure at all Xaa locations
  Clone ID: GOSHI-09MAY01-C51589_1.pep
VRNLTVEERRRWVXKNPKPAPPPKQKWRFMQKYYHKGAFFQTDADDPAATAGAQNIYHRDFSAPTGDDKMDKTILPKVMQVKHFGRSGRTKWTHLVNEDTTDWNNPWTYNDPLRAKYNAKMAAVNVPIAKPKGSKKLKDWEMK

SEQ ID NO: 80016 - protein, 142 aa, Gossypium hirsutum
  unsure (1)..(142): unsure at all Xaa locations
  Clone ID: GOSHI-09MAY01-C51499_1.pep
QSLAVGHAEVEGLSRITTVVPGADESISKLVQQLYKLVDMHEVRDLTQLPFAERELMLIKIAVNAAARRDVLDIANIFRAKAVDVSDXTVTLELPGDLDKMVALQRLLEPYGICEVARTGRLALVRESGVDSRYLRGYSLPL

SEQ ID NO: 80017 - protein, 220 aa, Gossypium hirsutum
  Clone ID: GOSHI-09MAY01-C51459_1.pep
SDPSVVHYFSSALGEDFEHTGRIYQKYCEKMRELSLVIFELLAISLGIDRLHYRKFFEDGNSIMRCNYYPPCNNSGLTLGTGPHSDPTSLTILHQDQVGGLEVFINNKWYAVRPRQDAFVINIGDTFMALCNGRYKSCLHRAVVNKERERRSLVYFVCPKEDKIVRPPQDLMCRSGGPRVYPDFTCSDLLDFTQNHYRADVATLQSFFPWLLSSNPTSNF

SEQ ID NO: 80018 - protein, 136 aa, Gossypium hirsutum
  unsure (1)..(136): unsure at all Xaa locations
  Clone ID: GOSHI-09MAY01-C51439_1.pep
VVAAVPDGLTAWEMLKGRPHNVXDLILAEVDLPSISGFALLTLIMEHELCKSIPVIRMSSQVPVCSLYKCMLRGAADYLVKPVRRNELRNLWQHAWRRQSSIIDGNFPGDESIGRKQVEATSENDAARQTDKGSDT

SEQ ID NO: 80019 - protein, 96 aa, Gossypium hirsutum
  Clone ID: LIB3146-034-Q1-K1-A5.pep
VVKYFNPNWNCLMILCIYSMELRVADGRSWKVEYERRGRSKCRKAVFGGKSWGQFAMDNEFEVGDVCVFELMNENGNLLEVVIHCPNWNCLMILCI

SEQ ID NO: 80020 - protein, 49 aa, Gossypium hirsutum
  Clone ID: LIB3146-034-Q1-K1-F4.pep
HLIVQVKDIVVICVKSTNISHKYCISKLTPASSIRHNNPTPPISNSQFH

SEQ ID NO: 80021 - protein, 61 aa, Gossypium hirsutum
  Clone ID: GOSHI-09MAY01-C51199_1.pep
FLLLEERSAYEKKHYKAIISIVPSNQHKQRLTNRGELKCIANKLTRNIDRTRGRTRGPLAI

SEQ ID NO: 80022 - protein, 166 aa, Gossypium hirsutum
  unsure (1)..(166): unsure at all Xaa locations
  Clone ID: GOSHI-09MAY01-C51159_1.pep
LISVNTQDQLHCIHVPRQIPKAKLIKLLPKRWITNYEKLHEHNQPIQSTKSQITFRRNGTIEIKFDQSHLXNPETPSVFPTMLMMQPVPDPEEGDNPRLLLWTLXEPGPKRKLTESFTADGKPHYMFRDPKTGHCPWALNCTCELCAYDRFDGWIDSMDHNELKSC

SEQ ID NO: 80023 - protein, 301 aa, Gossypium hirsutum
  Clone ID: GOSHI-09MAY01-C51149_1.pep
MPAQKIETGHEDALHDVAMDYYGKRLATASSDTTIKIIGITGSSSQQLAVLHGHKGPVWGVAWAHPKFGSILASCSYDAQVIIWKENNQNEWLQAHVFNDHKSSVNSIAWAPHELGLCLACGSSDGDISVFTARDDGSWDTTRIEQAHPVGVTSVSWAPSTALGAFIGSGLLDPVQKLASGGCDNMVKVWRLYNGSWKMDYSPALQMHTDWVRDVAWAPNLGLPKSTIASASQDGKVIIWTCGKEGEQWKGAILKDFKTPVWRVSWSLTGNLLSVADANNNVTLWKETVDDEWQEVNAIEP

SEQ ID NO: 80024 - protein, 143 aa, Gossypium hirsutum
  unsure (1)..(143): unsure at all Xaa locations
  Clone ID: AI730908.1.pep
PAQKIHTGHEDALHHVAMDYYGQPLATASSDTTIKIIGITGSSSQQLAVLLGHKGPVWGVAWAHPLFGSILASCSYYGQVIISNDNNPYYWLLAHVFNHHXSSVISLAWAPHDLCLCLACGSPYRNISVSTALDDCILDLPTI

SEQ ID NO: 80025 - protein, 104 aa, Gossypium hirsutum
  Clone ID: uC-gsflnu33B059h09b1.pep
TENRDKVMRMHSMMLPWIIMENDRRRGASFLGIKIIDTSVPSLHYLIVLPRPLMDSAWGLYAWAHAKTQQSPPQVLMMPSRFSRRKIIKKSGCRSMFLMIIHHV

SEQ ID NO: 80026 - protein, 181 aa, Gossypium hirsutum
  Clone ID: GOSHI-09MAY01-C51389_1.pep
SSMDRDLTKKFQIPAGSYGMFNIISLALWVIFYDRPILPMASKIKGKPVRIGVKLRMGIGLFLTCIAMVVSAIVENARRKEAIRSGFQNNPTAVVKMSAMWLVPQFCLNGFAEAFTAIGQTEFFYSELPKSMSSIAAALFGLGLAVANVLASVVVSIIDDITSKGGKESWVSSNINKGRID

SEQ ID NO: 80027 - protein, 240 aa, Gossypium hirsutum
  unsure (1)..(240): unsure at all Xaa locations
  Clone ID: GOSHI-09MAY01-C51259_1.pep
ATRPPTRPPTRPVKRLMTDVPFGVLLXGGLDSSLVAPVAARQLADSEVACLWRSQLHTFCIGLKGSPDLKAAKEVPDYIGTRYHEFHFTVQEGIDALEEVIYHIETYDVTTIRASTPMFLMSRKIKSLGVKMVLSREGSDEIFGGYLYFHKAPNKEEFHEETCRKIKALHLYDCLRANKSTSSMGTLKLRVPFLDKEFINIAMSIDPEWKMIRPDLGRIEKWILRNAFDDDKKPYLPKHI

SEQ ID NO: 80028 - protein, 49 aa, Gossypium hirsutum
  unsure (1)..(49): unsure at all Xaa locations
  Clone ID: LIB3146-025-Q1-K2-F1.pep
STSPWGLEARVPFLDKEFINIAMSIDPDWKMIRPDLGMIXKCILLNAFD

SEQ ID NO: 80029 - protein, 177 aa, Gossypium hirsutum
  Clone ID: GOSHI-09MAY01-C51219_1.pep
DWETCISVPDFDWKQIAEPVMKLYTETTDGSAIETKESSLVWNYRDADPDFGFCQAKELLDHLESVLANEPVLVKSGQHIVEVKPQGVNKGLVAEHLLVTMKQKGMLPDFVLCIGDDRSDEDMFEVIMRATAGPYLSPVADVFACTVGQKCSKAKYYVEDRTEILRMFQVLANASEH

SEQ ID NO: 80030 - protein, 160 aa, Gossypium hirsutum
  Clone ID: GOSHI-09MAY01-C52859_1.pep
RDARYKKTEVCQTCSKLKNVCQVCLLDLEYGLPVQVRDTALSINSNDAIPKSDVNREYFAEEHDRRARAGLDYESSYGKVRPNDTILKLQRTIPYYKRNRAHICSFYVRGECTRSAECPYRHEMPEAGELSQQNIKDRYYGVNDPVALKLLNKAGEMPFF

SEQ ID NO: 80031 - protein, 200 aa, Gossypium hirsutum
  unsure (1)..(200): unsure at all Xaa locations
  Clone ID: GOSHI-09MAY01-C52819_1.pep
HYANEINMGFDIEIVSLEALNSCSWSSLPLHFGENETIAVNLPIGSFSNYPSTLPLILRFVKQLSPKIVVSSDRGCDRTDVPFPHHIIHALLSYSGLLESLDAVNMNLDALEKIERFFLQPSIEKIVLGRHRSLERRPPWRSLFIQSGFSPLPFSTFTESQAECLIQPTPIRGFLVEKRXSSLVLCWQRRELIAASAWRC

SEQ ID NO: 80032 - protein, 357 aa, Gossypium hirsutum
  Clone ID: GOSHI-09MAY01-C52839_1.pep
MEDTCKDCRDWEEEIFWTHFQCVHFSQFLHGDFLQRLEIPEKFAKNIKKKLPETVTLKGPSGSIWDVRLTVDDDDTLFFNGGWKTFVKDHSLVANDFLIFKYNGVSHFDVLMFDGKSLCEKASSYFVRKCMHTESDATHQTKRKVNENSDEILHNSSQCGLESGPEKSTNNDMDARPSRKPINSAASKKKIRNSDNGTRSIHAKQSLVGKELPTFPGEVKVERLETEYEHTTMDGDGDVFGLWHTTGKRFVTQFEKTNVLLKAQEALTNEGFMIIMKPTHVGRRFYMAVPTAWVAKYLPKDNADVILRMNKRTWKTRFYYHRSRDCGGLSGGWRNFVNDNNLEEHDVCVFQPANIGK

SEQ ID NO: 80033 - protein, 68 aa, Gossypium hirsutum
  Clone ID: LIB3582-002-P1-K1-C12.pep
PPEEYIHHGEIVRNVRTENGSKRFPLPSPYNPYMYLPFALTKENLMGSPQKSKKMEENKKKNPKVVSY

SEQ ID NO: 80034 - protein, 166 aa, Gossypium hirsutum
  unsure (1)..(166): unsure at all Xaa locations
  Clone ID: GOSHI-09MAY01-C52529_1.pep
SAGKSKNKSSNGIPVKSQVIADPSSSSESEPEENRNNYHKNVKPDSKRKRKEEVDEEEEEAKVCRFPMNRIKRIIKTEDSHXLFLQDVVFLVNKAAELFLEKFCEDGYKCSIKDRKKSLSYKHLSTVVHEQKRYDFLSDYVPQKIKAEDALKVMNLPAPGRARGLG

SEQ ID NO: 80035 - protein, 74 aa, Gossypium hirsutum
  Clone ID: uC-gsflmaxxa096a06b1.pep
LRTNPSYLHQFRFTISKKYVHAVIHVSETLACRRAQRSNPVLPKQVTVQHRCLLPTSSHKPPHDVLVCLKAEQC

SEQ ID NO: 80036 - protein, 106 aa, Gossypium hirsutum
  Clone ID: GOSHI-09MAY01-C52499_1.pep
MAKLVAAFFLALIAISMLQVMVLASHGHGGHHYDQKHYGPGSLKSYQCPSQCSRRCSKTQYHKPCMFFCQKCCNKCLCVPPGYYGNKAVCPCYNNWKTKEGGPKCP

SEQ ID NO: 80037 - protein, 106 aa, Gossypium hirsutum
  unsure (1)..(106): unsure at all Xaa locations
  Clone ID: uC-gsflnu33B062h12b1.pep
MAKLVAASLLAFIGISMLEAMGLASHGHGGHHYDQKHYGPXSLKSYQCPLQCSRRCSKTQYHKPCMFFCQKCCNKCLCVPPGYYGNKADCPCYNNWKTKEGGPKCP

SEQ ID NO: 80038 - protein, 103 aa, Gossypium hirsutum
  Clone ID: LIB3146-047-Q1-K1-G3.pep
QLSQWQNLWLLSSWLSLPSPCFKLWSWHRTDMEVIIMIKNITALEASRVTVSKLQLISHFSFAFLLKISSETLENSNMVKKKKKKERKPSSKKFHKYYSFLNG

SEQ ID NO: 80039 - protein, 59 aa, Gossypium hirsutum
  Clone ID: GOSHI-09MAY01-C52489_1.pep
AFFCRRCGQQRHGRPRVRQVGDASGDECARVTWAATAHRKGGNPRIPWCCLVFGLYWAV

SEQ ID NO: 80040 - protein, 310 aa, Gossypium hirsutum
  Clone ID: GOSHI-09MAY01-C52439_1.pep
GGNARCIAMLQAFQEAIRDYSTPPEKTLTRDLTSKIGGFVSFLIECRPLSMSMGNAIRFLKSRIARLPLTLSESEAKTTLCSDIDRFINEKIVLADKVILRHAATKIRDGDVLLTYGSSCVVEMILLYAHELGKQFRVVVVDSHPMLEGQKLLRRLVVKGLSCTYTQLNAISYVMHKVTRVFLGASSIFSNGTVYSTVGTASVAMVAHAFRVPVLVCCEAYKFHERVQLDSICFNELGDPDAISKVPGRVDVNYLDNLTDKQKENLELLNLKYDATPSDYISVIVTDYGMIPPPSVPVIVRGYRKESLLI

SEQ ID NO: 80041 - protein, 121 aa, Gossypium hirsutum
  Clone ID: uC-gsronu33B103e08b1.pep
IKKTPRQENPNTNVLLQIFTSPNTQIHKPLARIAQIQKEFQQSSTKSFWNMPEQCQGVGSHERFPRTASFKHTSPRSSVRMIRISMVATCVGKDLAVDRMSSAFDGAICMSAASQVKPDEW

SEQ ID NO: 80042 - protein, 103 aa, Gossypium hirsutum
  Clone ID: LIB3146-048-Q1-K1-A11.pep
RTRPPTRSEKLFPCFTRLYPRGQPLTSSNLVANSTDNGQILPMDAKTFGNLDHPYGGAGRGTRKRSRARKPLVRPNPLALFWHVPEASGAWLLEFLLNLGYTS

SEQ ID NO: 80043 - protein, 245 aa, Gossypium hirsutum
  Clone ID: GOSHI-09MAY01-C52139_1.pep
MELNISNGASELVEANGNGSVRKASKKSKKAKKSTGDSGKKTKKNNNAKYTAADKENNVMVPAESASSNIEKNGEGDSITFTESVISNLQLQFEKVAEEVGLNSDVASACDLPKVNGTVSKKRKRGKHMDGKKSQNGEETNQGEDEIDATAKSCENSTKRVRFSMKNSIVWKPHSPLPPLSLRIPPSVIPRGSALKKGLPPGPIREMPLMTKKVKKAKSVKKVRKVVKGMHPLVKRSKKLKSKSP

SEQ ID NO: 80044 - protein, 105 aa, Gossypium hirsutum
  Clone ID: GOSHI-09MAY01-C52309_1.pep
MHSFGHRLNGLLTFSVTILAIMCAIASLSDNLNTPSPTAEIKIMNINWFQKQPQGNDEVSLTMNISADLQSLFTWNTKQLFIFVAAEYETPKNSLNQVSLWDAII

SEQ ID NO: 80045 - protein, 257 aa, Gossypium hirsutum
  Clone ID: GOSHI-09MAY01-C52289_1.pep
MAACGTIKHIFENPLPENPTLLESLSSSSSWKPGIKPLDQKPSFTEFFGELHFQENLSISHSSSTTSSFPTLKVSRSIGVYSHGNGENSSNCHKKSDSFSLNPESLQLCTEELGFESSYGVEEVNNEMNQDWESKKTKAPSPTTKHSTMENQNGEMKRSRASSGGGFPPPISCIGKSGKPWFCFKSYRQDGRFVLKQVRIPTQEFLHACREDGRLKLQFVQPNDEQVLEDEDFEDDDDLEDEMINGDIDEEDSEQVS

SEQ ID NO: 80046 - protein, 117 aa, Gossypium hirsutum
  Clone ID: GOSHI-09MAY01-C52219_1.pep
MAAKILANLIVMGSGIFARAVVQAYRQALANAANSGVTHETLQNAARRAGKVMTEQEAKQILGVSEDTAWEEIMKKYDVLFEKNAKVGSFYLQSKVHRAKECLEAIYRAKGEGTPPS

SEQ ID NO: 80047 - protein, 164 aa, Gossypium hirsutum
  Clone ID: GOSHI-09MAY01-C53889_1.pep
MASETEAPEISSLFERLLRHRDLYFFLPFILGVSNNSVSRENSENPDQETSQETTSQRERIILVNPFTQGMVVVEGDPNLEALLRGWANKDGQPPASKASIEAMPSVKIGESEDGECVVCLEEWKPGEVVKEMPCKHKFHDECIQKWLGIHGSCPVCRYKMPVD

SEQ ID NO: 80048 - protein, 128 aa, Gossypium hirsutum
  Clone ID: GOSHI-09MAY01-C53469_1.pep
LRPTSSLSSALNMLVQARVSSMPIVDDNDSLLDIYSRSDITALAKGRAHTHNLNEMTVYQALQLGQDSNSPYEPRTQRFQMCLHTDTLLKVMEQLANPGVRRLVIVEAGSNRVEGIISLSDVFRFLLG

SEQ ID NO: 80049 - protein, 92 aa, Gossypium hirsutum
  Clone ID: LIB3149-026-Q1-K1-C8.pep
RSDITALAKGRAYTHNLNEMTIYQALQLGQDSNTPYEMRSQRCQMCLRTDTLLKVMEQLANPGVRRLVIVEAGSNRVEGVVSLTDVFRFLLG

SEQ ID NO: 80050 - protein, 173 aa, Gossypium hirsutum
  Clone ID: GOSHI-09MAY01-C53429_1.pep
MAEDDVVAKDRKILVAVDEGEESTNALSWCLKNVISHTSKDTLVLLYAKPPRAVYTSLDGTGYLFSSDILATMDKYSNDVADCVIEKAKRVCREQGDPEVKVEVIIESGDPRDVICQVADKINADVLVMGSHGYGLIKRAFLGSVSNHCAQNVKCPVLIVKKPTCSSSASGTK

SEQ ID NO: 80051 - protein, 80 aa, Gossypium hirsutum
  Clone ID: GOSHI-09MAY01-C53699_1.pep
TGEMTLRGLVLPVGGIKDKILAAHRHGIKRVILPERNLKDLVEVPASVLSNLEILLAKRMEDVLEQAFDGGSPWRQHSKL

SEQ ID NO: 80052 - protein, 133 aa, Gossypium hirsutum
  Clone ID: GOSHI-09MAY01-C53089_1.pep
EASLDHYNYLIQVETKDFYRKLWNLQLLTKILILIWRISWNYIPSLVNIRYKRVTTNVRCPRYCSAEEDSFHVFRQCPGYSAEVQRSRSEYFFVPYGLSLRPLDPNKERWSYGSLYSLMQLLISTTLDQRQEW

SEQ ID NO: 80053 - protein, 105 aa, Gossypium hirsutum
  Clone ID: LIB3585-041-P1-K1-A12.pep
VFFCALWVISTAVRSEQREVELRESIQFDAAFDINNSRSASGMVARGQNGEITVSKSTLHSNVSSPFVAEALACLEATKLGLVGETREEHRISDRDGHKILIEGS

SEQ ID NO: 80054 - protein, 104 aa, Gossypium hirsutum
  Clone ID: GOSHI-09MAY01-C53399_1.pep
ELMDSFRHFPCTLFIILCEFSSKSFLHHLPNHVDHGKLAVPGLVLDSTTVLIEDINSKPKIFVRIYILTEYILIYLSCYLSSICINLSIYDSFGIIYIDVNYMY

SEQ ID NO: 80055 - protein, 165 aa, Gossypium hirsutum
  Clone ID: GOSHI-09MAY01-C53299_1.pep
LYLLYRFRDLVSLLRTSIVFEGGLQLVLRLTWSFISTQEKIGQLALRRQVLALTDTAASRIRHLLQQRQRSSLRLGAKARGCNGLSYTLSGADEKGKFDELGEDKGVKILIDPKALMHVIGTKMDFVDDKLRSEFIVIIPNSRGHCGCGESFMTTVGCTANHGGN

SEQ ID NO: 80056 - protein, 90 aa, Gossypium hirsutum
  Clone ID: GOSHI-09MAY01-C48959_1.pep
ELRTVRRFTFPNKHVFTVCYCKWNLQNSLSNVRLKGSTRGIHQSIQIEMWHFLSQLSNLALEEEVILQPKYSSRDTTQITKRKDRRNKET

SEQ ID NO: 80057 - protein, 153 aa, Gossypium hirsutum
  unsure (1)..(153): unsure at all Xaa locations
  Clone ID: GOSHI-09MAY01-C48559_1.pep
TLSAGLLPYSIVVSKLATVPGQLICEIVMRNNCFLVMEFGRGTAGIQFSKESINLYNLNSYKHSGLANKKTVTVQPGGKDQSVLLATTKTKKQNKPASVLHKSGMRKEFPRLANAVVNQVVDNHYRPDLKXPALPRLSACHRSLKVAKFRGHE

SEQ ID NO: 80058 - protein, 198 aa, Gossypium hirsutum
  unsure (1)..(198): unsure at all Xaa locations
  Clone ID: GOSHI-09MAY01-C48699_1.pep
WIPGNGGGPVTTIGKRQSDLKKSFKLPARPLLTXCPTQEFSKAFPKFSSVEQEHLHQLSIQVITSLHGNIEDEFESLCNETQVGDALDTVEQLVEEQSLDPLSSDRTTVMDAVHNLSAAKKAEIHYLRGLLERAEEHNRLIQARVDLLRNKTQEVPDIKDVIGKLRGGILKFQGNTKCGALNGLQLVGLAKCISDCSD

SEQ ID NO: 80059 - protein, 107 aa, Gossypium hirsutum
  unsure (1)..(107): unsure at all Xaa locations
  Clone ID: GOSHI-09MAY01-C48159_1.pep
SCRNGVCNFTEGAMGSLPQLRXPPKAIEAAKQAGKVPDVFYCLKLLEATGISTGPGXSGFGQKEGVFHLRTTILPAEEDMPEIMSSFKKFNDEFMAQYEDNWNRSRM

SEQ ID NO: 80060 - protein, 169 aa, Gossypium hirsutum
  Clone ID: GOSHI-09MAY01-C48119_1.pep
PRVRPRVRGFMGGEIALFLIEEFSVPVDCITFLVLLFNFAVIGVWAGFMSKMPIIVTQGYLVLIGMLVAYWFTLLPEWTTWVLLVAMALYDLAAVLLPVGPLRLLVELAMSRDEDFPALVYEARPVTHHDSALRPVQTLILRERLNARLDSEDSSSFNSDLNSTINYCS

SEQ ID NO: 80061 - protein, 201 aa, Gossypium hirsutum
  unsure (1)..(201): unsure at all Xaa locations
  Clone ID: GOSHI-09MAY01-C48099_1.pep
MDFSHQNPNSNPNYTFFPENVNPMPDFEVSDYLDLDGSIFDDDTSSEKGMAAATELSGATSKNSNRKCKNGVGKNKSELGVRVAFRMKSEMEVTDDGYKWRKYGKKSIKNSPNXRNYINXSSVGCNVKKRIXRDVKEQSYVVTTYEXGVHNHETPSMVYYNQMSIMALMLGPFKALSLLLYMKENYSYNIHIIYNPRIYIC

SEQ ID NO: 80062 - protein, 124 aa, Gossypium hirsutum
  Clone ID: GOSHI-09MAY01-C48069_1.pep
PTQPNSRPSPSQIKAAYRRKGWESHPDLFPVHEKRSAESKFKLIAEAYTCLQSGSGREGSYSATYSRVVRTGVPKAHGGRRNRGLIQIPFLLIVLGTVGLGGLNATRAYRKQKEACPSHNPFLP

SEQ ID NO: 80063 - protein, 168 aa, Gossypium hirsutum
  Clone ID: GOSHI-09MAY01-C48019_1.pep
MASDQDQFTLVSRAINQEGKLPRKYTDEGQGAKRKVSPPLEWYNVPEGTRSMALVVEDVYAPDPSGPIVPWTCWVAINIPPTLKGLPEGFSGKEEEVGGDYASIKEGNNDHKVPGWRGPKLPSHGHRFLFRLFALDDELNVGNKVTKEKVLEAIEGHVVGEAELTTKF

SEQ ID NO: 80064 - protein, 162 aa, Gossypium hirsutum
  Clone ID: GOSHI-09MAY01-C48369_1.pep
LVASSQRERWSFDSEHFGSGDGKISGCSSRFSYSPSIGMRTCGACSKLLAERSSCSCNEISVVAVLVCGHVYHTECLETMTPEADRYDPACPICMGGEKQVSKISRKALKAELELMAKHLKLFKNRVKDSFAESDCNDFNHQQNAKREGKAPKLEPQSSRRS

SEQ ID NO: 80065 - protein, 73 aa, Gossypium hirsutum
  Clone ID: GOSHI-09MAY01-C48329_1.pep
WNNLNSLQVVGVVGFMDRRLELPEGLDPQIESIISDCWQSNPENRPSFEDIINRMTGIVQKSAIGLGRRHSEP

SEQ ID NO: 80066 - protein, 65 aa, Gossypium hirsutum
  Clone ID: GOSHI-09MAY01-C49989_1.pep
MFAAENGLKGDPRLQAISDAIRVVPHFPKPGIMFQDITTLLLDHKAFKDTVDIFVDRYRDMDISV

SEQ ID NO: 80067 - protein, 151 aa, Gossypium hirsutum
  Clone ID: GOSHI-09MAY01-C49929_1.pep
LSFGLAKLGSDKAGGHVSTRVLGTQGYVAPEYALTGHLTTKSDVYSYGVVLLELLTGRVPVDAKRPHGEGVLVSWALPQLTDREKVVQIMDPTLEGQYSMKEVIQVAAIAAMCVQPEADYRPLMADVVQSLVPLVKTHRSTANVGGCSTFQ

SEQ ID NO: 80068 - protein, 187 aa, Gossypium hirsutum
  Clone ID: LIB3828-028-Q6-K6-D5.pep
LFVTAVLLVISRIGYFIPLPGFDRRLIPQDYLSFASGSVDDLGDFSAELKLSFFQLGISPQIIASIIMQVLCHVVPSLVKLRKEGLDGHEKIKSYIWWISLGFAIVEAVIVACYSLQYSIYAASYRVKHVMVTAFLLVCGAMTMTWICDTISESGFGQGSSLIICVGILTGYTDTLYKMLTQLSGSA

SEQ ID NO: 80069 - protein, 93 aa, Gossypium hirsutum
  Clone ID: LIB3135-058-Q1-K1-H8.pep
FMQFDSPLGEGKGRRVEELLKRCPNLKKIIIFRVISKAKPHKECQMVDFTWLCNSRSCYSCLLFSSVFNLCSQLQVLWAKHVMVTSFFWFVVQ

SEQ ID NO: 80070 - protein, 78 aa, Gossypium hirsutum
  Clone ID: GOSHI-09MAY01-C49019_1.pep
MDHNKEQDKEFHAMLMAPKMPEAVTPIIAADGDNVRRPRGRPAGSKNKPNPPIIVTRESGNAIRAHAMEVSSGCADAW

SEQ ID NO: 80071 - protein, 84 aa, Gossypium hirsutum
  Clone ID: GOSHI-09MAY01-C49309_1.pep
LLFAFFFSCFAFVSVFSLPFLCCFFWSFLQVSGVNGEDCYVGVNGGWAGLGTRRGRCARGGATQRRGNPRVPCACLVFRPPWAV

SEQ ID NO: 80072 - protein, 131 aa, Gossypium hirsutum
  Clone ID: GOSHI-09MAY01-C49239_1.pep
MFRDVSSCNTYNYGDALYWDSRYIQEAGGAFDWYQRYSSLRPFVRRYVPTSSRVLMVGCGNALMSEDMAKDGYEDIMNIDISSVAFDMMGRKYEFVPQLKYMQMDVRDMSFFPDESFDSVMDKGTLDSLMC

SEQ ID NO: 80073 - protein, 120 aa, Gossypium hirsutum
  Clone ID: GOSHI-09MAY01-C44959_1.pep
MASNGTTEKKAGKYASFFSGTQDKCGVCKKTAYPLEKVTMEGEIYHKNCFRCSHGGCVLTTSSFAALDGILYCKIHFAQLFKEKGSYAHVTKATAMKKTSSEAKTEDDPTPGAEAEAEAE

SEQ ID NO: 80074 - protein, 118 aa, Gossypium hirsutum
  Clone ID: GOSHI-09MAY01-C44549_1.pep
MEIAIIALILAVLLGAFILVPRHGKSAHKNKVKSTVANSKASKSYSKTEVMLHNKRTDCWIIIKDKVYDVTSYVEEHPGGDAILAHAGDDSTEGFYGPQHATRTFDMIDDFYIGDLQK

SEQ ID NO: 80075 - protein, 68 aa, Gossypium hirsutum
  Clone ID: LIB3148-028-Q1-K1-B2.pep
ITFEDLRCRSHRSCQTSELRVCGLFFQWTTNLPIYLFFKQRQNVTKFQIQKLTSKFPGLQTSLQSTKI

SEQ ID NO: 80076 - protein, 117 aa, Gossypium hirsutum
  Clone ID: GOSHI-09MAY01-C44539_1.pep
LFAAFHFTPSSFLSFAFSDEKKSNKMSLWQHIRSRHEEKGVIYAVLFTCCCCFCCYATLEGILENGIRFVPFLYANVLISTLIITCSCSRGIRSPHLNYCQIMQVLSTNNLCSLGCC

SEQ ID NO: 80077 - protein, 128 aa, Gossypium hirsutum
  Clone ID: GOSHI-09MAY01-C44469_1.pep
VKIYFVSPDIVKMKDDIKDYRTSRGVEWEESGDLMEVASKCDVVYQTRIQRERPGERIHLYEEARGKYIVDENVLKVMQSHAVVMHPLPRLDEITVDVDAHPRAAYFRQAKNGLYIRMALLKLLLVGW

SEQ ID NO: 80078 - protein, 98 aa, Gossypium hirsutum
  Clone ID: GOSHI-09MAY01-C44709_1.pep
ECRIKNRGLLSVALARLGLCRWHEFCLVFLFHLYFVLSIDLYASGFTCSEVWEKWCLCYSGNQTWWSIWTAKGLLQKGLCWRVGRADKSLFGRTFKRK

SEQ ID NO: 80079 - protein, 67 aa, Gossypium hirsutum
  unsure (1)..(67): unsure at all Xaa locations
  Clone ID: LIB3135-026-Q1-K1-E11.pep
IYYYYLYFFLFFYIFFFWNGELSGEFSVRSAYKLLQEDTLNPTDYVLPXESKEFYRKLWGLQIPPKI

SEQ ID NO: 80080 - protein, 46 aa, Gossypium hirsutum
  Clone ID: LIB3148-055-Q1-K1-C7.pep
WSLVLAYKKFHIVGEEARTDSSHRKCPQLLSMLHLTPHPSFICTAP

SEQ ID NO: 80081 - protein, 66 aa, Gossypium hirsutum
  Clone ID: LIB3148-022-Q1-K1-G12.pep
ENNGAWFLHTRNFILTVKKLEQTRLSESVRNYLASPSNTSSFISMHCTLNKRKGNTKLCILIFFNG

SEQ ID NO: 80082 - protein, 196 aa, Gossypium hirsutum
  Clone ID: GOSHI-09MAY01-C44119_1.pep
PTRPLGLVLCFIRDPSIFGDIKFGPSKIGFLSITWNDWKVGFLKGAVPQIPLSVLNSVIAVCKLSGDLFPNRELSAAKVSVSVGVMNLVGCWFGAMPVCHGAGGLAGQYRFGARSGWSVVYLGIGKLIIGLVFGNSFVRILNQVPIGILGVLLLFAGIELAMASRDMNSKEESFAMLDCAAVSLTGSSAALGFVCG

SEQ ID NO: 80083 - protein, 445 aa, Gossypium hirsutum
  unsure (1)..(445): unsure at all Xaa locations
  Clone ID: GOSHI-09MAY01-C44059_1.pep
HAVRPRRPPTRPGKVVALKKVRXSNLEPESVKFMAREIKILRRLDHPNVVKLEGLVTSRMSCSLYLVFEYMEHDLAGLAASPAIKFTESQVKCYMHQLLSGLEHCHNRHVLHRDIKGSNLLIDNGGVLKIADFGLASFFDPNHKQPMTSRVVTLWYRPPELLLGATDYGVGVDLWSAGCILARLFAGRPIMPGRTEVEQLHKIFKLCGSPSDEYWKKSKLPHATIFKPQQSYKRCXREAFKDFPPSSLPLIDTLLAIDPVERLTATAALNSEFFTTKPYACDPSSLPKYPPCKEMDAKLRDEEARRLRATGRPNAGVKKARPRDRPARAIPAPEANAELQANLDRRRLITHANAKSKSEKFPPPHQDGTLGYPLGSAHPIDPGYDPPDVPFSTSFSYSNKAPIQTWSGPLIDSSAVGAPRRKKHMSGDGHSHSKSCKKDKNSTRI

SEQ ID NO: 80084 - protein, 82 aa, Gossypium hirsutum
  Clone ID: GOSHI-09MAY01-C44049_2.pep
WWCCFPGAEAAPAPKCDNPLEYSSCLNAYKKPPPSAGCCQKMKEQAPCYCEYMKIEDVKRVFDRVEIAKMAKLCGVSYSSTC

SEQ ID NO: 80085 - protein, 98 aa, Gossypium hirsutum
  Clone ID: GOSHI-09MAY01-C44049_1.pep
KNMKRFSLIVLCVVTLVVVLFSGAEAAPAPKCDNPLEYSSCLNAYKKPPPSAGCCQKMKEQAPCYCEYMKIEDVKRVFDRVEIAKMAKLCGVSYSSTC

SEQ ID NO: 80086 - protein, 183 aa, Gossypium hirsutum
  unsure (1)..(183): unsure at all Xaa locations
  Clone ID: GOSHI-09MAY01-C44399_1.pep
RAMSNIESSPEGFNMLRRMYENVQEPFMNATTMXGNNGNSPSSNPFAALLSNLGDSQARSLPNNTSTNGSETTHGHTSPNTNPLPNPWGNTVGGGGAQTNATARSNPAGDARAPGLGGLGGLGLPDVPPMMNGMPDASQLTQLLQNPALSQMMQSIVSNPQYMNQIMNLNPQLRGMFDLNPQL

SEQ ID NO: 80087 - protein, 59 aa, Gossypium hirsutum
  Clone ID: LIB3543-002-Q1-K1-H4.pep
KKIDYILMKNINIFIYIKYFHIKYIYKNIFNIFYCCILPYPCPRVLKIAVCPCPCFIDL

SEQ ID NO: 80088 - protein, 70 aa, Gossypium hirsutum
  Clone ID: LIB3148-024-Q1-K1-F9.pep
WKKVDYILMKNINIFIYIKYFHIKIYIIFLIFFIAILPYPCPHFLKIAMWPCSVSCRTHIMCPCPCFIDI

SEQ ID NO: 80089 - protein, 267 aa, Gossypium hirsutum
  Clone ID: GOSHI-09MAY01-C44329_1.pep
MDPQLTEVSQMFERFKAAFIRKDFDSCANLLSQLKVLLTKFRSLPPLFENTPNSVNEVLLAREIYEHAVVLSVKIEDQDAFERDFFQLKPYYTDAGSRLPPSQQEYLILGLNLLRLLVQNRIAEFHTELELLSATALENPCIKHAVELEQSFMEGAYNRVLSARQNAPHETYVYFMDLLAKTVRDEIAGCSEKAYDYLSINDARQMLLFSSDQELLEYIKEEHPDWEVKNGSVYFQKAKDSAPCKEIPSLQLINQTLSYARELERIV

SEQ ID NO: 80090 - protein, 93 aa, Gossypium hirsutum
  Clone ID: GOSHI-09MAY01-C45919_1.pep
DVKVVNLFTAFQQRENWMTDCFTDGVHLSAEGGKIVVAEILKVLKEAEWKPSLHWKSMPTEFAEDSPYDIVGADGKTTLNPSEWTFHREIQWD

SEQ ID NO: 80091 - protein, 136 aa, Gossypium hirsutum
  unsure (1)..(136): unsure at all Xaa locations
  Clone ID: GOSHI-09MAY01-C45899_1.pep
NSSNIPAGPFETNHRRNEGFIDPRRLYPMGDLHDPGVNPQRPTRSSMSSTVESFSGPRPAQPPQKSADFAVVSTRKYYPRPPPVEPEDCHSDCDSSSSVVDDGDIALSSCRKTLPFDLNFPPXMKMEDLQCTALCL

SEQ ID NO: 80092 - protein, 69 aa, Gossypium hirsutum
  Clone ID: uC-gsronu33B149d08b1.pep
HFLKKKKRSNNRSSSFITGMVIKDIKRSLEIFIFIQGWNTEIQTISYSHSDPTSISPSSATYNDKSQSL

SEQ ID NO: 80093 - protein, 184 aa, Gossypium hirsutum
  unsure (1)..(184): unsure at all Xaa locations
  Clone ID: uC-gsronu33B029d09b1.pep
PRVRFPMTDARHIKAGLSVLAKYKRPLLVHSEIQSLVESHLETKDGGGDPRSYSTYLKTRPPSWEEAAVRELLTVTKDTRSGGPAEGAHLHVVHLSDASSSLDLIKEAKRRGDSITVETCPHYLAFSAEEIPDGDTRFKCAPPIRDAANKEKLWNAXMEGDIDMLSSDHSPTVPELKTLNDGNF

SEQ ID NO: 80094 - protein, 137 aa, Gossypium hirsutum
  Clone ID: LIB3148-040-Q1-K1-H4.pep
HASAATWAVRCPLRREKSTEPYDLMEGDIDMLSSDHSPTVPELKLLNDGNFLKAWGGISSIQFVLPVTWSYGQKYGITLEQLVSWWSERPAKLAGQHSKGAIAIGNHADVVVWEPEVEFDLNEDHPMFVKNPSISAY

SEQ ID NO: 80095 - protein, 135 aa, Gossypium hirsutum
  Clone ID: GOSHI-09MAY01-C45509_2.pep
KSSGQESSSTAPNTGKEKSSGEKDREAMQVDGPPEKKTEPEPSFEILPNPARVVPAQEKFIKFLDGRYVPVKAAPSGFILLKDNCPNEPEELSLTDAPATTSPAGGSAAGQQQSSSLAMAVDDEPQPPQPFEYTS

SEQ ID NO: 80096 - protein, 175 aa, Gossypium hirsutum
  Clone ID: GOSHI-09MAY01-C45509_1.pep
PTTVPTTTSAVKLPTAVLSTSGKAKARAKKEAEHKANAEKSTGAESSAAANTGKGKSSSEKDGEAMQVDSPPEKKSEPEPSFEILTNPARVVPAQEKFIKFLEDSRYVPVKLAPSGFVLLRDLCPNEPEVLSLTDAPTSTASPAGGSTAAAGQQSSSAMAVDDEPQPPQPFEYSS

SEQ ID NO: 80097 - protein, 71 aa, Gossypium hirsutum
  unsure (1)..(71): unsure at all Xaa locations
  Clone ID: LIB3149-055-Q1-K1-A6.pep
TTRXAEQKAXAEKSTGAESSAAANTGKGKSSSEKDGEAMQVDSPPEKKSDPEPSFEIXTNPARVVPARRSS

SEQ ID NO: 80098 - protein, 74 aa, Gossypium hirsutum
  Clone ID: LIB3584-024-P1-K1-F9.pep
KTIFFDDSARNIAGGKAAGLHTVIVGNSALVPGADHALRSIHNIKEAIPEIWDGDEEQMEQVIQAAAVETVVLA

SEQ ID NO: 80099 - protein, 52 aa, Gossypium hirsutum
  Clone ID: LIB3148-039-Q1-K1-C11.pep
WQVGNSTLVPGADHALRSIHNIKEAIPEIWDGDEEQMEQVIQAAAVETVVLA

SEQ ID NO: 80100 - protein, 75 aa, Gossypium hirsutum
  Clone ID: GOSHI-09MAY01-C45429_1.pep
LSNIQCLTSRLRSYTTISMPPRAKIQAKKKGGGRGKRKKKSVNKPRDYFYDQPIWLWGSNIRRYSSPRSLVTQGP

SEQ ID NO: 80101 - protein, 64 aa, Gossypium hirsutum
  Clone ID: LIB3148-043-Q1-K1-H7.pep
LCSIFHFHDLESLEGICLWFRYIKKNEESKQYFSYFFKRVWRASKGYLGPCSECDESDIFNLIL

SEQ ID NO: 80102 - protein, 199 aa, Gossypium hirsutum
  Clone ID: GOSHI-09MAY01-C45789_2.pep
DNVDRGDNLYFIATTTNGKVGNFSTPSPHHPLKAWRSLNQGINTGANRDNREVIFVAHSSRAFRDEESKSFWLEIEIVDKHRYPSGFQAPYNVTTTLLVPAHYQGERRIKQSQIFERPGKYRIKLPTVGVRTTGTVVVEMVDKNGLYFSDDFSLTFHMYYYKLLKWLLVIPMLGMFAVLVIFRPQEAMPLPSFSRNTDL

SEQ ID NO: 80103 - protein, 236 aa, Gossypium hirsutum
  Clone ID: GOSHI-09MAY01-C45789_1.pep
LTIVTTSFDGYLYLIDGPTSCADVVDIGAAAWGMVLADNVDGGDDLDLIVTTMNGNVFCFSTPAPHHPLKAWRSNNQGRNNVANRYNREGVYVTHSSRAFRDEEGKSFWLEIEIVDKHRYPSGFQAPYNVTTTLLVPGNYQGERRITQRQIFERPGKYKIKLPTVAVRTTGTVIVEMVDRNGLYFSDDFSLTFHLYYYKLLKWLLVIPMLGMFGVLVILRPQDAVPLPSFSRNTDL

SEQ ID NO: 80104 - protein, 209 aa, Gossypium hirsutum
  unsure (1)..(209): unsure at all Xaa locations
  Clone ID: GOSHI-09MAY01-C45749_1.pep
VFRRQHLQVEDAQNYHIYYGQTFKVIKNGIDGKSYLLIQSDTRMAGRTKYCTPRIKSFVIPLSNFSVDTTTSFPVSFFELLGVVGSMKGMTSNTVASECVLKMVEGGEISLINASEPQQLAPFVAHFVSNLDLYQACNFANFAATGEDSPLQRAEWIKFLGAFANLEKRANHVYKAVKDNYXCLTKVPEAKEKAFKPIVAWMEYQNVGC

SEQ ID NO: 80105 - protein, 147 aa, Gossypium hirsutum
  unsure (1)..(147): unsure at all Xaa locations
  Clone ID: GOSHI-09MAY01-C45729_1.pep
MVLSMPSLFCLPFMAPIFSSFLALTLIFPLSNAQGPPSPGFSPSSRVSTVAFDKGFRNLWGPQHQKLDQGSLTVWLDKSSGSGFKSLRSYQSGYFGAAMKLQPGYTAGVITSFYLSNNEEHPGNHDEIDXEFLGTTPDKPYTLQTNV

SEQ ID NO: 80106 - protein, 72 aa, Gossypium hirsutum
  Clone ID: LIB3148-044-Q1-K1-A5.pep
TLIFPLTIAKGPPSLESSPSSKVSTVAFDKGFRNLWGPQHQKLDQGSLPVWLDKSSGSGFKSLCSDTSGYFG

SEQ ID NO: 80107 - protein, 132 aa, Gossypium hirsutum
  Clone ID: GOSHI-09MAY01-C46989_1.pep
ANKSVKEIIEELKKHQQSTEASVVEWANEALQGLGKGAPFSLFLTHNYFSRVASGYGKQNNEFTMLKGVMKTEYRVALRSSLRNDFAEGVRAVLIDKDQNPKWNPATLDEVDQKEVEAVFEPLGPGIEELKV

SEQ ID NO: 80108 - protein, 166 aa, Gossypium hirsutum
  Clone ID: GOSHI-09MAY01-C46959_1.pep
GRVGADVWSCGVTLFVMLVGAWRFEDPDEPKDIRRTIQRIINVQYSIPDFVQISPECRHLISRIFVADPTARITIPEIKNHAWFLRNLPADLMDENTMGYHFEEPDQPMQSIDTIMQIIAEATIPAAGAHGLNHLMVDNLDDEDMDDFDSESELDVYSSGEIIYAM

SEQ ID NO: 80109 - protein, 206 aa, Gossypium hirsutum
  unsure (1)..(206): unsure at all Xaa locations
  Clone ID: GOSHI-09MAY01-C46519_1.pep
VSEKNLLCRLGNEGGQVVRNWSGPVSERNGTHQSLPPIKYLHLHECDSFSIGIFCMPPSSVXPVHNHPGMTVLSRLIYGSLHVKSYDWLDPTEPEDPLQARAAKLVKDTEMTAPCATTVLYPTSGGNIHCFRARTPCAIFDILSPPYSSEHGRHCTYFRRSPRRDLPGEIEMNGETFSEVTWLEEFQPPDDFVIRRGLYKGPVIRR

SEQ ID NO: 80110 - protein, 117 aa, Gossypium hirsutum
  unsure (1)..(117): unsure at all Xaa locations
  Clone ID: LIB3493-006-P1-M1-A10.pep
NNCHADLLPAGYFADPVVTELAAFSPNGPVSDEALDRVRTMLXEAQVVRNWSGPVNERNGTHQSLPPIKYLHLHECDSFSIGIFCMPPSSLIPLHNHPGMTVLSRLIYGSLHVKSYD

SEQ ID NO: 80111 - protein, 205 aa, Gossypium hirsutum
  unsure (1)..(205): unsure at all Xaa locations
  Clone ID: GOSHI-09MAY01-C46749_1.pep
PTRPRIMGVLSGLIAVGKWFEQICNWRNPLTTILIHILFIILVLYPELILPTIFLYLFLIGIWNYRWRPRHPPHMDTRLSHADAAHPDELDEEFDTFPTSRPSDIGRMRGDRFRSIAGRVQTVIGDLATQGERFQSLLSWRDPRATTLFVTFCLIAALVLYVTPFQVVXLLAGIYILRHPRFRHKLPSTPLNFFRKLPARSDSML

SEQ ID NO: 80112 - protein, 73 aa, Gossypium hirsutum
  Clone ID: GOSHI-09MAY01-C46649_1.pep
LMMMAGAVQNFRVQVFRAKIGASNGSSLSLFRKLGFKETSYSEIFKEVTLELAVTEQKQEELLQLLGSVVTHA

SEQ ID NO: 80113 - protein, 187 aa, Gossypium hirsutum
  Clone ID: GOSHI-09MAY01-C46669_1.pep
GRVGLTDTISAVIPTDKEQTNTSVDHNGVWGSLAAASHIDQNPETAKQKHVAAEASSKEMQAKQGASTTSTRSRTKVQMQGIAVGRAVDLTVLKGYDDLINEVEKMFDIKGELRPSGKWSVVFTDDEGDMMLVGDDPWMDFCKMVRKIFIYSSEEVKKISPRCKFAVSSLEGEGTAVTIDSEHKSET

SEQ ID NO: 80114 - protein, 79 aa, Gossypium hirsutum
  Clone ID: GOSHI-09MAY01-C46189_2.pep
MGVEKKIMVLWICSLVISSMVMEEGANATPISYPGLGKNLQVPCKLGGGNCLPPPSNGYDRGCSHLKRCRSHYTTPIFH

SEQ ID NO: 80115 - protein, 88 aa, Gossypium hirsutum
  Clone ID: GOSHI-09MAY01-C46189_1.pep
PRVRYFLEENRNGEEIMVLWICAMVISSMVMEEGANATPISYPGLGKNRQVPCKIGGGNCLPPPSNDYDRGCSPQKRCRSHHTMPIFH

SEQ ID NO: 80116 - protein, 94 aa, Gossypium hirsutum
  Clone ID: LIB3828-013-Q1-K6-E2.pep
IAEEIIEFWICSMLICSMVVEDGAYATPISYPGLVKKPSRSMQNWKAEISLPPPSNDTDRGCSPQKTCDKSSFNAHLPLTTTRKCTSLTNLYMI

SEQ ID NO: 80117 - protein, 81 aa, Gossypium hirsutum
  Clone ID: uC-gsflmaxxa098e02b1.pep
IKMGVEKRIMVLWICAMVISSMVMEEGANATTISYPGLEKNRQVPCKIGGGNCLPPPSNDYDRGCSPLKRCRSHHTMPIRH

SEQ ID NO: 80118 - protein, 101 aa, Gossypium hirsutum
  Clone ID: GOSHI-09MAY01-C46139_1.pep
PRVRAVVEEIGVPATSLSDPLFIGISRRVLNVRPAIFFFIKCSLESKEIHQLYSKAQDGYESTQLYTVSMIEVEHMTLKMPGCHQGGFALYKLMVEALKKN

SEQ ID NO: 80119 - protein, 210 aa, Gossypium hirsutum
  Clone ID: GOSHI-09MAY01-C46299_2.pep
PTRSERFQAKQQDASDNWNDALQNAKAHPFDDHTTKSRKRKSRDDQGATNHSELKKAEMENVVATEEGQASKKPKLNPTGEKRNPFSKEIFEGSNQKLKGSRHNPKDRKGGAKPAVGSSDKVETNVNETSKLKLKEVKAISHPKERTRQEKAKPEEGETNLKRKRPKRNKDPSSRDVVDKLDMLIEQYRSKFSQPKSGTPDAEKQGSKKL

SEQ ID NO: 80120 - protein, 124 aa, Gossypium hirsutum
  Clone ID: GOSHI-09MAY01-C46299_1.pep
KDQGISPRIVKVAQNLLLVVPTRLKQILIGSTLRPETSKLKLKEVKAVSHPKERTRQEKAKPEERETNLKRTRPKRNKDPSGRDVGDKLDMLIEQYRSKFSQPRSGTPDAEKQGSKKLRRWFQA

SEQ ID NO: 80121 - protein, 225 aa, Gossypium hirsutum
  Clone ID: GOSHI-09MAY01-C47969_1.pep
MEGASYQRFPRVKIRELKDEYAKFELHDTDASMANALRRVMIAEVPTIAIDLVEIEVNSSVLNDEFIAHRLGLIPLTSQRAMSMRFSRDCDACDGDGQCEFCSVEFHLRAKCISDQTLDVTSKDLYSSDHTVVPVDFTDSAGYESSEQRGIIIVKLRRGQELRLRAIARKGIGKDHAKWSPAATVTFMYEPEIHINEDMMDTLTLEEKAKLVDSSPTRVFDIDPN

SEQ ID NO: 80122 - protein, 117 aa, Gossypium hirsutum
  Clone ID: GOSHI-09MAY01-C47519_1.pep
GYHDQDVFNIILFDPLISDMGLKIKFLDTAYFGGLCEPSKDLNLVCTMHANCCYGMDSKLHDLKIMLQDWRAFTSLPPDLKNESVISWRVPQNCSLHSLRHFDSPSPEINVEREEEN

SEQ ID NO: 80123 - protein, 130 aa, Gossypium hirsutum
  Clone ID: GOSHI-09MAY01-C47789_1.pep
MAQTISYITGSQLLPLKRLPNIAIIDVRDDERSYDGHIAGSLHYASGTFTDKISNLIQDVKGKDTLVFHCALSQVRGPTWARRLAYHLEELKEDTGIKNILVLERGFNGWEASGRPVCRCTDIPCKGESA

SEQ ID NO: 80124 - protein, 61 aa, Gossypium hirsutum
  Clone ID: LIB3135-036-Q1-K1-H3.pep
MCESRFVAQTCARRLAYHLEELKEDTVIKNILVLERGFNGWEASRRPVCRCTDIPCKGESA

SEQ ID NO: 80125 - protein, 198 aa, Gossypium hirsutum
  Clone ID: GOSHI-09MAY01-C47769_1.pep
MRSWNSSVVLFFFSLPFLLPLSALASSIHDQHERIGHRVLMSFKEISKEPNNTFDCSPSGPCVPCLYSEKSDQKYRCSETGYRIPFKCVETDDGSKAENKQKTEKGRSNLEISVINEDLRQRRSLLDDSSTSESGSRAYITYRSCIPAVNEEKLSVLGFEGIIFGLLLISGSVVFLRRKRAITMPGVSAGRIQPNSRF

SEQ ID NO: 80126 - protein, 168 aa, Gossypium hirsutum
  Clone ID: GOSHI-09MAY01-C47189_1.pep
RKRKPGSGPYVVIDNRTKGSASTQETSSDDGDSDTEEPSGAEDADASNKDELKTVKSDTVQDPENSVPAANEQLERTIDEGAQACSTLFIANLGPNCTEYELKQVLSKYPGFNMLKIRAKGGMPVAFADFEQVEQATKVMTDLQSSLLPSSDRGGMHIEYARSKMRKP

SEQ ID NO: 80127 - protein, 96 aa, Gossypium hirsutum
  Clone ID: GOSHI-09MAY01-C47129_1.pep
AKQAGAEGGFTATGTGAYKAAGTHSYSTTGERGQSTGAHQMSALPGHGSGQPAGQVVEGTAAAHPIGSNPGVGGAKSHNTRGEGNPHGYGTGGTYS

SEQ ID NO: 80128 - protein, 227 aa, Gossypium hirsutum
  Clone ID: GOSHI-09MAY01-C47049_1.pep
IRRKQSRVSDDNPSAGFDCNICLDTVQDPVVTLCGHLYCWPCIYKWLHCQSISTESHDQRQPQCPVCKAEVSASTIVPLYGRGRMSMASRGKAPQLGIVIPKRPVGPDFGTPRSPNSATSPQFTHQIHHHHHGYSYQPQVSDYPSSPMLSPGGTMMNVPDPVTRIFGEMVYARVFGESITNLYAYPNSYNLTGSTPRIRRHLKQADKALNRISFFLFCCLIICLLSF

SEQ ID NO: 80129 - protein, 281 aa, Gossypium hirsutum
  unsure (1)..(281): unsure at all Xaa locations
  Clone ID: GOSHI-09MAY01-C47229_1.pep
MKIYPAFLSFLFISIFISPSVSDHCNAQDKKVLLKIKKALGNPYLLASWDPNTVGSASARPAGHPNTHRVVSLTLFSDDRLTGQIPPEVGDLPYLETLLFRHLPNLNGTIQPAIAKLKNLKTLRLSWTNLSGPVPNFLSQLKNLTYLDLSFNNLSGSIPSSLSTLPNLEALHLDRNKLTGTIPESFGMFPSKNLYLFILSHNKLSGTIPASLANMDFNTIDLSRNLLKXPSVLFGPKKTTFEIDLSGNMFNSIXKVQFPRSLAGLDLNLTRIREVFCGERN

SEQ ID NO: 80130 - protein, 175 aa, Gossypium hirsutum
  unsure (1)..(175): unsure at all Xaa locations
  Clone ID: LIB3585-037-P1-K1-F10.pep
MYPAFLTVLFISIFISPSVLDHCDAQDXKALLKIKKALSNPYLLASWDPNTDCCDWYCLECHPNTHRVDHLTLLCDDRFTGHIPPEVGDLSYLETLXFRHLPYLNGTIQPPIAKLKNLKTLCLSWTNLFGPVPNFLWQLXNLAYLDLSIDNLLGSIXRFLSTLPNLEALILDRTS

SEQ ID NO: 80131 - protein, 46 aa, Gossypium hirsutum
  Clone ID: GOSHI-09MAY01-C40989_1.pep
GPACSKLIGTQREEFIRLANTYSYKLKSKAMKYLAAFSFKKIDNKL

SEQ ID NO: 80132 - protein, 164 aa, Gossypium hirsutum
  Clone ID: uC-gsronu33B160b04b1.pep
DCGKQVYLGGFDTAYAAARAYDRAAIKFRGVDADINFSLCDYEDDMKQTKDLSKEEFVHVLRRQSTGFSRGSSKYRGVTLHKCGRWEARMGQFLGKRYIYLGLFDSEVEAARAYDKAAIKSNGREAVTNFELSTYEGEMVFDTRNKGNGHNLDLNLGISPPVSD

SEQ ID NO: 80133 - protein, 148 aa, Gossypium hirsutum
  unsure (1)..(148): unsure at all Xaa locations
  Clone ID: LIB3147-036-Q1-K1-B5.pep
APTRPTTRPPTRTHKCGRWEARMGQFLGKRAYDKAAIKSNGREAVTNFELSTYEGEMVFDTRNKGNGHNLDLNLXISPPVSDGPKEKENAGHLQMNNGKSLRAENPAAATFSVPSFQGLAGTSDQPIFWNSAYPRFFPSEERTMVKPV

SEQ ID NO: 80134 - protein, 235 aa, Gossypium hirsutum
  Clone ID: GOSHI-09MAY01-C40909_1.pep
APTRPVSFLQKITGQTIQLPTTATVIVPAPAPPPPPSPTQPTVSVVPPEVPIAPPSHQTPSLPQQKQQEQQQTHISHHQPPPPQQQPQVVQQQQQLHHMELVRHQQQPITTEIVMAIPEQQVPPQETGGSGSLAEPASSRWPKAEVLALINLRSGLESRYQEAGPKGPLWEEISAGMSRLGYKRSAKRCKEKWENINKYFKKVKESNKKRPEDAKTCPYFHQLDALYRKKILGGA

SEQ ID NO: 80135 - protein, 88 aa, Gossypium hirsutum
  Clone ID: LIB3585-011-P1-K1-F2.pep
SSSESSKDIFFCSASPDSDRNDPFLQIQKSSLVIDDGGFHLRRYFFDPIGRASQIVLSSFKGVRHFICFSREHHLLQPNLGNPFLPQI

SEQ ID NO: 80136 - protein, 94 aa, Gossypium hirsutum
  Clone ID: LIB3147-035-Q1-K1-G2.pep
GLCYIPNQKIKFYITSFWNLLIPSKIKIHLWRVANNFLPTLSILKLRRLRNDAACLVCSIGEETMEHLFRDCKFIKQILQEVGLAISHINANHT

SEQ ID NO: 80137 - protein, 87 aa, Gossypium hirsutum
  Clone ID: GOSHI-09MAY01-C40869_1.pep
CLLFSAYQKGSFNVHLCLPQTLEAIKRICPKRALLIGMTHEFDHHKDNEFLMEWSEREGIHIQLARDGLRVPFHLFPEASQMQVLRR

SEQ ID NO: 80138 - protein, 136 aa, Gossypium hirsutum
  Clone ID: GOSHI-09MAY01-C40539_1.pep
MSKTEQPVLGVPYYAGPRMDGYQQGRIPANAIYGDPKGIPIQQTMYRDTPAPFNCPYCGNSGLTLVRSKPSLAAVVGCMMPFMLGICFLCPSMDCLWHKYHYCPTCNEKIADFEKSDPCLVVDLPQWMQKSFALPA

SEQ ID NO: 80139 - protein, 78 aa, Gossypium hirsutum
  Clone ID: AI055491.1.pep
MSKTEQPVLGVPYYAGPRMDGYQQGRIPANAIYGDPKGIPIQQTMYRDTPAPFNCPYCGNSGLTLVRYFLFLFHSLII

SEQ ID NO: 80140 - protein, 100 aa, Gossypium hirsutum
  Clone ID: GOSHI-09MAY01-C40499_1.pep
HLLGRAFGQQKGYCKMTYVGESVGEIKYLFRMIGGYREKERMDSKIVPFKRTHHRRFCKFLWQKMNMMIFKSGEENILANFQSKVPTSYYNRLIWILMLI

SEQ ID NO: 80141 - protein, 184 aa, Gossypium hirsutum
  Clone ID: GOSHI-09MAY01-C40459_1.pep
PLVRASQISESHLLHKLDIFKIQGKDKRGHKILRITGKSFPARFLSVDVLKEYLDEYIFPRLSKKPFSVLYMHTGVQRTDNFPGISALRSIYDAIPVTVKDNLQSVYFLHPGLQSRLFLATFGPPFFGDGLYGKLRYLSRVDYLWEHIRRNEIEVPDFVYDHDEDMEYRPMMMEYGWDMMILTL

SEQ ID NO: 80142 - protein, 75 aa, Gossypium hirsutum
  Clone ID: GOSHI-09MAY01-C40739_2.pep
MYLQFYINENGDKVYTTKKESPHGLPTQSAHPARFSGGDKYFFKRVLLKKRFGLLPTQQSPLIILIHFMSCMRDF

SEQ ID NO: 80143 - protein, 63 aa, Gossypium hirsutum
  Clone ID: LIB3147-033-Q1-K1-F2.pep
YLQFYINDNGDKVYTTKKESPLGMPTQSAHPARFSPDDKYSRQRVLLKKRFGLLPTQQPPQKY

SEQ ID NO: 80144 - protein, 61 aa, Gossypium hirsutum
  Clone ID: LIB3147-036-Q1-K1-E4.pep
IIIVIIKGLRYEPKRNFVAHTQTRSMLYQSSACLNCKRFEIVSSMCCMSDCVRVAPGSPRR

SEQ ID NO: 80145 - protein, 145 aa, Gossypium hirsutum
  Clone ID: GOSHI-09MAY01-C40189_1.pep
LFAMGRIAQGTKVLAEGGYEKIFRQTFETVPEEQLQNSFACYLSTSAGPVMGVLYVSTAKLAYGSDRPLSYQNGSKTEWSYYKVVIPLHQLKAINPSTSRVNPSEKYIQVSSVDSHEFWFMGFLNYEGAVQCLQEALQQHSLQSV

SEQ ID NO: 80146 - protein, 329 aa, Gossypium hirsutum
  Clone ID: GOSHI-09MAY01-C40099_2.pep
KVSPDYERNPRPNFLEVKENRSVVYGDGIPSARSDGKFGGPKLQPSPSEASERPKLKLLPRTKPLDNLEPPVVDAKQEQQQLSESVLTHAGIGNDSYGYVNTVKPGSAGSENGNQAVERPKLNLKPRSQPVEQLEGNIEKERNVLFGGARPRELVLKERGIDDSIHEPDQHPDRVVKHNVPRSEKVAEQAAPRPSERVGNPPVDQRAGRKSERNHGVYNERVDTQRRNRPNENWRNDKEIERQQRQERQPSPETWRKPAEQPKPVSPEAAGVRYGKAASALELAQAFSKSFSDQKTDDRYAGQRGLPGRPQMPFSRLMGSTPRPQINGY

SEQ ID NO: 80147 - protein, 126 aa, Gossypium hirsutum
  Clone ID: AI055716.1.pep
VQSVWSEQSAVSKLAHASAMEKISSGRWQSKQSIQYQKDVDVSKHSETETGLHSQGYDVIAVAGREHSDVISARQVERGVNVEHGINCGRKVSPDYERNPRPNFLEVKENRSVVYGDGNSSARSAG

SEQ ID NO: 80148 - protein, 86 aa, Gossypium hirsutum
  Clone ID: LIB3135-024-Q1-K1-G5.pep
RTPAASGETGLGCSAGLRQVSGDGCLSCRCCLSISLSFRQFSLGGTNVRVQPRALVHRCEYLTFSLSSLMGSRNAKSFTNTRVSNS

SEQ ID NO: 80149 - protein, 131 aa, Gossypium hirsutum
  Clone ID: LIB3146-055-Q1-K1-D3.pep
MVMRRVVKRNVPRSEKVAEQAAPHPSERVGNPPVDQRAGRKSERNHGVYNERVDTQRRNRPNENRRNDKEIERQQRQERQPSPETWRKPAEQPKPVSPEAAGVRYGKAASAFELAQAFSKSFSDQKTDDRY

SEQ ID NO: 80150 - protein, 224 aa, Gossypium hirsutum
  unsure (1)..(224): unsure at all Xaa locations
  Clone ID: GOSHI-09MAY01-C40359_1.pep
NERRAIGKCPLTPEEVGLVLRAMGFDNSTRIYLAAGELFGGDRFMKPFRDLFPRLENHSSVDSSEELVANTRGLLGSAVDYMVCLLSDIFMPTYDGPSNFANNLLGHRLYYGFRTTIRPDRKGLAPIFIDRENGQTAGFEQAVRRVMLKTNFGGPHKRVPPESFYTNSWPEXCFCQISPSNPADKCPPDNVLEILESQLENEVNRDLETLMETIQHVERKYENF

SEQ ID NO: 80151 - protein, 192 aa, Gossypium hirsutum
  Clone ID: GOSHI-09MAY01-C40379_1.pep
RKKSRATVELDFFGMEKANSCKSQFQKFLDRRRSFRGIQGAISKMNPELIKSVIASGSTNRNPVDWRKSFSVPSSPKEDRSTSLPSLPLLNPALRSTPSEDSPETAPLTIFYNGTVSVINVPRDKAESIFKLAVEGSSKNIESVDSSKAANPSSDQQNLLEARNGDLPIARRKSLQRFLEKRKERLTSPYAW

SEQ ID NO: 80152 - protein, 102 aa, Gossypium hirsutum
  Clone ID: LIB3147-027-Q1-K1-D8.pep
HVLFRSIPSEESPETAPLTIFYNGTVSVIQCTSRQGGSIFKLAVEGSSKNIESVDSSKAANPSSDQQNLLEARNGDLPIARRKSLQRFLEKRKERLTSPYAW

SEQ ID NO: 80153 - protein, 190 aa, Gossypium hirsutum
  Clone ID: GOSHI-09MAY01-C40319_2.pep
PTRPDEVQTREVFDDDGWFHRGDIGLWLPGGRLRIIDRKKNIFKLAQGEYIAPEKIENVYAKCKFVSQCFVYGDSFNSSLVAVVAVEPDVLRDWAASEGIQYEDLRQLCNDPRARNAVLAEMDDVGREAQLRGFEFAKAVTLVPEQFTLENGLLTPTFKIKRSQAKEYFAKAIANMYAELSTSEPAPSKL

SEQ ID NO: 80154 - protein, 137 aa, Gossypium hirsutum
  unsure (1)..(137): unsure at all Xaa locations
  Clone ID: LIB3582-031-P1-K1-C5.pep
SLCFTSRLQGLLQKNLWLLDLPSKIKITVWNISWNFLATRVNMLLKRLMNTIACPRCGSGTENMDHLFCEYPEYFHRARHHSVGFFVVHYGLLLTNGESHLTGLLRSISTPHPTVDKINQLWEYWPEXERXQFRTRG

SEQ ID NO: 80155 - protein, 86 aa, Gossypium hirsutum
  Clone ID: LIB3825-004-Q1-N6-H6.pep
LRQLCNDPRARNAVLAEMDDVGREAQLRGFEFAKAVTLVPEQFTLENGLLTPTFKIKRSQAKEYFAKAIANMYVELSTSEPAPSKL

SEQ ID NO: 80156 - protein, 129 aa, Gossypium hirsutum
  Clone ID: GOSHI-09MAY01-C40219_1.pep
SLGLMTSVLLSSDGKTLEAEAAHGTVTRHFRLHQKGQETSTNSIASIFAWTRGLEHRAKLDKNEMLLDFVQKLEAACIETVEAGKMTKDLAILTHGPKVTREFYLNTEEFIDAVAVNLDLKLQEPALCK

SEQ ID NO: 80157 - protein, 97 aa, Gossypium hirsutum
  Clone ID: GOSHI-09MAY01-C41979_2.pep
VTTRNQLQADVSLVKENEALRTELLKMKMYISDMQKNNQTGTSSKSVGTRKPTFFSSMSKTLGKLNPFRHGSKDTSHIDDNLGVDVTKPRRRRFSIS

SEQ ID NO: 80158 - protein, 214 aa, Gossypium hirsutum
  Clone ID: GOSHI-09MAY01-C41979_1.pep
HASAKTVDAYLAEIATAVELAISKFNGIANLVPKGARKVEDDLYRAIDVYLKSHPNLDEIEREKVASAMDPLKLSYEARVHASQNKRLPVQIVLHALYYDQLKLRSGGADDRNQPDAVTTRNQLQADVSLVKENEALRTELLKMKMYISDMQKNNQTGTSSKSVGTRKPTFFSSMSKTLGKLNPFRHGSKDTSHIDDNLGVDVTKPRRRRFSIS

SEQ ID NO: 80159 - protein, 155 aa, Gossypium hirsutum
  Clone ID: GOSHI-09MAY01-C41889_1.pep
PTRPAGSGPTSTEGRAETNAGARGHGSNRQESHQARKQSTLETRAIAWDEAERAKYMARYKREEVKIQAWENHEKRKAEVEMKKIEVKAERLKARAKERCAYKVAAARRIADEKRANAESKLNEKAIRTSQRADYIRRTGHFPSSFFFKLPSLCW

SEQ ID NO: 80160 - protein, 95 aa, Gossypium hirsutum
  Clone ID: GOSHI-09MAY01-C41849_1.pep
WPSREWLQRVVNTVMKRFRWGFVLAGFIALAMAAISWNLESSQSYWIWHSVWHVAIYSSSFFFLCSKVITINSGNRTPTDANYQLTQQDSLSQGA

SEQ ID NO: 80161 - protein, 205 aa, Gossypium hirsutum
  Clone ID: GOSHI-09MAY01-C41589_1.pep
FTYEPANPDDIFAVFEDVAFGEANEREIEPFTAYSPASHASKVLMVSPEMNMMKKDSIMKHSNALFDQNDEIEEDESGWETVSHLEDQGSSYSPKRSAASVTRNHRDSNFSGSGTEWEENACGDTPITEISEVCSLPARQSKKASSITRLWRSCPNNGENYKTISVEGANGRLSNGRKSNGGIVSPDRGSGKGGLSPSLGQWSSP

SEQ ID NO: 80162 - protein, 158 aa, Gossypium hirsutum
  Clone ID: GOSHI-09MAY01-C41549_1.pep
MKMAISLVLSRLILFLTLTCFAAVSSSTTTSTTLKRHSGFLYSRTRGKCTPQFWSSRREAWPRMVPQGSTVSNVFGSRASERYRSDMTLLESRAVNEEGNVFNELLKQASAALLNSYARKGFPYSAWEVKTLMIQGLVSEHAAARLTRRFFVANDACI

SEQ ID NO: 80163 - protein, 122 aa, Gossypium hirsutum
  Clone ID: GOSHI-09MAY01-C41519_1.pep
FEVTRSHLIKKDWWRLLYSFSFSKSKSIPVFPKKGFDNEDYKSFHTDLWLLKIPEKIKIHVWRLFNNLVPHYSNLARRTLCGGKSVSTMHDLTWRILSTYCGLREALQDIWVMLHVRLPPSS

SEQ ID NO: 80164 - protein, 119 aa, Gossypium hirsutum
  Clone ID: LIB3582-011-P1-K1-G9.pep
CFMPSSIRWRLVYSFSFSKSKSIPVFPKKGFDNEDYKSFYTDLWLLNIPEKIKIHVWRLFNNLVPHYSNLARRTLCGGKSVSTMHDLTWRILSTHRALVRYCRIYGLCCTFDFLRRLIH

SEQ ID NO: 80165 - protein, 203 aa, Gossypium hirsutum
  Clone ID: GOSHI-09MAY01-C41479_1.pep
MLGICCGHHGFRGCFEVTQFDHSLLQVDGGFNQNLNSKTLSAPNLSTMDFPALTVSDGQSGPPKYTGDDLQHSASTYRSADRDNLLMFKTSSSLPSRGAIDFASAVRKMASQDSGMWKYDRNGSADSTVGSSRSSNGSANSYSAAPGRGVYANRLQTRGSARSAPVWLETGDAVGNLYSELREEARDHARLRNAYFEQARQAF

SEQ ID NO: 80166 - protein, 142 aa, Gossypium hirsutum
  Clone ID: GOSHI-09MAY01-C41419_1.pep
QMSNAALVTIAQNCPNFTRFRLCLLDPKIADYRTLQPLDVGFGAIVEHCKDLRRLSLSGLLTDRVFEYIGMHAKKLEMLSVAFAGESDLALHHVLSGCESLRILDIINCPFGDKALLANAAKLETMRSLWMSSCSVSLGACK

SEQ ID NO: 80167 - protein, 190 aa, Gossypium hirsutum
  unsure (1)..(190): unsure at all Xaa locations
  Clone ID: GOSHI-09MAY01-C41769_1.pep
PRIDKTGTDLIGDPIIIDDLLNSXRRHXASRGKLYDAVVSTLGHQLLNLKVKVDKXALEQSIRLENHLKDGAERAANILHQVDVDPFGSGSHEYIRYESSVEETLTTLNAMSPEEAAAHVYTRMGYSCEGRIGSRIRRYMDPTELMGFAARGLLMNCRSKEKYSDTSDIRPLKTWKQYLEANMLKQWNTC

SEQ ID NO: 80168 - protein, 146 aa, Gossypium hirsutum
  unsure (1)..(146): unsure at all Xaa locations
  Clone ID: GOSHI-09MAY01-C41699_1.pep
MEMQGGKMEKDFVLQWGNRKRLRCFNKLKKQHQHQFGNSGGGTSTTPHSLPLPNKKMGSSPVANRLKMNSDLGTNKSRSALTSPEKEDRYYATRGSGSIVVEDNNTQVFDGSPPGXVDYGSVWPRLFTTLSNKEKEQDFMAMKGCK

SEQ ID NO: 80169 - protein, 104 aa, Gossypium hirsutum
  Clone ID: uC-gsflmaxxa027e07b1.pep
SSNQTISIPYILRRLATGEEPIFLLDKGKECGVVEVPPPLSPNWCWCCFLSLLKHLSLFLFPHCNTKSFSIFPPCISIHFLLPKICQPMYRFSKSIYDLSTPKL

SEQ ID NO: 80170 - protein, 151 aa, Gossypium hirsutum
  unsure (1)..(151): unsure at all Xaa locations
  Clone ID: GOSHI-09MAY01-C41659_1.pep
MPNAAPWAGYTTSGPAATGVMTGSASLKKSNSGPLNRHGGPAKKSSGPQSGGVTTSGRQNSGPIPPVLPATGLITSGPISSGPLNSSGAPRXLSGPLDSMGSMKVKSSVVXSQAVNVLSQDDDFSFKRNFPMLIFWGTDMVFGMGIIGGGF

SEQ ID NO: 80171 - protein, 147 aa, Gossypium hirsutum
  unsure (1)..(147): unsure at all Xaa locations
  Clone ID: LIB3584-041-P1-K1-E11.pep
KRLRHPNVLXFMGVVVSSQRLCIVTEFLPRGSLFQLLQRNTTKLGWRRRVSMALDIASIKXRGMNYLHNCNPPIIHRDLKSSNLLVDKNWTVKVGDFGLSRLKHKTYLTTKSVKGTPQWMAPEVLRSEPSDEKYSDVYSSGVILWEL

SEQ ID NO: 80172 - protein, 132 aa, Gossypium hirsutum
  unsure (1)..(132): unsure at all Xaa locations
  Clone ID: LIB3147-043-Q1-K1-H11.pep
VTEFLQRGSLFRLLQRNAAKLERKRRVHMALDIARGMNYLHHCNPTIVHRDLKSSNLLVDKNWTVKVGDFGLSRLKHATFLTTKTGKGTPQWMAPEVLRNEPSDEKSDIYSFGVILWELATGKIPXENLNSM

SEQ ID NO: 80173 - protein, 175 aa, Gossypium hirsutum
  unsure (1)..(175): unsure at all Xaa locations
  Clone ID: GOSHI-09MAY01-C41109_1.pep
PVMSLYIEAFVGSSINQESGLVWHHGDAHPDPGACRAKELLDHLESVLANEPAVVHRGQHIVEVKPQGVSKXLVAEKVLSRMVNGGKPPDFVMCVGDDKSDEDMFQSILTSVSNPSLPVAPEIFACTXVGRKPSKARYYLDDTADVLKLLKGLATATISKPRCLPEIKVSFESNA

SEQ ID NO: 80174 - protein, 88 aa, Gossypium hirsutum
  Clone ID: LIB3149-048-Q1-K1-C1.pep
TSYVGFMKDGAEWLVKHTDIKLIGIDYLSVAAFDDLIPSHIVFLEDRDIILVEGLKLDNVQPGIYSVHCLPLRLLGAEGSPTRCILIK

SEQ ID NO: 80175 - protein, 45 aa, Gossypium hirsutum
  Clone ID: LIB3585-014-P1-K1-D10.pep
ISILKLPSRIPNSVKFQLINPLFALFQSNTTRNVTRPLPLSKQHA

SEQ ID NO: 80176 - protein, 60 aa, Gossypium hirsutum
  Clone ID: LIB3147-037-Q1-K2-D10.pep
YESLFYVKGIFVQVRGIRGNGRVTLRVVFDCNKANNGFMSYNLTLVGILKGSFSIEIWLQ

SEQ ID NO: 80177 - protein, 145 aa, Gossypium hirsutum
  Clone ID: GOSHI-09MAY01-C41019_1.pep
YNYHGDFPWALEHFPECERGLKAHSLFMTSVAHELFLSAKDSQVWRIATSMENHKSEIENWDLGAGIYISFYVLRSSFQDDNNTMAELGSLDSKNAACRDFLGCLNESSAVWGGRLHVDARVAYSKMADEVCNLLLSDTSGSRTH

SEQ ID NO: 80178 - protein, 154 aa, Gossypium hirsutum
  unsure (1)..(154): unsure at all Xaa locations
  Clone ID: GOSHI-09MAY01-C41009_5.pep
LFLSDTLPYNPRPFMVTNLHLFMLFLTRAXSSASAQVNITCSDNNSSVPFASLVAVNDPLRTGPEPDSELIGNVQGIALLAGTNASSSQYIDFGSNTGKFNGRSLSVFSRGEPGLAAVGGRGRFAMATGTALFNPILINATNVIIEFNVTVIHY

SEQ ID NO: 80179 - protein, 174 aa, Gossypium hirsutum
  Clone ID: GOSHI-09MAY01-C41009_2.pep
MRGTLMLSWILIICLSQVAVQSQYYSETRPYHPKPPKVTNLHFFMHEHTGVTAVVLTQANITSNNSSVPFATLVAVNDPLRTGPEPDSEVIGNVQGISLLAGSNASSTQYIEFGFNTGKFNGSSLSVFSRGEPGLAVVGGRGRFMMATGTALFNPILINATNVIMEFNFTVVHY

SEQ ID NO: 80180 - protein, 183 aa, Gossypium hirsutum
  unsure (1)..(183): unsure at all Xaa locations
  Clone ID: GOSHI-09MAY01-C41009_1.pep
MRGTLMLTWILIICLSQAAARSPPPFRSETRPHIPRPIKVTNLHFFMHENLGGTNASAVIVAQSNITSNDNNSSVPFGTLFAVDDPLRIGPEPDSEVIGNAQGLSLLAGTNPRTSTTYFDFXGFTTGKYNGSSISMFSRTDLELAGAAXRGRLRMATGFALLNPYLINATTVIIEFDVTLFHH

SEQ ID NO: 80181 - protein, 161 aa, Gossypium hirsutum
  Clone ID: uC-gsronu33B098e07b1.pep
MRGTLMLTWILIICLSQVAVKSQYYSKTRPYHPRPVKVTNLHVFMHKTAGITAVQVAQANITSNDNNSSVPFASLVAFNDPLRTGPEPDSKVIGNVQGIALLSRMNASSTQYIDFGFNTGRFNGSSISVFSRGEPELQLFEEEETSFVIRVCFFYPFHSFP

SEQ ID NO: 80182 - protein, 122 aa, Gossypium hirsutum
  Clone ID: uC-gsflnu33B060g02b1.pep
TAPARTSFFDPPTLPLTRPRVRGHVLFLEKRTSTRIDLRGEQKEGFFLSRSNASSTHYIEFGFNTGKFNGSSLSVFSRGEPGLAVVGGRGPFMMAKGTALFNPILINATNVIMESNFTVAHY

SEQ ID NO: 80183 - protein, 99 aa, Gossypium hirsutum
  Clone ID: LIB3272-037-P1-K1-H6.pep
MLSWVLIICLSLVAVQSQYYWETLPYRPRPGKVTNLHFFMHEFTGITAVQVAQVNITSSDNNSSVPFACLVAVNDPLRTGPEPDSELIGNVQGIALLAG

SEQ ID NO: 80184 - protein, 147 aa, Gossypium hirsutum
  Clone ID: GOSHI-09MAY01-C41039_1.pep
PTRPGATPGLTRPMQEVQLGKNVKLLGCPGVVMLKSSGNDASIALRNCKRIEKLDDPVAPVKEILKLCPERLLVTIYKIPGFESVDEFLQNVATGRGKLKKGGIVDVEAAARIILHDWNEGKIPYYTMPPGRNQEEPSEARIVTELG

SEQ ID NO: 80185 - protein, 183 aa, Gossypium hirsutum
  Clone ID: GOSHI-09MAY01-C41029_1.pep
MGDSKLILCCFIACILFLGVNGENPYRYITWKVTYGDIYPLGVKQQGILINGQFPGPHIDAVTNDNLIISVYNYLNEPFLISWNGVQQRRNSWQDGVSGTNCPIRPGKNFTYVLQVKDQIGSFYYFPSLLFHKAAGGYGAIRIWSRPKIPVPFPSPAGDFTVLAGDLYKTNHYVLRRLLDSGH

SEQ ID NO: 80186 - protein, 135 aa, Gossypium hirsutum
  unsure (1)..(135): unsure at all Xaa locations
  Clone ID: LIB3147-037-Q1-K2-F10.pep
PRVRGEKLFLKQQGXXRXGLKGGPGIKTXTKDNXXIXXDNXPXEPXRXXRNXXQQRRNPRQXGXXGTNXPXRPGKNXTYVLQVKDQIGSFYYFPSLLFHKAAGRYGAIRIWSRPKIPVPFPNPGGDFTVLAGDWY

SEQ ID NO: 80187 - protein, 65 aa, Gossypium hirsutum
  Clone ID: LIB3196-004-P1-M1-C8.pep
MGDSKLILCCFIACILFLGVNGENPYRYITWKVTYGDIYPLGVKQQERCAAKEELMAGWSFWHKL

SEQ ID NO: 80188 - protein, 339 aa, Gossypium hirsutum
  Clone ID: GOSHI-09MAY01-C41209_1.pep
MELMRIFSYASIILSISVYLLPIMVNSIGINYGQIADNLPSPENVVPLVKSIGVTKVKLYDADPRVLGAFANSGVEFMIGLGNGDLEKMRDPNNAQDWVKQNVHAHLPDTKITCIFVGNEVLTFNDTNLSDNLVPAMQSVHTALVNLGLDKQVTVTTAHSLGILQTSFPPSAGAFREDLVDILSQTLSFHQKTGSPFLINAYPFFAYKGNPKQVSLDFVLFQPNQGVIDPATNLHYDNMLYAQIDAVYSALASLGYKKLPVHISETGWPSKGDEDEAGATPDNAKKYNGNLIKLMSQNAGTPLRPDSDLNIYVFALFNENMKPGPTSERNYGLFKPDGT

SEQ ID NO: 80189 - protein, 125 aa, Gossypium hirsutum
  Clone ID: GOSHI-09MAY01-C42859_1.pep
EILFWCNHPHVPACASFVEILAPVFSRDTWRCVWHMIQNDLVHGWGLDFALRKCVEPAHEKIGVVDSQWIVHQSVPSLGNQGESLDGKAPWKGVRERCKKEWSIFQTRFSRAEKAYLKEINSTSR

SEQ ID NO: 80190 - protein, 259 aa, Gossypium hirsutum
  Clone ID: GOSHI-09MAY01-C42869_1.pep
ENSPGKIYGSKEDDEDALKSLSEIHLAENQSKDSLATMIVKFLGKLSDQESSKIRNQLLSNFIPDDGCPCGTNLFMETPAQTYESGSADNQSPEKVEPPLFTVDDDTIKGQTGAETYLAPETQNLLSVHELLDALSETAHQVGRQSVSAPPDMPYSEMAGNCEALLVGKQQKMSAVMSAQQNREGLVSISTKEGQPRSHAGSGFLKAENPFLDDNIGAVSLNQPAGANLMLCANEHQHQPCFQLPASIPYDNFLKAAGC

SEQ ID NO: 80191 - protein, 105 aa, Gossypium hirsutum
  Clone ID: LIB3828-016-Q1-N6-C9.pep
YSEMAGNCEALLVGKQQKMSAVMSAQQNREGLVSISTKEGQPRSHAGSGFLKAENPFLDDNIGAVSLNQPAGANLMLCANEHQHQPCFQLPASIPYDNFLKAAGC

SEQ ID NO: 80192 - protein, 69 aa, Gossypium hirsutum
  Clone ID: GOSHI-09MAY01-C42589_1.pep
WFLFVTGIPLLLMGSGASAGVGGYALPKVAQLTVTSYYAASSASHYGISLLTRHIEDAYATPSQQERLR

SEQ ID NO: 80193 - protein, 143 aa, Gossypium hirsutum
  Clone ID: GOSHI-09MAY01-C42549_1.pep
SRGFRHSKGPVNNIVIVRLPYPLGRAESKSQPSSRKHELSLPPPLEKYANSSDEDMDNKAIVMLPDTIDLPSYLSSQLINDHIKQLQQQGSSAVAEMEAKRLKVDCQRSKEMFQQLRKVYDNLQEFCVNELLDEQTMEGSKGN

SEQ ID NO: 80194 - protein, 26 aa, Gossypium hirsutum
  Clone ID: LIB3135-041-Q1-K1-E11.pep
MTYLMYNNFILIFFFLILIFLLFFCS

SEQ ID NO: 80195 - protein, 29 aa, Gossypium hirsutum
  unsure (1)..(29): unsure at all Xaa locations
  Clone ID: LIB3147-058-Q1-K1-G9.pep
TLVHPSKFICITGYLVFFXXXSSEFNLYL

SEQ ID NO: 80196 - protein, 53 aa, Gossypium hirsutum
  Clone ID: GOSHI-09MAY01-C42429_1.pep
LSCISFSFSFFFPFLIYSHIHFLKRKTYFFISFCYTINLICWTLKFFIKLFKT

SEQ ID NO: 80197 - protein, 176 aa, Gossypium hirsutum
  Clone ID: GOSHI-09MAY01-C42749_1.pep
MAVQPLTFLFLLLLTASVLESSTSFEPNIRLPTTATIVPRSDIDDDLYCASWQLAVETSNAGSWAAIPSRCVPFVRDYMTGQRYASDCEVVANYSLAYASTVKIASDGKDAWVFDVDETLLTNLPYYRDHGFGSEIFNESCWDEWVAEAKAPAIPSRLKLYNGLKQMRFKIFVLTG

SEQ ID NO: 80198 - protein, 87 aa, Gossypium hirsutum
  unsure (1)..(87): unsure at all Xaa locations
  Clone ID: GOSHI-09MAY01-C42719_1.pep
MKRVVLKRVEPPRPVTTVRYVECQKNHAAAAGGHIVDGCREFIPSGAEGTDAAFTCAACGCHRNFHRRXLKVNLVGHCSSAPSSNGA

SEQ ID NO: 80199 - protein, 42 aa, Gossypium hirsutum
  Clone ID: LIB3148-001-P1-K1-H11.pep
IYYFYAPLEDGAEEQWPTRSPFHPSMEIPMAATSSTSKGCIG

SEQ ID NO: 80200 - protein, 115 aa, Gossypium hirsutum
  Clone ID: GOSHI-09MAY01-C42689_1.pep
MAQVAAALSLSFLIFSFIPGGTLMMVNGQKSWCVAKPSSDQATLLANINFACSQVDCRVMQKGCPCFSPDNLMNHASIAMNLYYQAKGRNKWNCDFRGSGLIVITNPSYADCIYD

SEQ ID NO: 80201 - protein, 56 aa, Gossypium hirsutum
  Clone ID: LIB3148-001-P1-K1-B10.pep
SIKTVSEVEPRRSNRKIQPTSRLLEGLQSSLIISKIPSVSHDRSHKSQNRSSRGEP

SEQ ID NO: 80202 - protein, 147 aa, Gossypium hirsutum
  Clone ID: GOSHI-09MAY01-C42189_1.pep
RSPPIVHRDLKSPNLLVDKKYTVKVCDFGLSRLKANTFLSSKSAAGTPEWMAPEVLRDEPSNEKSDIYSFGVILWELATLQQPWGNLNPPQVVAAVGFKGQRLEIPHDLNPQVAAIIEDCWANEPWKRPSFSNIMDRVKPLIKPSTP

SEQ ID NO: 80203 - protein, 189 aa, Gossypium hirsutum
  Clone ID: LIB3582-058-P1-K1-B2.pep
MASDLSSDRSVFRGVSSSSPIRRRDLVFIVNPRGANGRTGKEWKKLLPYLQSRLGSDCNICESLTSGPSHAIDITREAIREGADAVIAVGGDGTLHEVVNGFFWDGKPVANWNTEAVHSTALGLIPLGTGSDFARTLGWKNDPREAIDRIARGVRSQIDVGVISREGEGSHYFINVADIQSDAKAGYYA

SEQ ID NO: 80204 - protein, 135 aa, Gossypium hirsutum
  Clone ID: LIB3147-052-Q1-K1-F10.pep
MVSYYNHLLTPVGGVRFLSAKPSVLTAETNNPMASDLSSDRSVFCGDSSSSPIHRRDLVFIINPGGANGRTGKEWKKLLPYLQSCLGSDCNICESLTSSPHAIDITREAIREGERVCSAWDGYASFSALITKLCT

SEQ ID NO: 80205 - protein, 164 aa, Gossypium hirsutum
  Clone ID: GOSHI-09MAY01-C42179_1.pep
PRVREEAMNWLLSHMDDPGRDAPISHGSQSAEISIDQSKVDTLISFGFQEEIARMALKASGGDIEKATDWIFNNPSASASSAMDTNASSNGPSTPVDAGLPDGGGRYRLFGIVSHIGTSTQCGHYVAHILKDGRWVIFNDDKVGASINTPKDMGYLYFFERINS

SEQ ID NO: 80206 - protein, 71 aa, Gossypium hirsutum
  Clone ID: LIB3493-003-P1-M1-F7.pep
TSCIFHVKVTTFFFWFAAYPGNEHLQQALAAMTKSFRNSKIIVSSPERVKTAQTMSSIFKDESSNKRCHCQ

SEQ ID NO: 80207 - protein, 53 aa, Gossypium hirsutum
  Clone ID: LIB3147-051-Q1-K1-D7.pep
HLTLNILYISCENHYFFSFGLQLIQAMNIFNKHWLLYKSFRNSKIIVSSPERR

SEQ ID NO: 80208 - protein, 115 aa, Gossypium hirsutum
  Clone ID: GOSHI-09MAY01-C42039_1.pep
DDRPNPGHPPSGKVTLCVGVRDSRLTFKLEVGPEWGQGKPVILFNGWIGIGKNMHEGGKPGAEAHLRVQLDPDPRYVFQFEDVTMLSPQIVQLRGSIKQPIFSCEFSRDRLCKTI

SEQ ID NO: 80209 - protein, 64 aa, Gossypium hirsutum
  unsure (1)..(64): unsure at all Xaa locations
  Clone ID: GOSHI-09MAY01-C42309_1.pep
FLSMKLEAVNSRMNPTIEVXALKDYGQQTFDATGMAFGPQATREYSRGASPEWLHIRGGFERTT

SEQ ID NO: 80210 - protein, 126 aa, Gossypium hirsutum
  Clone ID: GOSHI-09MAY01-C42269_1.pep
MNDLKSEDEYRFGRSSNNDGFDSLESMVRIKEAEAILFQSKADEARREVESYMRMIRAKSEKLEEEYAEKLSRLCLQETEERRRNKMEELKVLEHSQCDYYKMKLRMQAEIASLLERMEATKQQWV

SEQ ID NO: 80211 - protein, 232 aa, Gossypium hirsutum
  Clone ID: GOSHI-09MAY01-C42209_1.pep
EVDDTSVGRVGSPLPCSFVRLVDWPEGGYLISDSPMPRGEIVVGGPSVTLGYFKNEEKTKEVYKVDERGMRWFYTGDVGQFHADGCLEIIDRKKDIVKLQHGEYVSLGKVEAALSISPYVDNIMLHADPFHSYCVALVVASQHAVEDWASKQGVAFTDFAELCEKEETIKEVLSSLVQIGKKARLEIFEIPAKIKLLSTPWTPESGLVTAALKIKREAIRKAFSEDLAKLYT

SEQ ID NO: 80212 - protein, 254 aa, Gossypium hirsutum
  Clone ID: GOSHI-09MAY01-C43919_1.pep
PRVRSPLSDEDEHGFNPDDASADAKRKGSPWQRMKWTDSMVRLLIMAVYYIGDEGGSEGNGSDPTAKKKAGGLLQKKGKWKSVSRAMMEKGFYVSPQQCEDKFNDLNKRYKRVNDILGRGTACKVVENQSLLDSMDLSPKMKEEVKKLVNSKHLFFREMCAYHNSCGHVATAGAHQSSVVATEISQTQHQQAQCLHSSENAQIAGRIETEASKLAKVGSEEEDDDEDEDDEDEDDDEDDDDEAVDGHSRGQNGH

SEQ ID NO: 80213 - protein, 79 aa, Gossypium hirsutum
  Clone ID: LIB3148-019-Q1-K1-B11.pep
AHDSQFRLKITTTVSNCTFDLTNLSNLKSSIKKNATHSSTQTANSNKCIFSTYSSPSFQPKPTSTSLSFATTHQPFSWQ

SEQ ID NO: 80214 - protein, 202 aa, Gossypium hirsutum
  Clone ID: GOSHI-09MAY01-C43939_1.pep
EVISAGTDTSTTTVEWAMLNLVMNQDIQEKLYQEIVDCVGKDGDIKEEDIEKMPYLEAVVKETLRRHPPGHFLLSHAAIKDTELGGYTIPAGVHVEFYTAWITENPDIWSDPGEFRPERFLHGDGVGVDVTGTRAVKMVPFGAGRRICPAWNLGILHINLLIGKMVQAFKWVPVPGAPPDLTETYSFTVVMKNPLKAVIMPR

SEQ ID NO: 80215 - protein, 51 aa, Gossypium hirsutum
  Clone ID: LIB3148-019-Q1-K1-D4.pep
LKRPPLFIFFFFFFFFFFFFFFFFFFFFFFFFFFFFFFFFFFEALKIKVID

SEQ ID NO: 80216 - protein, 164 aa, Gossypium hirsutum
  Clone ID: GOSHI-09MAY01-C43819_1.pep
FYLNLLDWGCSNVLAIALGNTGYLWDASNSSTSELVTIDDDNGPVTSVSWAPDGQHIAIGLNNSEVQSWDSASNRQLRTLRGCHRSRVGSMAWNSHVLTTGGMDGMIVNNDVRIRSHVCKTYRGHRQEVCGLKWSASGQQLASGGNDNLVHIWDMSKASSNSPT

SEQ ID NO: 80217 - protein, 60 aa, Gossypium hirsutum
  unsure (1)..(60): unsure at all Xaa locations
  Clone ID: LIB3148-031-Q1-K1-A3.pep
XXCSIHNFQIFFFFLFMKSYICKMLIFKRMRCKIQSPKVFTDSTLSASYFKIHIYRKRGT

SEQ ID NO: 80218 - protein, 47 aa, Gossypium hirsutum
  unsure (1)..(47): unsure at all Xaa locations
  Clone ID: LIB3148-013-Q1-K1-H3.pep
WXIHNFQIFFFFLFMKSYICKMLIFKRMRCKCKFLVVCWLCLKAAAM

SEQ ID NO: 80219 - protein, 197 aa, Gossypium hirsutum
  Clone ID: GOSHI-09MAY01-C43519_1.pep
DAFLEDGSLEATIAVVRSLVVAVPHTTERLRDYLLSKIFQLTNTPVSSTDVMRRRQRANAFCEAIRALDATDLSANSIRDFLLPTIQNLLKDPDALDPAHKEALERILKERSGGTFEALSKVMGAHLGIASSVTSFFGEGGLLGKKEITESPTEPVEALQSAASPAAAEDTRFMRIMRVTDMLRGKGKNPEETHQNQ

SEQ ID NO: 80220 - protein, 68 aa, Gossypium hirsutum
  unsure (1)..(68): unsure at all Xaa locations
  Clone ID: LIB3148-029-Q1-K1-C12.pep
AWFFWSIHENAISLNLQXSLIHFCIMLFVAQQYSLSFLRFFIYFFIFFFIKLKVFLFFFFFFLVFFFF

SEQ ID NO: 80221 - protein, 111 aa, Gossypium hirsutum
  Clone ID: GOSHI-09MAY01-C43499_1.pep
QKTPEKAGPSKKRPAESSKKTPAPEKKAKLVTPQKTVHFGADSKKAGGHTATPHTSKKAGKTSAAAAAAAAAQVKQTPKSGGSFPCKSCGRSFGSENALQSHSKAKHGTQA

SEQ ID NO: 80222 - protein, 240 aa, Gossypium hirsutum
  Clone ID: GOSHI-09MAY01-C43469_1.pep
RSAVRNVAKYFPTAIISGRSRDKVYKLVGLTELFYAGSHGMDIMGPVKHTESDDGHPNCVRSIDQEGKEVNLFQPAREFIPMIDEVFRTLVENTKDIKGAKVENHKFCTSVHYRNVEEKNWPIIAQCVHDILKDYPRLRLTHGRKVLEVRPVIDWNKGKAVEFLLESLGLSDRDDVLPIYIGDDKTDEDAFKVLKEGNMGYGILVSSVPKESNAIFSVKDPSEVKKFLKALVRLKMLEEA

SEQ ID NO: 80223 - protein, 124 aa, Gossypium hirsutum
  Clone ID: GOSHI-09MAY01-C43429_1.pep
MEAEEEEDNDLQLSLKTLSLESLSVLTALPRLLLQGSSSTVQQLRIRGCPNLSILPAWLPNLTSLQKLEIVNCRNLSALPEGIDRLTNLRELRILGCPKLSKRYSENGGEDWHKIAHIQKVDIY

SEQ ID NO: 80224 - protein, 64 aa, Gossypium hirsutum
  Clone ID: LIB3148-012-Q1-K1-C3.pep
YGIESDREITILSHTSIFIRNNNFLDVSNFVPIFTPIFSVSFAQLRTSANSQFSKVGEAVYSLR

SEQ ID NO: 80225 - protein, 60 aa, Gossypium hirsutum
  Clone ID: LIB3146-021-Q1-K1-A10.pep
NPNANKAKVFLVLPQPLLDSSISISIFILNNNLLDVSNFVPIFTPILSVSFAQLRTSVNC

SEQ ID NO: 80226 - protein, 93 aa, Gossypium hirsutum
  Clone ID: GOSHI-09MAY01-C43799_1.pep
MGVTKEQVGSSLTSKLKPSHLEVIDTSGGCGAGVVIEIVSEQFEGTRLLERHRIVNAALEEEMEQIHALSIKKALTPEQWKQQPEAEKAKPDA

SEQ ID NO: 80227 - protein, 37 aa, Gossypium hirsutum
  Clone ID: GOSHI-09MAY01-C43709_1.pep
KETTIFNRLQQHIACKNRTGLDYRILITKKTESNDII

SEQ ID NO: 80228 - protein, 74 aa, Gossypium hirsutum
  Clone ID: GOSHI-09MAY01-C43659_1.pep
RPRVRPRVRPRVRPRVRVEGDDVPDEQKARICKSLAEADKRLVDGADEYLQLLDVASNTMRALCNMPQEFSFET

SEQ ID NO: 80229 - protein, 81 aa, Gossypium hirsutum
  Clone ID: AI725740.1.pep
VLLSRCRPDCPFFAFTTTTSVRRRLNLQWGLIPFRLSFSDDMDANLNKTFSLLKARGMIKSGDLVIAVSDMLQSIQVMNVP

SEQ ID NO: 80230 - protein, 44 aa, Gossypium hirsutum
  unsure (1)..(44): unsure at all Xaa locations
  Clone ID: LIB3148-015-Q1-K1-E5.pep
GVIVSLVFLVLTHGLSKKKKIKNILFFXKKYLIFKNNNLIYFFI

SEQ ID NO: 80231 - protein, 227 aa, Gossypium hirsutum
  Clone ID: GOSHI-09MAY01-C43619_1.pep
PRVRTNLRMGRMVMVDEKFCFEEETQLTVHKTSVFYRGDGFVVYNPKGELILRFDSYYGPHGHPLPKDELVLMDATGNCLLTLIRKKPSLHQRWEGLLGEKTKNESPIFCVHRSSIIGRSNVVVDVYGDPSQEYHIDGSYPHRCCTIYNTSLESSSKEPMAEIKRKVDPSTHVMLGKNVVLLCLRPGFDSAFAMALVLILDQMFDDADIDDDDAKEDPTHVALDSFS

SEQ ID NO: 80232 - protein, 76 aa, Gossypium hirsutum
  Clone ID: GOSHI-09MAY01-C43189_1.pep
SVANHPAKIQCSAGFNFMKSQSPNPNILVGAVIGGPDQKDRFPDQRSDYEQSEPATYINAPLVGALTYLAHSFGQL

SEQ ID NO: 80233 - protein, 147 aa, Gossypium hirsutum
  Clone ID: GOSHI-09MAY01-C43179_1.pep
MELALNISSPLIFPTNSTPKLKKINKISYGFGSNGSYPTSKICAVCSNGSGSSSSSSHGAEARAVGDARRRRSRRESLFCCDIPIPEERIEEPVGVSLAEKLVGDNPRCTDCQAKGADLCTTCSGSGLYVDSILESQGINVKVRCLG

SEQ ID NO: 80234 - protein, 144 aa, Gossypium hirsutum
  Clone ID: LIB3148-006-Q1-K1-H11.pep
TRADPRVRLDLTLPVHMIYALVSLQLTREFGAGVMDAKQASTIVTVTMLAFVLTGGYYVHKVPACMAWIKYVSTTYYSYKLFVNVQYSQGNKISSLLGCLHHGSNRVSCKFIDQDIAGQISPKLSVGILLLMFVRYKLLAYLAL

SEQ ID NO: 80235 - protein, 135 aa, Gossypium hirsutum
  Clone ID: LIB3148-006-Q1-K1-H10.pep
LVPARNRFLLTLVVLLGYVLVSHGLGGVFGAVIMDAKQASTIVTVTMLAFVLTGGYYVHKVPACMAWIKYVSTTYYSYKLFVNVQYSQGNKISSLLGCLHHGSNRVSCKFIDQDIARQISPKLSVGILLLMFVGY

SEQ ID NO: 80236 - protein, 210 aa, Gossypium hirsutum
  Clone ID: GOSHI-09MAY01-C43359_1.pep
RRVGGNVIRPDWNGFNVLLLNAAQAAALDLGLVPESSNSIESAKFLYLMGADDVNLNKVPSDAFVVYQGHHGDQSVYRANVILPSAAFSEKEGTYENTEGCSQQTLPAVPTVGDARDDWKIIRALSEVAGIRLPYDTLGAIRSRMRTVAPNLLNTDEIEPAAFGPSLSPDCSQKISLTPFKAAVENFYMTDSITRASKIMAQCSAMLLKK

SEQ ID NO: 80237 - protein, 75 aa, Gossypium hirsutum
  Clone ID: LIB3825-031-Q6-N6-C12.pep
DTLGSLRSRMRTVAPNLLNVDEIEPATFGPSLSIDCTQEINLTPFKAAIENFYMTNSVTRASKIMAQCSAMLLKE

SEQ ID NO: 80238 - protein, 87 aa, Gossypium hirsutum
  Clone ID: GOSHI-09MAY01-C43269_1.pep
HPQTWIPPHALGSFCHILEDLALFLSKKGERISRILPRSSGSVIRSRITSCFRKSHGRPSMTRSKSSSSSKTIENSADQRWIFCRSY

SEQ ID NO: 80239 - protein, 46 aa, Gossypium hirsutum
  Clone ID: GOSHI-09MAY01-C43209_1.pep
LIFMCLCSIFPNFKMNLEKQWRYPFFSLKFHAPRKKKKGKSGKLII

SEQ ID NO: 80240 - protein, 62 aa, Gossypium hirsutum
  Clone ID: LIB3135-052-Q1-K1-B8.pep
TTRTTTRAIFMCLCSILPNFKMNLEKQWRYPFFSLKFHAPRKKKGKIWKAYNSKIMLVFVLV

SEQ ID NO: 80241 - protein, 184 aa, Gossypium hirsutum
  unsure (1)..(184): unsure at all Xaa locations
  Clone ID: GOSHI-09MAY01-C78999_1.pep
PRVRVEQELRLRKMATKISIGIDVCMSFERRFYLNLPEVQMALHANRTKLPYDWSMCSGRLSYSDSDGNINILPILKKIILNGIPVWIFSGDQDSVVPLLGSRTLVRELAHDLKFKITVPYGAWFHKQQVGGWVTEYGNLLTFATVRGAAHMVPYSQPSRALHLFXSFVHGRRLPNNTHPPIHE

SEQ ID NO: 80242 - protein, 237 aa, Gossypium hirsutum
  Clone ID: GOSHI-09MAY01-C78529_1.pep
PRVRPRVRFALQKVNNERSYFRTIANMDMKLDFVPPSLINFIARQLIGNGFRLYQKTVASVTNSDEDYSKALGDPLFCLIRGALFSNNKSGEVLEAQEIKREPGIFPKEDEIVPNENEIVDIQDGTNDAEPEVHANEPAGESPLEIALDAKRKAFGEIEEEESEESTCLEESIKAANQPSTNSFADSSGVNAKQRVSIRPEVKEALGTLEKAISIVRQYRFNAQSRSSSFSDEKLRI

SEQ ID NO: 80243 - protein, 124 aa, Gossypium hirsutum
  Clone ID: GOSHI-09MAY01-C78419_1.pep
MFRLVLKVVSFLFLFTSLVSSLNSDGLSLLALKAAVESDPTRCLESWSESDATPCHWLGIGCTRKRVTSIFLPNKGLTGYIPSELGLLDSLTRLSLAQNNFPKLIPYHLFHATNLLYIDLSHNS

SEQ ID NO: 80244 - protein, 274 aa, Gossypium hirsutum
  unsure (1)..(274): unsure at all Xaa locations
  Clone ID: GOSHI-09MAY01-C78749_1.pep
MANAIKFFELNTGAKIPSVGLGTWQSEPGLVGAAVSAAVKIGYRHIDCAQVYGNEKEIGVVFKKLFEDGVVKREELFITSKLWCTDHSPEDVPAPVRPPVRDLQLDYVDLYLIHWPVRMKKGSAGFKPENFIQPDIPCTWRAMEALYDSGKARALGVSNFSSNKLGDLLAVARVPPAVNQVECHPSWQQAKLREFCKSKGVHLSGYSPLGSPGTTWLKSDVLKHPILNMVAQKLGKTPAQVALRWGLQMGHSVLPKSTHDERIXENFNVFDWSI

SEQ ID NO: 80245 - protein, 71 aa, Gossypium hirsutum
  Clone ID: LIB3582-012-P1-K1-E10.pep
INRSQAGWLDVCTLCPLWILDWVSLLLIGHGFINLKHCEFFLAQQGICILIEYISTPHVLHGALMEEFHFL

SEQ ID NO: 80246 - protein, 114 aa, Gossypium hirsutum
  unsure (1)..(114): unsure at all Xaa locations
  Clone ID: LIB3829-024-Q6-K6-H1.pep
SLVGNVGYMGGGIIWVLLLLTLRIESCSRIIFFLLALXSLWGGGDXXQXXXXXLCTLCPLWILDWVFLMLIGHGFINLKHCEFFLAQQGICILIEYIRTPXVVHGALMEELDLV

SEQ ID NO: 80247 - protein, 195 aa, Gossypium hirsutum
  Clone ID: GOSHI-09MAY01-C78249_1.pep
MTLVLNHSVTSSFSNFFKISSLKNHPRTCYGKYTMTINKPTGSQDLCNDFESLKFTALVNTIAVANLVAIDSAKALSEDNILEGAASLYTLADGSSGDWFGGLLYSAGQQANEAVQGQLSALSFTSLAVIFGAGLVTSLSPCTLSVLPLTLGYIGAFGSGKGRTEVIANSMAFSLGLATTLALLGIGASFAGKHM

SEQ ID NO: 80248 - protein, 187 aa, Gossypium hirsutum
  Clone ID: LIB3543-051-Q6-K6-F3.pep
MTLVLNHSVTSSFSNFFKISSLKNHPRTCYGKYTMTINKPTGSQDLCNDFESLKFTALVNTIAVANLVAIDSAKALSEDNILEGAASLYTLADGSSGDWFGGLLYSAGQQANEAVQGQLSALSFTSLAVIFGAGLVTSLSPCTLSVLPLTLGYIGAFGSGKGRTEVIANSMAFSLGLATTLALLGIG

SEQ ID NO: 80249 - protein, 120 aa, Gossypium hirsutum
  Clone ID: GOSHI-09MAY01-C79939_1.pep
TQATFSSRRCPSLLVFQYLISGNSTSSDRCLEELPLPLCSVYASTRGEPLFTTYTPTFTNTLDYIFFSPSDSLMPVSILQLPELDSGALSNYSHPSDHLPIGAKFEITKDQMFILRNERK

SEQ ID NO: 80250 - protein, 193 aa, Gossypium hirsutum
  Clone ID: GOSHI-09MAY01-C79879_1.pep
MAIQQHEQEESYPSFLLDGLYCEEDEVLEEGSSLSGCNNVGDIDLFWEDEELVSLFSKEMELVHLGPENVESKDDEFLTTVHREVRCEAVEWMLKVNAHYGFTTLTAVLSVNYLDRFLSSFCFQRDKPWMIHLVAGTWLSLAAKGEETHVPLLLDLQVEGTKYVFEAKTIQRMELLVLSTLKWKMHPITPLSF

SEQ ID NO: 80251 - protein, 268 aa, Gossypium hirsutum
  unsure (1)..(268): unsure at all Xaa locations
  Clone ID: GOSHI-09MAY01-C79779_1.pep
MASGSSGRGNTGNSXGFDFGSDDIGGSYEDYGNQESSNGNHTEPNSSNKEFHKGRVARSMFPPSGYSQPEDSFSSDVAATVEKTMKRYTDNLMRFLEGISSRLSQLELYCYNLDRSIGDMRADLVHGNGDADSKLKSIEKHLQEVHRSVQILRDKQELAETQKELAKLQLAQKESSSSHSQSTEERVSPPASDPKKTDLTSEMQNQQLALSLPHQVASQQQPVAAHSQAPPQNLTQQSYYMPSNQLSNPQAPAAASSPAPAPNPNPPP

SEQ ID NO: 80252 - protein, 78 aa, Gossypium hirsutum
  Clone ID: LIB3585-042-P1-K1-A5.pep
NENRNVSSIYLKICFCFFVISSRNRNRERKVILLFGSVFLEEMASGSSGRGNTGNSKGFDFGSDDILCSYEDFCSQEL

SEQ ID NO: 80253 - protein, 293 aa, Gossypium hirsutum
  unsure (1)..(293): unsure at all Xaa locations
  Clone ID: GOSHI-09MAY01-C79169_1.pep
SSKDIIFNHCDFPFSQLALPETLEIHPPNITKSKEPPIFSIKPSLFPRKSFSILIKKGILKPNFRFKEIRIFLGGICGKVLLEASKPSSSSASSVSTTTTSTSVTETVNGSHQFKITGYXPCLKVWGIGKYIASDTFMGGGYFVGRSIFIPEGKSPEDNATYVSLFIALASEGTDVRALFELTLLDQSGKERHKVHSHFGRTLESGPYTLKYRGSMWGYKRFFKRTLLEQSDYLKDDCLSVHCSGGVVKSYTEGPKIYSIAVTPSNISHHFGKLLKSGKGTDVSFEVDGEVFH

SEQ ID NO: 80254 - protein, 153 aa, Gossypium hirsutum
  Clone ID: GOSHI-09MAY01-C79099_1.pep
RPRLTPLNPSLDNKLAARASGSRPLKQTIKMNINAKAPSTSTSSLPLSKSKSFDVHNIEGLYTHTLDECLQHLTSLKRLTIGDCTEADLEGMQWEPLKNLSHLEIDNIPKLASLSIRLQHLVQLQTLKIHNCTGLRSLLPVFQHLTFLEEFPG

SEQ ID NO: 80255 - protein, 174 aa, Gossypium hirsutum
  Clone ID: GOSHI-09MAY01-C79089_1.pep
LEFFKQFGEIEEGPLVLDKHTGKPKGFALFVYRSIESARKALEEPHKNFEGHVLHCQKAIDGPKQTKGGFGGRASTRHHQQYQQHHQQGQHQNQSRYHHSKKGKYSSSGSETGHLMAPSGPAAVGVGFNPGVAAAGFNPGVAAAAPALNPVLGQALTALLASQGAGLGLGNLLG

SEQ ID NO: 80256 - protein, 260 aa, Gossypium hirsutum
  unsure (1)..(260): unsure at all Xaa locations
  Clone ID: GOSHI-09MAY01-C79399_1.pep
PRVRQGLSKNEVKGDFVSHVSCLAKTDAPSSSLDLRTNDEDTDAKGRVVNREQKTHAIDASLGEGFASENNQDSLRQAVLSHKKKALALKRDGKLAEAREELRLAKLLEKSLTEDGAPPKAGTNDGSISASSFPSDATKEKAASTLAPKPLSGRDRFKLQQESLSHKXRQALKLRREGKLQEAEAEFEIAKSLEARLEESSGQDSTNTGGGKSDDVAVEDLLDPQLLSALKAIGLDGSSTIEHSPQRPEPVKHNIAKTDN

SEQ ID NO: 80257 - protein, 154 aa, Gossypium hirsutum
  Clone ID: GOSHI-09MAY01-C79359_1.pep
ASEEIDLDLKNLGDTLPALLFTCHSVVTLKLDAVGSEIKVPSDVCLGNLKTLQLRNSVLFGDSIHRLISNCHVLEDLAFIECGFDNISEVNIQSPSLKRLVLEFDVTEGRYFNFVVVINAPNLVYFQYHAAVAKSYIVKQVQLILFKEFAMYGL

SEQ ID NO: 80258 - protein, 103 aa, Gossypium hirsutum
  Clone ID: LIB3825-001-Q1-N6-H2.pep
DDAGTRWKALRMKVPSCLSFHLKEIEISYFDTHMIEMVSYFLDNAMVLEKLIIRMAALTWRQKCEAQNKLLQLLKRSKKSLIVILYYCFILWLELISVWFGFV

SEQ ID NO: 80259 - protein, 157 aa, Gossypium hirsutum
  Clone ID: uC-gsflnu33B051d12b1.pep
RYFNYVVVINAPILVYFQYHAAVAASYTLSTMKSLEKADISIYQFDSINSETSATHLIQGICNVRSLSLTTDAAIFLTSGLPIFHNLIEFKYLGVGFNGRETWLVEFLHCVPNLKTLTLNFPDDAGTRWKALRMKVPSCLSFHLQEIEISYFDPRMI

SEQ ID NO: 80260 - protein, 333 aa, Gossypium hirsutum
  unsure (1)..(333): unsure at all Xaa locations
  Clone ID: GOSHI-09MAY01-C74989_1.pep
SESRPSRFPTPPEKRGVTFEFYELVALQLRQTVSIPLAKAIIEYCQEVQRRWKGRRLHWPEARDFSSXLTGHGVKAIVRNKEXVIVGNKSLMXEKNIVIPVDAQDMLTETESMAQTGILVSIDGEVTGVLAISDPVKPGAQEVISILKSMNVRSIMVTGDNWGTASSIASQIGFETVGAEAKPEQKAEKVKELQAEGYAVAMVGDGINDSPALVAAHVGMAIGAGTDIAIEAADIVLMKSNLEDVITAIHLSRKTFSXRIRLNYIWALGYNILGIPIAAGALFPSTGFRLPPWIAGAAMAASSVSVVCCSLLLKNYERPKKLENLEIGGIQIE

SEQ ID NO: 80261 - protein, 115 aa, Gossypium hirsutum
  Clone ID: uC-gsflnu33B114e03b1.pep
VGMMPVSRTDIAIEAADIVLLKSNLEDVITAIHLSRKTFSRIRLNYIWALGYNILGIPIAAGALFPSTGFRLPPWIAGAAMAASSVSVVCCSLLLKNYERPKKLENLEIGGIQIE

SEQ ID NO: 80262 - protein, 127 aa, Gossypium hirsutum
  Clone ID: GOSHI-09MAY01-C74569_1.pep
MEIEVTGPSSKESFAMVVGGLKRKVVEEKDQVRVTRKTLQAVLEQCQRAIESISNSEGGIDDDDEDDKDDVDPQGEAGGAGLQRDQEVDELCDLLKSRVQCSDFLEKLVCARVPISENVSEEGCFWN

SEQ ID NO: 80263 - protein, 218 aa, Gossypium hirsutum
  Clone ID: GOSHI-09MAY01-C74489_1.pep
MNESNTSVGGQDFITLPASSNSMSGSESGELRDVDDGLHQVDSQPNNAEAKDGEVKAEILQLNEGDIRNPQNNLIVEAKVDNTLAGDSSDMEISDEITEALRVEKKLDEVSSGAHSESFKVEEKLDGSSMSTKKRCLDLENGSPIQNHTMDAVVKRPRMTFDDRQPSIRIVYNFLTRASKQKLEELLQKWSEWQAEQGSSLQENELTESGEKTYFPAL

SEQ ID NO: 80264 - protein, 144 aa, Gossypium hirsutum
  Clone ID: GOSHI-09MAY01-C74169_1.pep
IAVCYTSLLYLWLLQLLFFCLQFQDFVYKILSWVGYAKAGLLSGFPGIESIPGPQLPEIEFLNRFAEENQKKYAEADARFKSSPLLKQLLERSKQNKEKNKQEIQDKYCMRGAEWGVGDCSVEAMSPEDKENFIAMLKEKAGIK

SEQ ID NO: 80265 - protein, 125 aa, Gossypium hirsutum
  Clone ID: GOSHI-09MAY01-C74049_1.pep
RTRPSKHSQPSPLFSKLRPKSCQRSRIGHHAGRRSSEPTPRSAEAGKGKNLYSAFSTLIKPDPSSKLPKKNHKKPQKCQETFRFPATDPRGWLPRPFQKQTGGCSLFIIYYIYFTNEERKEKNNR

SEQ ID NO: 80266 - protein, 99 aa, Gossypium hirsutum
  unsure (1)..(99): unsure at all Xaa locations
  Clone ID: GOSHI-09MAY01-C74319_1.pep
QLKKQAAVATTTVTVAGATKPSAEEEALKRNTDCVYFLASPLTCKKGSECEYXHSEYARVNPRDCYYWLDGNCLNPKCGFRHPPLDGVLGTQATTPTGS

SEQ ID NO: 80267 - protein, 150 aa, Gossypium hirsutum
  Clone ID: GOSHI-09MAY01-C75999_1.pep
MREIEDSSNLVGKWEEQLPSPEELMPLSQTLITPHLALAFDIPNPNHRQRKHPPPPPPPPPAEFAGDSGDLGSGAGGDEPARTLKRPMLVWIPQLHKRFVDAVAHLGIKNAVPKTIMQLMSVDGLTRENVASHLQKYRLYLKRMQGLSGG

SEQ ID NO: 80268 - protein, 384 aa, Gossypium hirsutum
  unsure (1)..(384): unsure at all Xaa locations
  Clone ID: GOSHI-09MAY01-C75869_1.pep
MASTPTLKPLVSSLYSDPTRHCGSLLENYFPRSFQVKKELSLEGKLKLSTKQFRLNCLGHRDMDVSASVLADSVTDAQLDVNEEDPSISTLLMNFXSNFDPYGAMSTPLYQTATFKQPSATENGPYDYTRSGNPTRDVLERLLAKLEKADRAFCFTSGMAALSAVANLVGTGQKIVAGDDIYGGSDRLLSQVTPRSGVVVKRVNTSDLSEVAKVIGPKTKLVWLESPTKAGQQIADIRRIAEMAHTHGAILLVDNSIMTPVLSRPLELGADIVMHSATKFIAGHSDLMAGVLAVKGESLAKELYFLQNAVGSGLAPFDCWICLRGIKTMALRVEKQQENAQKIAEFLSSHPRVKKVNYAGLANHLGRDLHYSQAKGAGSVLSFL

SEQ ID NO: 80269 - protein, 115 aa, Gossypium hirsutum
  unsure (1)..(115): unsure at all Xaa locations
  Clone ID: GOSHI-09MAY01-C75789_1.pep
PDDCFLGLTLAVKPSVSKLEAVHNGSQRMEEDILFCPSLKDHPEQSVFWSLLTPDQNGIHTPVESSLSLSFSSIQHPPIGVPQSAGFAIASLQPNLPVRQXLLAVASPFQQGYTL

SEQ ID NO: 80270 - protein, 172 aa, Gossypium hirsutum
  Clone ID: GOSHI-09MAY01-C75769_1.pep
DSSMIAFVGNEGYILLVSSKTKERIGTLKMNGTVRSLAFADNGNQLLSSGGDGQVYHWDLRTRTCIHKAADEGCINGTALCTSPNGRMFAAGSDSGIVNIYNRDEFLGGKRKPIKTVENLTTKVDFMKFNSDAQILAICSTMKKNSLKLMHVPSFTVYSNWPPLNKNLQYPR

SEQ ID NO: 80271 - protein, 218 aa, Gossypium hirsutum
  unsure (1)..(218): unsure at all Xaa locations
  Clone ID: GOSHI-09MAY01-C75169_1.pep
VLLDSKHQGWVKVLVSSCSGVFGNENADAWSDFLGLLKFRGVTVDRTLTRDSANQSWCPSNSSSMAKISSELVAVNPAMVAALAXILRSLGEDPLRKELVETPSHSVRWLMNSDNTKLEMKLNGCARGISDLLKPNGEISSRNNEQMHSELNLSFWSQCEHHLLPFYGVVHIGYFCPKGINHLGKSLLRSIVHFYGFKLQVQERLTRQIAETVSSILG

SEQ ID NO: 80272 - protein, 196 aa, Gossypium hirsutum
  Clone ID: GOSHI-09MAY01-C75379_1.pep
MRDQLNSDLFDPRTEMVPDFSRGASSSDGDFGFAFNDSNFSDRLLRIEIMGGPPQCRPDGEGCTSIADWARHRKRRREDIKKETVLDLSLCPEEQILNDIQPDMDDGGGCENQDEEPVAMVEETQSGDEDANSNESSWSMDCSTVLRVKTLHISSPILAAKSPFFYKLFSNGMRESEQRPVTLRINASEEAALMEL

SEQ ID NO: 80273 - protein, 204 aa, Gossypium hirsutum
  unsure (1)..(204): unsure at all Xaa locations
  Clone ID: GOSHI-09MAY01-C75369_1.pep
VAFEAWNFCNEVAHEAPGMGXPRAADCFDVSNSTLLHKVSEADDMLGIGKTFKGLSTEAMHRPDLYAVEKELYLGSLCEVSDSSKPWQFWXMVMLKNGNFDTKXGFCPENGKPKPPFTTSKNFPCFGEGCMNQPTLNHQPTQLLGDGTMRGWFNGTYDLDADIGKGLTNLSFYEVIWEKTLGSGSWVFKHRLKTSMKYPWLMLY

SEQ ID NO: 80274 - protein, 309 aa, Gossypium hirsutum
  unsure (1)..(309): unsure at all Xaa locations
  Clone ID: GOSHI-09MAY01-C75249_1.pep
DFLPPSMSEYRYTFNNVFGFLNFASCSSLFSTMENGKIVKGLAGVPDEGPVLLVGNHMLLGMDLSSLCEAFLREKKILVRGVAHPELFWGNFHTSSNVFNYFDLMKVMGAMPVSPKSLLKALSTNSHVLLYPGGPPRPLHRKGEAYKLFWPNQPEFVRFAAQFGATIVPFGAVGEDDMAKVVFDYYDYMKIPMLNDRIKEVIRNGGVQIRDKAKGEVASQEIFIPGMIPKIPGRFYYLFGKPIKLKGREDLVENRESANEVYLQAKAEVERCIGYLLKKREEDPFRSIINRLIYRTFYALYTXVPSFKP

SEQ ID NO: 80275 - protein, 256 aa, Gossypium hirsutum
  unsure (1)..(256): unsure at all Xaa locations
  Clone ID: GOSHI-09MAY01-C76809_1.pep
MTEYWVSQGNKWCDFCKIFISNNPSSIRNHELGQRHKENVAKRLTTMRKESAAKEKEQKDAARALEQIEAKAKRSYQKDVASFEARDSSDQALDSQEDWDYDSSSGYYYNQNNGLYFDPKSGFYYSDAIEGMQXGRWVTQEEAYSKVQASSNTKSRDPILKKPFPTSETGPVADSKSVAKSQNKTAPGPVISATLXNPMRSVKGAASSLAGKRKRQDEKPKAVSKEEAAALKAREAAKKRVEEREKPLLGLYKGSR

SEQ ID NO: 80276 - protein, 151 aa, Gossypium hirsutum
  Clone ID: GOSHI-09MAY01-C76579_1.pep
MAEICYGVVSEGEASIPREPSSRAARRRRMEIRRIKIRDVAPSEAGNGRKRQNLPGYRASFSLDCENAVENCASYEDGKKRTVKPKNGRLKTKGTIVKSNSSPSLLIPEIDSELHPKFGVASVCGRRRDMEDAVAIHPSFHRQGQDSAAIG

SEQ ID NO: 80277 - protein, 163 aa, Gossypium hirsutum
  Clone ID: GOSHI-09MAY01-C76469_1.pep
RGAWEENSAIHPAVAPLSYLLGTWKGEGEGGYPTINSFRYGEELHLAHPASGKPVIAYSHKTWKLDSGQPMHSESGYWRPKPDGSLEVVIAQSTGLAEVLKGTYSAEDNVIKLHSQVVANASKVREISRVYKIVNGDLHYVVQMATNLTTLQPHLKAVLKKLP

SEQ ID NO: 80278 - protein, 117 aa, Gossypium hirsutum
  Clone ID: LIB3493-019-P1-M1-B10.pep
DAWADAWAVIAYSHKTWKLDSGQPMHSESGYWRPKPDGSLEVVIAQSTGLAEVLKGTYSAEDNVIKLHSQVVANASKVREISRVYEMVNGDLHYVVQMATNLTTLQPHLKAVLKKLP

SEQ ID NO: 80279 - protein, 140 aa, Gossypium hirsutum
  Clone ID: GOSHI-09MAY01-C76649_1.pep
DIGMRKVEIAIICLFSLVFVAMPVKLPQRPQLMAPPRPLCASQFSLVNYACAALPLTPFSPPPPRNRNHSRSRSRSRSRSNSRRRSRKHRRRHGHRETEMHSYCCQWLKQVDTECVCDVLVHLPTFLSRPNHQYTRCRDD

SEQ ID NO: 80280 - protein, 151 aa, Gossypium hirsutum
  Clone ID: GOSHI-09MAY01-C76669_1.pep
RKLFGDQDLSTSLLDLGLLNRQALIVVPRQRSTGFQGQRSFADQRNSTPSEATAGSNGGYFAYVRSFMSYFNPFSYLGGGTGTSSSTTGPESQSGIWEYSPNPTLQNNLAGANRTYSPNSTNRNSSTDSRNRRPTTSRYGSNIHTLKHDED

SEQ ID NO: 80281 - protein, 103 aa, Gossypium hirsutum
  unsure (1)..(103): unsure at all Xaa locations
  Clone ID: uC-gsflnu33B009e10b1.pep
PCHSSLTIQILDRVIPHETXVVKQKLLKIALAKYFLMFSGLAAFIGPNPTLQNNLAGANRTYSPNSTNRNSSTDSRIRRPTTSRYGSNIHTLKHDEDDXPFSD

SEQ ID NO: 80282 - protein, 130 aa, Gossypium hirsutum
  Clone ID: GOSHI-09MAY01-C77979_1.pep
PPHATRTATRVMENSESMALCTYPLLNTILLGVFATVMSVYLFWLGRRILNLVINKGLQKRVYTLILSVSSFLPLRVLLLGLSVLSKPEQFVFEVLAFSAFVVLLCCVGVCICMLICCPVVDCIALGNLS

SEQ ID NO: 80283 - protein, 297 aa, Gossypium hirsutum
  unsure (1)..(297): unsure at all Xaa locations
  Clone ID: GOSHI-09MAY01-C77819_2.pep
MGRYRSRSKSYSPRRRSRSPTRGRKRYDDEPRDRQQSHRDHRRRSPLPSGLLIRNLPLDARPEDLRVPFERYGPVKDVYLPKNYYTGEPRGFGFVKFRYGEDAAEAKQRMNHQVIGGREIRIVFAEENRKTPQEMRLTARVSGRDRGSRRTPPRSPRRRYRSYSCSPSPXGHDSGDRDQRGKDYHHSPRRSRSISQDRGMRDDYRSPSRSRSMSRDCGAKDDYRSPRRSRSVSRSLSPRSPHGDRDREYRTKQRSPSPRENGQSLQDERDHVSSRSKSPRRVNRSPSRSRSRSLSPR

SEQ ID NO: 80284 - protein, 175 aa, Gossypium hirsutum
  Clone ID: GOSHI-09MAY01-C77819_1.pep
MGRYRSRSKSYSPRRRSRSPTRGRKRYDDEPRDRQRSHRDHRRRSPLPSGLLIRNLPLDARPEDLRVPFERYGPVKDVYLPKNYYTGEPRGFGFVKFRYGEDAAEAKQRMNHQVIGGREIRIVFAEENRKTPQEMRLTARVSGRDRGSRRTPPRSPRRRYRSYSCSPSPAGHDSR

SEQ ID NO: 80285 - protein, 190 aa, Gossypium hirsutum
  Clone ID: GOSHI-09MAY01-C77469_1.pep
PRVRGKGTGPHNSKNQNDFRPSHCLPPLPHQKVHAKASSPHDQPEHLKSVEGLRVTCPVDTREVIGPPVLSQSEAASIQYATSVPVAAAAAAAAVASSMVVTAKRLGTDSNVELPVAAAAMAATSAAVMKQTDCNDGDANLAGCEHISKRGQDAWRVNSEGERMSDKSAGNNSSKSDNALDGVAECEIPW

SEQ ID NO: 80286 - protein, 180 aa, Gossypium hirsutum
  Clone ID: GOSHI-09MAY01-C77729_1.pep
EKGHYKELEWKEKCLEVLYRELKAKEKHYDECLRKVELRKKEIEELSAEHRRKYEQQSSDLEFIVKKCEQQFKDLHSKEKKLAEWSKELERKSLAFAMHPQVKNEAAGSLSIKCSMDHSSPAHLRFCIHMDGKDLQMFLNGRWKEHGSIGTEVAMVLQLSGDPAKLVLDAMERVLPSTFE

SEQ ID NO: 80287 - protein, 234 aa, Gossypium hirsutum
  unsure (1)..(234): unsure at all Xaa locations
  Clone ID: GOSHI-09MAY01-C77639_1.pep
MAAAANPKEAVCVTGANGFIGSWLVRTLLEDGYTRVHAAIYPGSDPNHLLSLPGATSRGVVLQVYEADVLDYPAVLKAVEGCQGVFHVASPCSLEDPKDPDKELVRPAVRGTLNVLEAARSAKGRRVVLTSSISAMVPNPNWDPKTQGPFNESSWTDLEYFKARHKWYPVSKTLAEKAAWEYAEKHGLDVVAINPATCLGPMVQPNWNASCAVLLQLXQGSKDTQEFHWLGAVH

SEQ ID NO: 80288 - protein, 99 aa, Gossypium hirsutum
  Clone ID: GOSHI-09MAY01-C77139_1.pep
KEQNRQANGNKYIVYFRLISFFDYKSPAFNLCKGRRLHTLRTQNRLYAYNICMHAQKREKGAFRSIEVISFFFSSDFFPLFFLFSLFSYLFAPFYATKG

SEQ ID NO: 80289 - protein, 207 aa, Gossypium hirsutum
  Clone ID: GOSHI-09MAY01-C77249_1.pep
PTRPADSQIKAKRIEADLKIVRLQEEIMEVLPLDDTNQHVEKKLLRPEELIELCLESGSKELALQVFDVFAWTSSSFRKSHRNLLEECWKKAADQDPWSELYQASVSEGWSDEETLQQLSRTILFKASNRCYGPKAETIDDGFGEVLPLRQENVEVAGLKDARSSVEAILMQHRDFPYAGKLMLTALMLGCVQGDDVKLEESLSPMV

SEQ ID NO: 80290 - protein, 97 aa, Gossypium hirsutum
  Clone ID: GOSHI-09MAY01-C77209_1.pep
LMLQEVNARLISLGIGLEVSESIKDLICQQGYDQTYGARPLRRAVTAIVEDPLSEALLAGNYSPGETAVIDLDALGNPIVTSRSDRNISLSDPASIF

SEQ ID NO: 80291 - protein, 124 aa, Gossypium hirsutum
  unsure (1)..(124): unsure at all Xaa locations
  Clone ID: LIB3582-055-P1-K1-C1.pep
MIKTLNPYSAKTAEIMSRYRPIAPKPEVXPENSIDESSAMSQKMRQSPCLRNLWPQLQARPSRNRKRGRGTGLSPPPPTTTALKRARTQYFLGLSPPPPPPPPPPSTTSLVTLPLLPCLKVACS

SEQ ID NO: 80292 - protein, 181 aa, Gossypium hirsutum
  Clone ID: LIB3583-007-P1-K1-E4.pep
GRGTGLSPPPPTKTALKRARTQYFLGLSPPPPPPPPPPSSTTSLVTLPLLPCLKVAAHEIPEEKDFLKQLQGLPVLPTSSLITPQPIRPVGSTIIVGCINEAPAPAAPLQAPKKPEEVEDDIESESMPTIISDSNNKVRLANSAYKAMVGQPECPWLDSMVKGSECKRICGEVMLNLSNSR

SEQ ID NO: 80293 - protein, 280 aa, Gossypium hirsutum
  Clone ID: GOSHI-09MAY01-C70929_1.pep
QRRSPPSSRRSVTPSRGKSPSPYQSSSMSPVQRRSSSPVRRSPKGQRSSSLSPGGQRMRRKLSPVGHNHSSMRSTRSDRMDQSDTDDKVPGLSPPPNKSPLSKSPSHVRNRSGSEDRRSSSPYGSPPRQRKARIARDDSFSPERKPRELKGHRDGQGTGRRNETSESRHSPPISRQRVSPRTVHTPERLAGSRSTDSRSRLDNVESRKKDLETKSKRSSGEGVHSGTDRQRSPAISEDSFQGEKQSRSRLREGKRSDERSCSHKNTKDSDEHHKLETSPV

SEQ ID NO: 80294 - protein, 121 aa, Gossypium hirsutum
  Clone ID: GOSHI-09MAY01-C70499_2.pep
MILKYIPLDEGMMIMDEAIVKAKKIIEGYPETKFSGEEYQRFYECVYFMCTYHSSNEKTMQLYEKFRNSLEESIFSTVLPTLVNKQGANLLREFVVIWSNYKLMARWLCRFFEYLDRFFIP

SEQ ID NO: 80295 - protein, 134 aa, Gossypium hirsutum
  unsure (1)..(134): unsure at all Xaa locations
  Clone ID: LIB3582-019-P1-K1-B5.pep
MILKYIPLDEGMMIMDEAIVKAKKIIEGYPETKFSGEEYQRFYECVYFMCTYHSSNEKTMQXYEKFRNSLEESIFSTVLPTLVNKQGANLLREFVVIWSNYKLMARWLCRFFEYLDRFFIPQHIELESLNGISS

SEQ ID NO: 80296 - protein, 180 aa, Gossypium hirsutum
  Clone ID: GOSHI-09MAY01-C70489_1.pep
RVRGNTPPNYFLSKIFQLSWFQIITMSGATPPSSSSPALDTFRDIILWRRKKVSATVVLVSTATWILLQVYQFNFITVASWLIIFILASLFLWGNVLRLLGKEPPNVSDFDISKQTTMEIANTYRTFLEDVLRWMFHVTVEENWFVFARTLAGLLILSYVGAFFDFLTLVYIGISLVLIH

SEQ ID NO: 80297 - protein, 126 aa, Gossypium hirsutum
  Clone ID: LIB3582-010-P1-K1-D4.pep
NVSDFDISKQTTMEIANTYRTFLEDVLRWMFHVTVEENWFVFARTLAGLLILSYVGAFFDFLTLVYIGITMVMIVPVIYMKYGDQIQRSGERVKGEMGRFYEIFDEKVVRQRMSKFVKQEKEKKND

SEQ ID NO: 80298 - protein, 74 aa, Gossypium hirsutum
  Clone ID: LIB3582-040-P1-K1-B10.pep
RGKFLYLLIRFICTHFGLFMSAVIHGEQVNGLELPICRTLRPCSIGIHFDIRIFPLQDLEIALKMIKGWGGERL

SEQ ID NO: 80299 - protein, 71 aa, Gossypium hirsutum
  Clone ID: LIB3582-010-P1-K1-G11.pep
ILICMPVLERQPVYIGRKALVNLATEGENSYIFLLGSYALILDCLCQLLYPENTYALILDCLCQLLYTENK

SEQ ID NO: 80300 - protein, 56 aa, Gossypium hirsutum
  Clone ID: GOSHI-09MAY01-C70619_1.pep
GSGAVPFSAPLGAPVWLAGAGAWRGGGAGRALGRWRVRSAARPPPRRALRRSGASP

SEQ ID NO: 80301 - protein, 244 aa, Gossypium hirsutum
  Clone ID: GOSHI-09MAY01-C70019_1.pep
MASLKFSHSNGNPFAVTRHVTPRSTRPTRIGFKIFASDNHSEPDLSVCVNGLQMPNPFVIGSGPPGTNYTVMKRAFDEGWGAVIAKTVSLDAAKVINVTPRYARLRAGANGSAKGQIIGWENIELISDRPLETMLKEFKQLKKEYPDRILIASIMEEYNKAGWEELIDRVEQTGIDAIEVNFSCPHGMPERKMGAAVGQDCALLVEVCGWINAKTTVPVWAKMTPNITDITMPARVALSSRCEG

SEQ ID NO: 80302 - protein, 199 aa, Gossypium hirsutum
  Clone ID: GOSHI-09MAY01-C71999_1.pep
KVAKELEQVVEEWLQEHKEKRAENEANSEEDFMGVMLSILRGAEEHDADTINKAVSLALILAAEDTTSITMTWALSLLLNNRDALNKVKQELDIHVGKDRLLITESDTKNLVYLQSVIKETLRLYPAAPLAVIHEAIEDCSVHGYDISAGTWLILNLQKIQRDSQIWEAPLKFLPERFMTTHKDIDVKGHDFGLISFSS

SEQ ID NO: 80303 - protein, 66 aa, Gossypium hirsutum
  Clone ID: GOSHI-09MAY01-C71549_1.pep
ECDPLREVVISLLHVKDKLKKAEVTAAAQVSLKRDITNNEYNKVMSDFCEYKGNWWVLKSGDGKPS

SEQ ID NO: 80304 - protein, 108 aa, Gossypium hirsutum
  Clone ID: LIB3825-023-Q6-N6-B7.pep
YDWGLLNRHSKNRWLRDKLLVPHKKVYFGAMGLNILLRFAWLQTVLNFQLPLHPQTLTTIVASLEIIRRGIWNFFRLENEHLNNVGKYRAFKSVPLPFNYDEDDDKDD

SEQ ID NO: 80305 - protein, 92 aa, Gossypium hirsutum
  unsure (1)..(92): unsure at all Xaa locations
  Clone ID: LIB3585-065-P1-K2-A9.pep
KDAMQGLNGLXYFLTIAAVCGRTAYSLNKGIAWRIIAWIVSAIAAIFCTYWDLVYDWGLLNRHSKNRWLRDKLLVPHKKVYFGAMVGYNLQY

SEQ ID NO: 80306 - protein, 156 aa, Gossypium hirsutum
  Clone ID: GOSHI-09MAY01-C71799_1.pep
MSFDVSRKEAQQPAPPSTGHNGNAVAVLPSMSTVTANRLRLNPNTEHKPENYEGLQLEFSPLLFSSLERYLPPPMLSLPRDSKLHYMRDIILRYSPDGERIRVQRHREYRQKIISHYQPLHRELYTMHASNFFAPSFLKAINENKEEGFRSIMAEP

SEQ ID NO: 80307 - protein, 125 aa, Gossypium hirsutum
  Clone ID: LIB3543-066-Q6-K6-F1.pep
MSFDVSRKEAQQPAPPTTGHNGNVVAVLPSMSTVTANRLRLNPNTEHKPESYEGLQLEFSPLLFSSLERYLPPPMLSLPRDSKLHYMRDIILRYSPDGERIRVQRHREYRQKIISHYQVHSIIVV

SEQ ID NO: 80308 - protein, 231 aa, Gossypium hirsutum
  unsure (1)..(231): unsure at all Xaa locations
  Clone ID: GOSHI-09MAY01-C71789_1.pep
MGMQLQLASVFFTFSLGTRVHYFGRTILHGGAKYRATGRGFVVRHEKFAGGYRLYSRSHFVKGLELMVLLICYRLYGSAASGAASYALLSFSMWVLVLSWLFAPFLLNPSGFEWQKIVKDWEDWSKWISCRGGIGVXPLRSWESWWEEEQEHLRHTGFIGRFFEIILSIRFFIYQYGIVYHLNMTTSTNKVFGLALXYGLSWLVIGAVLIILKXVYGENECSADFHLMFRL

SEQ ID NO: 80309 - protein, 293 aa, Gossypium hirsutum
  unsure (1)..(293): unsure at all Xaa locations
  Clone ID: GOSHI-09MAY01-C71759_1.pep
KLSVCCWTLDQNGSIPEAANVENEGKGEVDGLPAFREYSIDTLKTATSGFSVENIVSEHGEKAPNVVYKGKLENQRWIAVKRFNRSAWPDARQFLEEARAVGQLRNHRLANLLGCCCEGDERLLVAEFMTNDTLAKHLFHWEAQPMKWAMRLRVALHLAEALEYCTSKGRALYHDLNAYRIVFDDEGNPRLSCFGLMKNSRDGKSYSTNLAFTPPEYLRTGRVTPESVIYXFGTLLLDLLSGKHIPPSHALDLIRDRNIQMLTDSCLEGQFSNDDGTELVRLASRCLQYEPRE

SEQ ID NO: 80310 - protein, 104 aa, Gossypium hirsutum
  unsure (1)..(104): unsure at all Xaa locations
  Clone ID: GOSHI-09MAY01-C71649_1.pep
LNWLDIHLSLASWLNNRQAPIDRPNKHARRMDSEWHARWTHSSRAVWGVLTRRPIHSLASXLALVSFAFFPFLLRTSAGFAKLDINGWLYGGDRLIDGTYIQKK

SEQ ID NO: 80311 - protein, 189 aa, Gossypium hirsutum
  unsure (1)..(189): unsure at all Xaa locations
  Clone ID: GOSHI-09MAY01-C71089_1.pep
MGDYQFLMLKDAITCINQKVNLFAVILDFTLPQRTKGTDYFCKLKVIDESHSEFWVPVHVFAQEIDGLPLVASVGDIIQLSRVTMTVHEGDVYAIFNNKFSSFALYDGKDGDNFHPYKVSLRFHEREHDEKIIASMRKWLASSEVIDVPNFSLLREIDRMGCVNLTXRVLHISKTTNDKWMVFLWDGTD

SEQ ID NO: 80312 - protein, 66 aa, Gossypium hirsutum
  Clone ID: GOSHI-09MAY01-C71039_1.pep
MSRLSFRPRPLDIHKKLPIVKSVKDFEDDDTPTSATRNSQMLRLAAAEVEPEVQPLATKKLAPEIP

SEQ ID NO: 80313 - protein, 323 aa, Gossypium hirsutum
  Clone ID: GOSHI-09MAY01-C71389_1.pep
MMVVSSFDLWQKHAFFSAAEEVQESADVMESVYRMWIKEMREGQKSSDTAELCRGLQTALGTAKWQLEEFERAIRLSCGHGCDDNRASRHKQFIAAIESQICRVEAALKEAIIEEGKQPLRWVDLDKQECDDLAMFLSGTSPSLQQSMENTLLVNSHRRKDTNPNVNATCNRNMPEVKSLNDFGKDVECLIDVEDERSSGKTDDVSSGQDRTTSTRRTWSTPNFGSLKIVIADEYADRNQMRSGMEATPKEKGSKPFFSKQRCGELTQAKCVFNLFNRCFGWVGGLQRQLRSPVHLQFSYSLQLKLVLTVAIFLIVPFVLYSS

SEQ ID NO: 80314 - protein, 198 aa, Gossypium hirsutum
  unsure (1)..(198): unsure at all Xaa locations
  Clone ID: LIB3828-003-Q1-K6-D8.pep
LHLSFIHHRPYFHKPIFXSFLQASSSFKLSSIRASSSSTPFFEPPKPSPSLLQTLTPLLKTTCITVTAAAALFFARFYQKPALAALTTPIVETATRESMVSLEEQEKTLVQKLGKTPNDVETLRSLMEVRIKLKKLQQAIDVIERLIRLEPQDPEWPMLRAQIHSYAGNFELAKEEFEEILAKDPDRVEAFHGLVMAY

SEQ ID NO: 80315 - protein, 102 aa, Gossypium hirsutum
  unsure (1)..(102): unsure at all Xaa locations
  Clone ID: LIB3493-043-P1-M1-C2.pep
TPQSLHTSVIKTTCITVTAAAALFFARFYQKPAIAAXTTPIVETATRGSMVSLEEQEKTLVQKLGKTPNDVETLRSLMEVRIKLKKLQQAIDVIERLIRLEP

SEQ ID NO: 80316 - protein, 206 aa, Gossypium hirsutum
  unsure (1)..(206): unsure at all Xaa locations
  Clone ID: GOSHI-09MAY01-C72899_1.pep
QRPALDGLIGCLPGRQQELIVSVAKAAKRPVVLVLLSGGPIDISFAKDDPRIGGIFWAGGPGEGGGNALAEVIFGDHNPGGRLPVTWYPQDFTKVPMTDMRMRPESSLDYPGRTYRFYKGDTVFEFGYGLSYSKYSYSFTRVSQNNLYLNHSSSLHTKETSDSVRYMLVSEVGAEICDERKITVHVGVKXNGELAGKHPVLLYVRH

SEQ ID NO: 80317 - protein, 209 aa, Gossypium hirsutum
  unsure (1)..(209): unsure at all Xaa locations
  Clone ID: GOSHI-09MAY01-C72599_1.pep
RVYALAVTALICARLVVTCFNMGLDSSDHKINSIFCMGGAHISMNQRKPGYAVSKIDTGPLPPTYGTELPRTAYLGSGSKGDLEKLWRTLHALYHPRKQYVVHLDLEAPCXERVTLASRIANHTVFSKVGNVYMITKANMVTYRGPTMVANTLHACAIHLNRSKNWDWFINLSASDYPLVTQDDLIDAFSDLNQNLNFIXHTSQLGGRR

SEQ ID NO: 80318 - protein, 195 aa, Gossypium hirsutum
  Clone ID: GOSHI-09MAY01-C72489_1.pep
GLLGGLMPRLAGNIGTPLRPGYLEVYLFGLLDEDVKSVAPGNFERHWGIYRYDGQPKFPLDLSGQNQNRFLIPAQNVEYLPQKWCILSPNTNDLSKLADNINYACTFSDCTALGYGSSCNILDANGNASYAFNMYYQVQNQNDMACNFQGLAKVTTQNPSQGTCNFIIQIASSSFAIGPSLIGMTFFAVIASVLL

SEQ ID NO: 80319 - protein, 261 aa, Gossypium hirsutum
  unsure (1)..(261): unsure at all Xaa locations
  Clone ID: GOSHI-09MAY01-C72449_1.pep
QNSRATTVPEKQTLLYHHKEKHFTAGEIVRDIIIGVSDGLTVPFALAAGLSGANASSSIVITAGIAEVAAGAISMGLGGYLXAAKSDAVLYARELKREEEEIISVPDVEAAEVAEILAEYGVEPHEYAPVGNALRKRPQAWLDFMMKVDLGLEKPDPRRALQSAFNIAVSYILGGLVPLLPYMFIPRAQDAVAASVVITIAALLIFGYAKGYFTGNKPVKSAFQTALIGAIASAAAFGIAKVIHPRKFYALFLRTENMGFL

SEQ ID NO: 80320 - protein, 210 aa, Gossypium hirsutum
  Clone ID: GOSHI-09MAY01-C72059_1.pep
WSFFLWTGATTRKKKQLKVLAMSSDNSTLKMNLNEYMVTLQKPLGIRFGLSLDGRILGHALKRGSNAEKSRIIMVGDTLKKTSDSSGGSFTEIKNFGDAQEMLTEETGSFSLVLERPFSPFPIHELHQLSDLDILFNRGRMPVATWNKALLASTLQTTEGGGNSGFVVFSSKFLASPGLKFLNDQNGHVDSGLHKNILSSPVSQLVCIFS

SEQ ID NO: 80321 - protein, 176 aa, Gossypium hirsutum
  Clone ID: LIB3543-036-Q1-K1-C2.pep
AIRRSAQVLAMSSDNSTLKMNSDEYMRYLYRKPLGIRFGLSLDGGIFVHALKRGSNAEKSRIIMVGDTLTKTSDSSGGSFTEIKNFGDAQEMLSEETGSFSLVLERPFSPFPIHELHQLSDLDILFNRGRMPVATWNKALLASNLQTTEGGGNSGFVVFSSKFLASPGLTFLNDQN

SEQ ID NO: 80322 - protein, 291 aa, Gossypium hirsutum
  unsure (1)..(291): unsure at all Xaa locations
  Clone ID: GOSHI-09MAY01-C72069_1.pep
EGTLLAVSTDDNGVKILANSDGVRFLRTVENRSFDASRVAPAAIVKAPSVGPFGSNNATIGTTIGDRAAPVAAIVGTNNDARTLADIKPRITEESAEKSRIWKLTEINEPSQCRSLRLPDSLTAMRVSRLIYTNSGVAILALASNAVHKLWKWQRNDRNVTGKATTSVAPQLWQPSSGILMTNDISDTNPEDAVPCFALSKNDSYVMSASGGKISLFNMMTFKTMTTFMPPPPAATFLAFHPQDNNIIAIGMDDSSIQIYNVRVDEVKTKLKGHQKRXTGLAFSHTLNVLV

SEQ ID NO: 80323 - protein, 164 aa, Gossypium hirsutum
  unsure (1)..(164): unsure at all Xaa locations
  Clone ID: GOSHI-09MAY01-C72329_1.pep
MEPVPKSDPQPEWNTQGPETGLEKPVCRLGLEGGSESYPERPDEADCIYYLRTGFCGYGSKCRFNHPRDRAGVMGAGKGGVGEYPERAGXPVCQYYMRTGACKFGASCYYHXPNQGGVPVTSVPLNNYGYPLRPGEKDCSIMXDGQCKXGTTCXFHHPAPPAMQ

SEQ ID NO: 80324 - protein, 269 aa, Gossypium hirsutum
  Clone ID: GOSHI-09MAY01-C72249_1.pep
FLRKQGNGAVASGSHTDRDGNINSKVVVSETNKPSEAATMPKETLSINQLAAKALQLRLKGKHDEAEKLLLEVESMKAKQNTGDHASKQQNVDNNSRHVVHDVLLRKGKDDDDTDKHLARRIMQNKQFSVSGQADDEYDYEDGPSRKPWKKGGESNWVSGNNHLAKRILTQQERCLFCFENPNRPKHLVVAIANFTYLMLPQWQPVVPGHCCILPMQHEPATRTIENNVWDEIRNFKKCLIMMFAKQDKEMVFLETVMGLAQQRRHCLI

SEQ ID NO: 80325 - protein, 204 aa, Gossypium hirsutum
  Clone ID: GOSHI-09MAY01-C73859_1.pep
MENFSYSSYPESGESSPISREIDSENQSWDDPPSTNAGGGGGGDYRVKFLCSYGGKIQPRSHDNQLAYVGGDTKILAVDRNIKFSAMIAKLSSLCGGDSEVCFKYQLPGEDLDALITVTNDEDLDHMMLEYDRVHRGSAKPARLRLFFFPLSPPLVASGLGGSEPKSERQWVVDALNSLQVQNIDGVSPPASAVPVANPDFLFG

SEQ ID NO: 80326 - protein, 153 aa, Gossypium hirsutum
  Clone ID: GOSHI-09MAY01-C73509_1.pep
MGILFTKLFSSLLGNKEARILVLGLDNAGKTTILYRLQMGEVVSTIPTIGFNVETVQYNNIKFQVWDLGGQTSIRPYWRCYFPNTQAIIYVVDSSDTDRLVIAKEEFHAILEEEELRGAVVLIFANKQVCTFFIYSFLLLGPGVELVLLLILC

SEQ ID NO: 80327 - protein, 149 aa, Gossypium hirsutum
  Clone ID: GOSHI-09MAY01-C73499_1.pep
VVTVGGWMRNLVKTVCGIELPIRPLETNVCYWRIKDGHEVEYTIGNDFPTFASYGHPYIYGTPSLEYPGLIKVAVHGGYQCNPDKRPWGPGLVPDSLKQWVEQRFKGKVDSSKPVMTQLSVYSMTPDEDFVIDFLGGEFGKDVVIGGGF

SEQ ID NO: 80328 - protein, 70 aa, Gossypium hirsutum
  Clone ID: GOSHI-09MAY01-C73799_1.pep
INLDAAYNLLQFRSASGLIAKDDSGKVLISKSSLKKKVASLFAAEACVCSQAVRLGISNGVDSVEIRTRG

SEQ ID NO: 80329 - protein, 179 aa, Gossypium hirsutum
  unsure (1)..(179): unsure at all Xaa locations
  Clone ID: GOSHI-09MAY01-C73619_1.pep
MSREQKGKQEKGGSNVAEKVVVAVKASKEVPKTALVWALTHVVQPGDCITLLVVVPSPSSGRRWGFPRFAGDCASRKSQLGSSSEQKSDITDSCSQMILQLHDVYDPNKINVKIKIVSGSPCGAVAAEAKRALASWVVLDKXKHEEKRCIEELQCNIVVMKNSQAKVLRLNLVGSPEKE

SEQ ID NO: 80330 - protein, 162 aa, Gossypium hirsutum
  Clone ID: LIB3829-017-Q6-K6-B2.pep
MTEEQKGKQEKTSLGMTEKVVVAVKASKEIPKTALVWALTHVVQPGDCITLLVVPSHGSGRKWGFPRFSGDCSSSSRKSQSGSSSEQKSGISDSCSQMILQLHDVYDPNKINVKIKIVSGSPCGAVAVEAKRAQAGWVVLDKQLKHEEKRCMEELQCNIVIM

SEQ ID NO: 80331 - protein, 128 aa, Gossypium hirsutum
  Clone ID: GOSHI-09MAY01-C73609_1.pep
MGFASFVGRVCFASIFILSAWQMFNEFGVDGGPAGKELAPKLNLAKKHLSSQFHVNFPDIEVRQIVLTAIAMKGLGAILFVFGHGFGAFLLIVYLLVSTPILHDFYNYGPDEPRYNILLRDFLQCVAQ

SEQ ID NO: 80332 - protein, 138 aa, Gossypium hirsutum
  unsure (1)..(138): unsure at all Xaa locations
  Clone ID: GOSHI-09MAY01-C73049_1.pep
MAAAALLRSFRRRDVAASPLSAYRCLTNNGKTSAGINWTSFCRAFSSKPXAGNDVIGIDLGTTNSCVAVMEGKNPKVIENSEGARTTPSVVALNQKGELLVGTPAKRQAVTNPTNTVFGTKRLNRRRYEDPQTKKEMG

SEQ ID NO: 80333 - protein, 141 aa, Gossypium hirsutum
  unsure (1)..(141): unsure at all Xaa locations
  Clone ID: GOSHI-09MAY01-C68839_1.pep
ISVEIIEEMTKEHPPEPLDFFIWTVEDVGMWLEEIXNLGSYRQIFKENCVNGEYLEGMSMFTTEQXILELIRRVLINWGDFITLCRELKQIKVACLKREQKVRRPWWAPXCLSIFFVKVXKRNKQSRVVSLELEHDAKNSF

SEQ ID NO: 80334 - protein, 197 aa, Gossypium hirsutum
  unsure (1)..(197): unsure at all Xaa locations
  Clone ID: GOSHI-09MAY01-C68529_1.pep
MPNLECRMYEAKYPEVDMAVMIQVKNIADMGAYVSLLEYNNIEGMILFSELSRRRIRSVSSLIKVGRTEPVMVLRVDKEKGYIDLSKRRVSEEDIQACEERYNKRXLVHSIMRHVAQTLDIDLEELYIKIGWPLYRKYGHAFEAFKIIVTDPDSVLNTLTCEVKNXGPDGPKVTEVVPXVTDEXKDALVKNIRRRMP

SEQ ID NO: 80335 - protein, 114 aa, Gossypium hirsutum
  Clone ID: LIB3189-051-P1-K1-H2.pep
MPNLECRMYEAKYPEVDMAVMIQVKNIADMGAYVSLLEYNNIEGMILFSELSRRRIRSVSSLIKVGRTEPVMVLRVDKEKGYIDLSKRRSSEEDIQACEERYNKSKLVHSIMRH

SEQ ID NO: 80336 - protein, 154 aa, Gossypium hirsutum
  Clone ID: GOSHI-09MAY01-C68499_1.pep
MASSSNPEIARVFFPSYPMFQLYKDGRAERLRQTVTVPPSDDPKTGVRSKDAPVPPLSSARIFLPKTSDPTAKLPLLIYIHGGAFCIESPFSPTYHNYLTSLVAKANVIAVSVQYRKAPEHNLPAAYDDAWDAINWIASHIERNGPEPWLNENA

SEQ ID NO: 80337 - protein, 164 aa, Gossypium hirsutum
  Clone ID: GOSHI-09MAY01-C68769_1.pep
MLSSRFVNSIAKRSFISSGYRYPERHLILSQHRPIFTTSPVHSSWMDSIKEVFTGKKTSPDDHVTSAESFTLLRFADELENARNVGKFKQYIVGRTREASFGGGFGKKLAIVRYLGGCEPTGENLQLSQKKEAAKQCDCTLLDVENALAKFTWAKEVHKKDGQL

SEQ ID NO: 80338 - protein, 234 aa, Gossypium hirsutum
  Clone ID: GOSHI-09MAY01-C69849_1.pep
RRSLEQGLEPSLSCSSSVQHKAKLRADEGTEISIFDAQRYFNETNSDIRVCKRVSPLNMPNLELDPISSAPQLRSFHATPTASSEASWNSQTGLLSNPPGAIAVSMTMKNPTTDHKRKGCGKLKWLWGRSCPCSGNKSVQVEPKTPLGMNQKSSSVADGDNKREERLLASNPHRMSAENQFDSSLGRQRVVASVSASARPRPLMISDGYSGTAVAGFTFPILNQQPTSSRLKMA

SEQ ID NO: 80339 - protein, 77 aa, Gossypium hirsutum
  Clone ID: GOSHI-09MAY01-C69739_1.pep
PQTQKNTVTHNFKQSKAKKTKVQSRFFIYLSVFLTFIFPFSFSFFLKFYFITKNIKRERKGDLPKPGFASPEPLLRC

SEQ ID NO: 80340 - protein, 174 aa, Gossypium hirsutum
  Clone ID: GOSHI-09MAY01-C69689_1.pep
MEISSISTTTIHYFCPSTESLLFKRVKLPSRDQHLVSISLNSRTEQRLLARPCSLAHKGNSVKVKCSQKREIPVLEASSMDEVFDILAERILPTSSVASNPNTKHIVGLAGPPGSGKSTLASEVTQRINKFWLQSACSSDPQVKPPDVAIVVPMDGFHLYRSQLDAMENPEEAH

SEQ ID NO: 80341 - protein, 230 aa, Gossypium hirsutum
  unsure (1)..(230): unsure at all Xaa locations
  Clone ID: GOSHI-09MAY01-C69679_1.pep
MPELSTVKPKAMSSNCKSDGIKQQCFQNSKEKEVMVMPPLVSADKESDNSCKETILSASAPVSVAEEMDSRKEEATMFSPVTSSSLVNEVSDDSKLAARSIAFGFDSSALTSSKDEGCHNLDREALETGHTPKLEDIADQPSSNNLQCGNGESSFSAAGLVTGLISYSGPIAYSGSLSHRSDSSTTSTRSFAFPILQSEWNSSPVRMAKADRRHYRNHRGWRQXLLCCKF

SEQ ID NO: 80342 - protein, 138 aa, Gossypium hirsutum
  unsure (1)..(138): unsure at all Xaa locations
  Clone ID: GOSHI-09MAY01-C69199_1.pep
MDLDDDGGTSDLSTSAGEPNAATEKICESSAFQIMPFKEEPIDSHPPPPIGVVPVSMRPLPTVKRSSTKDRHTKVEGRGRRIRIPATSAARIFQLTRELGHKSDGETIRWLLEHAEQAIXTTGTGTVSAIAVLVGGTL

SEQ ID NO: 80343 - protein, 181 aa, Gossypium hirsutum
  Clone ID: GOSHI-09MAY01-C69139_1.pep
FHPLDSHHSNIGSQVKFMAPEGMIHHDAPPNHHLPANMLHPLHHPSSGLTGFDPPIHHPMLQQMHIPRNFPPPIMQCGIPGVPLLAPHSTNQMAGLLPELNPMHGFPLGHGHRQPQPNFAGLGMPPGNDVGSGSHHPEALQRLIEMELRSKSKQMGPFGAPGHSQGQGMYGLEPDMGFQYR

SEQ ID NO: 80344 - protein, 160 aa, Gossypium hirsutum
  Clone ID: GOSHI-09MAY01-C64809_1.pep
NWISTQIGNPERQKLIDEIHEYMLSKTPPVPQLSPSQALEEHPTNSDGEAQANQKDSVTMVAGNGLPNPVVGDRAVEEEPLVLANANPGTAVMGVRAAREIPAEESSNQPLQRPEMRVQRSADDRLFTWAAVGLTIAILVLLFKKFMKSSGHGAVFMDGS

SEQ ID NO: 80345 - protein, 132 aa, Gossypium hirsutum
  Clone ID: GOSHI-09MAY01-C64509_1.pep
MDGSGGRGGSGVDNVLPNYKLGKTLGIGSFGKVKIAEHILTGHKVAIKILNRRKIKNMEMEEKVRREIKILRLFMHPHIIRLYEVIETATDIFVVMEYVKSGELFDYIVEKGRLQEEEARNFFQQIISGVEV

SEQ ID NO: 80346 - protein, 288 aa, Gossypium hirsutum
  unsure (1)..(288): unsure at all Xaa locations
  Clone ID: GOSHI-09MAY01-C64009_1.pep
NFRFEIERFYNLTTPDTPLTSTPPPATSPPSNNTKNTTGKKSNSSRTIIIASVSAVALVVLVVSSCIFIFLRVRKSKVKAEKGGEAAEAVDEIKNAEALQYDFSTISAATNHFSNSNMLGQGGFGAVYKGKLAGGELIAVKRLSTDSGQGDLEFKNEVLLVAKLQHRNLVRLQDFCLERNERLLIYEFVPNASLDQFLFDPVKRAYLGWEKRYKIIGGIARGLLYLHEDSRLRIIHRDLKTSNILLDAKMNPKIADFGMARLCAVDQTHGATSKIXGTYYMAPEYAMH

SEQ ID NO: 80347 - protein, 158 aa, Gossypium hirsutum
  Clone ID: GOSHI-09MAY01-C64269_1.pep
MASSLASPSPTSSFIRNKKDLGFSAFPSTSQIAIQKCKKQVSKKIVSVMAPQQSERKPATTGSVKTGMTMTEKILAKASEKPQLSPGDNVWVNVDILMTHDVCGPGSIGIFKKEFGQNAKVWDREKIVIIPDHYIFTSDERANRNVDILRDFCTEQNI

SEQ ID NO: 80348 - protein, 43 aa, Gossypium hirsutum
  Clone ID: GOSHI-09MAY01-C64229_1.pep
ETGTGSRVRRRRRRIGYQQVVLVLWFWKLLTTTMYEIKGFQNS

SEQ ID NO: 80349 - protein, 236 aa, Gossypium hirsutum
  unsure (1)..(236): unsure at all Xaa locations
  Clone ID: GOSHI-09MAY01-C65609_1.pep
ENANIALEQISELASPDGDTMQRIAAYFTEALADRILKTWPGLHKAINSTRVVDLVSEQALVRRLFFEVFPFLKAAFLLVNQAIIEAMEGEKVVHVIDLDAAEPMQWIALIRGLSARPEGPPHLRISGIHVRKEVLDQMGHRLSEEAEKLDIPFQFNPVVGDLEDLDVERLHVKTGXAVAISSVLRLHSLLAYDDEPLRKKLPLALKNSNGIHLQRALQMSQNTLESYSRKIRLTD

SEQ ID NO: 80350 - protein, 119 aa, Gossypium hirsutum
  unsure (1)..(119): unsure at all Xaa locations
  Clone ID: GOSHI-09MAY01-C65349_1.pep
MAMHKVFGAVLFVFLGVGICSATRALLTLNDVGSHLPGIGHGGATIGVYGGVGLGGGGGGGSGGGXGGSAVVGGGASAGYGGGGGSGEARGVALALQPTSPLNIIILPLLNHPFTLNHQ

SEQ ID NO: 80351 - protein, 171 aa, Gossypium hirsutum
  unsure (1)..(171): unsure at all Xaa locations
  Clone ID: GOSHI-09MAY01-C65319_1.pep
MAKVSLLLFSLFIIVASAIINGSAAVEKVGIYELKKGDLSVKFTNWGATIVSVFLPDKYGKMGDIVLGYDSVNDYKNDTSYIGSIVGRVANRIGGAQFTLNGVHYKLIPNEGKNMLHGGPIGFSDVVWKVNKYKKDGYSPSICFAYDSYDGEEXFPGALRVTVTYTLYPSN

SEQ ID NO: 80352 - protein, 139 aa, Gossypium hirsutum
  Clone ID: GOSHI-09MAY01-C66989_1.pep
EMDATISPGLYPLHRCKTRHLVRHAQGVHNVAGEIDHAAYSSEEYFDAHLTPLGWQQVDHLRNHVHETGLSKKVDLVIVSPLLRTMQTAVGVFGGEGYKDGIEVPPLMVANAGQSDRPEISSLNCPPFVAGELCREHLG

SEQ ID NO: 80353 - protein, 87 aa, Gossypium hirsutum
  unsure (1)..(87): unsure at all Xaa locations
  Clone ID: GOSHI-09MAY01-C66979_1.pep
MDHLAHVSNQPNSQPQSQISHLALDIXGGSLIKLVYFCRYDDSCRDDDELRSQNESLGSESDNSRPVLGGKLHFAKFETSKINDCLE

SEQ ID NO: 80354 - protein, 179 aa, Gossypium hirsutum
  Clone ID: GOSHI-09MAY01-C66609_1.pep
MDDGNTTEAERWLTIAAKLLASGDFHGTRTFAIRARESAPVLADQILAVTDTLLTAQSNPRDWYGILQLVPLTQSMEVVESQYRKLAILLNPVKNTLSFADQAFRFVSEAWNVLSNPSNKLIYDNELRFLQVGHVSQLAQQHYQQEQPQVQQPQPLTQTLFMQQPPPPKETQTLFMQTP

SEQ ID NO: 80355 - protein, 264 aa, Gossypium hirsutum
  Clone ID: GOSHI-09MAY01-C67999_1.pep
RQPLYEAEANVRTIEACYGIVERMVKALIGPIFETFFDSLYDLFKFADDWIGEFVTKIDGILPPVIKQAISKVASAANNALGLTVDVPTMEVQSTGVKGTSSRFLQQISSGAILVVEGVASQAKNSGLIPEELQVLKYLKYLKYFVTVQAAVLRAVKFYFEVKKMLRPLRPVIDFIERVVVSVYQKFFAKMVKSLFRWVLINLFGVPAGVFDIIDKVGGDLSKLGDLSKLGDLCMLGDFSTLGGLSKLGDLSKIDDLVPSGALS

SEQ ID NO: 80356 - protein, 173 aa, Gossypium hirsutum
  Clone ID: GOSHI-09MAY01-C67949_1.pep
MGLRNIIGKRLGLGLVRRRKPFSTATCDGDGNGNGNAKSINLYSAINQALHIALETDNRAFVFGEDVSFGGVFRCTTGLSDRFGKARVFNTPLCEQGIVGFGIGLAAMGNRAIAEIQFADYIYPAFDQIVNEAAKFRYRSGNQFNCGGLTIRAPYGAVGHGGHYHSQSPETFF

SEQ ID NO: 80357 - protein, 271 aa, Gossypium hirsutum
  Clone ID: GOSHI-09MAY01-C67799_1.pep
LKLHPKLPIWAAGILLVTSSSHLHSFVIQQARTMDRHLSKSFEIPPASLSIFGILTTLSGLVLYERLFVPLARRFTGHPSGVTCLQRMGIGFVINIVATIVSSFIEIKRKSVAAHHNLLDDPKAIVPISVFWLVPQFCLHGIAEVFMSVGHLEFLYDQSPESMRSTAAALYWTAISMGNYIGTLLVSLVHKYTGENSNWLPDRNLNRGKLEYYYWLVSGIQVLNLIYYIICAYLYTYKPLEEVTEEEEEDGEFNGKKISEKGVELTVNETA

SEQ ID NO: 80358 - protein, 195 aa, Gossypium hirsutum
  Clone ID: GOSHI-09MAY01-C67709_1.pep
MAKIWGKMWALMGLLLFNSVCNVSSLSVNVNNIECVYEYVLYEGDTISGNFVVVDHDIFWGSDHPGIDFTVSSPLGNTVHELKGTSGDKFEVKAPRSGMYKFCFHNPHSAPETVSFHIHVGHIPTEHDLAKDEHLDPINVKIAELREALESVTAEQKYLKARDTRHRHTNESTRKRVIGYTVGEYILLTLLSALQ

SEQ ID NO: 80359 - protein, 154 aa, Gossypium hirsutum
  Clone ID: AW187122.1.pep
MAKIWGKMWALMGLLLFNSVCNVSSLSVNVNNIECVYEYVLYEGDTISGNFVVVDHDIFWGSDHPGIDFTVTSPAGNTVHELKGTSGDKFEFKAPRSGMYKFCFHNPHSAPETVSFLFLSGHVLTVHYLDLYEHLDPINVKIAELREALESVTA

SEQ ID NO: 80360 - protein, 110 aa, Gossypium hirsutum
  Clone ID: GOSHI-09MAY01-C67699_1.pep
MASETCSPSNKLRFLLGMVLFLLMNMATVQLSSTFYSTTCPKALATIKSAVNSAVSNEARMGASLLRLHSHDCFVNGCDGSILLDDTANLTGEITAVPISNSIRGFEVID

SEQ ID NO: 80361 - protein, 168 aa, Gossypium hirsutum
  Clone ID: GOSHI-09MAY01-C67169_4.pep
MSLKIMMRPRVRPRVRPRVRSKRGGESKLWRSRTRSHVVPDQPQESAEQSPWANLPPELLLDIIHRVEESETAWPARAAVVFCAAVCRSWREITKEIVKTPEQCGRLTFPISLKQPGPRESPIQCYIRRDRATSTYLLFYGLVPSEGEGDKLLLAARKVRRATCTDFV

SEQ ID NO: 80362 - protein, 176 aa, Gossypium hirsutum
  Clone ID: GOSHI-09MAY01-C67169_3.pep
MSLKSIMRELKEMKEGIGSISKRGGESQVWRSRTRSHAAPDRAPTESESVQQSPWANLPPELLLDIIQRVEESETARPARAVVVFCAAVCRSWRGVTKEIVQTPEQCGRLTFPISLKQPGPHESPIQCYIRRDRAISTYFSFYWFLPLCVMIVIFLNIIYIIFFYLLYFTFSFLFS

SEQ ID NO: 80363 - protein, 279 aa, Gossypium hirsutum
  unsure (1)..(279): unsure at all Xaa locations
  Clone ID: GOSHI-09MAY01-C67169_2.pep
MSLKSIMRELKELKDGIGNXSPPAGQSKLWRSRTRSHVAPDRAPSESQPAEQSPWANLPPELLLDIIQRVEESETAWPARAVVVFCAAVCRSWREITKEIVQTPEQCGRLTFPISLKQPGPRESPIQCYIRRDRATSTYLLFYGLVPSEGESDKLLLAARKVRRATCTDFVISLVADDFSRASYTYVGKLRSNFFGTKFTIHDSQPPCDSIIPSSTRSSRRFHSKQVFPKLSSSNYNIGTITYELNVLRTRGPRRMHCVLHSIPMSSIQEGGTAPTPLA

SEQ ID NO: 80364 - protein, 278 aa, Gossypium hirsutum
  unsure (1)..(278): unsure at all Xaa locations
  Clone ID: GOSHI-09MAY01-C67169_1.pep
MSLKIMMRELKEMKDGIGNISKRGGESKLWRSRTSSHVVPDQPQESAEQSPWANLPPELLLDIIHRVEESETAWPARAVLXCAAVCMSPTRPSKEMGRAPEQCGRLTFPISLKQPGPRESPIQCYIRRDRATSTYLLFYGLVPSEGEGDKWLLAARKVRRATCTDFVISLAADDFARASYTYVGKLRSNFLGTKFTVYDSQPPCDSMIPLTTHRRFHSKQVSPRLPACNYSIGTITYELNVLRTRGPRRMHCVLHSIPVSAIQEGGTAPTPVGITAIL

SEQ ID NO: 80365 - protein, 96 aa, Gossypium hirsutum
  Clone ID: AI055297.1.pep
IQQKHTVNSQLFISSLGINLNIPGKFAHVLSADPGTVRTTWNLPGCQSLLFHLSLNVPNPIFHFLQTFAFIIFSDIYYRHTKANLYINQLNSQPKR

SEQ ID NO: 80366 - protein, 71 aa, Gossypium hirsutum
  Clone ID: uC-gsflmaxxa107b02b1.pep
KRNGSNQPRTKTARMHSPHTLFLFIGWNLKMATSFVTPVRPIQSALTPTFNPPGHRRSHQHRFSPQIRSQN

SEQ ID NO: 80367 - protein, 105 aa, Gossypium hirsutum
  Clone ID: GOSHI-09MAY01-C67359_1.pep
KKHAPVRRLLVLPIKCSSSGPSQDTESQAGTTSVPSSPSLPSSLASSNPTYNCRAGIGAARIIQTAYSTYLMLSGSDAFCPLGGGSCGDVLNSDYAFFFGVPLSL

SEQ ID NO: 80368 - protein, 203 aa, Gossypium hirsutum
  Clone ID: GOSHI-09MAY01-C67379_1.pep
PRVRPRVRPRVRPRVRPRVRFIFLQSNPFFFIQNPPFSMGNSRFKLSDMFPNVWFYNLKDMNKPIHHEKKHHHPSSSKHEQPHFNPRKSYHFTRELVPIHVSPDQPLRKSTKKRNPRRNFRSPPSKVLTSSVSAGCSCRETIKNKPDSPPEYSASSSSSLSSSGDSSLPQESFDNLVWSSSKANDDIISDADVKKIDEFLPEL

SEQ ID NO: 80369 - protein, 74 aa, Gossypium hirsutum
  Clone ID: LIB3829-007-Q6-K6-D2.pep
ESERNEQRAKIGENRPKYKINTAWTSLHGQTTRPCQFGRLEHGLKQSHTSVSQGRVLAEPKLSPIRKKDNFEGS

SEQ ID NO: 80370 - protein, 101 aa, Gossypium hirsutum
  Clone ID: LIB3196-016-P1-M1-G7.pep
NNRTRACHTGVSHGRVPPEPKLCPIRKRPILRVLRHSKAYKYTLEEEEKGDGEKEVGNCSRKAEFTIKTEDFPSISLQEFWVFFMFCIHYSSEMFSFLVMD

SEQ ID NO: 80371 - protein, 184 aa, Gossypium hirsutum
  Clone ID: GOSHI-09MAY01-C60549_1.pep
MGLSVENSVTQSHTRTHKIFLISNYLLLGAASSCIFLTLSLRLFPSLCGFFLILLHVITIAAVVLGCSVAISGSNKRYLAYMVSMVLTSIFEGSVSVLIMTRTSDFLGYLRSYVREDDGVLILKLAGGLCVAVFFLQWVVLGLAFVLRYYVLVEGHRVGNGGSLKQGNGKVAHDDLKTWPWDFH

SEQ ID NO: 80372 - protein, 129 aa, Gossypium hirsutum
  Clone ID: GOSHI-09MAY01-C60449_1.pep
RFTITAADHQNPISRVFFVFWVDETGAEEQTDTDRNMAVMFEILRRKRQVKLESFILNRSSFAQTAENLFSLSFLVKDGRVEIVVHGSGSHIVSPKKAPAASSIASGEAAYSHFVFRFDFKDWKDLLRN

SEQ ID NO: 80373 - protein, 109 aa, Gossypium hirsutum
  Clone ID: GOSHI-09MAY01-C60689_1.pep
AVFLGNPTGKRECAGTGVFLPRRIGAPSEPRKKPACPTVLLPARVVQALNLNLDELGAQPQLNPRLNANVTAEIDAALKLGSGWNQKQGNFRQHQGINHEVALPQEWTY

SEQ ID NO: 80374 - protein, 161 aa, Gossypium hirsutum
  Clone ID: GOSHI-09MAY01-C60649_1.pep
MKVTATAVTVDSGFGDHQVWPPGFRFHPTDEEPVLYYLKRKICKKRLKLDIIRETDVYKSDPEELPGKSVLKNGDRQWFFFCPRDRKYPNGARSNRATIHGYWKATGKDRSITCNSRVVGIKKTLVFYRGRAPNGERTDWVMHEYTLDEEELKRCQNVKDY

SEQ ID NO: 80375 - protein, 192 aa, Gossypium hirsutum
  Clone ID: GOSHI-09MAY01-C60639_2.pep
MCVVKELSIFVLFVLIFGNVIQAQNSPFPSPKSTPTTTPPSKSTSSSPPASSPTTSSPPAASPTTPPPPQIQPPAATPPSSSSPSISPPTASPPAATPSSSPPSLTPTSSPTSMTPAGAPPVSADIPSSSTTPAESPGVFPSSSSPPSPTPIGSSPESAAGPAANDDSGSRSGYEVGFVLSFGLVIGAPLAI

SEQ ID NO: 80376 - protein, 197 aa, Gossypium hirsutum
  unsure (1)..(197): unsure at all Xaa locations
  Clone ID: GOSHI-09MAY01-C60639_1.pep
LSIFVLFVLIFGNVIQAQNSPSPSPKSTPTTSPPSKSPSSSSPASSPTTSSPPASSPTTSSSPAKSPTTTPPPQIQPPAATPPSSSSPSISPPTASPPASTPSSSPPSLTPTSSPPSMTPAGAPPVSADIPFEFKNRRRKVPGXFPSSSSPSSPTPIGSSPESAAGPAANDDSGSRSGYEVGFVLSFGLVIGAALAI

SEQ ID NO: 80377 - protein, 89 aa, Gossypium hirsutum
  Clone ID: uC-gsronu33B081e03b1.pep
LLGLLSPTQSQPPNATPPSSSSPSITPANAFSPASTPSSSPPSLTPTSSPPSMTPTGAPPVSADIPFSSTTPAESPVVIPSSILLTLPI

SEQ ID NO: 80378 - protein, 55 aa, Gossypium hirsutum
  Clone ID: GOSHI-09MAY01-C60159_1.pep
QLKYFPRKEDERSGVWFGRTTAFHSFSSQIGALNVQMHTKLCMGPNHTYKAGYQL

SEQ ID NO: 80379 - protein, 104 aa, Gossypium hirsutum
  Clone ID: GOSHI-09MAY01-C60179_1.pep
LNPFRYSLRNTLGSWPILDTECRYSKSKSYPPASTHHLRSTLYTMWGLNQPTHPYTPCYTEMRHLIRRLQLSCQITSLIAFQTLLPNINPPRCNETYKICHVIM

SEQ ID NO: 80380 - protein, 180 aa, Gossypium hirsutum
  Clone ID: GOSHI-09MAY01-C60109_1.pep
SKVQGELDEIVGKSGPLTEPGVQSMVYLQAVLKEVLRLHPPGPLLSWARLSIMDTTVDGHHVPAGTTAMVNMWAITRDPDVWVDPLKFMPERFVSKDSGDVEVVSVLGSDLRLAPFGSGRRACPGKTLGLATVTFWVASLLHQYVWVQSDENPVVDLSEMLRLSCEMANPLKVKVHPRLR

SEQ ID NO: 80381 - protein, 73 aa, Gossypium hirsutum
  Clone ID: LIB3196-034-P1-M1-A5.pep
GQKWALTRKKNNEENTCDYIRIREQPINKYLSNEQKEHYSYTGSSRLSALESPLTPLSTHTGFTPCLGKPRSR

SEQ ID NO: 80382 - protein, 87 aa, Gossypium hirsutum
  unsure (1)..(87): unsure at all Xaa locations
  Clone ID: LIB3196-034-P1-M1-A4.pep
FWVTFCPCFPRGCKPVCIKRGVRGDLEHIILKIPCSCDVLFVHYLNTHLWAVVLFLYNHMYFPHYFSFSXEPTFALTLLNRSIYEFF

SEQ ID NO: 80383 - protein, 74 aa, Gossypium hirsutum
  Clone ID: GOSHI-09MAY01-C61829_1.pep
LQSVILWTSALISILATQYFLYSSFCGLLSLRGVLLLFMSLLGFKLACIFFIILWNTIGFLVVIDCGFICFVWN

SEQ ID NO: 80384 - protein, 123 aa, Gossypium hirsutum
  Clone ID: LIB3196-033-P1-M1-A1.pep
MSVAGGEIRGDTAGEDTAAPGRFSFSPEPTLEDIRRLHAEFAAERDWEQFHQPRNLLLALVGEVGELAELFQWKTDGEPGPQGWSPRERLALQEELSDVLIYLVALAARCRVDLPLAVLSKMD

SEQ ID NO: 80385 - protein, 86 aa, Gossypium hirsutum
  unsure (1)..(86): unsure at all Xaa locations
  Clone ID: LIB3196-033-P1-M1-A2.pep
GLQFLILWTSALISILATQYFSNKSFGRYTISWKRLLPFIGELGELAXRFQWKTEGEPGPQCWSPRERLDLQEELRDVLIYLVALA

SEQ ID NO: 80386 - protein, 48 aa, Gossypium hirsutum
  Clone ID: LIB3196-030-P1-M1-A7.pep
TNYNFKKNCSRVDLKSHNSHIHKTSPPRWGRNRGAGGRERVGGRDPRD

SEQ ID NO: 80387 - protein, 38 aa, Gossypium hirsutum
  Clone ID: LIB3196-030-P1-M1-A6.pep
NFKKNCSRVDLKLHKNHIDKIKYRLSLYFFKTILKKLK

SEQ ID NO: 80388 - protein, 38 aa, Gossypium hirsutum
  Clone ID: GOSHI-09MAY01-C61539_1.pep
CYINNCINNLQELDQIKISCIKLHKIKVHVYNCTLNHS

SEQ ID NO: 80389 - protein, 225 aa, Gossypium hirsutum
  unsure (1)..(225): unsure at all Xaa locations
  Clone ID: GOSHI-09MAY01-C61169_1.pep
DAWADAWAKLVTDFGSLELSPTDGRSLTDFMHLRGLKMQSLGRVVELAEKLPHIQSLCIHEMVTRAFKHVLKAIVASVXNIEDLPAAGASPLNFLLGNNGSEDNAENANDDYLLKLRWLKRFLSAKFGWKLRDEFRHLRKLSILREPCHKGGLELVPKDYDMEXKEPFKGCNIISIYPVCKHIVCTSADGRTLLESSKAALDKGKLEDAVNYGTKALAKMIAVCG

SEQ ID NO: 80390 - protein, 166 aa, Gossypium hirsutum
  unsure (1)..(166): unsure at all Xaa locations
  Clone ID: GOSHI-09MAY01-C61109_1.pep
SPAPFGDQSHSEPESWNAAQHCQQGRSQGGWGHRLDGFPPGRPXSPENLNQICLPDRQHVVYGPWNLPQSGYSHLTRQGETLNFLEIGYSRCCHCRSHTNRLECAKLVGGVAPGCRGDREYAVKTHHHSCCRHPPSPIRDECFARLAPYPNYDRDILAIDISRVTP

SEQ ID NO: 80391 - protein, 159 aa, Gossypium hirsutum
  Clone ID: GOSHI-09MAY01-C61129_1.pep
MSVLVPVLSFRHTGACVCSLCIWTMLDLIAADTRFALVLFLALSEHNPAGNIFISPFSISSAMAMVFLGTRGNTAAQLSKTFHFNTVEEIHSRFQSLNAEINKPGASYILKLANRLYGEKTYNFLPEFLASTQKTYGADLASVDFQHATEEARKTINQW

SEQ ID NO: 80392 - protein, 225 aa, Gossypium hirsutum
  Clone ID: GOSHI-09MAY01-C61319_1.pep
ISTRNIQEDDSGGSSLYDNNLHKDANSYQPQRHAFEHDEAEDGSSSVAVNMQQLNLHNDDQEASSEEDNPSVIIPNHLLVHTPDCSHLSFGSFGPAIGSAFSGSFASRPLKNNLDEAPESADISSIGHSENRNPEYYGDEHLRSNAEGNIMIRSTVNTGNYEATEDSQPAVLKQDASEAAQGNQYAFPSSASGYSYENSQQLNPAFTHPQTSTQMQNLTPFSSVM

SEQ ID NO: 80393 - protein, 49 aa, Gossypium hirsutum
  Clone ID: GOSHI-09MAY01-C62939_1.pep
DFCARGGSINPFMLTFIIALSASVLNCYSRTCLIMHVETTPFDLICQND

SEQ ID NO: 80394 - protein, 150 aa, Gossypium hirsutum
  Clone ID: GOSHI-09MAY01-C62539_1.pep
CNHIKLSGSNPYTTVTPQIINSKWEKVQQLVPKRDHALLEEQSKQQSNEHLRRQFASQANVVGPWIQTKMEEIGRISIEMNGTLEDQLSHLKQYERSIVDYKPNLDLLEQQHQLIQEALIFDNKHTNYTMEHIRVGWEQLLTTIARTINE

SEQ ID NO: 80395 - protein, 94 aa, Gossypium hirsutum
  unsure (1)..(94): unsure at all Xaa locations
  Clone ID: GOSHI-09MAY01-C62359_1.pep
MGTREVYEEKLRNGNLHHDPTINPGLGSARCPRCLSLLNPDSDKAEWTITSVLEDATAVAGSGIGGMLSAVHGFNTGIPRLXNHIKGPKWLPFV

SEQ ID NO: 80396 - protein, 85 aa, Gossypium hirsutum
  Clone ID: uC-gsronu33B154g11b2.pep
MGTREVYEEKLRNGNLHHDPTINPGLGSARCPRCLSLLNPDCDKAEWTINSVLEDATAVGSLSFRITSRDLSGSLLNCDSSAVNV

SEQ ID NO: 80397 - protein, 170 aa, Gossypium hirsutum
  Clone ID: GOSHI-09MAY01-C62369_1.pep
MSSTPYFSPQFPSLDVFERKESEVLPVEGSHRSWETRIDGGMDLDFRRQPHAVEFDVDFWPVEHPMEPQDEDRPVKCPMSAASSINDGKGHEEMVVGESSRKRSEQPQTVNGIGVAAMMEPLVRAVRKRQHTLTRDNHITVEPRIGKPSLPPIPTPTLTGSQMLQQLDKA

SEQ ID NO: 80398 - protein, 38 aa, Gossypium hirsutum
  Clone ID: GOSHI-09MAY01-C62309_1.pep
KIRVADLKIRKPAQKLISSNGIPINQIIKVKLPRDIHN

SEQ ID NO: 80399 - protein, 192 aa, Gossypium hirsutum
  Clone ID: GOSHI-09MAY01-C63909_1.pep
MVFPENSNYWSHFDYATLIDDIPVPDDPYAGFAWSTQPIDAPSNVVSVEIDGSFGDSDGLKESGSKKRVRSESCSASSSKACREKLRRDRLNDKFMELGSILQPGRPPKTDKSAILIDAVRMVTQLRGEAQKLKDSNTSLQERIKELKAEKNELRDEKQRLKAEKERQEQQLKAMNAQPSFMPPAPSAIPAA

SEQ ID NO: 80400 - protein, 119 aa, Gossypium hirsutum
  Clone ID: GOSHI-09MAY01-C63579_1.pep
PTRPLFLQPHLYFLPQKSTSPPQGAVTDAPSFEVWPILASDPPSISDYNEVIGDRRPRSEVRRRTWRHEGRWGVRGSCVGAYGCWRLRRQGGNPRVSMDSLILGHLDPIYFIWILGYGF

SEQ ID NO: 80401 - protein, 87 aa, Gossypium hirsutum
  Clone ID: GOSHI-09MAY01-C63109_1.pep
EIEREKKKKKRDSTRHTRSLTTLRLFVTFSVSTQNIHEHSILYINRFLSFIPLPIVFFFYCLLKNTAKKNRNQNLFSLQWVLLRSLL

SEQ ID NO: 80402 - protein, 69 aa, Gossypium hirsutum
  unsure (1)..(69): unsure at all Xaa locations
  Clone ID: LIB3196-053-P1-M1-D8.pep
QNNTPSXXVKASCHLKNPMFHKQLGFKNVFPLHSMSQTGEFGRSRREXGRDMRGVRIVMGKVKRVIGGG

SEQ ID NO: 80403 - protein, 68 aa, Gossypium hirsutum
  Clone ID: LIB3196-053-P1-M1-D3.pep
QNNTPTSRAKTNCHLQNPMFHKQLGFKNVFPLHSMSQTDSFIKHNKNESLEKYGIKETYKMQIPIYYI

SEQ ID NO: 80404 - protein, 370 aa, Gossypium hirsutum
  Clone ID: GOSHI-09MAY01-C18979_1.pep
EFQKSGKSLLREEVTDLDIAEIVSKWTGIPLSNLQQSERDKLVLLEKELHKRVIGQDIAVKSVADAIRRSRAGLSDPNRPIASFMFMGPTGVGKTELAKALAGFLFNTENALVRIDMSVFMEKHAVSRLVGAPPGYVGYEEGGQLTEVVRRRPYSVVLFDEIEKAHHDVFNILLQLLDDGRITDSQGRTVSFTNCVVIMTSNIGSHYILETLQSTYDSKDAVYNVMKKQVVELARQTFRPEFMNRIDEYIVFQPLDSKEISKIVELQMVRLKDRLRQKKIYLHYTKEAVELLGTLGFDPNFGARPVKRVIQQLVENEVAMGVMRGDFKEEDSIIVDVESLPSVKDLPPQDKLCIKKLESSSPLDVMVAND

SEQ ID NO: 80405 - protein, 48 aa, Gossypium hirsutum
  Clone ID: uC-gsronu33B143a08b1.pep
KRVRVPLIHHNIFVLTLKCGKELKSSITLFNLKLLVYVRMINISKRQR

SEQ ID NO: 80406 - protein, 452 aa, Gossypium hirsutum
  unsure (1)..(452): unsure at all Xaa locations
  Clone ID: GOSHI-09MAY01-C18899_1.pep
MGKKGKWLSSLKKVFSPDSKEKKNQKSKQQLLEKQVHLGSNDSGAATLETVNLPPPPPEEVKPIEAESKQTYPVAVATAAASPQAAVEVVQRQLNRDALFAGKSEEEVAAIKIQTAFRVYLARRALHALKGLVRLKSLMEGPVVKRQAVSTLRCMQTLSRLRXQVRIRRTRMTEENQALQRQLLQKHAKEIVNLQMGEDWDDSLQSKEQIEACLLSKHKAAMRRERAMAYSFTHQQTWKHTSRSMNPLFMDPNNPSWGWSWLERWMAAPPQEGRGTTEKEQNDQSSIRSARSNFGGEISKAYARYQLNLDKQSPKTGQKPNQTSSLLSVSTPKTSASIPARKLKSASPRSSVVGPHDDGRSMVSIQSERNRRHSIAGSSVHDSEGLGSSPSLPSYMVPTESTRAKTKLQSPLGLEANGTPEKGPIASAKKRLSYPPSPARPRQHLLIQKLVS

SEQ ID NO: 80407 - protein, 131 aa, Gossypium hirsutum
  unsure (1)..(131): unsure at all Xaa locations
  Clone ID: AW187221.1.pep
YQSTDITGVKKISIVSIPTQKLKSASPRSSVVGPNDDERSMVSIQSERNSRYSIAGSSVHNNEGQGSSLSLPSYMVRTEATRVKTKLXSPLGLEANRTPEKGPIASTNKRLSYPPSPXRPRQHLLIQKLVP

SEQ ID NO: 80408 - protein, 71 aa, Gossypium hirsutum
  Clone ID: LIB3196-055-P1-M1-A10.pep
GFQTSPFGGVLKPFSSSKAREALPLDTSDISRLISVPCQEAWDTEKDGKQGDETAACNICLDKEPMENVLQ

SEQ ID NO: 80409 - protein, 181 aa, Gossypium hirsutum
  unsure (1)..(181): unsure at all Xaa locations
  Clone ID: GOSHI-09MAY01-C18519_1.pep
MGILREDVVVISPAEKAGDPTVISVNCPDKTGLGCDLCRIVLHFGLSIARGDFSTDGKWCYIVLWVDGKTNTRWDLLEXKLLEVCPSYFSTSGIDYYRPANQQPKRLDVYLLKFWCSCVRKELLHDITLVLFDLELTIKRVKVSTTPDGKVMDLFFITDTRELLHTKGTAGGNHSSLGNRT

SEQ ID NO: 80410 - protein, 177 aa, Gossypium hirsutum
  unsure (1)..(177): unsure at all Xaa locations
  Clone ID: GOSHI-09MAY01-C18499_1.pep
MDGKQIPDNENVEKNELEQLLPSPEELAYQIEAELFKLFGGVNKKYKEKGRSLLFNLKDRNNPELRERVVSGEIPPERLCSMSAEELASKELSQWRQAKAEELAQMVILPXVEVDIRXLVRKTHKGEFQVEVEQTDSSSVEVSAGTSVTRRPKTDAKQAPRNNKTVAKEHESNAVGE

SEQ ID NO: 80411 - protein, 142 aa, Gossypium hirsutum
  Clone ID: GOSHI-09MAY01-C18469_1.pep
DGIKAIILEDLKNAKSIVNWIAWAEPQYDFNPMIDEWCKEAPKELDFDHEAENTRTVAANLGCKKSPGESYSSNRVNVLIPEVIQSTKSVLILEYMDGIRLNDTASLEAFGIDKQKIVEEITRAYAHQIYVDGFFNGDPHPG

SEQ ID NO: 80412 - protein, 170 aa, Gossypium hirsutum
  Clone ID: GOSHI-09MAY01-C18439_1.pep
MGKSPGKWIKAVLFGKKSSKSGYHKGRENVANVNEVLVSARASEAEVPVAPPFPSQLNQYANERNERDEGKLELENKEAANIYNDDRISLPVSQGIGSHESTLQDFQNDPASMKLKQAAPIVHAAFRGYLSRTAFMALNSIITLHALIRGHLVRRQAIATVCCEKGIAKL

SEQ ID NO: 80413 - protein, 72 aa, Gossypium hirsutum
  Clone ID: LIB3197-057-Q1-M1-C5.pep
PQRITKTARTIFLSLCVHVHTCSESTACVTYLQNVLPFAIWENHRENGLRLCFLERNLPKLVIINERRMLPT

SEQ ID NO: 80414 - protein, 205 aa, Gossypium hirsutum
  Clone ID: GOSHI-09MAY01-C18779_1.pep
GENQNHHQKQEEEAQHRQHQDQNHEEKDQQPQKHAAQVEEPEQKSPTVSLSPLTQKTTQSPPSYYSPIDSPLSSCNSSLSHGFSPPPTTTTAAVSHPSEPNSKPPSAVVSRAELTSRDQSTTTTTTVELEEQTQKLGSGSGKRLRPDLSILRRTKRDKMIKKALLGFRISGFVFCLVSFSVLAADKNQGWALDSFYRYKEFRFCM

SEQ ID NO: 80415 - protein, 57 aa, Gossypium hirsutum
  Clone ID: GOSHI-09MAY01-C18769_1.pep
TKVSLTFTKQIIREEYYEKYMNKQLRSYSFSMVDGSSLPFKQQPDQRATCGSLEVFY

SEQ ID NO: 80416 - protein, 47 aa, Gossypium hirsutum
  Clone ID: GOSHI-09MAY01-C18709_1.pep
SPKLHSYLKLVSESIISEHFCITTYIYIYLFNSGRKKKTCRLFFKNK

SEQ ID NO: 80417 - protein, 148 aa, Gossypium hirsutum
  Clone ID: GOSHI-09MAY01-C18739_1.pep
GESKHSIQLQRYNILLFWLKYHMAVGKLVLFSLLLLVEVLLVHAVGEESDFGVNVKPPEIKVHKEDRPGWAIPREADVPVPSPAESSRETREAEAPGISRLGKHDSSSDDGSMAAGGVIIGGLVTVFFAAVFAYIRVTRKKDDVQVQH

SEQ ID NO: 80418 - protein, 118 aa, Gossypium hirsutum
  Clone ID: GOSHI-09MAY01-C18679_2.pep
MAGKGGKGLLAAKTTAANKDKDKDKDKKRPVSRSSRAGIQFPVGRIHRHLKTRTSANGRVGATAAVYLASILEYLTAEVLELAGNASKDLKVKRITPRHLQLAIRGDEELDTLIKGTI

SEQ ID NO: 80419 - protein, 138 aa, Gossypium hirsutum
  Clone ID: GOSHI-09MAY01-C18679_1.pep
MAGKGGKGLLAAKTTAANKDKDKDKDKKRPVSRSSRAGIQFPVGRIHRHLKSRASANGRVGATAAVYLASILEYLTAEVLELAGNASKDLKVKRITPRHLQLAIRGDEELDTLIKGTIAGGGVIPHIHKSLINKTTKE

SEQ ID NO: 80420 - protein, 63 aa, Gossypium hirsutum
  Clone ID: GOSHI-09MAY01-C18619_1.pep
FVWEISSFSPISDIFSTTSYSFSPAKTTQISNQFSFSFFIILYALILFFSELNLRLNQQNFSI

SEQ ID NO: 80421 - protein, 285 aa, Gossypium hirsutum
  unsure (1)..(285): unsure at all Xaa locations
  Clone ID: GOSHI-09MAY01-C18199_1.pep
WVLAPLRKRTISAISNTARWNPSLHIPRTSEIQGLFHLVYVTWLWFRADYIAPLIQALSKFCVALFLIQSADRMVLCLGCFWIKYKKIKPRIEGNPFKSNDVEGSGYDYPMVLVQIPMCNEREVYEQSISAVCQLDWPKDRLLIQVLDDSHDESIQCLIKAEVATSNQRGINIIYRHRLIRTGYKAGNLKSAMSCEYVQAYEFVAIFDADFQPNPDFLKQTVPHFKDNPELGXVQARWAFVNKDENLLIRLQNINLCFTFEVEQQLWCVFKFFGLMDAGVWRIKL

SEQ ID NO: 80422 - protein, 220 aa, Gossypium hirsutum
  Clone ID: GOSHI-09MAY01-C18049_1.pep
MASINFNPFESWFRKPQNPIQPINLLSLAHSFRSKTFSSSPNFASINFSSPFNKKPKKPDSDSDTPGPYKQMLDQFFWECENLPDYRHTPEVEKILDEDPVFEKKENPTEEDIKENEEWWRDFRASPVVQFLARAEEIADEINRTELKENEEPFRKEDKKLWQALPHVIGLDGRPMPRKAIKTREESDDKFWDFTKQFFFGLWGFRQRPYPPGKPIDVAQ

SEQ ID NO: 80423 - protein, 123 aa, Gossypium hirsutum
  Clone ID: GOSHI-09MAY01-C118051_1.pep
MKSFGVHLFFLLFLAAIASVTVQAFTGTYGINYGRIANNILSPDDVVTLLRAAKINNVRIYDSDQSVLKAFSGTGLELAVGLPNENLRDVSANADHAMNCVKDNVLAYLSRSHIRGIAIGDEV

SEQ ID NO: 80424 - protein, 415 aa, Gossypium hirsutum
  Clone ID: GOSHI-09MAY01-C18319_1.pep
MATPTFRRLDLTLLTLSLLAVAVNAHNITAILEGFPDYSVYNDFLTKTKLADEINTRQTITCLVLNNGAMSALTAKHPLSVVKNILSLHVLLDYYDPQKLHKISDGTTLTTTLYQTTGNAPGNLGFVNITDLQGGKVGFGSAVPGSKLDSSYTKSVKQVPYNISILEISAPIIAPGVLSAPAPSASGVNITGLLEKAGCKTFANLLTSSGVLKTYEAALDKGLTIFAPSDEAFKADGVPDLSKLTNADQVSLLEYHASPDYKPKGTLKTTKDPITTLATRGAGKFDLTVTAAGDSVTLHTGISPSRVAEAVFDSPPVVIFTVDNILLPSELFGKSPSPAPAPEPVSSPSPTPSPLSEAPSPLAASPPAPPTDTPAGSPADSPAGSSENSTSDNAAGHVSPTVIFTVLAIVGYSLC

SEQ ID NO: 80425 - protein, 56 aa, Gossypium hirsutum
  Clone ID: LIB3149-035-Q1-K1-H7.pep
LFLKCVRTLMYYCKLDCNRLLKMLTDLFISFLGLTILLIIFKVSFFLNVYGFQFMG

SEQ ID NO: 80426 - protein, 123 aa, Gossypium hirsutum
  Clone ID: GOSHI-09MAY01-C18309_2.pep
GSSKSQVSINLTEISERSSCRRLTWRLFSFLFVFLSVFLSFFMFTFSVQIFIAVAATIRVRVRFLFFLFGRHSFCLPPEPTTADFAMLFLGVVFSEAKVFRSGKNRWVDENVKRIDRRWDGIG

SEQ ID NO: 80427 - protein, 187 aa, Gossypium hirsutum
  unsure (1)..(187): unsure at all Xaa locations
  Clone ID: GOSHI-09MAY01-C18309_1.pep
MSAEQKEQEPNPNPNPNGNGNGNENLNTESEHEERQEDRQEHEQEQEQEQEREQPPRQSSTRTPFTNLSQVDADLALARTLQEQERAYMMLRMNNDGGSDYGSWEAGSYLHDDDDDDDXGDPHDHDITDGDDEDEDDGEQEDEDEEEYDGTDADDDEDAFDVHAHAEDGDEDNNPSAELDPLLFRVM

SEQ ID NO: 80428 - protein, 70 aa, Gossypium hirsutum
  Clone ID: GOSHI-09MAY01-C18259_1.pep
HIKHERKRNCGKRFGQVFQHLEFLSMLEKSARKLAEVGGHWSIITLSSSSFWVYIVKSFWSNAMYRLAWP

SEQ ID NO: 80429 - protein, 293 aa, Gossypium hirsutum
  Clone ID: GOSHI-09MAY01-C18249_1.pep
TSKEWIRAVHFYSAVFQDLISEGLLSPHSKSLCVETPLGQEVFALKEIGVENSIGIFKKAAKPLVVKGEGHQIPFDDNSFDFIFSGGARLDTSARPADFASEIARTLKPEGFVVVHVKANDTYSFNSLLDLFSSFNLVKTIDMAGFDSSMPYIREIVLRKDTVIRNHGGRKIPDGVSGNKCSVPGHKRELVQKAEPLIEEEPLKPWITLKRNINNVKYLPSMVDISFKNRYVYVDVGARSYGSSIGSWFRKQYPKQNKTFHVYAIEADKTFHQQYESKKKTVTLLPYAAWVKN

SEQ ID NO: 80430 - protein, 124 aa, Gossypium hirsutum
  Clone ID: GOSHI-09MAY01-C18269_1.pep
MANASGFFTPSVPRLRSKIQPSIGVSRSGFCFSAGISRRVVCSSAIEGAEKHVSPSESRMPKLVSKGCKLVGCGSAVPSLSVSNDDLSKIVDTSDEWISVRTGIRNRRVMSGKESLKKLAVEAA

SEQ ID NO: 80431 - protein, 92 aa, Gossypium hirsutum
  Clone ID: GOSHI-09MAY01-C19959_1.pep
SRFFFFFFFPLNIIYYRDFKTLEMRQSHSHSHIRLPYGSASVRGTGDNILCKPKSSSSASHSLSNLTINLLPQQPIPATAITIFTTAQTIGQ

SEQ ID NO: 80432 - protein, 174 aa, Gossypium hirsutum
  Clone ID: GOSHI-09MAY01-C19939_1.pep
KERNHKTFLVKPFTFLQFSNRRPLVKLEPLQKIYSHDLLISVHISLINIPLSLLLLLGCRPLFWNVLCFSTPFRLLSVLGYCSPTVEASQAPALTIHFSDESISTPEHPGGLGFEERTNVTCSPATASFHLSARKALAALPSNCKPPGCTLSLSVEERFILTTPSLPSTADDLR

SEQ ID NO: 80433 - protein, 206 aa, Gossypium hirsutum
  Clone ID: GOSHI-09MAY01-C19849_1.pep
LQPHLLRCRNLSSVYLPIKPTNSPKEKTPKKSLSRKHGIGKDREVKDVGVSNGQENTHTFRRMADVLLSSSSCEQPASTASMEDNLVTKRVDPTSCAVEMLNSISDSKEMSTDSEVSVSNVDKQAESNSIPQKDAHVVSTSEMAFDSHHDDQEEPTSEPSRKLPEADMMTVSKKDAETLCDMQVLEAAKDVLGRSGTEIPNSISLS

SEQ ID NO: 80434 - protein, 146 aa, Gossypium hirsutum
  Clone ID: GOSHI-09MAY01-C19589_1.pep
MEGMEQWKGQLEQLKIQLEPWKIQLEQWLHQAIEYLHQIPPIQLYAAIAVLFISTLLLFSIRLFKRTKSNTIVLTGLTGSGKTGLFYVLRDGSSHQGTVTSMEPNEGTVVLNSESDKKGKIKPGHLVDVPGHSRLRAKLDELLPQA

SEQ ID NO: 80435 - protein, 57 aa, Gossypium hirsutum
  Clone ID: AW187130.1.pep
AVVFSLVFIFLLVYAFKNLKCHSFIVAKVIKPLSMYLFFKRCMDFSKFYFMCELLDF

SEQ ID NO: 80436 - protein, 335 aa, Gossypium hirsutum
  Clone ID: GOSHI-09MAY01-C19559_1.pep
EPGALVDPEGKGLRSLSRAQLDEILGPAECTIVSSLSNYHLDSYVLSESSLFVYPYKIIIKTCGTTKLLLSIPPILKLAGSLSLTVKSVRYTRGSFIFPAAQPYPHRYFTEEVVILDSYFGKLGAGSKAYEMGGLDKEQWHVYSASAESVNTKAPTYTLEMCMTGLDTEKATVFYKDESTSAASMTMKSGIRNILPNSEICDFEFEPCGYSMNSIETDAISTIHVTPEDGFSYASFEAVGYDLKELNLEQLVQRVLVCFKPSNFSVAVHVDVDCHSFEQTCLLAVEGYHCRESSIEELGSGGSIIYQSFNGIGGCGSPRSTLSCLWEEEEEYYYN

SEQ ID NO: 80437 - protein, 236 aa, Gossypium hirsutum
  Clone ID: GOSHI-09MAY01-C19569_2.pep
KKMWILLLVTCLNWMAWFPLASAHAAGMGAEVYGGKVKGSASQQKLYDEGVRAGALGLMINSIVLAFASLGLEPVSRLIGGVKNMWGVVNLILAACLAATVWITKVAEAWRGEHGPQILTPPPTRIKTSALALFGLLGIPLAVTFSIPFALASIYCSEEGGGQGLSLGVLNLSIVIPQMIISVISGPIDAAFGGGNLPAFVLGSILAAISALLAIFALPNPKTQLSLNSTGMAGAH

SEQ ID NO: 80438 - protein, 66 aa, Gossypium hirsutum
  Clone ID: LIB3585-026-P1-K1-F5.pep
EYVITILIKLNNETCILPTKFDGDPKIVGLSLGVLNLSIVIPQMIISVISGPIDATFGGGNLPAFV

SEQ ID NO: 80439 - protein, 123 aa, Gossypium hirsutum
  unsure (1)..(123): unsure at all Xaa locations
  Clone ID: GOSHI-09MAY01-C19509_1.pep
LSNLLMYAGGGNSVRCSCCHTLNLAPAPNQIAHINCGHCRTTLMYPYGAPSVKCAICXMSGTNVGTGNARAPFCFNRPNQIASAGTMPSTSTSQTVVVEPPMSVDESGKLVSNVVVGITTDKK

SEQ ID NO: 80440 - protein, 252 aa, Gossypium hirsutum
  Clone ID: GOSHI-09MAY01-C19499_1.pep
ICFRKYLLVVVSGGMNHQRNQIVDAGGIARILGAALVVPVLQVNIIWGDESEFSDIFHLGHFKKVLADDVRILSSLPSTLVMTRPVEEKRTPLHVSPQWIRSRYLKRINKERVLLLRGLDSRLSKDLSPDLQKLRCKVAFQALRFAPPILELGNKLARRMQSKGPYFALHLRIEKDVWVRTGCLPGLSNEYDEIVHNERRRHPEFLTAKSNLSYHERKLAGLCPLNAFEVTRLLKALGAPRSARIYWAGGQP

SEQ ID NO: 80441 - protein, 65 aa, Gossypium hirsutum
  Clone ID: GOSHI-09MAY01-C119481_1.pep
TDFLCFLFQKEKSPFYIVFFRFYSRLTSPYFTIVFTTVASCLALLCFLFFYLQVFGSDGKGPQGG

SEQ ID NO: 80442 - protein, 295 aa, Gossypium hirsutum
  unsure (1)..(295): unsure at all Xaa locations
  Clone ID: GOSHI-09MAY01-C119741_1.pep
PSSGAARLRKVVKERKKKNKGKNVEKNEKADITVAEEKKTEDKVIVEVEKVNVDKVNDKEVVKTIEEEKKPLKEEKVITKPVKLVLGEDIRWAQMPVNCNIKFLRDVAKDRFPGLKGVLVKYRDPEGDLVTITTTDELRLAESSTGVAGGSLRFYIAEINPDREPAYEGMNKEEAIKSEGKLSIGVDDNGNAGCGVGAIKGTCVEDXIVQFARLFKNYVGFDSDSYLDLHELGMKLYAEAMEETVTSEDAQELFEIAADKFQEMAALALFNWGNVHMSRARKHVYTDDGSKESKL

SEQ ID NO: 80443 - protein, 157 aa, Gossypium hirsutum
  Clone ID: GOSHI-09MAY01-C19679_1.pep
MEPFLDDLADDLQSLSFTSTSTATINRSTSSGSASNSGSSSLAPSAHGSFSSKTTRSGSPSLADLRFSIRLGSGDIGSVYLAELKSQPTPSDTNAANANNNSNKGSKSGVVFAAKGMDKKELASRSKEGRARTEMEILELLDPSILPSLYAVIDSPK

SEQ ID NO: 80444 - protein, 61 aa, Gossypium hirsutum
  unsure (1)..(61): unsure at all Xaa locations
  Clone ID: AI055719.1.pep
RRSERFDDEVEVTTPNEEERFQILKLYTKKVPLDPSVDXQVVAAFSNGYAGADVEAPNMPA

SEQ ID NO: 80445 - protein, 60 aa, Gossypium hirsutum
  Clone ID: uC-gsflnu33B081b11b1.pep
NKISTLQASTKFFVQASAISEILPMSDNEAVYCYHKAFCTHIGLLGDKVLFDKLKVLNLY

SEQ ID NO: 80446 - protein, 232 aa, Gossypium hirsutum
  Clone ID: GOSHI-09MAY01-C19609_1.pep
DSLAVQLVDEKHWEDRFIIIAVVSSRQKETSSTSGMRESVETSSLLQHRAKEVVPKRTIQMEEAIQNRDFASFAKLACADSNQFHAVCLDTLPPIFYMNDTSHRIISYVEKCNRSEGTPQVAYTFDAGPNAVLIARDRKAAAQLIQRLLFYFPPKSDTDLDSYLLGDKTILKDAGLEGLKDVEALSPPPENGSAQKYPGDVSYFICTRPGKGPILLSNDKLALLDPETGLPK

SEQ ID NO: 80447 - protein, 172 aa, Gossypium hirsutum
  unsure (1)..(172): unsure at all Xaa locations
  Clone ID: GOSHI-09MAY01-C19199_2.pep
MSLFGLGRNHRTFRPKKSAPSGSKGAQLKKHIDATLGSGNLREAVRLPPGEDLNEWLAVNTVDFFNQVNLLYGTLTEFCTPENCPTMTAGPKYEYRWADGVHINKPIEVSAPKYVEYLMDWIESQLDDESIFPQKLGVAFPSNFNEVVKTIFKKXVRVYAHIYHSHFQNIVM

SEQ ID NO: 80448 - protein, 215 aa, Gossypium hirsutum
  Clone ID: GOSHI-09MAY01-C19199_1.pep
MSLFGLGRNQRTFRPKKSAPSGSKGAQLKKHIDATLGSGNLREAVRLPPGEDLNEWLAVNTVDFFNQVNLLYGTLTEFCTPENCPTMTAGPKYEYRWADGVQIKKPIEVSAPKYVEYLMDWIETQLDDESIFPQKLGAPFPPNFKDVVKTIFKRLFRVYAHIYHSHFQKIVSLKEEAHLNTCFKHFILFTCEFGLIDKKELAPLQELIESIIVPY

SEQ ID NO: 80449 - protein, 73 aa, Gossypium hirsutum
  unsure (1)..(73): unsure at all Xaa locations
  Clone ID: LIB3543-031-Q1-K6-E7.pep
KHIDATLGSGNLREAVRLPPXGEDLHEWLAVNTVDFFNQVNLLYGTLTEFCTPENCPTMTAGPKYEYRWADGV

SEQ ID NO: 80450 - protein, 96 aa, Gossypium hirsutum
  unsure (1)..(96): unsure at all Xaa locations
  Clone ID: LIB3083-012-Q1-L1-D5.pep
MKMLERNQRTFRPKKSAPSGSKGAQLKKHIDATLGSGNLREAVRLPPGEDLHEWLAVNTVDFFNQVNLLYGTLTEFCTPENCPTMTAXPKYEYRWA

SEQ ID NO: 80451 - protein, 146 aa, Gossypium hirsutum
  unsure (1)..(146): unsure at all Xaa locations
  Clone ID: GOSHI-09MAY01-C19189_1.pep
MVKTELSSLGTRNVEAVDSKTGDKGEEAVETSKNKKRNKKKNKSGRTAQEEEDLDKILAELGEGPAVTKPTTAAPPQEEKAQVQPEPEPEPEPVIAADATGEKEGEDEPAESAAAKKKKKKKEKEKEKKXAAAAATVKEEETKTET

SEQ ID NO: 80452 - protein, 241 aa, Gossypium hirsutum
  unsure (1)..(241): unsure at all Xaa locations
  Clone ID: GOSHI-09MAY01-C19159_1.pep
KDYAREGDLQEWFNAAVAEKEVPAQQIASHVYTIRELSNQHTKALEHRDQAESRIVEAEARLHEAIEKYTKKESEANDLIEKLNVLENQIKTYEEQTHEASEIAVSREVEAEETLVKLKQLESLVEELQTKSSHFEKESGXLAEENLELTEELATYESKLSDLEGKLXAALAEKDETADHLHSSKKAIEDLTQQIASEGQRFQSQISSLMEENNLLNRTHQDTKNELQPAILQLQKQLENE

SEQ ID NO: 80453 - protein, 56 aa, Gossypium hirsutum
  unsure (1)..(56): unsure at all Xaa locations
  Clone ID: LIB3083-011-Q1-L1-G12.pep
MFSFSFIFFFFIFLFFFFFFVIFFXIFLFMSFFFFFFYYFFIFFFLFFFTFFLVFF

SEQ ID NO: 80454 - protein, 77 aa, Gossypium hirsutum
  Clone ID: LIB3083-012-Q1-L1-A4.pep
NKKQASNQSTNFFSKTHFFHSSLLWFIDYFDRIVKLLNSPLLRLTIKAAAIAADIPEETIERPLYFLSILSKEDPVG

SEQ ID NO: 80455 - protein, 94 aa, Gossypium hirsutum
  Clone ID: uC-gsflmaxxa005d05b1.pep
YEAMHPWSSLALICGRIISATLSESGLSMSCHWFIDYLDRIVKLLNRPLLRLTIKAAAIAADIAEETIERPLYFLSILSKGDRVGKYRSMKKRT

SEQ ID NO: 80456 - protein, 118 aa, Gossypium hirsutum
  Clone ID: GOSHI-09MAY01-C119131_1.pep
MAMLVEPPNGEKPRGKHYYSMWQTLFEIDTKYVPIKPIGRGAYGVVCSSINKETNEKVAIKKINNVFDSRVDALRTLRELKLLRHIRHDNVIALKDVMMPTHRTSFKDVYLVYELMDT

SEQ ID NO: 80457 - protein, 229 aa, Gossypium hirsutum
  Clone ID: GOSHI-09MAY01-C19109_1.pep
EKTFGDENKSEGKGSECGSSCTGDENKSDLKADEGKHSETGSYLNTPRGRANDHDTGSSNSEHISPQNTTDTTELIVQASNNSTEESKETNNLAAKEIPGSLQNGTSALDTTGGGRVIEEIYKEKANETVVDASKIENVVNVTTEGKGFESSTTKETTDNEKQGDNESNGKDENEDTSSSNETVDGNHNDPIDTSDNSVSQEEKGTEIDLSTLPDTTTEGAENEDSVAE

SEQ ID NO: 80458 - protein, 161 aa, Gossypium hirsutum
  Clone ID: AI055295.1.pep
VTFNEPDFQVKYGYRLGTFPPSRCSRPFGNCTYGDSEKEPFIAAHNIILAHIAAVHVYRTKYQESQRGSIGIVLHCMWYEPISNSVADKLAAERAQSFSINWFLEPIIYGRYPREMQNILGFILPEFTTSEKQKLNPGLDLLELTTFKFYVKIDCFLCYPD

SEQ ID NO: 80459 - protein, 114 aa, Gossypium hirsutum
  unsure (1)..(114): unsure at all Xaa locations
  Clone ID: LIB3083-010-Q1-L1-H7.pep
VYRTKYQESQRGSIGIVWHCMWYEPISNSVADKLASERAQSFSINWFLEPIIYXRYPREMHNILGSILPEFTTSEKQKLNQRLDFIGVNHYTSFYVKDCMFYVCEPRSGNLKTE

SEQ ID NO: 80460 - protein, 109 aa, Gossypium hirsutum
  unsure (1)..(109): unsure at all Xaa locations
  Clone ID: GOSHI-09MAY01-C19069_1.pep
PESHDVTDFCSFYTLPSSILGNQNYSXLKAAYSDYNVSTKTPLLQLMNDALIVAKQKDFDVFNALDVMHNESFLKELKFGPGDGQLHYYLYNYRIRNALRPSELGLVLL

SEQ ID NO: 80461 - protein, 142 aa, Gossypium hirsutum
  Clone ID: GOSHI-09MAY01-C19399_1.pep
ILKPLREPGNSYAKICFSNRSFGLDAANVAAPLLSSVKQQLTEVDLSDFIAGRPESEALEVMNLFSSVLEGCQLRYLNLSNNALGEKGVRAFGALLKSQNNLEELYLTNDGISEEAAQAVSELIPSTKKLKVLHFHNNMTGD

SEQ ID NO: 80462 - protein, 44 aa, Gossypium hirsutum
  Clone ID: GOSHI-09MAY01-C19369_1.pep
VHMRYHTYLFFIVYSGHQKTLDGLCKCDYSMTCVHSRYKEQKDL

SEQ ID NO: 80463 - protein, 240 aa, Gossypium hirsutum
  Clone ID: GOSHI-09MAY01-C19309_1.pep
IQQSPDYAEEPDFEAGLQDFTTRLANYEKVYEPVDEGSYIKMIDMASGHGGQIQVNNMSGYLPGRIVFFLVNTHLTPRPILLTRHGESRDNVRGRIGGDSVLSDTGEIYMKKLANFVEKRLKSERTASIWTSTLQRTILTASPIVGFPKIQWRALDEINAGVCDGMTYEEIKKNMPEEYESRRKDKLRYRFPRGESYLDVIPRLEPVIIELERQRAPVVVISHQARLRALYAYFADRPLK

SEQ ID NO: 80464 - protein, 128 aa, Gossypium hirsutum
  unsure (1)..(128): unsure at all Xaa locations
  Clone ID: LIB3148-053-Q1-K1-F11.pep
EIYMKKLANFVEKRLKSERTGSIWTSTLQRTILTASPIVGFPKXIQWRALDEINAGVCDGMTYEXIKKNMPEEYESRKKDKLRYRYPRGESYLDVIQRLEPVIIELERQRAPVVVISYQAVLRALYAY

SEQ ID NO: 80465 - protein, 286 aa, Gossypium hirsutum
  Clone ID: GOSHI-09MAY01-C119271_1.pep
MLQSLLSLSSPSPLSLPPFHNPSCSPLLQKPTFFSPLFPHSNVHLRPLLALPREEPFTTPIAEEKEEEEEVPIELPPSYSSLSSSSPLQTATTVLLSGAIAAFLFRSIKRRAKRAKEFRLRSKSLKEKSLNRLKAMGSASIKNKKLSTPSPVDALLGSLIAGVIAVFLYKFTTTIEAALNRQTVSDNFSVRQITITIRTIVNGLCYLATFVYGFNSIGLFLYSGQLALNPIMEGSMMSANMIIDDDNVRSVSPVKQNASELSKIDYVFFHLWVIRVLLAFYSVQII

SEQ ID NO: 80466 - protein, 368 aa, Gossypium hirsutum
  Clone ID: GOSHI-09MAY01-C19249_1.pep
MGSAERTKKKVQLWKKAIVHFSLCFVMGFFTGFAPTGKDSIFSSLAVATHNKSHISQPPVNQSVTPAVHSSNVNQSLRAETPVPVPVPAKSNELESPKQVDGTVVHEVKLPSRRLVIVVTPTSTKDQFQGVFLRRLANTIRLVPQPLLWIVVEGQSDSNELSEILRKTGIMYRHLVFKENFTDPEAELNHQRNVALKHIEQHKLSGIVHFAGLTNVYDLDFFKELRQIEVFGTWPMALLSANERRVVIEGPVCDSSQVIGWHLRKMNNQTDAETDADTKPPIHISSFAFNSSILWDPERWGRLTSVQGTSQNSLKFVKQIVMEDEGKLKGIPPEECSQIMLWRLHFPIGVVPRNLVKTSSLLDVITQL

SEQ ID NO: 80467 - protein, 90 aa, Gossypium hirsutum
  Clone ID: GOSHI-09MAY01-C19239_1.pep
QEDTSGNGGNDEQMASEEEDAEKAKSKSATSRQNEKLYAVEGMLNTKMKRAENKRRKKAKNKLTSGDDAMDDDDDNYDFGVDYVKGKEQN

SEQ ID NO: 80468 - protein, 164 aa, Gossypium hirsutum
  unsure (1)..(164): unsure at all Xaa locations
  Clone ID: GOSHI-09MAY01-C19229_1.pep
MKDLNFDADKAVAKXFISNFADANGDAKYMDILQEXANRKIKAVQIDLEDLFNYKDLDEEFLERVTENTRRYIEIFAGAIDELLPEPTEAFHDDDHDILMTQRAEDATNNTDGSDPRQKMPPEIKRYYEVYIRAPSKGRPFTIREVKASYIGQLVRISGIVTRC

SEQ ID NO: 80469 - protein, 167 aa, Gossypium hirsutum
  Clone ID: GOSHI-09MAY01-C114981_1.pep
MEVHDNLFLVFSQGCNMGMVMLACMFISWIFVYRLNQRNKNGPKTWPLIGAAFEQLINYDRMHDWLVEYLSASKTVVVPMPFTTYTYIADPANVEHVLKTKFANYPKGETYHSYLEVLLGDGIFNVDGELWKKQRKTASFEFASKNLRDFSTVVFREYSLQLHSILT

SEQ ID NO: 80470 - protein, 148 aa, Gossypium hirsutum
  Clone ID: GOSHI-09MAY01-C14579_1.pep
DRNHPHPHCSSFHCLRLYPLPFSFLLVSLILVPSTCCKSIPGMEELLKAKTNKAVPITKKKTQIPGTFIMPVLLADELMSPPPNKELIFPNYNYTLEKMPFMQQLSQRMKLFSSHQNIFKDNKKNGIQLSSPPKWSNFKQSRPENPWR

SEQ ID NO: 80471 - protein, 147 aa, Gossypium hirsutum
  Clone ID: GOSHI-09MAY01-C14539_1.pep
ETVHERVRTRIITDTMKASCDGFLLVLLAGGPSRAFSRQDSQIIEDDFKALKDLFWANGDGLPADLIDKFSSTVRGVLPLFRTDSESLIERFRRVTLETYGSSARSRLPLPPTSGQWNPTEPNTLLRVLCYPNDEAASRLLKKTYNL

SEQ ID NO: 80472 - protein, 156 aa, Gossypium hirsutum
  Clone ID: GOSHI-09MAY01-C14499_1.pep
LFLHLLSVCLCFSFSHLFPFLSLSVTLTISTPKLPIVATPTNYATTKTWSLPPPPPPYDHHPTNMLGLHNIFLIAPPPQENQQQQAPPPPPPPPQPFNQNYNLTDTNLWTSKRSTAQESIPVFQKKDGTLNNVEEEDDDESGAAGGCFKVCRGCGK

SEQ ID NO: 80473 - protein, 185 aa, Gossypium hirsutum
  Clone ID: GOSHI-09MAY01-C14469_1.pep
FNPKIGDFGLAKLFPANITHMSTRIAGTTGYLAPGYALGGQLTMKADVYSFGVLVLEIISGRSSSKTNWGGTMKLLLEWAWQLHEEGKLIEIVDPELGEFPEEEVLRYMKIAFFCTQAAANRRPLMSQVIEMLGRNVRLNEKELMAPGFFQDGEASSSKKSLESSAATSYQMSSVPVTITEVIPR

SEQ ID NO: 80474 - protein, 217 aa, Gossypium hirsutum
  unsure (1)..(217): unsure at all Xaa locations
  Clone ID: GOSHI-09MAY01-C14719_1.pep
LNATVEENKSLNGKLSEVSNEFQQAQGRIQQLMAELSQSKEELVEKERELLTLKELHDMHGSQSSAQIKELEAHVTSLELELESLQATNRDMAEQLENKASEAEQLGEQNIGLQSRISELEMMLEKREEEVFILTKKLEDDNRESLSGMENLTAQVNNLLSEMESLQAEKALLEENLAFKGDEASNQVQSLMDEVNTLQQQLKSLXSQKAESELQLE

SEQ ID NO: 80475 - protein, 93 aa, Gossypium hirsutum
  Clone ID: GOSHI-09MAY01-C14729_1.pep
EEVRVWCKMLVLSLNSKRQRRPNVRLGEIGDASAAFACGFSQKTKENLVHKRWKPDFLNSQVNEPVTGDEFSKGKSPDFLNLDPGFFAGRFAT

SEQ ID NO: 80476 - protein, 149 aa, Gossypium hirsutum
  unsure (1)..(149): unsure at all Xaa locations
  Clone ID: GOSHI-09MAY01-C14699_1.pep
MMFHGKMHGDHLVELLRPFVQQWSQADCWMQLYDRWSSVDDLGSLAVVHHMLANDPGKSLLWFRQSLLLLRLNCQKAAMRSLRLARNHSTSDHERLVYEGWILYDTGHCEEALAKAEESISIRXSFEAFFLKAYALADTSLDQESSAYV

SEQ ID NO: 80477 - protein, 271 aa, Gossypium hirsutum
  Clone ID: GOSHI-09MAY01-C14619_1.pep
MLKKNNKNFRKRSIQEDEGDDPASKSDDEEDRRLALEEVKFLQKQRERKSGIPAIPSVQTGGIVAKVTEKAEADGEKEELVLQDTFAQETAVLVEDPNMIKYVEQELAKKRGRNMDLKNEVENDLTRAEDELYKIPEHLKVKKRNSEESSTQWTTGIAEVQLPIEYKLRNIEETEAAKKLLQEKRLMGRAKSEVSIPSSYSADYFQRGRDYAEKLRREHPELYKDRGSQDDNAGSKPTDASNDAAGSRQAATNQFMLERFRKRERQRVMRR

SEQ ID NO: 80478 - protein, 228 aa, Gossypium hirsutum
  unsure (1)..(228): unsure at all Xaa locations
  Clone ID: GOSHI-09MAY01-C14639_1.pep
PRVRFSRFTLGTVAPQFTGVSIIEDEADSVTMELEMQWDANSNIVLAIKTYLGVSLPVQVKDIGFTGVFRLIFKPLVNEFPCFGAVCYSLRKKKKLDFTLKVIGGDISTIPGLSDAIESTIRDAIEDSIMWPVRKIIPILPGDYSDLELKPVGMLEVKLVQARDLTNKDIIGKSDPYAVLFVRPLPGRTKKSKSINNELNPIWNEHYEXVIEDATTQHLVVRIYDDEG

SEQ ID NO: 80479 - protein, 93 aa, Gossypium hirsutum
  Clone ID: GOSHI-09MAY01-C14139_1.pep
HKTPKELLVNRESAFSKMVQCTGPANAKYLRSLVLEGEEKGFSKEHAMRLDGQKRGQASPHWIADAQSALPVSLTSSLNDIQRLDTGDRENHI

SEQ ID NO: 80480 - protein, 101 aa, Gossypium hirsutum
  Clone ID: LIB3189-027-P1-K1-G5.pep
MLLFQVLEHKTPKELLVNRESAFSKMVQCTGPANAKYLRSLVLEGEEKGFSKEHAMRLDGQKRGQASPHWIADAQSALPVSLTSSLNDIQRLDTGDRENHL

SEQ ID NO: 80481 - protein, 191 aa, Gossypium hirsutum
  Clone ID: GOSHI-09MAY01-C14099_1.pep
MQEKKAETANKNAKKANLLDHGSIKHILDESVTEIVKSRGYVEDVRMSNIRLLLGTIIIVIALVAQFYKKKFPENRDFLIGCIVLYIVFNGVLQLVIYTKEKNAILFTYPPAGSVTSTGLVVSSKLPRFSDLYTLTIASADPKSISAGKPVELTKSVTQWFTKDGVLVEGLFWKDVETLINDYATEPKKKK

SEQ ID NO: 80482 - protein, 108 aa, Gossypium hirsutum
  unsure (1)..(108): unsure at all Xaa locations
  Clone ID: uC-gsronu33B004a06b1.pep
GFFFRRVRRIVGCAKLKNAGGYTYPSCGSVTSTGLVVSSKLPRFSDLYTLTIASADSKSIFAGKPVELTKSVTQWFTKDRIFCFGLXFVNVFESLINVYAXQEPKKKK

SEQ ID NO: 80483 - protein, 103 aa, Gossypium hirsutum
  unsure (1)..(103): unsure at all Xaa locations
  Clone ID: LIB3493-026-P1-M1-C9.pep
QVQIPSRCLHGNRLSLPKLLLNGSLRTEFLLMFYFFMIFFLRYFYFSFNFIIYMXYIILSFIVEFLFIFISMRNVSLFFLIFFSXFFFILLFIFYYYLNYYYL

SEQ ID NO: 80484 - protein, 82 aa, Gossypium hirsutum
  Clone ID: GOSHI-09MAY01-C14049_1.pep
GYQNPKILASYHVTWELGCGWEDVVQQAAMQLCILLILMCVCISLSQFEGFIFWHLCAVHYILGYVACCSFMKIAIFVSRGH

SEQ ID NO: 80485 - protein, 40 aa, Gossypium hirsutum
  Clone ID: LIB3189-024-P1-K1-C2.pep
NPCFISCDMGTGMWVRRRDSISNASLHQWKEVILTRFFYW

SEQ ID NO: 80486 - protein, 79 aa, Gossypium hirsutum
  Clone ID: GOSHI-09MAY01-C14069_1.pep
MATGTAPPRGSAAAAASLRRRRTTSGGGASGGAAGTMLQFYTDDAPGLKISPNVVLVMSIGFIAFVAVLHIMGKFVRRD

SEQ ID NO: 80487 - protein, 239 aa, Gossypium hirsutum
  unsure (1)..(239): unsure at all Xaa locations
  Clone ID: GOSHI-09MAY01-C114031_1.pep
IGVELSTDNVIAEYFFDRFDLKLHTAGIIAATFGMANIVARPFGGYASDKAAQLFGMRGRLWVLWILQTXGGVFCIWLGRADTLPVAVLAMILFSIGAQAACGATFGIIPFISRRSLGIISGLTGAGGNFGSGLTQLIFFSTSRFSTAAGLTWMGAMIVACTLPVSLVHFPQWGSMFLPPSKDENKSTEEHYYSSEWNEDEKKQGKHSASLKFAENSRSERGKRVASAPTPPNATPSQV

SEQ ID NO: 80488 - protein, 90 aa, Gossypium hirsutum
  unsure (1)..(90): unsure at all Xaa locations
  Clone ID: GOSHI-09MAY01-C14399_1.pep
VWFDPSLETEPDFDLDIKEXVQEECSKFGKLKHIYVDRNSAGFVYLRFEDAQGAINAQRNLHGRWFAGKMITATYMIPQTYEAKFPDSNR

SEQ ID NO: 80489 - protein, 169 aa, Gossypium hirsutum
  Clone ID: GOSHI-09MAY01-C14359_1.pep
MDSSRRAVESYWRSRMIDGATSDEDKVTPVYKLEEICELLRSSHVSIVKEVSEFILKRLDHKSPIVKQKALRLIKYAVGKSGVEFRREMQRNSVAVRQLIHYKGQLDPLKGDALNKAVRETAREAISAIFAEDNNTSKPSPADDFNKRIEGFGNTNFEMPSNEKKSFLS

SEQ ID NO: 80490 - protein, 146 aa, Gossypium hirsutum
  unsure (1)..(146): unsure at all Xaa locations
  Clone ID: GOSHI-09MAY01-C14299_1.pep
DSAHYLSPYAVKVQSLSVKLPASGIESYTKLENTKIHGSEXKYGPYQNVPSFSGPPIAGHFASYLPFAVAHELVREIEISHWGNVQVTEHYKLIHGGAQSKGEFSRLDFQARPNVRGASAFKYLVANLPPKAHSVYYRDEIGNILT

SEQ ID NO: 80491 - protein, 161 aa, Gossypium hirsutum
  Clone ID: uC-gsflnu33B063h07b1.pep
YVPELPKPELPKPELPKAPEFPKLESPKVPELPKSELPKVPEVPKPELPKAPELPKIPEVPKPELPKATELPKPELPKAPELPKPQLPKIPELTKPELPKVPEVPKPELPKTPELPKPELPKVPELPNMPKPEEPKVPELPKPELPKLPNLPKPETPIQEP

SEQ ID NO: 80492 - protein, 90 aa, Gossypium hirsutum
  unsure (1)..(90): unsure at all Xaa locations
  Clone ID: uC-gsronu33B159e12b1.pep
FVPKPELPKVTELPKPELPKVPEVPKPELPKAPELPXPQLPKIPGLTKPELPKVPELPKPELPKLPNLPKPETPKQELPXLPDLPIVPKP

SEQ ID NO: 80493 - protein, 245 aa, Gossypium hirsutum
  Clone ID: GOSHI-09MAY01-C114241_1.pep
YNKVSKEYIKQLVDDPRINRVPGIGLLYSELVQGIPPIFPHFISSIPSMHSVLVFVSIKKLPISKVRPEERFLFRHVEPREYRMFRCVVRYGYKDFMGAPVEFEQQLVEKLKEFIRHEYFMAEGEAAAVENPPQSSNILANQGKDKGSSRRAVFVEETLNQLNQSHSSSASIQSFNVAKSNNSTSGIISAAPPILGAEEEIQFVQKAKDEGIIYLLGEAEVMAKPNSFYTKRMIVDYGYNFLRRN

SEQ ID NO: 80494 - protein, 241 aa, Gossypium hirsutum
  Clone ID: GOSHI-09MAY01-C14269_1.pep
SPLKATTQETNGKKPQDWRVDIASPLAATVPGARENGFKERRNNENARSAKSEIRRSLFSNKNSDDKTHKISGSKSGSRVAPCQEEIPESTVVVSNASENLSSNHKDCEDLSLIRTQLVQIEKQQSSLLDLLQRFICSSQNGMNSLETRVHGLELALDEISYDLAVSTGRMSTSSRTTCCLLPAAGFLRSKFWSKKGMNTNGTSRFSTSKLNRNCYETFENHMVRPQGGGGFISYPLAEIR

SEQ ID NO: 80495 - protein, 115 aa, Gossypium hirsutum
  Clone ID: uC-gsronu33B098g05b1.pep
SSQNGMNSLETRGHGLELALDEISYDLAVSTGRMSTSSRTTCCLLPAAGFLRSKFWRKTGMNTNGTSTFSTSSCTPSAAATHYRAYRNCNETFENHRLRLQGGGGFITNPLAEIQ

SEQ ID NO: 80496 - protein, 210 aa, Gossypium hirsutum
  unsure (1)..(210): unsure at all Xaa locations
  Clone ID: AI055515.1.pep
MFFSSCIAHPLISPKISHFGQPGNLHRNVEVDQRFTSALKIRTTDHPSQQARIGAGLLDEWSFARGTRLVIRQKVSTFIPFRKSFEVQASWLPTSQIASSVFTLGTAAVLPFYTLMVFAPKSELTKKSMESSVPFIVLGLLYAYLLYLSWTPDTLKLMXASKYWLPELSGMAKMFSSEMTLASAWIHLWAVDLFAXRXXFHDGLXNQIET

SEQ ID NO: 80497 - protein, 121 aa, Gossypium hirsutum
  Clone ID: uC-gsronu33B158d06b2.pep
RSLQFFSHHVLFFLHCPSSNLTKGLPTSQIASSVFTLGTAAVLPFYTLMVFAPKSELTKKSMESSVPFIVLGLLYAYLLYLSWTPDTLKLMFASKYWLPELSGMAKMFSSEMTLASAWIHL

SEQ ID NO: 80498 - protein, 113 aa, Gossypium hirsutum
  Clone ID: GOSHI-09MAY01-C14219_1.pep
MGQILEKIHGKEWRKRQIRKISDKVFERVKNQSGRATLTFEDLYIAVLLVYNDINKRLPGPHFDPPSKDQIRSMMQECDLNLDGQINHDEFVKFIQKLTTDTLVVVSQGLLVT

SEQ ID NO: 80499 - protein, 129 aa, Gossypium hirsutum
  Clone ID: GOSHI-09MAY01-C14209_1.pep
MSINIFPILFCSIIALCCLIQMAESTDATKSSSAAAAAAGGTDAAVHIVYTERPQDEQPEAYHIRTLSNVLGSEEAAKEALIYSYKTAASGFSAKLTPQQVAEISKQLGVLQVVPSRTLQLHSGPGKLH

SEQ ID NO: 80500 - protein, 184 aa, Gossypium hirsutum
  Clone ID: GOSHI-09MAY01-C15989_1.pep
MDFWFKGISEDTSACSFNETDIQKCPFLKNINKPTDFSFPSMSFPMPVQGARGPLFEDGPNFDMAFKLFHGKDGIVPLSGRSDVPCDRDKQEPTIQFNPLAGKAATISLSAFSSGGPFSFGPFSDKRKNQKKKSDSSNKQEPSSQKGNSSNHDAMGNEWLQNGNCPIAKSYRAVSRVLPLVATP

SEQ ID NO: 80501 - protein, 113 aa, Gossypium hirsutum
  Clone ID: LIB3197-016-P1-M1-B4.pep
MSSKGKGKEKEVVYGKRKVSAGRSGGGAEENRRKRKNRGVLQFFEDAADVDDNEASDDSDFDDYFMEEEPDLNANNNPWKTHNLPFVPKEEVIEEEFDKMMEERYKDGARFMS

SEQ ID NO: 80502 - protein, 108 aa, Gossypium hirsutum
  Clone ID: LIB3149-018-Q1-K1-E6.pep
LLLLLLPSSSSSKPSPLHRRFFHKIIIKIAVIAGFIVINISSVFKELKNSPILPLPTVLLRSTTASSGADLPFPINHLLLLSLPLRRHILSVQLQNFYFYFPYIFLHK

SEQ ID NO: 80503 - protein, 63 aa, Gossypium hirsutum
  Clone ID: GOSHI-09MAY01-C15849_1.pep
LMNWNDRYLHVHSHITPTVEPLYMAAHSSYFSFISRLLFLYKQVCSQFTGKGRDALETSIHFL

SEQ ID NO: 80504 - protein, 190 aa, Gossypium hirsutum
  Clone ID: GOSHI-09MAY01-C15839_1.pep
QVLEEAMAARYWCYQCSQVVTPIMEAEIKCPFCRGGFIEEMGNGTRDSAPGMDSHIQSDRALSLWAPILLGMLGNPRRRRRLRRIEFEEEDAENSDGEARHGGDTDLDRELESIIRNRRRNSASIVQLLQGVRERMASEGENSENDRDRDGVIFINPFNQTIIVQGSYDSNPGGRNRNSDRIGSIGDYFI

SEQ ID NO: 80505 - protein, 84 aa, Gossypium hirsutum
  unsure (1)..(84): unsure at all Xaa locations
  Clone ID: LIB3197-014-P1-M1-D6.pep
MFLLWQQGTGVISVLKWGLVLWKLSVKCPFCRGGFIEEMSNGTTDSAPDMDXHXQSDRALSLWAPILLGMLGNPCRRRRLRRIE

SEQ ID NO: 80506 - protein, 94 aa, Gossypium hirsutum
  Clone ID: GOSHI-09MAY01-C15599_1.pep
MNGNSNGFGSAGAVAATEFLRRRHRHETGENQCSSAVVKRIKAPVPLVWSLVRRFDQPQKYKPFVSRCVAQGSLEIGSLREVDVKSGLPATTST

SEQ ID NO: 80507 - protein, 380 aa, Gossypium hirsutum
  Clone ID: GOSHI-09MAY01-C15539_1.pep
MASRYWVVSLPVQNSASTWYIFQDQFSMHSFVSPLYRFILPNLRVGTPDSLLALSVDLLYSNTFIEGVSHKIRRQIEELERASGLEANALTVDGVPVDSYLTRFVWDEAKYPTMSPLREIVDGIHTQVAKIEDDLKVRVAEYNNVRGQLNAINRKQSGSLAVRDLSNLVKPEDIITSEHLVTLLAVIPKYSQKDWLSSYETLTTYVVPRSSKKLYEDNEYALYTVTLFGRVADNFRTSARERGFQIRDFEYSPEAQESRKQELEKLVQDQDSLRSSLLQWCYTSYGEVFNSWMHFCAVRIFAESILRYGLPPSFLACVLSPSTKGEKKVRSILEGLCDSTNSTYWKTEDEGGAMAGLGGDADTYPYVSFTINIAFDECNC

SEQ ID NO: 80508 - protein, 193 aa, Gossypium hirsutum
  Clone ID: GOSHI-09MAY01-C15529_1.pep
MASTVKPIFILLVFISFHFSPLASKPNDPTPSTWPLQFHSVLFMNNSGTLQKVDLWYDWPNGRNFNIIQNQLGKLLYDLEWDNGTSFIYTLDSNKECRILHFDVGILRPNWLDGANYLGQQQKDGFLCNVWEKVDFIWYYEDVVTKRPVFWAFYTGYTAHVMTFEVGAVLEDSKWQAPVYCFQEADGKRINFE

SEQ ID NO: 80509 - protein, 120 aa, Gossypium hirsutum
  Clone ID: GOSHI-09MAY01-C115401_1.pep
FKQTLSFCWVMDPPAMMSDGGYNLAEIWQYPVSESGLRRGQFGNVPPPHYDHPNPEVSGGMRRRRDGEDEAAKVVSTSSGNGVSFGDGKRLKASGCREENDDSKVEAAEPSSGKPVEHTA

SEQ ID NO: 80510 - protein, 149 aa, Gossypium hirsutum
  unsure (1)..(149): unsure at all Xaa locations
  Clone ID: GOSHI-09MAY01-C15769_5.pep
FNGPKDGGCYLEVWGSKEELPDAYPYKSPSIGFINTIYHPNVDEMCGSACLDVINQTWSPMCDLVNVFEEGVPQLHIYANPSDPXNGEAAALMMRARAAYEQGVKEYREKYAKPEDIGAKAEEKSSDEELSEDEYAASDDEEIAGKPDP

SEQ ID NO: 80511 - protein, 62 aa, Gossypium hirsutum
  Clone ID: GOSHI-09MAY01-C15769_4.pep
GNRWKNRSLGTYYALHTRYKNCLVLYMIFSSKKIRTRQNRGTCGKIPTYLIFSLLFMDVCVN

SEQ ID NO: 80512 - protein, 184 aa, Gossypium hirsutum
  unsure (1)..(184): unsure at all Xaa locations
  Clone ID: GOSHI-09MAY01-C15769_1.pep
MSSPSKRREMDLMKLVMSDYKSXMMNDGVQEFYVEFNGPKDSPYHGGVWRIRVELPDAYPYKSPSIGFVNKIYHPNVDEMSGSVCLDVINQTWSPMFDLVNVFEVFLPQLLLYPNPSDPLNGEAAALMMRDRTAYEEKVKEYREKYAKPDDVAGAEEVKSSDEELSEDEYAASDDEEIAGKPDL

SEQ ID NO: 80513 - protein, 96 aa, Gossypium hirsutum
  unsure (1)..(96): unsure at all Xaa locations
  Clone ID: LIB3825-015-Q1-K6-A12.pep
RVVGAEEVKSSDKKLSEDEYAASEDEETAXKNRSLGTYYALHTRYKNCLVLYMIFSSKKIRTRQNRGHEGKVGNLSSCSHYLSWMFVRSAPLGAPH

SEQ ID NO: 80514 - protein, 169 aa, Gossypium hirsutum
  unsure (1)..(169): unsure at all Xaa locations
  Clone ID: LIB3582-041-P1-K1-D6.pep
MMSDYKVEMINDGMQEFYVEFNGPKDSPYHGGVWKIRVELPDAYPYKSPSIGFINKIYHPNVDEMSGSVCLDVINQTWSPMFDLVNVFEVFLPQLLLYPNPSDPLNGEAAALMMRDRAAYEQRVKEYCEKYAKPEDIGAXRKEKSSDEELSEDEYAAXDDEENRGKPDP

SEQ ID NO: 80515 - protein, 114 aa, Gossypium hirsutum
  unsure (1)..(114): unsure at all Xaa locations
  Clone ID: LIB3147-036-Q1-K1-A5.pep
NLRLGVRYGNIAGPYHGGVWKIRVELPDAYPYKSPSIGFINKIYHPNVDEIITSGTVCLDVINHTWSPMCDLKNVFEELLPQLLXYANRSDPLNAEAAALMMRDRAAYEHRVKE

SEQ ID NO: 80516 - protein, 192 aa, Gossypium hirsutum
  Clone ID: GOSHI-09MAY01-C15719_1.pep
MAREGEKKKKSSPISLQQFISNITPLIDLEKEAEISASISSGATRNLDTAQKRGSTILNLKCVHAQTGLMGKTLLEFQSTKGDVLPAHKFGTHDVVVLKPNKADLGSPALGQGVVYQLKDSSITVAFDDVPEDGLNNPLRLEKVANEVTYRRMKDALIQLSKGVLKGPAADQVPVLFGERQPTVSKKALSHS

SEQ ID NO: 80517 - protein, 97 aa, Gossypium hirsutum
  Clone ID: GOSHI-09MAY01-C115701_1.pep
KSKTTRVPTSKGLRRYRGSGILKPSMLSFGGVEEDQRGGASNKCSLCISPSKLLPFSCLLQSHPLYSLLHSGSSQSLGFHLCSIPFLNSQSSPLYKT

SEQ ID NO: 80518 - protein, 281 aa, Gossypium hirsutum
  Clone ID: GOSHI-09MAY01-C15199_1.pep
MFLCDKSSEGIPLYSFSMDKRATVAPSAASDTPLPWMDPISKSFSLASSVPTPKLVSGSFGITAGSKQFYRVVHEPESRENDQIANVNSKFQDMGLSSTVKGSSVRMEDASTSTDFTGLPSFSRSSSIPDSGWRPRGVLVAHLQEHRSAVNNIAVSNDHSFFVSASDDSTVKVWDSRKLEKDISFRSRLTYHLEGSRALCTAMLRNSAQVVVGACDGTIHMFSVDHISKGLGNVVEKYSGIADIKKKDVKEGAILTLLNYPIDNCGIQTFMYSTQNWGIHL

SEQ ID NO: 80519 - protein, 212 aa, Gossypium hirsutum
  Clone ID: GOSHI-09MAY01-C15189_1.pep
MEASSTSQPEFDYLFKLLLIGDSGVGKSTLLLSFTSDTFEELNPTIGVDFKVKHVTIGGKKLKLAIWDTAGQERFKTLTSSYYRGAQGIIMVYDVTRRDTFTDLSDVWAKEIDLYSTNQDCIKMLVGNKVDKESERVVSKKEGIDFAREYGCLFIECSAKTRVNVEQCFEELVLKILETPSLVAEGSSGVKKNIFKQNPPQSGAATSGCCSW

SEQ ID NO: 80520 - protein, 83 aa, Gossypium hirsutum
  Clone ID: uC-gsflmaxxa009b01b1.pep
MKLILFSLFFWASLVVSVSSDLASDRAALLALRAAVGGRIRLWNLSSSPCSWTGVNCVQNRVVELRLPGMGLSGQLPIAIGNL

SEQ ID NO: 80521 - protein, 68 aa, Gossypium hirsutum
  Clone ID: uC-gsflmaxxa009c09b1.pep
IHLKTTSQHCVRIALPHQVDLLEGLDFKDTSESFNEKGGLTAGSGPCNWGFEPANFGLENKPGFYFFS

SEQ ID NO: 80522 - protein, 82 aa, Gossypium hirsutum
  Clone ID: GOSHI-09MAY01-C15159_1.pep
FLKKVISIFGSIFYFLRFFIIYIQKKKERKMALPLSLGRRFPFTSSKSKFRGKSVTERSHASKPVSAGHRTLRWAGVFEEKI

SEQ ID NO: 80523 - protein, 109 aa, Gossypium hirsutum
  Clone ID: GOSHI-09MAY01-C15179_3.pep
QAFAKADKLVNLLKKQAESIKPYGAICASPALVLEPHGLLKRPRATAYPAMCDKLSDQSHIDNRVVVDGNLITSRGPGTAMEFALGIVEKFFGRPKALELAKGLLVGRQ

SEQ ID NO: 80524 - protein, 195 aa, Gossypium hirsutum
  unsure (1)..(195): unsure at all Xaa locations
  Clone ID: GOSHI-09MAY01-C15179_2.pep
LNPMEWKCNNIPQILVPIADGSEEMEAVMIIDILRRAKANVVVASVGDNLEILASRKVKLVADMLLDEAAKLSYDLIVLPGGLGGAQAFANSDKLVNMLKKQAESNKPYGAICASPALVLEPHGLLKGKKXATAFPAMCNKLSDQSFIDNRVVVDGNLITSRGPGTSMEFALGIVEKFFGRPKALELAKVMLFVH

SEQ ID NO: 80525 - protein, 431 aa, Gossypium hirsutum
  unsure (1)..(431): unsure at all Xaa locations
  Clone ID: GOSHI-09MAY01-C15179_1.pep
MALLHLRHLTHHSLLSTSKLHHHFRFSPLKSPRFSCSASASTTMAKQVLVPIANGTEPMEAVITIDVIRRSGADVTVASVEKELRVDACHGVKIVADALVADCKNTVFDLIALPGGMPGASNFKDCGVLESLVKKQAADGRLYAAVCASPAVALGSWGLLKGLKATCYPSFMEQLQSCATAVESRVQQDGKVVTSRGPGTTMEFAVTLVEQLYGKEKADEVSGPLVMRPNHGDEYTITELNPLEWKCNNVPQVLVPIADGSEEMEAVMIIDILRRAKANVVVASVGDNLEILASRKVKLVADMLLDEAAKLTYDLIVLPGGLGGAQAFAKSDKLVNLLKKQAESNKPYGAICASPXLVLEPHGLLKGKKATAYPAMCDKLSDQXHIDNRVVVDGNLITSRGPGTAMDCTRMGSFRRPKPNCKDCCDAMMTI

SEQ ID NO: 80526 - protein, 61 aa, Gossypium hirsutum
  Clone ID: LIB3146-038-P1-K1-A11.pep
EYKSCLSTLRVHGREVWSLLRGISAMKQAERNEHLWIMCDGVPQEIIEVLILQELISDFQE

SEQ ID NO: 80527 - protein, 251 aa, Gossypium hirsutum
  unsure (1)..(251): unsure at all Xaa locations
  Clone ID: GOSHI-09MAY01-C15129_5.pep
MSRQSSVSFRSGGSRSFSTASAITPSVSRTSFTSVSRSGGGGGGFGRVSLGGACGVGGYGSRSLYNLGGSKRISISTSGGSFRNRFGAGAGGGYGFGGGAGSGFGFRGGAGGGFGLGARAGFGGGFGGPGFPVCPPGGIQEVTVNQSLLTPLSRQIDPTIHRVRAEEREQIKTLNNKFASFIVMVRFMDLYNKVLVTMWTLLCLHXTITVKQNLEPLFXLYFNILRRQFDSIVGERGRLDSELKSMQTWWR

SEQ ID NO: 80528 - protein, 316 aa, Gossypium hirsutum
  Clone ID: GOSHI-09MAY01-C15129_4.pep
MASTSTTIRSHSSSRRGFSAGSARLPGVSRSGFSSVSVSRSRGSGGLGGACGGAGFGSRSLYGLGGSKRISIGGGSCAIGGGYGSRAGGSYGFGGAGSGFGFGGGAGIGFGLGGGAGLAGGFGGPGFPVCPPGGIQEVTVNQSLLTPLNLQIDPTIQRVRAEEREQIKTLNNKFASFIDKVRFLEQQNKVLETKWTLLQEQGTKTVRQNLEPLFEQYINNLRRQLDSIVGERGRLDSELRGMQDLVEDFKNKYEDEINKRTAAENEFVMLKKDVDAAYMNKVELEARVDALMDEINFMKMFFDAELSQMQTHVSDT

SEQ ID NO: 80529 - protein, 383 aa, Gossypium hirsutum
  Clone ID: GOSHI-09MAY01-C15129_3.pep
MGPLASLIAPSLLSAAMIARQQCVRGGSRGFSCGSAIVGSGKRGAFSSVSVSGGAGRCSSGGFGSRSLYNLGGNKSISMSVAGSRQGACFGGAGGFGTGGFGGGFGGSFSGKGGPGFPVCPAGGIQEVTINQSLLTPLHVEIDPEIQKVRTEEREQIKLLNNKFASFIDKVRFLEQQNKVLETKWKLLQQQTTSTSSKNLEPLFETYLSVLRKQLDTLVNDKGRLQSELKTMQDSVEDFKTKYEEEINKRTAAENDFVVLKKDVDAAYMNKVELEAKVDSLNDEINFLKVLYDAELSQMQTHVSDTSVVLSMDNNRNLDLDSIIAEVKAQYEEIANRSRTEAESWYQTKYEELQQTAGRHGDDLRNTKHEISEMNPMIQRLRA

SEQ ID NO: 80530 - protein, 378 aa, Gossypium hirsutum
  Clone ID: GOSHI-09MAY01-C15129_2.pep
LERVGAPPQFPGLGLLEQQNMVLDTKWTLLHEQGSKSVWQNLEPLFEQYINNLRRQLDSIVGERGRLDSELRNMQDLVEDFKNKYEDEINKRTAAENEFVMLKKDVDAAYMNKVELEAKVDSLNDEINFLKVLYDAELSQMQTHVSDMSVVLSMDNNRNLDLDSIIAEVRAQYEEIAQRSKAEAEALYQTKVQQLQISVDQHGDNLKNTKSEIAELNRMIQRLRAEIENIKKQCQTLQASVADAEQRGENALKDAHSKRIELETALQQAKEELARMLREYQELMSVKLALDIEIATYRKLLEGEECRMSGECQSAVSISVVGGSTSTGGISGGLGSGSGFGLSSGFGSGSGSGFGFGGSVSGSSSSKIMSTTTLNKRR

SEQ ID NO: 80531 - protein, 310 aa, Gossypium hirsutum
  Clone ID: GOSHI-09MAY01-C15129_1.pep
SHRCRRSPAENEFVTLKKDVDAAYMNKVELQAKADTLTDEINFLRALYEAELSQMQTHISDTSVVLSMDNNRNLDLDSIIAEVKAQYEEIAQRSRAEAESWYQTKYEELQITAGRHGDDLRNTKQEIAEINRMIQRLRSEIDHVKKQCASLQAAIADAEQRGEMALKDAKNKLEGLEDALQKAKQDLARLLKEYQELMNVKLALDVEIATYRKLLEGEECRLNGEGVGQVNISVVQSTVSSGYGGASGVGSGLGLGGGSSYSYGSGLGVGGGFSSSSGRAIGGGLSSVGGGSSTIKYTTTSSSSRKSYKH

SEQ ID NO: 80532 - protein, 45 aa, Gossypium hirsutum
  Clone ID: LIB3196-041-P1-M1-D5.pep
EHEIDQLALDIEIATYRKLLEGEECRMSGECQNAVSISVVGGSTS

SEQ ID NO: 80533 - protein, 121 aa, Gossypium hirsutum
  Clone ID: LIB3197-021-Q1-M1-E7.pep
KVGRLGSCAQVTPDCWLFPQDVDAAYMNKVELQAKADTLTDEINFLRALYEAELSQMQTHISDTSVVLSMDNNRNLDLDSIIAEVKAQYEEIAQRSRAEAESWYQSKYEELQITAGRHGDD

SEQ ID NO: 80534 - protein, 131 aa, Gossypium hirsutum
  Clone ID: LIB3196-020-P1-M1-A2.pep
SNSLKMDRTIQRVRTEEHEQIKTLNNKFASFIDKEQGTKTVRQNLEPLFEQYINNLRRQLDSIVGERGRLDSELRGMQDLVEDFKNKYEDEINKRTAAENEFVTLKKDVDAAYMNKVELQAKADTLTDEIN

SEQ ID NO: 80535 - protein, 120 aa, Gossypium hirsutum
  Clone ID: LIB3196-034-P1-M1-G3.pep
QSLLTPLHVEIDPEIQKVRTEEREQKKITRIELVYFVFEERLLQYQSTVLVTKWKLVHEQTNRTFCKDLERIFETYLSVLRKQLDTLVNDKRRLQSELKTMHDSVEDFKTKYEEEINKRT

SEQ ID NO: 80536 - protein, 97 aa, Gossypium hirsutum
  unsure (1)..(97): unsure at all Xaa locations
  Clone ID: LIB3196-006-P1-M1-B1.pep
TKKHAGAGPEFPGCSTAGGRYGFGGAVSGFGFGGGTAIGXGLGGGAGLADGFGGPGFPVCPTGGIQEVTVNQSLLTPLNLQIDPTIQLSCVPWSVNR

SEQ ID NO: 80537 - protein, 185 aa, Gossypium hirsutum
  unsure (1)..(185): unsure at all Xaa locations
  Clone ID: AW587445.1.pep
MPLRLEIKRKLAQRSERVKSVDLHPTEPWILASLYSGTVCIWNYQSQTMAKSFEVTELPVRSAKFVARKQWVVAGADDMFIRVYNYNTMDKVKVFEAHTDYIRCVXAVHPTLPYVLSSSDDMLIKLWDWEKGWVCTQIFEGHSHYVMQVTFNPKXDTTLFASASLDRXIKIWNLGSPDPNLLLDA

SEQ ID NO: 80538 - protein, 125 aa, Gossypium hirsutum
  unsure (1)..(125): unsure at all Xaa locations
  Clone ID: uC-gsflnu33B062b10b1.pep
MPLRLEIKRKLAQRSERVKSVDLHPTEPWILASLYSGTVCIWNYQSQTMAKSFEVTELPVRSAKFVARKQWXVVAGADDMFIRVYNYNTMDKVKVFEAHTDYIRCVAVHPTLXLCVASSDDMLIK

SEQ ID NO: 80539 - protein, 122 aa, Gossypium hirsutum
  unsure (1)..(122): unsure at all Xaa locations
  Clone ID: LIB3189-052-P1-K1-H1.pep
MPLRLEIKRKLAQRSERVKSVDLHPTEPWILASLYSGTVCIWNYQSQTMAKSFEVTELPVRSAKFVARKQWVVAGADDMVIRVYNYNTMDKVKVFEAHTDYIRCGGVHPTLXYVVASSDDML

SEQ ID NO: 80540 - protein, 113 aa, Gossypium hirsutum
  Clone ID: LIB3149-033-Q1-K1-E4.pep
GAGGMHMVDPLFQRMLVNECRHCRIPVIFDEVFTGFWRLGVESAAELLGCVPDIACFAKLMTGGIIPLAATMATDAIFDSFTGDSKLKALLHGHSYSAHAMGCTAAAKSIKWF

SEQ ID NO: 80541 - protein, 124 aa, Gossypium hirsutum
  Clone ID: LIB3189-051-P1-K1-E6.pep
VFMHNGKWTVSLPEVFHSATLKPEDTTFRSRDEIFLKSRDESNLAGLYSLYVSQQLSQYSTLSETNKQIGALIMEPIIQGAGGMHMVDPLFQRMLVNECRHCRIPVIFDEGFTGFWRLGVESAA

SEQ ID NO: 80542 - protein, 243 aa, Gossypium hirsutum
  Clone ID: GOSHI-09MAY01-C15049_1.pep
MAEISQADEGPPNMTLYINNLNEKIKIDQVKKSLHAVFSQFGKILDVLAFKTLKHKGQAWGVFEDVNSATNALRRMQGFPFYDKEMRIQYAKTKSDIIAKADGTFVPREKRKRHDEKGGKKRKEQLDPNQAAAGLNPSYAGAYGATPPLSQIPYLGARPIVPEAPAPPNNILFVQNLPHDATAMMLQMLFNQYPGLKDVRTVETKPGIAFVEYENEMQSTVAMQALQGFKIQQNQMLITYAKK

SEQ ID NO: 80543 - protein, 187 aa, Gossypium hirsutum
  unsure (1)..(187): unsure at all Xaa locations
  Clone ID: LIB3543-033-Q1-K1-G10.pep
EHYLQFLFQXDSSPIAWDCSAWVRTYALFLEERLECFRILKYDIEAERLPRPSQGRIRLEYLFCRITLVFDFTIVGSCSAANFVLLNGQGYSRTRDLGSEELLEQLPALQQLLHRLIGCRPEGAAIGNYVIQYALALVLKESFKIYCAINDGIINLVDKFFEMPRHEAVKALDVYKRAGQQFAKDWN

SEQ ID NO: 80544 - protein, 153 aa, Gossypium hirsutum
  unsure (1)..(153): unsure at all Xaa locations
  Clone ID: LIB3197-005-P1-M1-C4.pep
ILQISNFKDDSSPIAWDCSAWVRTYALFLEERLECYSILKYDIEXERLPRPVLGQDKDYSRTTELDSEELLEQLPALQQLLYRLIGCRPEGAAVANYVIQYALALVLKESFKIYCAINGGIINLVDKFFEMPRHEAVKALDIYRRSRQHVMIY

SEQ ID NO: 80545 - protein, 457 aa, Gossypium hirsutum
  Clone ID: GOSHI-09MAY01-C15299_1.pep
RVDLSSSSRHESQQPIPLLTNGHTVSGEIATPDNRSVRTTSGPLGPSEKNGSSSPYVDPRQPVPVRIVDPTKDLNSYGLGNVDWKERVESWKLKQEKNVMHMNNRYPEGKGDIEGTGSNGEELQMADDARQPLSRVVPISSSHLTPYRVVIILRLIILGFFLQYRATHPVKDAYPLWLTSVICEIWFALSWLLDQFPKWYPINRETYLDRLALRYDRDGEPSQLSPVDVFVSTVDPLKEPPLVTANTVLSILAVDYPVDKVACYVSDDGSAMLTFEARSETAEFARKWVPFCKKHSIEPRAPEFYFAQKIDYLKDKIKPSFVKERRAMKREYEEFKVRINALVAKAQKMPEEGWTMQDGTPWPGNNPRDHPGMIQVFLGHSGGLDTDGNELPRLIYVSREKRPGFQHHMKAGAMNALIRVSAVPTNGAYLLYVHCDHYFNNSKALKEAMCFMMDPAY

SEQ ID NO: 80546 - protein, 87 aa, Gossypium hirsutum
  Clone ID: GOSHI-09MAY01-C15289_2.pep
MSWWWAGAIGAAKKKFEEDEAPRSFQSVGLIIGATGIVGNSLAEILPLSDTPGGPWKVYGVARRPRPNWNVDHPIEYIQCDVSDPND

SEQ ID NO: 80547 - protein, 154 aa, Gossypium hirsutum
  Clone ID: GOSHI-09MAY01-C15289_1.pep
MSWWWAGAIGAAKKKFEEDEAPKSLKSVGLIIGVTGIVGNSLAEILPLSDTPGGPWKVYGVARRPRPNWNANHPIQYIQCDVSDPNDTESKLSQLTDVTHIFYVSWTNRTSEAENCEINGSMLRNVLRSVIPNAPNLRHICLHTGATHYLGPVR

SEQ ID NO: 80548 - protein, 66 aa, Gossypium hirsutum
  Clone ID: AW186802.2.pep
RTNYSHFTKNPISSPAFNRMNNQLPIFLRKKRGTKLITTLKPNIQCKSSSLIKSHFFNNILRKMNK

SEQ ID NO: 80549 - protein, 94 aa, Gossypium hirsutum
  Clone ID: LIB3197-003-P1-M1-C1.pep
DLTRRTLLTIFNSRWLTTNATHDNPHLDKTFFCSYNQSLPLHSFKKFLLFQYFYTHPIPPYTKSLKAQTKSKSHISLIQLHQKSHFLTSIQPNE

SEQ ID NO: 80550 - protein, 426 aa, Gossypium hirsutum
  unsure (1)..(426): unsure at all Xaa locations
  Clone ID: GOSHI-09MAY01-C15219_1.pep
MSGARLCTLLADLGYEGAEKLDPDSFEWPFQYDDTRTILDWICSSLCPSNVLSLSQLSLYEQIVQEGELLEGEDLDFAYDSISAFSSRRDNQEAVFGAEEGLKDIRDATGAXKAEALELQKQLRHLQSQFDMLTGQASALIQGRRARVAATSAANAHPSALAAGLSGRNLQMNEVLGKIASTAQELAHYHSGDEEGIYLAYSDFHPYLVGDSSCIMELNQWFAKQLDTVPFRLVAEEGKSKCSWVSLDDVSNSLVRADLEKSHHQRVSELQRLRSIFGTSERQWVEAQVENAKQQAILMALKSQISSDEAHIHLDLHSLRRKHAELVXERVSYLYHIEEKFLTETIPDLCWELAQLQDTYILQGDYDLRVVRQEFYISRQKAFINHLINHLARHQLLKIACQLEKKNMLGAYSLLKXIESELQAYL

SEQ ID NO: 80551 - protein, 125 aa, Gossypium hirsutum
  unsure (1)..(125): unsure at all Xaa locations
  Clone ID: uC-gsronu33B032g09b1.pep
QKLLKQDLRHYSGPYSRLSPNPNHQNVVGLPVYYPRHNDDCRCLRHCVGYTYVIVLLSXVLVLIYRFDPTLELVRLQLNHVGVNTLAKLTLDLXCSLTIRVRSRGFVSLDNGMRSAEAWLVGGAQ

SEQ ID NO: 80552 - protein, 170 aa, Gossypium hirsutum
  unsure (1)..(170): unsure at all Xaa locations
  Clone ID: AI729132.1.pep
MSGARLCTLLADLGYEGAEKLDPDSFEWPFQYDDTRTILDWICSSLRPSNVLSLSQLSLYEQIVQEGKLLXGEXXXFXXNXFXVFSSKMDHHHAVFGAEQGLKHLADATVACGAEPCELQKQLGRMRSQLYMLSVTMHLIWLEEQFMLHLPRGNSWWCHRRLLSGTEWLE

SEQ ID NO: 80553 - protein, 35 aa, Gossypium hirsutum
  Clone ID: uC-gsronu33B032f07b1.pep
FYLCISELNQWSVKQLDTAPFRLVAEEGKSKCSWV

SEQ ID NO: 80554 - protein, 221 aa, Gossypium hirsutum
  Clone ID: GOSHI-09MAY01-C16909_1.pep
LTRGRTRGRTRGVGGAAVLLSNRSVDRRRSKYKLVHVVRTHCGANDKAFNCVRQEQDDIGKTGVSLSKDLMAIAGGALKSNITTLGPLVLPISEQILFFVTLVAKKLFNAKIKPYIPDFKLAFDHFCIHAGGRAVIDELEKNLQLLPVHAEASRMTLHRFGNTSSSSIWYELAYTEAKGRMRKGNRVWQIAFGSGFKCNSTVWVALRNVKPSPNNPWEDCI

SEQ ID NO: 80555 - protein, 145 aa, Gossypium hirsutum
  Clone ID: GOSHI-09MAY01-C16939_1.pep
QSCNGLCLISYQERRAKGAAASVGVVAYLRLSFLDAPPSSQTAMGLLSLSSSLTPSFPSLHLKPKHKLSLTFPNPSFACSAPTSKPLSSSLKLKPTANSLNFSSPQSPATAMRGAEADAVALLLRERIVFLGNNIDDFAADAIIS

SEQ ID NO: 80556 - protein, 204 aa, Gossypium hirsutum
  Clone ID: GOSHI-09MAY01-C16929_1.pep
MKLQFFLRSPSHQTLTVTLESTQSLTLRQLKSSLLPNPQSFSSFYFTLNGKPLSDSTLLPNPQISHLSTLFLLPRVSGGGGDGGATGAESRDCYLKMYAVKKPDKVDPNEKRLGKWLNCALSNEPLREPCVIDKLGNIFNKEALVEALLGKKLPKEFRHVKGLKDMINVKLSMIPGKQSDAADGATFPCPITGLEFNGKYKFFA

SEQ ID NO: 80557 - protein, 172 aa, Gossypium hirsutum
  Clone ID: LIB3828-007-Q1-K6-C9.pep
MAELGLQDRNTVRSGYRAGAASPDSVIFTLESNFSLFSSASASVDRCSFASDAHDRDSIASELSLHMAGQESGDQNESSSGPDPDPDPNKAITVPKHIRLSRKGEKVKVKTEESGPAHTEDETQLRDSARNSFSLALKECQDRKTRSDALLKNPDRRRPASLDLNNISGLSP

SEQ ID NO: 80558 - protein, 74 aa, Gossypium hirsutum
  Clone ID: LIB3197-033-Q1-M1-B11.pep
LPLYLTLESNFSLFSSASASVDRCSFASDAHDRDSIASELSLHMAGQESGDQNESFGGPDPDPDPNKAITVPKH

SEQ ID NO: 80559 - protein, 128 aa, Gossypium hirsutum
  Clone ID: GOSHI-09MAY01-C16859_1.pep
MVFWEGYVSDEAMGTVAPVVVYWLYAGFYQLLPPLDKYRLHTRKEEEEKNAVPFVSVVRGVLFQQLVQATVAKLLFLLTSTADASGTTIQPSVPVQLAQFIVAMLVMDAWQYFVHRFMHQNKFLYRHV

SEQ ID NO: 80560 - protein, 120 aa, Gossypium hirsutum
  unsure (1)..(120): unsure at all Xaa locations
  Clone ID: LIB3145-017-Q1-K1-F7.pep
GKPGRTHASAHASEKKKEGYREEARGTRAPGXXYRXYAGFYQLLPPLDKYRLHTRKEEEEKNAVPFVSVVKGVLFQQLVQATVAKLLFLLTSTADASGTTIQPSVPVQLAQYIVAMLVMD

SEQ ID NO: 80561 - protein, 207 aa, Gossypium hirsutum
  Clone ID: GOSHI-09MAY01-C16849_1.pep
MVCIRKATMDDLLAMQACNLLCLPENYQMKYYFYHILSWPQLLYVAEDYNGRIVGYVLAKMEDESNECHGHITSLAVLRTHRKLGLATKLMNAAQAAMEQVFGAEYVSLHVRKSNRAAFNLYTQTLGYKIHDVEAKYYADGEDAYDMRKQLKGKTNHHHGHHHHHHHHHHHGGGCCSGDARSGEAAHTRGDSKSESKASTKSDSKTG

SEQ ID NO: 80562 - protein, 149 aa, Gossypium hirsutum
  unsure (1)..(149): unsure at all Xaa locations
  Clone ID: GOSHI-09MAY01-C16559_1.pep
MGNTCRGSLKGKLHKGDNQPKDHCSSRNNTSSGRSTTATDYSPSTLNSQQLIAQEFSKETNQKETHLPVINPTKKDNNNNTMRRGIDHQAYYVLGHKTPNIRDLYTLGRKLGQGQFGTTYLCTEISTGTEYACKSISKRKXISMEDVEM

SEQ ID NO: 80563 - protein, 200 aa, Gossypium hirsutum
  unsure (1)..(200): unsure at all Xaa locations
  Clone ID: GOSHI-09MAY01-C16569_1.pep
MGGGFRVLHLVRPFLSFLPEVQSADKKVPFREKVIYTVISLFIFLVCSQLPLYGIHSTTGADPFYWMRVILASNRGTVMELGITPIVTSGLVIQLLAGSKIIEVDNNVREDRALLNGAQKLLGILIAIGEAVAYVLSGMYGSXRQLGVGNAILIILQLCFAGIIVICLDELLQKGYGLGSGISLFIATNICENIIWKAFS

SEQ ID NO: 80564 - protein, 62 aa, Gossypium hirsutum
  Clone ID: GOSHI-09MAY01-C16539_1.pep
MGEAPAFCFDNLQNGFGLKPKGLETSADVGDKTFVIGGADNDSTSYIGVKIYDTSTGKWVIP

SEQ ID NO: 80565 - protein, 77 aa, Gossypium hirsutum
  Clone ID: GOSHI-09MAY01-C16499_1.pep
GRSPHYFGIYKQFTLVYQCPQFGSIKNRNNLLPRAPFQVFSLVSCPSRLSLKKKDRNDIMLTLGKIVHIFSKFQLLF

SEQ ID NO: 80566 - protein, 163 aa, Gossypium hirsutum
  Clone ID: GOSHI-09MAY01-C16489_1.pep
MKMSSITKSISMADSCCLVCIPSLFTTCSKSPSLLSFPPKPINLFLSSSHSSTSLTLKTRTHFSSLVSFVAQTSDWAQQGEENDTTITIDEDESETEGGESKWENDESDGAEAIWGTEGEDAGFEEQSGDSEEEGSEPSEEAKLFGGKLPFDVDSQSLAMLFE

SEQ ID NO: 80567 - protein, 119 aa, Gossypium hirsutum
  Clone ID: LIB3197-026-Q1-M1-E6.pep
MSSITKPISMADSCCLVCIPSLFTTCSKSPSILSFPPKRINLLLSSSHSSTSLTLKTKTHFSSLVSFVAQTSDWAQQEEENDATITIDDEESGIEAKWENDESDGPEGEDSVFEEQSGD

SEQ ID NO: 80568 - protein, 87 aa, Gossypium hirsutum
  unsure (1)..(87): unsure at all Xaa locations
  Clone ID: GOSHI-09MAY01-C16419_1.pep
MDPTSRPAVVIDNGTGYTKMGFAGNVEPCFIQQTVVAVNESLLNQSRASSKSNWLAQYSAGAMADLDFXIGDEALTRSRSNNNYNIT

SEQ ID NO: 80569 - protein, 103 aa, Gossypium hirsutum
  unsure (1)..(103): unsure at all Xaa locations
  Clone ID: AW587510.1.pep
MDPTSRPAVVIDNGTGYTKMGFAGNVEPCFIQPTVVAVNESFLNQSRTSSKSNWSAQYSAGVMADLDFFIGDEALTKSRSSNAYTLHXPIRNGKVXNWDAMDG

SEQ ID NO: 80570 - protein, 72 aa, Gossypium hirsutum
  Clone ID: GOSHI-09MAY01-C16789_2.pep
QLSLDSWRQPKVSVKKLSASLDYFEFWSLGSIQVGVLRSLNLIKSVYVDRVHVFFLITLELKSYVLKHLLLS

SEQ ID NO: 80571 - protein, 184 aa, Gossypium hirsutum
  unsure (1)..(184): unsure at all Xaa locations
  Clone ID: LIB3543-011-Q1-K6-G3.pep
MITNVSEYEVIAKEKLPKMVYDYYALGAEDQWTLKENRNAFSRILFRPRILIDVSKINMMTTILGFRISMPIMVAPTAMQKMGHPEGECATARAASDAGTIMTLSTYANSXVEEVXFTXSGIRFFQLYVHKDRNLVAHLVRRAERAGFKXIALTEDTPRLXRREXDIKNRFNLXPYFDIEKLKG

SEQ ID NO: 80572 - protein, 87 aa, Gossypium hirsutum
  Clone ID: GOSHI-09MAY01-C116741_1.pep
LQVHVCDDTCREVILDPNNELLVCTISGHCFDRLLSPSEMELDAEQQQAGGTDEAEPFLGSGRFARAYLLGYNCEDEKELEAALRFC

SEQ ID NO: 80573 - protein, 311 aa, Gossypium hirsutum
  unsure (1)..(311): unsure at all Xaa locations
  Clone ID: GOSHI-09MAY01-C16769_1.pep
VTRDNALQLMEAEFQVLSPLVPIRQIQFIRFCKQHSDSVWAIADVSINLSNAANALMFANCRRLPSGCVIQDMDNKYSKVTWVEHSEYDESTVHHLFRPLLSSGFGFGAQRWIATLRRQYSSLAQLMSPDIHGEDINTVGKKSMLKLAQRMAYNFSAGIGASSVNKWDKLNVGNVGEDVTVMTRKNVNDPGEPLRMVLSAATSVWMPITQQTLFGFLRNERMRNQWDILSSGRPMQAMFSVAKGPXQGNCVSILRGAAVNGSDTNMLILQETWTDACGALIVYAPVDASSIKVVMNGGDSSHVALLPSGFA

SEQ ID NO: 80574 - protein, 132 aa, Gossypium hirsutum
  unsure (1)..(132): unsure at all Xaa locations
  Clone ID: GOSHI-09MAY01-C16719_1.pep
MGSYRFSFTFLTISTILAVHVALSSSSPTLDVVGGLFLPIKSECRGSIAECLMLSGEESSDFDAEFAMDSEISRRILARTRYISYGALRRNTVPCSRRGASYYNCRPGAQXNPYSRGCSRITRCRVRFITIL

SEQ ID NO: 80575 - protein, 213 aa, Gossypium hirsutum
  Clone ID: GOSHI-09MAY01-C16669_4.pep
MASTFTAMSSVGSFVAPNGLVMDKKLPSSSNRLSSLASISSSSFVSRRNVVLRRSRLPKISAAKELHFNKDGSAIKRLQTGVNKLADLVGVTLGPKGRNVVLESKYGSPKIVNDGVTVAKEVELEDPVENIGAKLVRQAAAKTNDLAGDGTTTSVVLAQGLIAEGVKVVAARANPVLSPRGIEKTSRALVSELKAISKEVEDSELADVAAVSA

SEQ ID NO: 80576 - protein, 86 aa, Gossypium hirsutum
  Clone ID: GOSHI-09MAY01-C16669_3.pep
MASTFTAMSLVGSFVASNVLVMDKKLSSSSNRLSSLASISSSSFLIRRNGVLKRSHLPKISTAKELHFNKDGSTIKKLQVSLCFKC

SEQ ID NO: 80577 - protein, 185 aa, Gossypium hirsutum
  unsure (1)..(185): unsure at all Xaa locations
  Clone ID: LIB3543-001-Q1-K1-B12.pep
MSQSKIKRRVGKYEIGRTIGEGTFAKVKFARNTETGEPVALKILDKEKVLKHKMAEQIKREIATMKLIKHPNVVRLYEIMGSKTKIFIVLEYVTGGELFDKIVNNGRMREDEARRYFHQLINVVDYCHSRGVYHRDLKPENXLLDAYGNLKVSDFGLSALSKQVRDDGLLXTTCGTPNTLXPESL

SEQ ID NO: 80578 - protein, 147 aa, Gossypium hirsutum
  Clone ID: LIB3543-047-Q6-K6-H1.pep
MSQPKIKRRVGKYEMGRTIGEGTFAKVKFARNTETGEPVALKILDKEKVLKHKMAEQIKREIATMKLIKHPNVVRLYEVMGSKTKIFIVLEYVTGGELFDKIVNNGRMREDEARRYFHQLINAVDYCHSSSVYHRDLKPENLLLDAY

SEQ ID NO: 80579 - protein, 108 aa, Gossypium hirsutum
  unsure (1)..(108): unsure at all Xaa locations
  Clone ID: LIB3825-034-Q6-N6-B2.pep
MASTFTAMSSVGSFVAPNGLVMDKKLSSSSNRLSSLASISSSSFLSRRNXCCRRSRLPKISAVKELHFNKDGSAIRKLQTGVNKLAVLVGVTLGPKGRNVVLERKYYC

SEQ ID NO: 80580 - protein, 109 aa, Gossypium hirsutum
  unsure (1)..(109): unsure at all Xaa locations
  Clone ID: LIB3197-028-Q1-M1-H1.pep
MSQPKIKRRVGKYEVGRTIGEGTFAKVKFARNSETGEAVALKILDKEKVLKHKMAEQIKREIATMKLIQHPNVVRLYEVMGSKTKIFIVXLSLLPGGELFDKIVNNGRM

SEQ ID NO: 80581 - protein, 316 aa, Gossypium hirsutum
  Clone ID: GOSHI-09MAY01-C16619_2.pep
MAKPTRGRRSPSVSGSGSSSRSRSRSRSRSRSYSGSDSKSSSRSRSVSRSRSASPSSSRSRSRSLSSSPSRSGSSRSRSPPQRRSATDASRRGRSPPPQSKKSSPAPRKTSPIRESLVLYVDSLSRNVNEGHLREIFGNFGEVVNVDLAMDRALNLPRGFGYVEFKTRADAEKALLYMDGAQIDGNVVRAKFTLPPRPKASPPPKPIASATTKRDAPKSDNVNADTEKDGPKRPREPSPQRKPPPSPRKRSPVGRRGGSPRRPPESPRRRPDSPVRRRGETPTRRRPASPARRSSPLSPPRRLRSPARTSPRRMRG

SEQ ID NO: 80582 - protein, 179 aa, Gossypium hirsutum
  Clone ID: GOSHI-09MAY01-C16619_1.pep
DAWADAWPDAWADAWGRPDSPVRRRGETPPRRRPASPARGRSPLSPPRRLRSPARTSPRRMRGSPIRRRSPPPRRRSPPRRPRSPPRRSPFNRRRSPSPIRRRSRSPIRRPLRSRSRSISPPRGRGPAARRGRSSSYSRSPSPRKAGRRVSRSRSPRRPLRGRRSSSHSSSSSSPPRKP

SEQ ID NO: 80583 - protein, 75 aa, Gossypium hirsutum
  unsure (1)..(75): unsure at all Xaa locations
  Clone ID: LIB3135-058-Q1-K1-E3.pep
PFFVHGLSLAPALIPVQTPSPVLALAQCPAPHLLSRLALVLAPHLYTLLLXRAELSSRSLLASSGLSIRQASLSN

SEQ ID NO: 80584 - protein, 143 aa, Gossypium hirsutum
  unsure (1)..(143): unsure at all Xaa locations
  Clone ID: GOSHI-09MAY01-C16639_1.pep
MTVMAPXPIDQQEDEEMLVPQSDLTDNHQPMEVVAQPEAANTVENQPVEDPPSSRFTWRIENFSRLNAKKHYSEVFVVGGYKWRILLFPKGNNVDHLSMYLDGADSASLPYGWSRYAQFSLAVVNQIHNKYSIRKDTQHQFNA

SEQ ID NO: 80585 - protein, 192 aa, Gossypium hirsutum
  Clone ID: GOSHI-09MAY01-C16199_2.pep
RGDPSRRPTLPPTRPVNWKSKYEAAGIWYEHRLIDDMVAYALKSEGGYVWACKNYDGDVQSDFLAQGFGSLGLMTSVLVCPDGKTIEADAAHGTVTRHFRVHQKGGETSTNSIASIFAWTRGLAHRAKLDDNPKLLDFIEKLEAACIATVESGKMTKDLALIIHGSKLARDKYLNTEEFIDAVAADLKARLC

SEQ ID NO: 80586 - protein, 411 aa, Gossypium hirsutum
  unsure (1)..(411): unsure at all Xaa locations
  Clone ID: GOSHI-09MAY01-C16199_1.pep
MGFEKIKVANPIVEMDGDEMTRVIWKSIKDKLILPFVELDIKYFDLGLPHRDATDDKVTIESAEATLKYNVAIKCATITPDEARVKEFDLKQMWKSPNGTIRNILNGTVFREPIICKNVPRLVPGXTKPICIGRHAFGDQYRATDAGIKGAGKLKLVFVPEGQGEKTEYEVFNFTGEGGVSLAMYNTDESIRAFAEASMNTAYQKKWPLYLSTKNTILKKYDGRFKDIFQEVYEANWKSKYEAAGIWYEHRLIDDMVAYALKSEGGYVWACKNYDGDVQSDFLAQGFGSLGLMTSVLVCPDGKTIEAEAAHGTVTRHFRVHQKGGETSTNSIASIFAWTRGLAHRAKLDDNPKLLDFTEKLEAACIGTVESGKMTKDLALIIHGSKLARDKYLNTEEFIDAVAADLKARLS

SEQ ID NO: 80587 - protein, 57 aa, Gossypium hirsutum
  Clone ID: LIB3584-029-P1-K1-C2.pep
PRVRPRVRAACIATAESGKMTKDLALIIHGSKLARDKYLNTEEFIDAVAADLKARLC

SEQ ID NO: 80588 - protein, 65 aa, Gossypium hirsutum
  Clone ID: uC-gsflmaxxa070c04b1.pep
KLYDNPKLLDFIEKLEAACIATVESGKMTKDLALIIHGSKLARDTYLNTEEFIDAVAADLKARLC

SEQ ID NO: 80589 - protein, 191 aa, Gossypium hirsutum
  Clone ID: LIB3829-016-Q1-K6-C2.pep
MHNKKEACRNFQRGSCQYGERCKFLHVIQQQPKSNAFGFGTQAISHQQQKPNPFGFGVQNNAQSKGVNDFGNKQSQFKNTWTRSSASSGAPSLRQPDNQPQATNHRCNDPESCKRIIAEDFEHERPLWKLTCYSHWKNSPCDIVGDVSYEELRAAAYDDAKRGLSLQSIIERERNLLNSKLVEFENFLRNP

SEQ ID NO: 80590 - protein, 99 aa, Gossypium hirsutum
  unsure (1)..(99): unsure at all Xaa locations
  Clone ID: LIB3197-020-Q1-M1-H12.pep
MVKGASSGAPSLRQPDNQPQATNHRCNDPESCKRIIAEDFEHERPLWKLTCYSHWKNSPCDIVGDVSYEELRAAAYDDAKRGLSLQSIIERERXLLNSK

SEQ ID NO: 80591 - protein, 78 aa, Gossypium hirsutum
  unsure (1)..(78): unsure at all Xaa locations
  Clone ID: GOSHI-09MAY01-C16089_1.pep
GVLAAGTEKERLISGEDAACCICLANYVDDDELRELPCDHVFHVECVDKWLKINASCPLCXSEIGESSAASPLARDSN

SEQ ID NO: 80592 - protein, 77 aa, Gossypium hirsutum
  Clone ID: GOSHI-09MAY01-C16019_1.pep
KDAAAAAAAASNRGKIEITEVRDFAGQEIEIKKRIHADSKEAAEKSKAYAPSAVDAVLEQIKKKPKLSVLDKTKKDW

SEQ ID NO: 80593 - protein, 91 aa, Gossypium hirsutum
  Clone ID: GOSHI-09MAY01-C16359_3.pep
MGRLHSRGKGISASALPYKRTPPSWLKISSQDVEENICKFAKKGLTPSQIGVILRDSHGIAQVNSVTGSKILRILKAHGLAPEIPEDLYHL

SEQ ID NO: 80594 - protein, 151 aa, Gossypium hirsutum
  Clone ID: GOSHI-09MAY01-C16359_1.pep
MGRMHSRGKGISASALPYKRTPPSWLKISSQDVEENICKFAKKGLTPSQIGVILRDSHGIAQVRSVTGSKILRILKAHGLAPEIPEDLYHLIKKAVAIRKHLERNRKDKDSKFRLILVESRIHRLARYYKKTKKLPPVWKYESTTASTLVA

SEQ ID NO: 80595 - protein, 59 aa, Gossypium hirsutum
  Clone ID: LIB3149-032-Q1-K1-D3.pep
DHLGAIRKHLERNRKDKDSKFRLILVESRIHRLARYYKKTKKLPPVWKYESTTASTLVA

SEQ ID NO: 80596 - protein, 421 aa, Gossypium hirsutum
  unsure (1)..(421): unsure at all Xaa locations
  Clone ID: GOSHI-09MAY01-C16379_1.pep
HVSGDDGGDGGAGCGNGGKPFGSVSCSICLETATDNGDRSWAKLQCGHQFHLDCIGSAFNVKGAMQCPNCRKIEKGQWLYANGCRSYPEFNVDDWTHDEDLYDLSFSEMSFGVHWCPFGSLARLPSFEVGEFSSTSYHELLGQQAIFAEHSASAGHPCPYVAYFGPTVHPSSSNSGXSVSDSSSFNGHWNGPSVPSEMPTSYAFPAMDLHYHSWEHQSPPFSTSSSRIGSSDQPSNPPVSQRSARSGSDMPRSGSFMRPYVVGHSSGARAGSSVASSLIPPYPGSNARARDRVQALQAFYHQHHPSTSPSIRTPVISGSRXQALTEIHAQVGPVASSSDQVGGFYFFPSGTPVRNFQEAENPLSTRFHAWERDHLPSFSINQVDRDSVWGAFHQSAGAPDPGIRSGSFRQRHGSERMSSHN

SEQ ID NO: 80597 - protein, 161 aa, Gossypium hirsutum
  unsure (1)..(161): unsure at all Xaa locations
  Clone ID: LIB3829-007-Q6-K6-E6.pep
MTDPHYQFHLDCIGSAFNVKGAMQCPNCRKIEKGQWLYANGCRSYPEFNVDDWAHDEDLYDLSFSEMSFGVHWCPFGSLARLPTFEEGELSSTTYHELLGQNAIFSEHSAPAAHPCPYVAYFGPTVHPSSSNSXXSVSDSSSYNNHWNGPSVPGEVPASYA

SEQ ID NO: 80598 - protein, 79 aa, Gossypium hirsutum
  Clone ID: uC-gsflnu33B092c09b1.pep
SDQVGGLHSFTSGTPDRNSEEADNPLSTRVHAWERDHLPSFSINQVDRDSAWGAFHQAAGAPDPGIRTGSFRQRHGSAR

SEQ ID NO: 80599 - protein, 94 aa, Gossypium hirsutum
  Clone ID: LIB3197-024-Q1-M1-F5.pep
CTRRNKIEATHLVRLSGYGSSLSMSSMTAPSSGAISNGCPYGWLSSRMLFIVRLESLNSISGPSIATLGKGGSITEQINSLLLHQNCGQQQTDA

SEQ ID NO: 80600 - protein, 224 aa, Gossypium hirsutum
  unsure (1)..(224): unsure at all Xaa locations
  Clone ID: GOSHI-09MAY01-C16369_1.pep
LTFFKIPIFFLTGLHTYVHLGKAGSANNAFSGLRXATRRPSSGSGSQLDDHHYLSSIPNGDLKKRNKCKVKFEFDENNAQIFRLKLEDGHLQTRLFFNEYRNSFVFSFLGISCLCLSKCLGDSEPGSRVLINGNLIPVIFGFMGLPKPFLAXLAKISFENSSSXRSGNQFSNGVLGFLVGIMFCSGIGPPVFDFHFDSVEGSWRILLAVLMGSLATFLYMPAGR

SEQ ID NO: 80601 - protein, 353 aa, Gossypium hirsutum
  Clone ID: GOSHI-09MAY01-C16299_1.pep
MDTNGATTSSAAGGGSTSKSSSKKHSRKPVYSRFTQQELPACKPILTPGLVIATFTIIGIIFIPLGLVSLSASEKVVEIVDRYDESCVPSDYSNDKLKFIQNPSINKSCVRTLTVPKLMKSPVFIYYQLDNYYQNHRRYVKSRSDKQLRSVSDEKSTKDCSPEDKTVDGPIVPCGLVAWSLFNDTYGFSVNSKTIEVNKHDIAWKSDKEHKFGSNVYPKNFQSGGLIGGAKLNSSVPLSKQEDLMVWMRTAALPTFRKLYGKIEQDLQANEKIQVVIQNNYNTYSFSGKKKLVLSTTSWIRGKNDFLRIAYIIVRGLCLFLTVCFILLYVIKPRPLGDPSYLSWNKSPAGHPV

SEQ ID NO: 80602 - protein, 110 aa, Gossypium hirsutum
  Clone ID: LIB3829-033-Q1-K6-D8.pep
MGNVAKAYDLKFVVNISELGEDDPLMQNVTRLSPLLNVPWYTTGGSKHDGFGCFLHQVKLPRGRMLDILSLNTASLQDTVVVGSPSGKRGNLSNWLTRTLKATTSDWRMV

SEQ ID NO: 80603 - protein, 60 aa, Gossypium hirsutum
  Clone ID: LIB3197-022-Q1-M1-B5.pep
CRESGHVLYEWIVLSKLANINANLSTHQHGHRTTYRVKQPVCVTKAMDPSLLVDKNKLKG

SEQ ID NO: 80604 - protein, 209 aa, Gossypium hirsutum
  Clone ID: GOSHI-09MAY01-C17989_1.pep
MSMYGRDPWGGPLEINAADSATDDDRSRNLQDLDRAALSRPLDETQQSWLLGPSEQKKKKKYVDLGCIIVSRKIFVWTVGTLVVSAVLAGLITLIVKTVPRHHHGKPPPDNYTLALHKALMFFNAQRSGKLPKHNNVSWRGNSCLRDGKSDPGTTMKDLVGGYYDAGDAIKFNFPASFAPTMLSWSVIEYSAKYEAAGELNHVKEIIKW

SEQ ID NO: 80605 - protein, 48 aa, Gossypium hirsutum
  Clone ID: uC-gsronu33B061g02b1.pep
QSRSCRFLLLSSISGGINRVYLHRPSPGISRYIPIFINRCRLTTITGL

SEQ ID NO: 80606 - protein, 89 aa, Gossypium hirsutum
  Clone ID: GOSHI-09MAY01-C17969_1.pep
MVDRSYQCKGVLILAYQSFGVLFGDLSISPLYVFKSTFSGNLSNYQSEDVIFGALSLIFWTLTLLSLFKHVIILLNADDYGEGGIFVLY

SEQ ID NO: 80607 - protein, 214 aa, Gossypium hirsutum
  Clone ID: LIB3543-060-Q6-K6-E2.pep
LILAYQSFGVLFGDLSISPLYVFKSTFSGNLSNYQSEDVIFGALSLIFWTLTLLSLFKHVIILLNADDNGEGGIFALYSLLCRHAKFSLLPNHQTADEELSTYHNPRYSYRNPQSLTVKRFAERHKKAKTALLLLVLFGTCLLICVGFLTPAISIRSAIEGVKVRSSELHYGVVLIIACILLVGLFVLQHRGTYRVAFMFAPIVILWSLSIAAI

SEQ ID NO: 80608 - protein, 60 aa, Gossypium hirsutum
  Clone ID: GOSHI-09MAY01-C17859_1.pep
TRAWVDYPPSQQPRRTNVQLYPCLHACKQPGLTDTIASNIPTVHRLIGFHRSILLETGFL

SEQ ID NO: 80609 - protein, 60 aa, Gossypium hirsutum
  Clone ID: LIB3197-049-Q1-M1-E8.pep
QGLGLIIHQANSHVAQIFNSYPCLHARKEHGLTDTIACNIPTVHRLIGFHRSLLLETGFL

SEQ ID NO: 80610 - protein, 264 aa, Gossypium hirsutum
  unsure (1)..(264): unsure at all Xaa locations
  Clone ID: GOSHI-09MAY01-C17499_2.pep
PTRRSDAKGDIGPSDRDLAANINEDTQADDASKKVRLPKELTFQDMYHNQDAFDDDDEDDSDWEPVQKHIEILKWFCTNCTMVNLDDVFLCDICGEHKESGILRHGFYASPFSPEVELVQVESEATGREKEIWSEASASNCSTAVGFDERMLLHSEVEIKSHPHPERPDRLRAIAASLSAAGIFPGKCCLIPATEITLEELQMVHSSEHIEVAELTRQMFSSYFTPDAYANEHSAHAARLAAGLWADLASSIXSGRVKSGFDVA

SEQ ID NO: 80611 - protein, 347 aa, Gossypium hirsutum
  Clone ID: GOSHI-09MAY01-C17499_1.pep
LDGLFFTGSYFTPDTYANEHSAHAAKLAAGLCADLASAIFSGRVRNGFALVRTTGHHAGVTQAMGFCLHNNAAVAALAAQAAGAKKVLIVDWDVHHGNGTQEIFDQNKSVLYISLHRHEGGKFYPGTGSAFEVGTKGAEGYCVNIPWSRGGVGDNDYIFAFQHVVLPIASKFAPDFTIISAGFDAARGDPLRCCDVTPAGYTQMTHMLSTLSGGKLLVVLEGGYNLRSISSSATAVIKVLLGESCECEPENIVPSKAGLLTVLEVLKIQMKYWPNLSSSFEKLQLQRAMYSVEKKRKQLFLNFSRSPAVLIIRTKGMHGRGLLSCFFPLSRVQTYHIVRGWFPIILH

SEQ ID NO: 80612 - protein, 104 aa, Gossypium hirsutum
  Clone ID: GOSHI-09MAY01-C17459_1.pep
MTGKAKPKKHTAKELAAKVDAATTNRGGGKAGLADRSGFEKGGHAKYECPHCKTTAPDVKSMQIHHDAKHPKIPFEESKLINRHAVHVAEPSKPRPGVRGSLRK

SEQ ID NO: 80613 - protein, 156 aa, Gossypium hirsutum
  Clone ID: GOSHI-09MAY01-C17449_1.pep
MDSSSSSSSSGPSPLDLMSALVKAKMDPSNASSDSAAQVTTVLFENREFVMILTTSIAVLIGCVVILIWRRSASQKPKQIQLPLKPSIIKEPELEVDDGKKKVTILFGTQTGTAEGFAKALVEEAKARYEKATFNIVDLDDYAADDEEYEEKMKKD

SEQ ID NO: 80614 - protein, 77 aa, Gossypium hirsutum
  Clone ID: LIB3197-044-Q1-M1-A11.pep
MDSSSSSSSSGPSPLDLMSALIKAKMDPSNASSDSAAQVTTVLFGNREFIMVLTTSIAVLIGCVVILIWRKSSSQKP

SEQ ID NO: 80615 - protein, 89 aa, Gossypium hirsutum
  Clone ID: GOSHI-09MAY01-C17469_1.pep
MGRAPCCDKKGLKKGPWAPEEDEILTNYIKKRGHGSWRSLPKLAGLLRCGKSCRLRWTNYLRPDIKRGPFTLEEEKLVIQLHAILGNRW

SEQ ID NO: 80616 - protein, 139 aa, Gossypium hirsutum
  unsure (1)..(139): unsure at all Xaa locations
  Clone ID: GOSHI-09MAY01-C117451_1.pep
MSDKQAHLNGAYYGPSIPPPTRNYHRPGRGSGCGCGCCLLKCLFNIIITAIVIIGLAVFIFWLIFRPNRVKFHVTDVQLTQFXLTSHNTLHYNLALNMTIRNPTVDRHIYDRIEAKAYSRIKIHTVTLPRLSGHKTLVT

SEQ ID NO: 80617 - protein, 170 aa, Gossypium hirsutum
  Clone ID: GOSHI-09MAY01-C17419_1.pep
MEDDFEFPTASNMEEDEMDIPEDDPVSPILKVGGEKEIGKNGLKKKLVKEGEGWENPSSGDEVEVHYTGTLLDGTKFDSSRDRGTPFKFKLGQGQVIKGWDEGIKTMKKGENAIFTIPAELAYGGSGSPPTIPPNATLQFDVELLSWTSVKDICKGGGIFKKILVEGEKW

SEQ ID NO: 80618 - protein, 156 aa, Gossypium hirsutum
  Clone ID: GOSHI-09MAY01-C17439_1.pep
MATCAWLLSLCFTLVFCLCNASRTPPISPSLDGFLTNGNFEQAPKKENLNKTVILGKYSLPGWEIDGTVEFMSGGPQPGGFYFPIPRGAHAVRLGNEASISQNVNVKPGFIYSITFGTTRTCAQDEVLRISVPAQTTDISIQTLYSTDGGDTMAML

SEQ ID NO: 80619 - protein, 332 aa, Gossypium hirsutum
  Clone ID: GOSHI-09MAY01-C17429_1.pep
MATLTRVPLVFSSNRVAPAPAASLNHKCNCVASSSPLTRKLPHCSTPSSLSFNPFSSSFPSFSTRQNKGFRRTSLVVASMADLSTVLVTGAAGRTGQIVYKKLKERSDQFVVRGLVRTPESKETIGGADDVFVGDIRDTTSLVPAMQGIDALIILTSAVPRMKPGFDPTKGGRPEFYFEDGAYPEQVDWIGQKNQIDVAEEAGVKQIVLVGSMGGTNPNHPLNSLGNGNILVWKKKAEQYLADSGVPYTIIRAGGLQNKDGGIRKLLVGKDDELLQTETKAIARPDVAEVCIQALKFEEAKFKASDLASKPEGVGNPTKDFKALFSQITTRF

SEQ ID NO: 80620 - protein, 88 aa, Gossypium hirsutum
  Clone ID: LIB3145-016-Q1-K1-F8.pep
KQGAISWCARISETYAVPRMKPVFDPTKGGRPEFYFEDGAYSEQVDWIGQKNQINVADEAGVKQIVLVGSMGGTNPNHPLNSLGNGNI

SEQ ID NO: 80621 - protein, 188 aa, Gossypium hirsutum
  Clone ID: GOSHI-09MAY01-C17699_1.pep
TEKQGLKMLVTAGPRAQKMVGIWLFGSAAWVFSMVVLSGVTRLTRSGLSMTDWKFAGNLPPLSDDEWQQEFEKYKQSPEYKRVNKGMSIEEFKFIYWMEYAHRMWGRALGVMFALPFSYFLRKGYITMRLGLRLSALFALGAGQGLIGWWMVKSGLEEPASEYVEPRVSPYRLAAHLTSAFVIYSGLF

SEQ ID NO: 80622 - protein, 208 aa, Gossypium hirsutum
  unsure (1)..(208): unsure at all Xaa locations
  Clone ID: GOSHI-09MAY01-C17689_2.pep
FKFIESFPRKSEKQLYSHLSYIICELLLISLSHALSLCLLQAKRRRGRTPTPGRYLGLRTSRARHRSRSNSPRRSPRYSSYSRSQSRSPRYSSGKGRSRSYSPRHRSYSRSPSPYSGSSEDCYYRRWDRSYSPDDRYYRRRDRSYTPKDCYYRRWNRSYSPDDGYYRXGRGRSYTPDERYYRRADRSYSPDDRYYRRPGLFLTNLMID

SEQ ID NO: 80623 - protein, 138 aa, Gossypium hirsutum
  Clone ID: LIB3825-021-Q1-K6-F5.pep
MSYSRRSSYSPSPSPYKRYRRSVSRSLSRSRSRSRSVENPGNNLYVTGLSHRITKRELEKHFSSEGKVVDVHLVVDPWTRESRGFGFVTMSTIEEAERCIKYLNRSVLEGRVITVEKLLWQQVSCVLQLFTKLQKSYI

SEQ ID NO: 80624 - protein, 193 aa, Gossypium hirsutum
  unsure (1)..(193): unsure at all Xaa locations
  Clone ID: GOSHI-09MAY01-C17189_1.pep
MDSLWKLLYLLEPAPLTLILTAVAVTFGSAFRALNYGKEMERNRDLSEASITLDRSQALMIPIMSSCSLLLMFYLFSSVSQXLLTAFTAIASVSSLXFFCLSPHVAYLKSHLGWADPFVSRCCSKSFTKIQGLLLLACILMVAAWLVSGHWILNNLLGISICIAFVSHVRLPNIKICAMLLVCLFVYDIFWVF

SEQ ID NO: 80625 - protein, 55 aa, Gossypium hirsutum
  Clone ID: GOSHI-09MAY01-C17129_1.pep
RNDDIAYEVSGDQKVSTALVDAFHHADYRTRQIAERALKHVDKIPNFSGIFPNMG

SEQ ID NO: 80626 - protein, 208 aa, Gossypium hirsutum
  unsure (1)..(208): unsure at all Xaa locations
  Clone ID: GOSHI-09MAY01-C17059_1.pep
MDAPKEIFLKDYKSPDYYFDTVDLRWAGGEEKTIVASKITVFPRVEGSSAPLVLDGVDLKLISIKVDGKELKEGDYHLDSRHLTLPSPPQGKFTLEIDTEIQPQNNTSLEGLYKSSGNFCTQCEAEGFRKITFYQDRPDIMAKYTCRIEADKLLYPVLLSNGNLIKQGTFEGGKHYAVWEDPFKKPCYLCALVXGQLESRDDTLLPAL

SEQ ID NO: 80627 - protein, 435 aa, Gossypium hirsutum
  unsure (1)..(435): unsure at all Xaa locations
  Clone ID: GOSHI-09MAY01-C17079_1.pep
ASRWYCLFFVLFVLIGVYFVTNLILAVVYDSFKSENVGFLNKEQCIHLFEELNKYRSLPKITREEFELIFDELXDSHDFKINLDEFTDLCNAIGLRFQKEDVPSLFERFQIYRSPFSENLKAFVRGPKFGYIISFILILNLFAVIIETTLDIANNSGQKVWQEVEFVFGWIYVLEMALKVYSFGFENYWRDGQNRFDFLITWIIVIGETVTFASPDEFYFFSNGEWIRYLLLARLLRLIRLLMHVRSYRAFVATFLTLIPSLMPYLGTIFCVLCIYCSIGVQIFGGIVNAGNPALEATELTDDDYLLFNFNDYPNGMVTLFNLLVMGNWQVWMQSYKELTGTSWSLVYFISFYLVPVLLLLNLVVAFVLEAFFAEMDLEASGNSEEDHKDAGSGKGRKSLAGTKPRSQRVDLLPPHMLSAELDKSHSSASSDAYT

SEQ ID NO: 80628 - protein, 98 aa, Gossypium hirsutum
  Clone ID: GOSHI-09MAY01-C17029_1.pep
RPKLSLVASIYVKPRQWVRTITTTRPPPPPPPSLRLTRRMTALFSPSTHFSNSLLPKKNLLPLVRFAFPNCFSSSANNKGAINGSGPGSDRILADMDP

SEQ ID NO: 80629 - protein, 83 aa, Gossypium hirsutum
  Clone ID: LIB3197-034-Q1-M1-G1.pep
IKRPKMSGLKLSLVASIYVKPRQWVRTITTTRPSPSPSLRLTRRMTALFSPSTHFSNSLLPKKNLLPLVRFAFPNWFLFLSKQ

SEQ ID NO: 80630 - protein, 405 aa, Gossypium hirsutum
  unsure (1)..(405): unsure at all Xaa locations
  Clone ID: GOSHI-09MAY01-C17399_1.pep
MDSVFASIVQAPEDPILGVTVAYNKDPSPNKLNLGVGAYRTEEGKPLVLNVVRKAEQLLVNDLSRVKEYLPILGLAEFNKLSAKLILGDDSPAIQENRVATAQCLSGTGSLRVGAEFLAKHYHQRTIYIPQPSWGNHVKVFTMAGLSVKNYRYYDPTTRGLNFQGLLEDLGAAPAGAIVLLHACAHNPTGVDPTXEQWEQIRQSMRSKGLLPFFDSAYQGFASGSLDADAQPVRMFVADGGECFIAQSYAKNMGLYGERVGALSIVCKAADVASRVESQLKLLIRPMYSNPPIHGASIAMTILKNSDMYNEWKIELKAMADRIISMRKQLFDALSAKGTPGDWSHIIKQIGMFTFTGLDSDQVAFMIKEYHIYMTSDGRISMAGLSSKTVPHLADAIHAAVTRGC

SEQ ID NO: 80631 - protein, 213 aa, Gossypium hirsutum
  unsure (1)..(213): unsure at all Xaa locations
  Clone ID: GOSHI-09MAY01-C17359_1.pep
VFRAKKTMANLQLERETSIGMQVEDLWDVQESKLNPTQKLNACFENIPVSAFPHTPQGIEIKSDASLAEAVQILAQNKILSAPVVNVDAPEDASWIDRYLGIVEFAGIAVWILQQSEPPSPTNXLPTGAESAVASANGMPSSAELRTLGSEDASITAGDFFEALTFLRVHRKAMVGNSGXFRWAPFHAFSNSXNSFLTMLLLLSRSKVKRFQC

SEQ ID NO: 80632 - protein, 140 aa, Gossypium hirsutum
  Clone ID: GOSHI-09MAY01-C17349_1.pep
PRVRPRVRVILGSRFRDAFQDPGAFLAIEPLFEKERYIVTYNPSKGKVYALLKDQAKSDDILKAAFHAHVLLHFIHSADNSLSSRSQHEHLMPAATDFELHIAESCKMVSTSYRHFKNNAAEQGWRMSDSLLNPGRARLH

SEQ ID NO: 80633 - protein, 158 aa, Gossypium hirsutum
  Clone ID: GOSHI-09MAY01-C17379_1.pep
MGATATGKSLHFCSSQDPLSFLSLTKTKSKAETLNLNFRFSKPPLTPNSRRLRLSIRASSPSSTALNDPPLPSLTNSDLQLRVRILSESLPYIQKFRGKTIVVKYGGAAMKSAELKASVVRDLVLLSCVGLRPVLVHGGGPEINVLLNQLNIPAQFRD

SEQ ID NO: 80634 - protein, 62 aa, Gossypium hirsutum
  Clone ID: GOSHI-09MAY01-C17319_2.pep
LTCKNIDRAFCIPLGALPRLPPYLPAPTLKLLAKVSVLKEEVVRLEEQVIHFMQDLYREVVW

SEQ ID NO: 80635 - protein, 103 aa, Gossypium hirsutum
  Clone ID: GOSHI-09MAY01-C17319_1.pep
NIKTHRNSSCGLISCMCLRRKRRGDTGVKNLLGCQDLAPHISYYQPRRRSRRLLVKRRIKINSHSCSLVILVRSLVCFQDYPKSATKETTLLDGPLTKHPVST

SEQ ID NO: 80636 - protein, 180 aa, Gossypium hirsutum
  unsure (1)..(180): unsure at all Xaa locations
  Clone ID: GOSHI-09MAY01-C117291_1.pep
MAYLKVAFGFLVTAFLSAAVSLAHPGLGFGWGGVGAPGGQSGAPSYGLFPQFYQFSCXQAEDIVMSVLEMALAHEPRMAASLLRLXHFHHCFVQGCDASILLDNSATIVSEKNSLPNRNSVRGFEVIDEIKAKLEEACPQTVSCADILAMAARGSTVLSGGPSWELPLXRRDSKTVSLSI

SEQ ID NO: 80637 - protein, 332 aa, Gossypium hirsutum
  unsure (1)..(332): unsure at all Xaa locations
  Clone ID: GOSHI-09MAY01-C10979_1.pep
PKDGFLLLDSEFNVKGRWEKPGHSPMFGYDFWYQPRHKTMISSSWGAPVAFTKGFDLQHVTDGLYGRHLHVYSWPXGELKQTGDLGDTGLIPLETRFLHDPSKDTGYVGCALTSNMVRFFKTKDGSWSHEVAISVKPLKVQNWILPEMPGLITDFLISLDDRFLYFANWLHGDVRQYNIEDPKNPVLVGQVWVGGLIQKGSPVVAMTEDGKTWQSDVPEIQGHRLRGGPQMIQLSLDGKRFYMTNSLFSAWDRQFYPELLEKGSHMLQIDVNTEEGGLKTNPNFFVVFGADPDGPSLAPEMSYPGGACPSDIWTLPSPNPVSPLKKISLLIL

SEQ ID NO: 80638 - protein, 83 aa, Gossypium hirsutum
  Clone ID: GOSHI-09MAY01-C10939_6.pep
MTRRCSHCSHNGHNSRTCPNRGVKLFGVRLTDGSIRKSASMGNLSQYSGSNSGAHNGNGSGSPGEGPDHTDGYASVDFVPGSS

SEQ ID NO: 80639 - protein, 139 aa, Gossypium hirsutum
  Clone ID: GOSHI-09MAY01-C10939_5.pep
MTRRCSHCSHNGHNSRTCPNRGVKLFGVRLTDGLVRKSASMSNLSQFAGSNSAGHNGNGSGSPGEGPDHADGYASEDFVPGSSSSRDRKKGVPWTEEEHRMFLLGLQKLGKGDWRGISRNYVISRTPTQVASHAQKYFI

SEQ ID NO: 80640 - protein, 245 aa, Gossypium hirsutum
  Clone ID: GOSHI-09MAY01-C10939_1.pep
MATMLRSLLTFTLFTLLFSYVSATTITLYNKCPHPVWPGIQPSAGKPLLARGGFKLRPNKAYSMRLPPLWSGRFWGRHGCSFDASGRGRCATGDCGGSLFCNGLGGAPPATLAEITLGQDQDFYDVSLVDGYNIAMSITPFKGSGKCSYAGCVSDLNLMCPVGLQVRSKDNKRVVACKSACFAFNSPRYCCTGTFGNPQSCKPTAYSKIFKAACPKAYSYAYDDPTSIATCTRGNYLVTFCPHRR

SEQ ID NO: 80641 - protein, 147 aa, Gossypium hirsutum
  unsure (1)..(147): unsure at all Xaa locations
  Clone ID: LIB3582-007-P1-K1-F5.pep
MYGLYNICFFLFSTATTITLYNKCPHPVWPGIQPSAGKPLLARGGFKLRPNKAYSMRLPPLWSGRFWGRHGCSFDASGRGRCATGDCGGSLFCNGLGGAPPATLAEITLGQDQDFYDVSXVDGYNIAMSITPFKGSGKCSYAGCVSD

SEQ ID NO: 80642 - protein, 85 aa, Gossypium hirsutum
  Clone ID: LIB3829-006-Q6-N6-F2.pep
MRVRASLLKQIKRTRFCKSACFAFNSPRYCCTGTFGNPQSCKPTAYSKIFKAACPKAYSYAYDDPTSIATCTRGNYLVTFCPHRR

SEQ ID NO: 80643 - protein, 94 aa, Gossypium hirsutum
  Clone ID: LIB3829-013-Q6-N6-H11.pep
CVSDLNLMCPLGLQVRSKDNKRVVACKSACFAFNSPRYCCTGTFGNPQSCKPTAYSKIFKAACPKAYSYAYDDPTSIATCTRGNYLVTFCPHRR

SEQ ID NO: 80644 - protein, 53 aa, Gossypium hirsutum
  Clone ID: uC-gsflnu33B073a09b1.pep
CSRVRAVGLHDWGFPKIFKVACPKAYSYAYDDPTSIATCTRGNYLVTFCPHRC

SEQ ID NO: 80645 - protein, 109 aa, Gossypium hirsutum
  Clone ID: GOSHI-09MAY01-C10819_1.pep
NIYLHISLLSLSLFFQESTMNVDEEVERLKEEIQRLGQIQSDGSYKVTFGVLFNDDRCANIFEALVGTLRAAKKRKVVAYDGELLLQGVHDNVEIILKATTPAAAQSSN

SEQ ID NO: 80646 - protein, 89 aa, Gossypium hirsutum
  Clone ID: LIB3147-010-Q1-K1-G4.pep
LLFLNCFNLSSRCLLVGSFISLLLIFCFFLFFFFFFFFFFFFFFFFFFFFFFFFFFFFFNQKKTYTNLGVVHSGKFHNRVFTNTVMHLC

SEQ ID NO: 80647 - protein, 96 aa, Gossypium hirsutum
  Clone ID: GOSHI-09MAY01-C10549_1.pep
LRLFGCTHPHASLRSFDRRPLSTVHVYVKHRGRKQDPVIKRTEKDRRRSEIERTKIWGVLALDWRLKLGGSLDPLERVTTTTTVVKHRLRLSGAGG

SEQ ID NO: 80648 - protein, 251 aa, Gossypium hirsutum
  unsure (1)..(251): unsure at all Xaa locations
  Clone ID: GOSHI-09MAY01-C10509_1.pep
QNTKKLEAILVSWEKEEDAXEFFEGMQLMHMTICLASRKQGLCRSNLAEETXLIGLNFWRRYLHSKIKCMKCLGKSERYERMMDLTVEIDGDXGSLEEALAQFTAREILDGENKYHCIRCKSYVKASKKLTVLESPNILTIVLKRFQSGNFGKLNKSVQFPEVLDLAPYMSGSSSKAVIYNLYAVVVHLDVMDTAFSGHYVCYVKSFRGEWFRIDDSTRDLXVIPVSLERVLLERAYMLLYARRSPMAPAL

SEQ ID NO: 80649 - protein, 124 aa, Gossypium hirsutum
  unsure (1)..(124): unsure at all Xaa locations
  Clone ID: LIB3272-038-P1-K1-D8.pep
ENKYHCIRCKSYVKARKKWTVLESPNILTIVLKRFQSGNFGKLNKSVQFPEVLDLAPYMSGSSSKAVIYNLYAVVVHLDVMDPALSGHYVCYVKSFRGECLRIDXSTVIPMSLERVLFERAYML

SEQ ID NO: 80650 - protein, 125 aa, Gossypium hirsutum
  unsure (1)..(125): unsure at all Xaa locations
  Clone ID: GOSHI-09MAY01-C10499_1.pep
MQQAIPYKSWPLPCIDATSHRARSTTTLGHNGRGKDVLNIVSENAVIVLARKGCCMSHVVRRLLLTLGVNPAVHEIDEEDEAGVLNELGTICKGTENNKMVQLPAVFIGGRLLGGLDKXMATHIN

SEQ ID NO: 80651 - protein, 121 aa, Gossypium hirsutum
  Clone ID: LIB3829-005-Q6-K6-G8.pep
IMDTFSVIDLTYTHIQNRICTNPNMPGPKALNKPNTAKKKQKAKKPSSKQQATSNSPQRLQQASKRRTSRADLSSTHAFLSTNTHTPNPPSHGHLRRNRSLGAKGSGGAQRVEGTLKPTRP

SEQ ID NO: 80652 - protein, 121 aa, Gossypium hirsutum
  Clone ID: LIB3166-026-P1-K1-F1.pep
KRRKNNRFRIENSFFFFFFLLFLGYKSPIPCTQKGGGNSVREKDTKIQRKRLKRNRKFSLNKGDFPRLFCFGVHRSVSYLSCFYVFLAQNIKKRKEKTYLYVEPAESWPSPSQSERRRSKG

SEQ ID NO: 80653 - protein, 118 aa, Gossypium hirsutum
  Clone ID: LIB3583-044-Q6-K1-F1.pep
MGTTTTTTSLDAGGEDRVMAAAQQIVKSLNTAKEVREDMLLIFSSFDNRLSNITNLIKKDSDSTGVRFDAAEKVILRWDSSSSNPDASRHSLSWEDSPHEAAEFLSAVDEILKLGVDV

SEQ ID NO: 80654 - protein, 92 aa, Gossypium hirsutum
  Clone ID: LIB3166-026-P1-K1-C12.pep
EYFFIKLVMLNKSVIEARENQKHIFTNLFCSVETIHYLLSRSHNPVLAYRIKASSSGSRYHSRCFSPLLDPVLRFMFNICNNQGIGGGSEWE

SEQ ID NO: 80655 - protein, 90 aa, Gossypium hirsutum
  Clone ID: GOSHI-09MAY01-C110461_2.pep
PRPNYPKPQNTETLDAFASAPQQPLRRAPADLIGARCGTTPFPRVVHSTNSCNRGLRGFPVETYTRIAPNREPGEGLRPEAPSNAGGWFV

SEQ ID NO: 80656 - protein, 82 aa, Gossypium hirsutum
  Clone ID: uC-gsronu33B016f09b1.pep
PFPTVAVLKRTNLRRSKALRVLAFRQPPDLERCECRFQRGSFKGSVAVECARTWRPKRAAIGRWALRGCCCGAEADAALLTA

SEQ ID NO: 80657 - protein, 210 aa, Gossypium hirsutum
  unsure (1)..(210): unsure at all Xaa locations
  Clone ID: GOSHI-09MAY01-C10469_1.pep
VGAGAGTGISAKFEEAGGVDLIVLYNSRRFRMAGRGSLAGLLPFADANAIVLEMANEVLPVSXVKAVPDLAGVCGTDPFRRMDYFLKQLESIGFSGVQNFPTVGLFDGNFRQNLGETGMGYGPEVQMIAKAHKMGFLTTPYAFNTNEAAEMAKAGANIILAHMGLTTSXGSIGAKTAVSLEESVLRVQAIADAAHAINPNVIVLCHGGPI

SEQ ID NO: 80658 - protein, 134 aa, Gossypium hirsutum
  unsure (1)..(134): unsure at all Xaa locations
  Clone ID: GOSHI-09MAY01-C10419_1.pep
MESLHENAIRKPLFHSQISDPKSESASSEXEDVLSDGNSSLLERWGKATCIESKLLFHLAAPAVIVYMINYLMSMSTQIFSGHLGNLELAAASLGNTGIQVFAYGLMLGMGSAVETLCGQAFGAXQYDMLGIYL

SEQ ID NO: 80659 - protein, 168 aa, Gossypium hirsutum
  Clone ID: GOSHI-09MAY01-C10789_1.pep
AGFGLLFPPLISSPFYKLIWGFSSLCAVLSISWSGFSFSRLLSGISCLGFLLVGVLSFAQAFYQFCSSSLAPVGFLLPFCSLWCLACLGLLEFWFSVGFWRLVPGFSSVPFSAPIQEVQWVSFFVGWSEGADICVVASWVARFSDSISLVHSELCADSVLAFCFRGLD

SEQ ID NO: 80660 - protein, 123 aa, Gossypium hirsutum
  unsure (1)..(123): unsure at all Xaa locations
  Clone ID: GOSHI-09MAY01-C10709_1.pep
LKAEDCFFVYRMVVVLCRREXAVVQTNCLWEVMWADQAAIRAGIGKPAWSWIRQRAPPTDDLLLHAIAASVLQKRKLIIENYGSTDDIITECNSMSGQLDVWKLLNDAHDLVVTLHDKIESTF

SEQ ID NO: 80661 - protein, 317 aa, Gossypium hirsutum
  Clone ID: GOSHI-09MAY01-C10659_1.pep
LASLPNVTEKGFWVMGNGHGLQKLKSFTVKACRGVTDLGLEAIGKGCPNLKQFCLRKCAFLSDNGLVSFAKAAGSLESLELEECHWVTQFGFFGSLINCGAKFKSISLVNCLGIKDLNVGLPPLPPCESLRSLSIRNCRGFGDASLAALGKLCPQLQNVELSGLHGITDVGFFPLLESCEAGLVKVNLSGCPNLGNKVVCKMADLHGRTLEMLNLDGCKISDAGLVAIAENCQLLSDLDVSKCTITDSGIAALARSNLINLQILSVSGCNLVSDKSLPSLGKLGQTLLGLNLQQCKAISSGAVDLLVEQLWRCDILF

SEQ ID NO: 80662 - protein, 189 aa, Gossypium hirsutum
  Clone ID: GOSHI-09MAY01-C10619_1.pep
HASAHASALMALLFLRHALYLTSGEEDDDLSRFISLFLLRAAGFLLPCYIVAWAISILQRRRQRQEAAAITAADVAVMIQATRPRSIHYSIAAGPSVTHQQEQPQSIHYSVAPGPSTAPQPEQPLTIHYSIAAPGPSAIPQQEQPQAMHYSVAASGPSMTPQQDQPLTIHYSITAPGPSATTQQEPAVQ

SEQ ID NO: 80663 - protein, 119 aa, Gossypium hirsutum
  Clone ID: GOSHI-09MAY01-C10159_1.pep
MAEEGQVIACHTVDSWNQQLEMGNQSKKLVVVDFTASWCGPCRFISPILVDLAKKLPNVIFLKVDVDELNTVAQEWAIEAMPTFVFLKGGTIIDKLVGARKEELQQKIAFHSSNPVQTA

SEQ ID NO: 80664 - protein, 147 aa, Gossypium hirsutum
  Clone ID: uC-gsflmaxxa090d07b1.pep
SLVFPRVRFINRITLCLKSLVFFRLFGVIAQEGQVIACHTVDSWNQQLEMGNQSKKLVEVDFTASWCGPCRFISPILEDLAKKLPKRIFLKVDVDELNTVAQEWAIEAMPTFVFLKEGTIIDKVVGARKEELHQKIAFHSSNPVQTA

SEQ ID NO: 80665 - protein, 101 aa, Gossypium hirsutum
  Clone ID: LIB3165-060-Q1-K1-H12.pep
MAEEGQVIACHTVESWQQQLQMGNESNKLVVVDFTASWCGPCRFISPILVDLAKKLPNVIFLKVDVDELKSVAQSWAIEAMPTFVFLKGGTIIDKLVGARK

SEQ ID NO: 80666 - protein, 185 aa, Gossypium hirsutum
  unsure (1)..(185): unsure at all Xaa locations
  Clone ID: GOSHI-09MAY01-C10179_1.pep
MISKAKVGSEELNSCFEKLLMVAAGNSGVGVRMEGAVITEWKDIPMELLLRIVPLVDDRTAIVASGVCCGWRDAICFGLTQLSLSWCRKNMNNLVLSLAPKFTRLQTLILRQEYPQLEDNAVEAIANFCHDIQELDLSKSFKLSDHSLYALARGCPNITKLNISGCTSFSDGALEXLTNFCQKLK

SEQ ID NO: 80667 - protein, 154 aa, Gossypium hirsutum
  Clone ID: GOSHI-09MAY01-C10169_1.pep
MYVRAVPTTDLNKNTEWFTYPGVWTTYILMVFISWLLVLSLFGTSAGTAWTIVHLAHFFVTYHFFHWKKGTPFADDQGIYNGLTWWEQIDNGKQLTRNRKFLTVVPVVLYLIASHTTDYQNPMLFFNTLAVFVLVVAKFPNMHKVRLFGINGEH

SEQ ID NO: 80668 - protein, 183 aa, Gossypium hirsutum
  Clone ID: GOSHI-09MAY01-C10119_1.pep
MPNSKNNRKEQEKNRKGKLSEKASSFHGKFPTVAPSDLRRPKTLPDLFSERTTSVLPDARPKLTKLLLNVTIQGSLGAVQVVLSPENTVGDLITAAVRQYSKGGRRPILPSTDASLLDLHYSQFSLESLERGEKLMALGSRNFFLCTKKAASKDGDNPTSSCSKEAEKVTKSVIIPWLKFMNF

SEQ ID NO: 80669 - protein, 111 aa, Gossypium hirsutum
  unsure (1)..(111): unsure at all Xaa locations
  Clone ID: LIB3135-039-Q1-K1-F3.pep
SASDVSFRFFSCSLRLFLEFGIFQVSYYTIIQPRNIKKKIKKKVINELLFSVFFFLLGIRVERSRRLRQAPETEEPNARKPESGSGAXPLRFPVTKSYPXAWXXAWXNAWX

SEQ ID NO: 80670 - protein, 90 aa, Gossypium hirsutum
  Clone ID: LIB3166-022-P1-K1-C4.pep
MVTFNSSFVNFGIFQVSYYTIIQTRNIKKKIKKKVINELLFSVFFFLLGIRVERSRRLPQAPETEEPNARETESGSGAAALRFPVTKTLS

SEQ ID NO: 80671 - protein, 47 aa, Gossypium hirsutum
  Clone ID: LIB3135-034-Q1-K1-D8.pep
CDRPPTFPSIPKWLDKYLIQNVTKLYNLVLYFFFSPIYSRISFFLIN

SEQ ID NO: 80672 - protein, 243 aa, Gossypium hirsutum
  Clone ID: GOSHI-09MAY01-C10109_1.pep
KFKDYNCTVEYYRSPFLVVQSRPPAGSPQNIKTTLKLDRMDWNSFRWKDADLLVFNTGHWWNYEKTVRGGCYFQVGEKIETKMTIEHAYQRSLETVMQWLRNEVNMSKTKVYFRTFAPVHFRGGDWRTGGSCHLETLPELGTTLVPSETWELLEIVKDVLSPHSNTSHGIKFDILNITQMTAPRKDGHASLYYLGPKESPAPIHRQDCSHWCLPGVPDAWNELLYAVFLKQSTNHTFNSSSTL

SEQ ID NO: 80673 - protein, 250 aa, Gossypium hirsutum
  Clone ID: GOSHI-09MAY01-C10099_1.pep
MPMASTTSTNLPLKDRVAIVTGSSRGIGRVIATHLAGLGAKLVINYTSSADQADLVATQINSLYPGDSPRAVTVKADVSDPAQVKLLFDSAEQAFGSPIHILVNSAGVLDPKYPKIADTALEDFDRIFSVNTRGAFLCAKEAANRLKRGSGGRIILLSSSMAAALRPGFGAYAASKAAVKAMVKILAKELKGTGITANCVAPGPIATEMFFAGKSEEAVQRCIDESPHNRLGQSEDVAPVVGFLASDASD

SEQ ID NO: 80674 - protein, 158 aa, Gossypium hirsutum
  unsure (1)..(158): unsure at all Xaa locations
  Clone ID: GOSHI-09MAY01-C10079_1.pep
GKSPVLQYLYYFGTRLGLAXSPLSNTFLVSGAMHRNPFXPCFSYRGLNVSLVYAMIPLQIHLTKEPLVEEYSIAASVWKLSACDLCEIARNSVYQSGFSHALKSHWIGKEYYKRGPNGNEIQRTNVPHIRLEFRDRIWREEMQLVYLGKAIIPEEVEK

SEQ ID NO: 80675 - protein, 121 aa, Gossypium hirsutum
  Clone ID: LIB3196-017-P1-M1-F5.pep
GRVGSPVLQYLYYLAQIGLAMSPLSNNSLFLDYHRNPFPMFFLRGLNVSLSTDDPLQIHLTKEPLVEEYSIAASVWKLSSCDLCEIARNSVYQSGFSHALKSHWIGKHYYKRGPDGNGIHK

SEQ ID NO: 80676 - protein, 177 aa, Gossypium hirsutum
  Clone ID: LIB3825-008-Q1-K6-B5.pep
TPIERKDRAENLLLTFSLVACSCALLAISGVFIFKFRVLRYKRLLEIGNLGLTGELTLASFSYNVLKRATNGFKEELGKGSFGAVYKGSLNRGRNLIAVKRLEKLVEEGEREFQAEMRAIGRAHHKNLVRLLGYCAEDSKRVLVYEYMGNGSLADLLFKSRQRPDWDERTRIALDVA

SEQ ID NO: 80677 - protein, 127 aa, Gossypium hirsutum
  Clone ID: LIB3166-021-P1-K1-B1.pep
FVALLSSLYENDVNVSSPVRPKFPISNSLLYLRTRNLKMNTPEIASKAHEHATRLKVKRRIFSVGSFRLIWGFNSWETVPSSASRLLIPIFKKTVELTPCRRRKCHSGSFCFLQTGRVDGRVGGRVG

SEQ ID NO: 80678 - protein, 132 aa, Gossypium hirsutum
  unsure (1)..(132): unsure at all Xaa locations
  Clone ID: GOSHI-09MAY01-C10029_1.pep
MARRSGVWRGYENCVPNGVAKEKKSWFGWNKKGSKNSDDPDDSKIGKFSKSAPEGSNQRQVDNHRSSSEFAKEDAXHGKKRKDKSSKKKKKKGGNSDDKHESEYKKGLRPVLWLTPDFPLKTEELLPLLDIL

SEQ ID NO: 80679 - protein, 145 aa, Gossypium hirsutum
  Clone ID: GOSHI-09MAY01-C10379_1.pep
PRLLPDVTDLTSFWRLFTVVPVLVTAYICHYNVHSMDDELEDSTQIKPVVRTALALCSTVYIMTSFFGFLLFGDSTLDDVLANFDTDLGIPYGSLLNDAVRVSYAAHLMLVFPIVFYPLRLNMDGLLFPSARPLALANMRFAFTT

SEQ ID NO: 80680 - protein, 193 aa, Gossypium hirsutum
  Clone ID: GOSHI-09MAY01-C10329_1.pep
FRDRDSDFEMTRQEFPNSREYELSRNGSRDVARARLWEARDRARARQKDIKERDVINGGYRSSSSRSDSGGNSSGGGSHGLRRREFSLGVVDKEPGELSSESGSEDAIESESVVKDSEVEKVMENGALSPVGRKREFSPIVWDRSDKDVSMSKSKNSPVVTVVHHTPPRSKAYHTSPNIISCKAAQTSLVIEN

SEQ ID NO: 80681 - protein, 86 aa, Gossypium hirsutum
  Clone ID: GOSHI-09MAY01-C10289_2.pep
LRILDMFNITTTFCKRISVKELVTSAPVYGTITDGSSGLSLMLRRWASKKTAGSTKNGRDSKPKNLGVKKFGGEGGVPGNIIVRQR

SEQ ID NO: 80682 - protein, 115 aa, Gossypium hirsutum
  unsure (1)..(115): unsure at all Xaa locations
  Clone ID: uC-gsflmaxxa076b07b1.pep
LRILDMFNIATTFCKRISVKELVTSAPVFGTITDGSSSGLSLMLRRWASKKTAGSTKNGRDSKPKXLGERSLGGERVIPGNIIXVRQRGXTRFHPGNYXXMGKXDHTLYALKEAV

SEQ ID NO: 80683 - protein, 235 aa, Gossypium hirsutum
  Clone ID: GOSHI-09MAY01-C10249_1.pep
GMLQCTWKGGIPYFVFSLDNRKEVYVANLSKEGSARGKGPDFMYSFHSSKGSHKEHGISDDESHLVAKMKVMTSFSICPQGSKIMETEFVLFSGNETFNPEVQTLSYNHRKNRGLPKKVVEAFKSSHSSKPRTIPRLWSSSIVEDSSWGPCHDTVNGPNSLNKMDLLEEEFSPNLELATIVVRNHLPKNPLPEVGGWGLKFLKKAGVTAAASVPCDCSLNTDDCSTSTDILVPAG

SEQ ID NO: 80684 - protein, 93 aa, Gossypium hirsutum
  Clone ID: GOSHI-09MAY01-C10239_2.pep
RDILNQAIPETARNLQLNFPIGLRNAEDSTAQSSSSSRRDRDGGVVPVWSPPSSSYPEQFISEESGIGASSSFLQGHPQSHQIINWRRLSQTG

SEQ ID NO: 80685 - protein, 102 aa, Gossypium hirsutum
  Clone ID: GOSHI-09MAY01-C10239_1.pep
QEPQRDSLNQGIQLTARNNNTFRQFNLPMGLGNAEDSTADSSTSSSRRERDGGVVPVWSPPASSYSEQFIGDENDIGTSSSYLPRHPQSHQIVNWRRLSQTG

SEQ ID NO: 80686 - protein, 83 aa, Gossypium hirsutum
  unsure (1)..(83): unsure at all Xaa locations
  Clone ID: AI054824.1.pep
MSMLQTSLKAAMNARVIGSGSETMILAHGFXRDHSIWDIKLPYLTKHYHVHLFDWLRFGTVKDPKLYDSLNYTHFKCQFRTFN

SEQ ID NO: 80687 - protein, 126 aa, Gossypium hirsutum
  Clone ID: LIB3166-046-P1-K1-C12.pep
MSMLQTSLKAAMNARVRGSGSETMILAHGFGGDQSLWDKILPYLTKHYHVLLFDWLCSGTVKDPNLYDPLKYTSFDAFADDLIALMDELHLTSSVFVGHSMSGMIGCIASIKRPQLFSKLILVGSS

SEQ ID NO: 80688 - protein, 167 aa, Gossypium hirsutum
  Clone ID: GOSHI-09MAY01-C11949_1.pep
MKEVPTGAWRCAEIISGNGHTYCVKYGWFPITGEAALVERVPRKAIRPCPPPINGTDDWVPGDVVEVFDELCWKPAVIVRVFGGNNMFSVRILGSKSQLKAHQSRLRVRQSWEDGYWLLVGKGSSNSTGPPKRKRSSLGFPDAGGKKMKVIEKEYLMAMLEASILCF

SEQ ID NO: 80689 - protein, 200 aa, Gossypium hirsutum
  Clone ID: LIB3825-024-Q6-K6-B12.pep
VREVPTGAWRCAEIISGNGHTYSVKYGWFPITGEAAAVERVSRKAIRPCPPPMNGKNNCACGDIVEVFDDLSWKPAVIVKVLGGNNFSVRILGSSSELKAHQSRLRIRQSWEDGNWFLVGKGSSNSTGPQKRKRSSLGFSYIGAQKKRVLEEGSNGVQRIIIRLPSPASEKVDGFDSPNNMLGERCMPSSFNRIDDTLSC

SEQ ID NO: 80690 - protein, 94 aa, Gossypium hirsutum
  Clone ID: GOSHI-09MAY01-C11889_3.pep
GFCPLSPHAANRRFQKPSLMTLQLLLFQLPRQGHDSRPQVTPRSTPPVDHHQAFAIAEFFASTLKSETFQVPPVMCGGVGGGAWISAWRSDDQS

SEQ ID NO: 80691 - protein, 115 aa, Gossypium hirsutum
  Clone ID: GOSHI-09MAY01-C11889_2.pep
KPRDNPKFQNIKALNSPLPKYKSLNGRPKYKRPYPVTITSRPTITSYLDTLKLRPITTDPRGPRTKRAQVAQLVTPRHETLGFLPSFSSRRKQKVPEAKPHDSSTPGGPTTPSRP

SEQ ID NO: 80692 - protein, 122 aa, Gossypium hirsutum
  Clone ID: GOSHI-09MAY01-C11889_1.pep
GFCPLSLRAANRRFQKPSLMTLQLLLPHQGHDSRPQLTLRSTPPVDHRQAFAIARFFCKYLQEKERKSQQTCEANTERNQRFLSKNCSSRGYKAFFLFCKKGHTRRERLDSRNTPTQKQREE

SEQ ID NO: 80693 - protein, 104 aa, Gossypium hirsutum
  Clone ID: LIB3582-061-P1-K1-B3.pep
TLYLLFLFLFASKTLCFLIPYYSSLCFCVGVFLLSGLSPAVCFYRLKRSFIASTTTSFGKKHRFLSVFASHVCCDFLSFSCRYLRKIRQWQRSDNGPLVALISA

SEQ ID NO: 80694 - protein, 97 aa, Gossypium hirsutum
  Clone ID: GOSHI-09MAY01-C11859_1.pep
MAKRLIPSFNRILVEKIIPPSKTNSGILLPEKTPKLNSGKVVAVGPGARDRDGKHIPVNLKEGDTVLLPEYGGTEVKLGEKEYHLYRDDDILGTLHD

SEQ ID NO: 80695 - protein, 54 aa, Gossypium hirsutum
  Clone ID: LIB3135-037-Q1-K1-B1.pep
VGPGARDRDGKHIPVNLKEGDTVLLPEYGGTEVKLGEKEYHLYRDDDILGTLHD

SEQ ID NO: 80696 - protein, 224 aa, Gossypium hirsutum
  Clone ID: GOSHI-09MAY01-C11599_1.pep
MNPFKTLPTLSFLFLTLFSLAHAATFDIRNNCPYTVWAAASPGGGKRLDQGQAWQITAASGTTQARIWARTKCNFDASGKGSCETGDCGGVLECKGYGKAPNTLAEYAIDQFEHQDFIDISNIDGFNVPMEFSSNSPGCTRVIKCTADIVGQCPNQLKVPGGCNGPCPVFKTEEHCCNSGNCQPTDFSRFFKERCPDAYSYPKDDPTSLFTCPTGTNYKVIFCP

SEQ ID NO: 80697 - protein, 84 aa, Gossypium hirsutum
  Clone ID: LIB3135-060-Q1-K1-E10.pep
LIRFISSNVFYVILLLKYGFLLFFLIKGFQFFIHANHNISNSDLMPSKKGVQKQLRFIPLLIITYYVGNRKDFKPIQVLFMVIK

SEQ ID NO: 80698 - protein, 99 aa, Gossypium hirsutum
  Clone ID: GOSHI-09MAY01-C11579_1.pep
PNSSIPRSRLSFTDSILENGFHLLLGFVKSNPLVSEPNLYHLLFYFIQFINMAIRFTVSFSGYVAQNLASTAGSRLGSCPSRSVHECWLRSRFLSAKQK

SEQ ID NO: 80699 - protein, 74 aa, Gossypium hirsutum
  unsure (1)..(74): unsure at all Xaa locations
  Clone ID: LIB3166-040-P1-K1-F3.pep
IEAPPPKHFLSRLRRHLRSRLLLYAELLTRSSGSAPNFRKRLAFVIHRPNQTPQLPXLVSRSPIPSMKMASISC

SEQ ID NO: 80700 - protein, 142 aa, Gossypium hirsutum
  unsure (1)..(142): unsure at all Xaa locations
  Clone ID: GOSHI-09MAY01-C111511_1.pep
FFSFFFVLRVRFNRAVCWSKLGLWEKSVEDCNQALRIQPNYLKALLRRAASNAKLGRWPDAVRDYEPLRKELPGDNEVAESLHNAQVALKKSRGMDVLNMKISXEVEEISSLERFKTAISTPVVHFKVATNEQCEEISPFVN

SEQ ID NO: 80701 - protein, 174 aa, Gossypium hirsutum
  Clone ID: GOSHI-09MAY01-C11499_1.pep
MRPILMKGHERPLTFLKYNRDGDLLFSCAKDHTPTVWFADNGERLGTYRGHNGAVWTCDVSRDSMRLITGSADQTVKLWNVQKGTQLYTFNFGSPARSVEFAIGDKLAVITTDPFMELTSAIHVKRIAGDPTEQTEESVLVIKGPQGRINRAVWGPLNRTIISAGEDAVIRIWD

SEQ ID NO: 80702 - protein, 95 aa, Gossypium hirsutum
  Clone ID: GOSHI-09MAY01-C111441_1.pep
MNYRYVKLNNTILEWEEKKKKKARSKLDKAEKSESEKKRARALTKFRNEMDYIKQVADGARAQANARQRNDELKAKEKANIIRTTGELPMTCFCC

SEQ ID NO: 80703 - protein, 246 aa, Gossypium hirsutum
  Clone ID: GOSHI-09MAY01-C11409_1.pep
EETAPAQVDLLGEALFQFCDPMMEPLDWKLFSPLHSQIEAEGAPWMFDHVGNSFGGVKFEHGTNENDAEFMNSILNNSDDYYSDDSSSRRNSVIETETPKSMAFGTNGGLYCKPDAEPARVLPGTGTANGGAFYNVRNSNGEPSNHVNTACNVDTAPTIRIRSRAHRIQPDTENFDTQGIASRRCKLVVHSPRFEEKEHESKPILTKGVKAMEEYISVGNDAARRTMDEPQIFETSKRDVLRSKSK

SEQ ID NO: 80704 - protein, 213 aa, Gossypium hirsutum
  Clone ID: GOSHI-09MAY01-C11439_1.pep
MIHMRAMASEQGMSSWTDLLHSSTKLLEQAAPSAQFPPLQRNLDQLEALSKKLKAKTLRTEAPSQSIAATRLLAWEGINAEQLTRDMKSFDLKTTFEDVFPTEATSVEEYLQQEDWQKEKRDFLQSLSRISTLPKTNLIDKSSGGIRSGQMVPMASSSHVSSGPSANGLLPLADKPVVEKKVSVYAEVVRNLNNARQQGLPFKACAISACGNF

SEQ ID NO: 80705 - protein, 37 aa, Gossypium hirsutum
  Clone ID: LIB3166-039-P1-K1-A10.pep
MRAMASEQGMSSWTDLLHSSTKLLEQAASSAQFPPLQ

SEQ ID NO: 80706 - protein, 359 aa, Gossypium hirsutum
  unsure (1)..(359): unsure at all Xaa locations
  Clone ID: GOSHI-09MAY01-C11749_1.pep
MSRIKETLSNISNSAKHISFTKKHKKIFLALFASLVIVAAIIGIVAGVSSRNNSDESDTSHHAVVKSACSGTFYPDLCFSAVTTVPAGTAKKVRSQKDVIELSLNITTTAVEHNYFKIKKLLARKDLTTREKTALHDCLETIDETLDELHEAVEDLHEYPNKKSLTQHADDLKTLMSAAMTNQETCLDGFSHEGADKKIREVLIDGEKYVEKMCSNALAMIKNMTDTDIANEMMLKSSNRKLKEDESGIAWPEWLSAGDRRLLQSSSVTPNVVVAADGSGNFKTVSEAVAKAPEKSSKRYIIRIKAGVYXENVEVPKKKSNIMFIGDGGSKTIITGSRNVVDGSTTFHSATVAVVGEKF

SEQ ID NO: 80707 - protein, 232 aa, Gossypium hirsutum
  Clone ID: GOSHI-09MAY01-C11779_1.pep
FGLSSSDLRSNKLHSGLFPSGFHQLDRTAPPTRLSGDNFCSDNANNTNISSLLTIGNPTQSLKQSNDSKTPHIVLFGQLIFCEQRASQSCSGDTVGNSSSDGNTEKTAISSDGTGSVLHQNVRENSSDEGFPWCKEHQKTDLGLETGHCKVFMESENVGRTPDLSVLGSYEELFGKLANMFGIESSEMLSSVLYRDAAGSVKNTGDEPFSEFMKTARRLTILMDSSSDNLER

SEQ ID NO: 80708 - protein, 127 aa, Gossypium hirsutum
  Clone ID: LIB3166-043-P1-K1-H5.pep
GLSSSDVRSSLLQSGLFPHGFNQLGHTIPPMGHSSDYGNNRNISSSHTMGNLTQSLKESNEIKTPHILLFGQLIFCEQHVSQSCSDTIGNSSSNGNTEKTVISSDASGSALHQNARENSSDEGSPWY

SEQ ID NO: 80709 - protein, 157 aa, Gossypium hirsutum
  Clone ID: GOSHI-09MAY01-C11709_1.pep
DAWVKGKGSEERWTGAIANLTEMASNLDSLQKLLLKKAVFVDEDTFAKASLTSEQARTIKVLEQRVETLEREVDAAITAAARARSEKRQAEAAQKAAELRAQEVTKELENTTKVFELHMEELRAKQEEISKRDKEIKLLEAIIQTLAGKDSRSSPLE

SEQ ID NO: 80710 - protein, 97 aa, Gossypium hirsutum
  Clone ID: GOSHI-09MAY01-C11649_1.pep
MGAKGFSVELIHRDSPISPFYNASLTSSQIPRKNALHSLDRLRHFQSLIDQSAIQSAVTPNGGIYLMKLSFGTPPVDYMAVADTGSDLIWIQCVPCL

SEQ ID NO: 80711 - protein, 114 aa, Gossypium hirsutum
  Clone ID: LIB3165-048-Q1-K1-B7.pep
MMHKPLFLVLTAIFSSLVVQPVIGAKGFSVELIHRDSPISPFYDPSLTSSQILRKNALHSMDRLKHFQSLIDQSTIQSAVTPNGGIYLINLSFGTPPVEYMAVAYTGSDLIWIQ

SEQ ID NO: 80712 - protein, 151 aa, Gossypium hirsutum
  unsure (1)..(151): unsure at all Xaa locations
  Clone ID: LIB3585-056-P1-K1-H3.pep
MLRRNIRLRREYLYRKSLEGKERLLYEKKRKIKEALEEGKPIPTELRNEEAALRQEIDLEDNYTSIPKTHIDDEYANATVRDPKILLTTSRDPSAPLIQFVKELKFVFPNAXRMNRGGQVISEIIESCRAHEFTDVILVHEHRGIPDGLII

SEQ ID NO: 80713 - protein, 86 aa, Gossypium hirsutum
  Clone ID: LIB3166-042-P1-K1-C4.pep
MLRRNIRLRREYLYRKSLEGKERLLYEKKRKIKEALEEGKPIPTELRNEEAALRQEIDLEDNYTSIPKTHIDDEYANATVRDPKIL

SEQ ID NO: 80714 - protein, 84 aa, Gossypium hirsutum
  Clone ID: GOSHI-09MAY01-C11629_1.pep
AWLFLKVHFCILLVKSKSKRMAHLMSTSCSIKISSSYRPCGQPLSQDRTVLPNSFTIKTSKSPFKRLISKGHRAGRSCGVLAIA

SEQ ID NO: 80715 - protein, 73 aa, Gossypium hirsutum
  Clone ID: uC-gsronu33B047d10b1.pep
GWEVNYGAEFVPSGEDSYTIIIQKSKKVGCSEGEVVCDNFKVGEPGKVVLTIHNPTSKKKKLLYRLKTMPASA

SEQ ID NO: 80716 - protein, 55 aa, Gossypium hirsutum
  Clone ID: uC-gsronu33B047d05b1.pep
PPGGVERGSGIFVYSSFYPISSFGASHIGSFYTFLNPTSKKKKLLYRLKTMPAFV

SEQ ID NO: 80717 - protein, 160 aa, Gossypium hirsutum
  unsure (1)..(160): unsure at all Xaa locations
  Clone ID: GOSHI-09MAY01-C11109_1.pep
MASTAISLSLPTFPSSSSTVKAKPSIFSHPHLFIAKNVPSSSLFSSSTKITKQIRTAFKIKCSSASFSNTLPSALLFDCDGVLVDTEKDGHRVSFNDTFNEKXLGVTWGVDLYGELLKIWXVGKERMTAYFNKTGWPDKAPKSEEERKAFIASLHKRKTE

SEQ ID NO: 80718 - protein, 104 aa, Gossypium hirsutum
  Clone ID: LIB3120-043-P1-K1-H3.pep
SHARPRVTHRVLYCHTLHIAATAIYLSLPTFPSSSSTVKAKPSIFSHPHLFIAKNVPSSSLFSSSTKITKQIRTAFKIKCSSASFSNTLPSALLFDCDGVLVDT

SEQ ID NO: 80719 - protein, 95 aa, Gossypium hirsutum
  unsure (1)..(95): unsure at all Xaa locations
  Clone ID: GOSHI-09MAY01-C11079_1.pep
GKKGPPTRPESVPKVSPTPTLGTGGRHIADQAAAKTWCGSAFQMPLHYPRYTEADYEAMPEWKVDCLLKEYGLPITGDGEQKRXAFAMGAFLWPR

SEQ ID NO: 80720 - protein, 68 aa, Gossypium hirsutum
  Clone ID: uC-gsronu33B008g04b1.pep
AHMDCTTGIKRRLKPGAAAQKRCRCMTQGTRKLITKPCLSGELMDRLRIRTTHHRLTQKQKRSSRHGR

SEQ ID NO: 80721 - protein, 119 aa, Gossypium hirsutum
  Clone ID: GOSHI-09MAY01-C11019_7.pep
ITVQPVEGAFVVNLGDHGHYLSNGRFKNADHQAVVNSDCSRLSIATFQNPAPDATVYPLKIREGEKPILEEPITFAEMYRRKMSKDLELAMLKKLAKEQQMETTKKPELETKPLEQILA

SEQ ID NO: 80722 - protein, 94 aa, Gossypium hirsutum
  Clone ID: GOSHI-09MAY01-C11019_6.pep
CEPTETAHVDPNLLLINQTPVESARALSIAGGLVNKEKVRSSWAVFCEPPQDQIILKPLPETVSGTEPPLFPPRTFAQHIEHKLFRKTQDNLSN

SEQ ID NO: 80723 - protein, 102 aa, Gossypium hirsutum
  Clone ID: GOSHI-09MAY01-C11019_4.pep
NGRFKNADHQPVVNSNCSRLSIATFQNPAPDATVYPLKIREGEKPILEEPIPFAEMYRRKMSKDLELARLKKVAKEQQQLKEKEAENEKPKLEAKPLEEILA

SEQ ID NO: 80724 - protein, 150 aa, Gossypium hirsutum
  Clone ID: GOSHI-09MAY01-C11019_3.pep
MAPSTLTELAGKETLQASFVRDEDERPKVAYNQFSDEIPVISLAGINYVGEKRAEICQKIVEACENWGIFQVVDHGVDTKLISEMTRLAREFFALPAEDKLRFDMSGGKKGGFIVSSHLQGETVQDWREMVDYFSYPIKIQDYSTWPDMP

SEQ ID NO: 80725 - protein, 368 aa, Gossypium hirsutum
  Clone ID: GOSHI-09MAY01-C11019_2.pep
MAPSTLTALAEEKTLQASFVRDEDERPKVAYNQFSNDIPVISLAGIDDVDGKRGEICKKIVEACEDWGVFQVVDHGVDTKLVSEMTRLAREFFALPAEEKLRFDMSGGKKGGFIVSSHLQGEAVQDWREIVTYFSYPLKSRDYSRWPDKPEGWIEVTKEYSEKLMGLACKLLEVLSEAMGLEKEALTKACVDMDQKVVVNFYPKCPQPDLTLGLKRHTDPGTITLLLQDQVGGLQATRDNGKTWITVQPVEGAFVVNLGDHGHYLSNGRFKNADHQAVVNSDCSRLSIATFQNPAPDATVYPLKIREGDKPILEEPITFAEMYRRKMSKDLELARLKKLAKEQQQLKEKEAENEKPKLEAKPLEEILA

SEQ ID NO: 80726 - protein, 354 aa, Gossypium hirsutum
  Clone ID: GOSHI-09MAY01-C11019_1.pep
MVTSVLPRVESLASSGIQSIPKEYIRPQEELTSIGNVFEEEKKEEGPQVPTIDLTEIESEDKEVRERCQQELKKAAMEWGVMHLVNHGISEELMDRVRKVGQKFFELPVEEKEKYANDQSSGNVQGYGSKLANNASGQLEWEDYFFHLIFPEDKRDLSIWPKIPSEYTEVTSEYARQLRGLASKILSALSICLGLEEGRLEKEVGGVEELLLQLKINYYPKCPQPELALGVEAHTDISALTFILHNMVPGLQLFYQGKWVTAKCVPNSIIMHIGDTIEILSNGKFKSILHRGLVNKEKVRISWAVFCEPPKDKIILKPLPETVSETEPPLFPPRTFAQHIEHKLFRKTQDNLSN

SEQ ID NO: 80727 - protein, 146 aa, Gossypium hirsutum
  Clone ID: LIB3135-036-Q1-K1-E8.pep
MVTSVLPRVESLASSGIQSIPKEYIRPQEELTSIGNVFEEEKKEVRERCQQELKKAAMEWGVMHLVNHGISEELMDRVRKVGQKFFELPVEEKEKYANDQSSGNVQGYGSKLANNASGQLEWEDYFFHLIFPEDKRDLSIWPKIPS

SEQ ID NO: 80728 - protein, 137 aa, Gossypium hirsutum
  unsure (1)..(137): unsure at all Xaa locations
  Clone ID: LIB3146-009-Q1-K1-A4.pep
IASGRPRSRTPRVRKEYIRPQEELTSIGNVFEEEKKEEGPQVPTIDLTEIESEDKEVRERCQQELKKAAMEWGVMHLVNHGISEELMDRVRKVGQKFFELPVEEKEKYANDQSSGNGQGYGSKLXNNASGQLEWEDY

SEQ ID NO: 80729 - protein, 156 aa, Gossypium hirsutum
  Clone ID: uC-gsflnu33B090c05b1.pep
YSSAHASAHAFAHASVTRLAREFFALPAEEKLRFDMSGGKKGGFIVSSHLQGEAVQDWREIVTYFSYPLRSMDYSRWPDKPEGWVEVTKEYSEKLMGLACKLLEVLSEAMGLEKEALTKACVDMDQKAVGNFYPKCPQPDLTLGLKRHTDPGTITL

SEQ ID NO: 80730 - protein, 105 aa, Gossypium hirsutum
  unsure (1)..(105): unsure at all Xaa locations
  Clone ID: LIB3493-024-P1-M1-D12.pep
MVTSVLPRVESLARSVIQSIPKEYIRPQEELTSIGNVFEEEKKVEGPXVPTIDLTDIESEDKEVRERCYHELKKAVMEXRVMHLVNHGIFEELMDRVMKDGQKFF

SEQ ID NO: 80731 - protein, 83 aa, Gossypium hirsutum
  Clone ID: LIB3148-014-Q1-K1-C7.pep
KINRNGYHHKKKSRNEIKLTQHSGRRNSANTITSRVKVLGKDFLQWLGFKLGLLILSLFLLQLLLLFGQLLQPGKLKILAHLP

SEQ ID NO: 80732 - protein, 98 aa, Gossypium hirsutum
  Clone ID: LIB3148-013-Q1-K1-C6.pep
MYLYHRLFFFSKKKKKKKKKKKKKKKMMLMAKRGEICKKIVEACEDWGVFQVADHGVDTKLVPEMTRLAREFIALTAEKKLLFNMSGGKKGGFIACSH

SEQ ID NO: 80733 - protein, 40 aa, Gossypium hirsutum
  Clone ID: LIB3083-056-Q1-L1-C5.pep
LSCKETLQASFVRDEYDQSKVAYNQFIDEIPEISIAGINY

SEQ ID NO: 80734 - protein, 313 aa, Gossypium hirsutum
  Clone ID: GOSHI-09MAY01-C11369_1.pep
MVLSQRIHEAFKGTVERITGPRTVSAFKEKGVLSVSEFILAGDNLVSKCPTWSWESGEPSKRKSYLPPEKQYLITRNVPCLRRAASVEEEYEAAGGEVLLDNEDNDGWLATHGKPKDKSDVEENLPSMETLEIRQNAVRSIPSYFGVGEDEEDIPDMADYEEADNLVETDAATLQPTYLVAQEPDDDNILRTRTYDVSITYDKYYQTPRVWLTGYDESRMLLQPELVLEDVSQDHAHKTVTIEDHPHLPGKHASVHPCRHGAVMKKIIDVLMSRGVEPEVDKYLFLFLKFVASVIPTIEYDYTMDFDLGSTST

SEQ ID NO: 80735 - protein, 81 aa, Gossypium hirsutum
  Clone ID: LIB3582-055-P1-K1-B8.pep
TNSDTIICHSVLARMVDHPALTADITSSFRYASDNNQLAPNCQSVPAKSLFNCWSYQDQSPWCSHTQLLELQRLQFQEQEK

SEQ ID NO: 80736 - protein, 89 aa, Gossypium hirsutum
  Clone ID: LIB3189-024-P1-K1-E9.pep
MVLSQKIHEAFKGTVERITGPRTISAFKEKGVLSVSEFILAGDNLVSKCPTWSWESGEPSKRKSYLPPEKQYLITRNVPCLRRASSVVQ

SEQ ID NO: 80737 - protein, 82 aa, Gossypium hirsutum
  Clone ID: GOSHI-09MAY01-C11319_5.pep
MVVLAASVLSKSGKVLVSRQFVDMTRIRIEGLLAAFPKLVGTGKQHTYVETENVRYVYQPIEALYLLLVTNKQSNILEELET

SEQ ID NO: 80738 - protein, 118 aa, Gossypium hirsutum
  Clone ID: GOSHI-09MAY01-C11319_4.pep
EYEASAMFDLRNVVISVPLPALREAPNVRQIDGEWRCDPRNSILEWSILLIDNSNRSGSMEFVVPPADSSVFFPISVRFSAPSLYSDLKVVNIIPLRGGATPKFSQRTNLSTENYQVV

SEQ ID NO: 80739 - protein, 110 aa, Gossypium hirsutum
  Clone ID: GOSHI-09MAY01-C11319_3.pep
RNVVIYVPLPALREAPNVRQIDGEWRYDSRNSVLEWSILLIDNSNRSGSMEFVVPPADSSVFFPISVRFSATSTYSDLKVVNIIPLRGGGAPPPKFSQRTNLITENYQVV

SEQ ID NO: 80740 - protein, 149 aa, Gossypium hirsutum
  Clone ID: GOSHI-09MAY01-C11319_2.pep
MVVLAASIVSKSGKVLLSRQFVDMTRIRIEGLLAAFPKLVGTGKQHTYVETENVRYVYQPIEALYLLLVTNKQSNILEDLETLRLLSKLVTEYSYSLDEEGIGKTAFELIFAFDEVICLGHKENVTVTQVKQYCEMESLEEKLHKLVLQ

SEQ ID NO: 80741 - protein, 527 aa, Gossypium hirsutum
  Clone ID: GOSHI-09MAY01-C11319_1.pep
YCLGRLLLGNQDVLLSRQFVDMTRIRIEGLLAAFPKLVGTGKQHTYVETENVRYVYQPIEALYLLLVTNKQSNILEDLETLRLLSKLVPEYSYSLDEEGIGKTAFELIFAFDEVICLGHKENVTVAQVKQYCEMESHEEKLHKLVLQSKINETKDVMKRKASEIDKSKIDKNKGDKGGFMSMGSGRIESSFSDMSISSSGSGFGSSSGLGLTTDLDSFSTKSKGRQLSSATAPPKGLGMQLGKSQKTNQFLESLKAEGELIVEDVQPRAGQARVAAAAPTDPITLTAEEKLNVTLKRDGGISNFDVQGTLSLQILNQEDALIQVQTETGGNPGILFKTHPNMNKELFSNENILGLKDPNRPFPTGSAGDAAGVGLLKWRMQSADESMVPLTINCWPSVSGNETYVSIEYEASAMFDLRNVVIYVPLPALREAPNVRQIDGEWRYDSRNSVLEWSILLIDNSNRSGSMEFVVPPADSSVFFPISVRFSATSTYSDLKVVNIIPLRGGGAPPPKFSQRTNLITENYQVV

SEQ ID NO: 80742 - protein, 77 aa, Gossypium hirsutum
  unsure (1)..(77): unsure at all Xaa locations
  Clone ID: LIB3272-057-P1-N1-B6.pep
EWRYDSRNSVLEWSILLIDNSNRXDSSVFFPISVRFSATSTYSDLKVVNIIPLRGGGAPPPKFSQRTNLITENYQVV

SEQ ID NO: 80743 - protein, 55 aa, Gossypium hirsutum
  Clone ID: LIB3148-026-Q1-K1-D2.pep
VPPADSSVFFLISVRFSATSLYSDLKVVNIIPLRGGATPKFSQRTNLSTENYQVV

SEQ ID NO: 80744 - protein, 105 aa, Gossypium hirsutum
  unsure (1)..(105): unsure at all Xaa locations
  Clone ID: GOSHI-09MAY01-C11309_1.pep
MFLSRSVLAFIFLSSLLLFPANPIRLFKAEDESDLFMEAPVYQNGPHCPVLGKDTLICDSSVVHIAMTIDPVYLRGTIAAIHSVVKHGSCPHNVFFXHFIASDSS

SEQ ID NO: 80745 - protein, 72 aa, Gossypium hirsutum
  Clone ID: GOSHI-09MAY01-C11299_1.pep
MGKQPVKMRAVVYALSPFQQKIMGGLWKDLPGKISHKVSENWISATLLLTPLVGTYAYVQNFKEKEKLEHRY

SEQ ID NO: 80746 - protein, 126 aa, Gossypium hirsutum
  Clone ID: LIB3189-002-P1-K1-E3.pep
DAWANFRKPVLKQTLVDKKIEEKNIEVMKKEDCFQKNLINEEALKGQLQKQQMIFDQQQRNIKELKHAINSTKAGMQFIQMKFHEEFNSLGMHIHGLAHAASGYHRVLEENRKLYNQVQDLKGSIR

SEQ ID NO: 80747 - protein, 117 aa, Gossypium hirsutum
  Clone ID: LIB3189-002-P1-K1-E4.pep
MCTDSTLLFFIHTIVAEGIGDMNMEEQNNEDCFQKNLINEEALKGQLQKQYMIFDQQQRNIKELKHAINSTKAGMQFIQMKFHEEFNSSGMHIYGLAHAASGYHRVLEENCKFYNQV

SEQ ID NO: 80748 - protein, 133 aa, Gossypium hirsutum
  Clone ID: GOSHI-09MAY01-C12989_1.pep
MVVSGPITPGQVSFLLGILPVFVAWIYSEFLEYKRSASHSKVHADNNLVESGDEKIKEDDRALLLEGGLTRSTSAKVHSSTIKTNLIRFLTMEDSFLLENRAILRAMAEFGAILVYFYICDRTNLLGESTKKY

SEQ ID NO: 80749 - protein, 100 aa, Gossypium hirsutum
  Clone ID: LIB3583-048-P1-K1-F1.pep
MVVSGPITPGQVSFLLGVIPVFIAWIYSEFLEYKKSASLSKAHSDTNLVVLGKETIKEDDRAVLLEGGLTRSASSKLHASSIKTNLIRFLIMEDSFLLEH

SEQ ID NO: 80750 - protein, 132 aa, Gossypium hirsutum
  Clone ID: LIB3585-052-P1-K1-F11.pep
MVVSGPITPGKVSFLLGILPVFIAWIYSEFLEYKRSASHSKVHADNNLVESGDEKIKEDDRALLLEGGLTRSTSAKVHSLTIKTNLIRFLTMEDSFLLENRAILRAMAEFGAILVYFYICDRTNLLGESTKK

SEQ ID NO: 80751 - protein, 136 aa, Gossypium hirsutum
  unsure (1)..(136): unsure at all Xaa locations
  Clone ID: GOSHI-09MAY01-C12959_1.pep
MESDNLAYMELAIHQAKLALESLEVPVGCVIIKDGELIALGRNRTTETRNATRHAEMEAIKNLLKMLEKKRFSKAVLVKNFSQCILYVTCEPXIMCAATLSFLGIKEVYYGCANEKFEGCGSILSLHSICSKLSSM

SEQ ID NO: 80752 - protein, 57 aa, Gossypium hirsutum
  Clone ID: GOSHI-09MAY01-C12949_1.pep
RNPQYTNFYNHLVSSKAFEIQYNKRHELFLLVLPNPTNLIWISWPFSDQMSGLYPLY

SEQ ID NO: 80753 - protein, 115 aa, Gossypium hirsutum
  Clone ID: GOSHI-09MAY01-C12969_1.pep
LRAKFSITLQESKESEIEARWRKKRIEKKSVFQAGCSSDQLVDRRSIRGSIELIFGQQLGDKVFLTLYGRIFHPSLVASEIPIFQQLRFLGMFSHFSLFCLRLHIASLVRVVCLL

SEQ ID NO: 80754 - protein, 161 aa, Gossypium hirsutum
  Clone ID: GOSHI-09MAY01-C12909_1.pep
MAQEEVQNGGPEKVAEVSFTALKPQLMVEAPKAADAVQFYKTAFGAVEAGRTVYPKRKAEQEQPHVLSAQLELAGSTILVSDIADNSTPVKTEGTGCVLCLETEDVEAAIAKAVSAGGVAEGEVTEGDGACCGGRVGKVKDPYGYVWLICSPAKKCGDAEA

SEQ ID NO: 80755 - protein, 101 aa, Gossypium hirsutum
  Clone ID: uC-gsflnu33B134f11b1.pep
KGPSGSIFCFKNGLYHVSLSISVVELELSSLRQLSVQSVCPYLSGTVNTVFFLVVVSKIHLTAADNCRFMKISLTRVNTKESITVDLLILPARIHFFGRVG

SEQ ID NO: 80756 - protein, 163 aa, Gossypium hirsutum
  Clone ID: GOSHI-09MAY01-C12939_1.pep
CYCLRCRTPLSSSFLAANTLENRASTCFSKASISFSKTPNFPPKSMAATLVFPERIADTREFAALFSSLTSFNVSPFSTITLKTHESTSINKAELNLTITCLISKYGLVSPDKVAKTTPNTHNPTLFTSIKASWTTLSLQEDNFPSPPSLFLTSSFKSLLELW

SEQ ID NO: 80757 - protein, 254 aa, Gossypium hirsutum
  unsure (1)..(254): unsure at all Xaa locations
  Clone ID: GOSHI-09MAY01-C12849_1.pep
MLGAILRNEVGWFDEEEHNSSLLAAIIGSXDHADVKSAXAERISVILQNMTSLLTSFIVAFIVEWRVSLLILGTFPLLVLANFAQQLSLKGFAGDTAKAHAKTSMIAGEGVSNIRTVAAFNAQNKILSLFCHELRVPQMQSLRRSQVSGLLFGLSQLALYASEALILWYGAHLVNKGASTFSKVIKVFVVLVVTANSVAETVSLAPEIIRGGEAVGSVFSILDRSTRIDPDDPEAEPVESIRGEIELRHVDFAY

SEQ ID NO: 80758 - protein, 59 aa, Gossypium hirsutum
  Clone ID: GOSHI-09MAY01-C12879_1.pep
MGAEFLLDCFGDQVSEIVIMFEWFFFYCKIIIHPFSFSFNSALQFVICCHIVHLVTPIH

SEQ ID NO: 80759 - protein, 208 aa, Gossypium hirsutum
  unsure (1)..(208): unsure at all Xaa locations
  Clone ID: GOSHI-09MAY01-C12839_1.pep
YFPLSTILTAKVGSYPSFTWRSICSARDLISDGILWRVGNGASINIWNDPWLXWNRELIHNLVDDNTANRIFDIPISESRPENMLVWKYEGSGEYTVRSGCRVLITDYLQSNLHMSSTNEEYKIFYMDLWVLHIPEKIKIHVWRLFNNMVPHYGNLARRTLCEEVVCPLCKEDLETTAHLLGSCRVLQNIWTSLQVQIPPLDDSPDAW

SEQ ID NO: 80760 - protein, 117 aa, Gossypium hirsutum
  Clone ID: GOSHI-09MAY01-C12829_1.pep
EVLGFIRVLGKPKKSWLATCGRRTLGFSCSSAKTIFTHLPSSTPANNKLPGLFSPNKISASRFSLRNLTFSRLPLELGGAVTLMPLHSVTASALFTSLLSLHNQSWGCLSEGFATPL

SEQ ID NO: 80761 - protein, 72 aa, Gossypium hirsutum
  Clone ID: GOSHI-09MAY01-C12599_1.pep
FCCTFLHKHGKIAVDRSEPRNRLLLLRHQCFHSHRVHPMEMDQVIFDRDSEDELDDYIDDLEDRKVWFTICI

SEQ ID NO: 80762 - protein, 392 aa, Gossypium hirsutum
  unsure (1)..(392): unsure at all Xaa locations
  Clone ID: GOSHI-09MAY01-C12549_1.pep
LLLILSFSSVANLASKLQPWWLLLVIPFLFVSNTYHCVNAEPQVPCYFIFGDSLSDNGNNNNLATEAKVNYWPYGIDFPKGPTGRFTNGRTMQDIIVQLLGFQEFIPPFATSRGQEILKGVNYASGSAGILNDSGQHLGVRISMNMQLSNHQSVISTIVEMLGNCAASKLLGKCMYAVQIGSNDYINNYFKPEMYNSSHLFTPEQYAAYLIEQYSRQIKTLYNNGARMFALFGLGAIGCTPNAIAVHGTNGSXCVEKMNTAAQLFNERLVPLVDELNSNFTDAKFTYLNPTGASAANSLGFTVANASCCDIGSGGDFCIPGSEPCGDRSQYVFWDAVHTSDAWNEVIAVEAYDSESKAIAYPFNVQKMAQLPNNNDADGDICEMGPHSGVTV

SEQ ID NO: 80763 - protein, 169 aa, Gossypium hirsutum
  Clone ID: GOSHI-09MAY01-C12499_1.pep
SYASAHASAPFFCFFFFQRDSFRFWRKMNHYNLQQNPIAVSAYEEMGGFISSISEHHRAGPVVCPKPRRIGVLTNNPIKPFRLHMSHQADVSESKASAELLDIILNKGDLWAEQSAAQVASSPPFFCGSPPSRATNPVVQDARFGDEGVAALSASQSPSPSPSAHKGGM

SEQ ID NO: 80764 - protein, 131 aa, Gossypium hirsutum
  Clone ID: GOSHI-09MAY01-C12489_1.pep
MALPETLDSPQSSSSSDPQLFRNLSSSRLNAQAPEFVPTRSTPQQQQQQQQSMRMMIPPPPPPGIMHVYSPPPAPAGAAFHLPVPMPPHLVPVPHHMSMRNHHHHPYQNHHHREQEVEAVANKDHQEHKDH

SEQ ID NO: 80765 - protein, 104 aa, Gossypium hirsutum
  Clone ID: GOSHI-09MAY01-C12479_1.pep
MGTLQTWRKAYGALLDSTKVGLAHVNSDYADLDVAIVKATNHVECPPKERHLRKILLATSAIRPRADVAYCIHALSRRLANTHNWMVALKTLIVIHRALREGDP

SEQ ID NO: 80766 - protein, 97 aa, Gossypium hirsutum
  Clone ID: GOSHI-09MAY01-C12469_1.pep
LYFKNTFPFSLFPRPPSTMASLTSLKRSSPSILHLSSIHHRLQIRQFSSLPLIIASYIQSNNLMDSIASSFLKWIAVGSSFGLVCWYSFSASDRSTG

SEQ ID NO: 80767 - protein, 72 aa, Gossypium hirsutum
  Clone ID: GOSHI-09MAY01-C12419_1.pep
MQRRQDQRSRSVKPITVHGLAQSGDLVGLQKLLNDKPFLLNERNPVMAQTPLHVSSGNDRAEIVKFLLDWQG

SEQ ID NO: 80768 - protein, 253 aa, Gossypium hirsutum
  Clone ID: GOSHI-09MAY01-C12409_1.pep
MAEVEKQDKLAVNGGKREEEETLLEGMAVLDFDMLCSTVALQTQGKWRKLESAEDPLEQGNADFGGVLRMWEGEVVLDFLEDRRLALESACCPCYRFGKNMRRAGLGICLLQGTVYFILAVTAILNFVAFFVTKRNCFLYLGVTFILSIGAYLGFFRRQIKRKFNIRGNDSLLDDCVYHLICPCCTLSQESRTLEMNNVQDGTWHGRGDICIGSYAEGTKPLFGLHPPPTMSIKTPEPCSMQNGLNGDDNGQT

SEQ ID NO: 80769 - protein, 104 aa, Gossypium hirsutum
  Clone ID: AI054442.1.pep
STNVFYFYKEKINRFYRRDASTSSKLQRSRRFLVVKDHRRFRVSSICLALAKPPWNIACRNPTPPFLITASLLLPFCLHLQQVCLASLLPPLKRKTDKPRNFTT

SEQ ID NO: 80770 - protein, 80 aa, Gossypium hirsutum
  unsure (1)..(80): unsure at all Xaa locations
  Clone ID: LIB3166-052-P1-K1-B6.pep
TIKKQKEKRERERLRLKKXNFVVCLPFFLMAEVEKQDKLAVNGGKREEEETLLEGMAVLDFDMLCSTLCFSNTMVFGINS

SEQ ID NO: 80771 - protein, 145 aa, Gossypium hirsutum
  Clone ID: GOSHI-09MAY01-C12759_2.pep
GLEVTGHRISRVRPHAVPEMALPVDESLDLRVVSARRRALSSLDLPLSQVIEEPVSSLLMLASILQAHPLYYPLCPDSQLLGFLSIHFFFPFQSSMKWVLGVLSFLGARYSTGRTEHSIDVLPLRSALLPREIVIRNSCSKLKGM

SEQ ID NO: 80772 - protein, 129 aa, Gossypium hirsutum
  Clone ID: GOSHI-09MAY01-C12759_1.pep
MALQWMILTYVVAAEAALALLLTFPSPKLLKNRFVSLISLILQPTLFIVPFAGFLLLDIYWMNEHRLMCTSEICTAAERDRYEKSVFKTQRNVILCTTACLLYWCIYQICKYHKEIQSLEEVEKRYKNE

SEQ ID NO: 80773 - protein, 215 aa, Gossypium hirsutum
  Clone ID: GOSHI-09MAY01-C12779_1.pep
MAIPEQKVPPQEIGGSEGIKPASSRWPKAEVLALINLRSGLETRYQEAGPKGPLWEEISAGMSRMGYKRSAKRCKEKWENINKYFKKVKESNKKRPEDAKTCPYFHQLDALYRKKILGSGSSSFSDQNRFEGETSQQHQDPPMEAPQHSHDQSENKTGTTIDVLTSKENSPGSLFGKGNGRATKKSEDIVREQMEEQEMQCNSNNMQWMTNGYDL

SEQ ID NO: 80774 - protein, 142 aa, Gossypium hirsutum
  unsure (1)..(142): unsure at all Xaa locations
  Clone ID: GOSHI-09MAY01-C12729_1.pep
MALMLDNCEGILLSLDSHKPVPAPCLTKTYQLVDDPTTDHIVSWGEDDTTFVVWRPPEFARDLLPNYFKHNNFSSFVRQLNTYGFRKIVPDRWEFANEYFKKGEKHLLCEIHTRKTAQPQVTAALNLXNHHHRHLHTQSTNG

SEQ ID NO: 80775 - protein, 207 aa, Gossypium hirsutum
  unsure (1)..(207): unsure at all Xaa locations
  Clone ID: GOSHI-09MAY01-C12699_1.pep
EENCEMILVYDYMAYGTLREHLYKTQKPPLPWKQRFEICIGAARGLHYLHTGAKHTIIHRDVKTTNILLDEKWVAKVSDFGLSKTGPTLVNTHVSTVGKGSFGYWDPEYFRRQQLTDRSDVYSFGVVLFEILCARPALNPTLPKEQVSLAEWAAHCHKKGIPDQIMDXPYLKGKIAPECFKKFAETAMKCVXDHGIDRPAMGDGHGT

SEQ ID NO: 80776 - protein, 171 aa, Gossypium hirsutum
  unsure (1)..(171): unsure at all Xaa locations
  Clone ID: uC-gsflmaxxa011a03b1.pep
SKTGPTLDNTHVSTVVKGSFGYLDPEYFRRQQLTDKSDVYSFGVVLFEILCARPALNPTLXHCHKKGILDQIMDPYLKGKIAPECFKKFAETAMKCVADQGIDRPSMGDVLWNLEFALQLQESAEESGKGISELEVEEGTYDVTCKGKKDPNASPGFDIXVADSRSSGMSM

SEQ ID NO: 80777 - protein, 83 aa, Gossypium hirsutum
  unsure (1)..(83): unsure at all Xaa locations
  Clone ID: LIB3829-022-Q6-K6-E12.pep
RGRPRGGEVRQGTKISLIGYCEENCEMILVYDYMAYGTLREHLYKTFFLPLPWKQRGGGGIXAARGLHYLHTGAKHTIIHRDV

SEQ ID NO: 80778 - protein, 183 aa, Gossypium hirsutum
  Clone ID: GOSHI-09MAY01-C12679_1.pep
MVADHFSGGGCGWRDIKTFGLKLILGRWFMVFASLLIMSVSGATYIFGLYSNVIKTSLGYDQTTLNLLSFSRDLGGNVGILSGLINEVTPPWVILLIGAVMNFFGYFMIWLAVTGRTAKPHVWQMCRYFCLGANSQAFANTGALVTCVKNFPESRGSVLGLLKSYVGLSGAILTQLYHAFYGD

SEQ ID NO: 80779 - protein, 328 aa, Gossypium hirsutum
  Clone ID: GOSHI-09MAY01-C12669_1.pep
LLASAYAFRFVGEWLKWLYTDVTRRLEANDFSTLPEVHACTAGLKSVTTSATADAIEECRKLCGGHGYLSSSGLPELFAVYVPACTYEGDNVVLLLQVSRFLMKTVSQLGSGKKPVGTIAYMGRSEHLLQCRCEVERAEDWLKPNVILEAFEARAARMSVTCAKNLNNFPNQEEGFAQLATDLAEAAVAHVQLIIASKFIEKLQQDIPGKGVKRQLEILFNVYALSLLHKHLGDFVASGCITPKQGALANEQLRLLYSQVRPNAIALVDAFNYTDHYLGSVLGRYDGNVYPKLYEEAWKDPLNETVIPDGYHEYIRPILKQHIRVARL

SEQ ID NO: 80780 - protein, 89 aa, Gossypium hirsutum
  Clone ID: uC-gsronu33B098g03b1.pep
MPPDEPRVSGPPMPSIPNLPQPTIPTLPTTQPSLPKPGALPPLPTMPTLPTIPNAPKLSMPPLPNIPSFPTIPATMPSIPFFSAPPAKN

SEQ ID NO: 80781 - protein, 73 aa, Gossypium hirsutum
  Clone ID: uC-gsflnu33B012g11b1.pep
STRPQPTIPTLPTTQPSLPKPGALPPLPTMPTLPTIPNAPKLSMPPLPNIPSFPTIPATMPSIPFFSPPPAKN

SEQ ID NO: 80782 - protein, 154 aa, Gossypium hirsutum
  Clone ID: GOSHI-09MAY01-C12169_1.pep
SNILSKIFCSKFKMKRNQNQKQMNEQFTNNREKRNNGFVLLFCGAYNKKKTNLGYWWKGIEVLRWGCLWVKAKAAVVPAFFARTECESRSSRKRKESARPRFARGEHQYTTAPNCFHHSQKYQKINGLIPTKRGKEPEKRSSGTQISTKKGEEF

SEQ ID NO: 80783 - protein, 144 aa, Gossypium hirsutum
  Clone ID: LIB3147-024-Q1-K1-B8.pep
KATFFQFFLSKFKMKRNQNQKQMNEQFTNNREKRNNGFVLLFCGAYNKKKTNLGYWWKGIEVLRWGCLWVKAKAAVVPAFFARTECESRSSRKRKESARPRFARGEHQYTTAPNCFHHSQKYPQITGSFPLFVKIKTLIFGRVG

SEQ ID NO: 80784 - protein, 123 aa, Gossypium hirsutum
  Clone ID: GOSHI-09MAY01-C12119_1.pep
SKKINKLGRKGIATSPMHSNFIKWIKHFDESKLLRWNPLSSIRIRHHHESHSESLMDLMTAIAGKLLRMVSISCTARESAKLIVLKLHGNLPRIKLLIAVVEHHQNRLEPVGLVGRIGGFQLG

SEQ ID NO: 80785 - protein, 113 aa, Gossypium hirsutum
  Clone ID: uC-gsflmaxxa027a09b1.pep
MAFYLNCNTHFFFKFSLLFSLLSFSFSQSDVVEAPSPAADSCNGIFLSYAYSSGTKLKPTDPTHQPYRFESVLTVLNNGDEELKSWKGSVEFQNDEFLVSGSNAVLADGTSLP

SEQ ID NO: 80786 - protein, 94 aa, Gossypium hirsutum
  Clone ID: GOSHI-09MAY01-C12089_1.pep
TSTKISLGIFGVFPPYTLLKPGIGWASARILSNASLKIARVLAHDTSTLIFSFRLYSVLEGVTVKSSSWKETPTSSTSDDIASAGRRYSCLFLP

SEQ ID NO: 80787 - protein, 89 aa, Gossypium hirsutum
  Clone ID: LIB3166-048-P1-K1-A2.pep
SYGFPYYHFLFLLQIISCKQEKGIFVSNTFCRRACFPPRIRYRILKFHGRKRHEYLRPALAISSDVEDVGVSFQFEDFTVTPSSTEESR

SEQ ID NO: 80788 - protein, 199 aa, Gossypium hirsutum
  unsure (1)..(199): unsure at all Xaa locations
  Clone ID: GOSHI-09MAY01-C12059_1.pep
PLIRVPAEYHKFFGRPLYVAEYGAFKLVNLFHQLLXVTHLFEKINKFVYLRNWKACPSAPPLVLTRKDKKGKGNQEESLDIAAGVGSSDEFSDEERVVVEEHYEKRNEGRTNFGEAGCEVDDRNLEQFKCELQEILVSYSCRIFLGCFEEIYQQRYKKMLDYQKLGVEKLEELFDKVRDVVFLHEEPLSKRKFLYAVGS

SEQ ID NO: 80789 - protein, 191 aa, Gossypium hirsutum
  Clone ID: GOSHI-09MAY01-C12049_1.pep
LTNPMVLLAVILGSTIIFILFLQPRHLSSSPKSDSMAARSFVLWLHGLGDSGPANEPIKTLFRSSEFRNTKWSFPSAPENPVTCNYGMRMPSWFDIQEIPVTADSPKAESDVLKAVQNVHAMIDKEVAAGTDPNNVFVCGFSQGGALTLASVLLYPKKLGGGAVFSGWVPFNSSMVEKFPEDAKKTPILWS

SEQ ID NO: 80790 - protein, 313 aa, Gossypium hirsutum
  unsure (1)..(313): unsure at all Xaa locations
  Clone ID: GOSHI-09MAY01-C12009_1.pep
MVRKGWSFWQGYVVLLALAVVVKAESPYRFIDWNVTYGDIFPLGVRQQGILINGQFPGPDIYSVTNDNLIINVQNNLDEPFLLSWNGLQQRRNSYEDGVYGTTCPIPPGKNFTYILQVKDQIGSFFYFPSLAFHKAAGGFGGIRVLSRPRIPVPFPDPAGDFTLLIGDWFKNDHRLLKAMLDGGHMLPFPDGILINGHGLNGASFTVEQWXSFRFRISNVGLSNSLKFRIQGHKMKLWEVEGTXHCQTIYESLDXHVGKSYSCAGTMDQAAQDFYIVAFNSFTDNIFHHWHPSYSTQHRMLAYSADNRPNDCF

SEQ ID NO: 80791 - protein, 75 aa, Gossypium hirsutum
  unsure (1)..(75): unsure at all Xaa locations
  Clone ID: LIB3166-057-P1-K1-A12.pep
MMCKGWSFWQGYVVLFALAVVVKAESPYRFFDWNVTYGDIFPLGVRQXGPDIYSVTNDNLIINVQNNLDEPFLLS

SEQ ID NO: 80792 - protein, 135 aa, Gossypium hirsutum
  Clone ID: GOSHI-09MAY01-C12359_1.pep
MNAISTSPVDFIQESNNGNGSDSDTSHDDAPEYYQPISAVDGDDDDDDDEDRESFDDQVNSDEEHHHRNLTSGYVNRVENGISFLHVGSVATEQEEEEEEERRREASDTAIRRAFREDERRRNAPLTAENAMRVR

SEQ ID NO: 80793 - protein, 128 aa, Gossypium hirsutum
  unsure (1)..(128): unsure at all Xaa locations
  Clone ID: GOSHI-09MAY01-C12369_6.pep
RGEPVNPKAYPLADAQLTTTILDLVQQAANYKQLKKGANEATKTLNRGISEFIVMAADTEPLEILPHLPLLAEDKNVPYVFVPSKQALGRACGVTRPXVIACSVTSNEGSQLKSQIQQLKDAIEKLLI

SEQ ID NO: 80794 - protein, 153 aa, Gossypium hirsutum
  Clone ID: GOSHI-09MAY01-C12369_5.pep
GKCLTQKLLKKKPKKGSKNAKQITKTEDCESFFNFFNPPQVPDDDEDIDEDAAEELQNQMEQDYDIGSTIRDKIIPHAVSWFTGEAIQGDELELDDEDEDEIEEDDDDEDEEDDDDDDDDEEEEEETKTKKKRNGRAQGDGQQGERPPECKQQ

SEQ ID NO: 80795 - protein, 343 aa, Gossypium hirsutum
  unsure (1)..(343): unsure at all Xaa locations
  Clone ID: GOSHI-09MAY01-C12369_3.pep
TSEILLREHTDMLESLFTKXVRKRVEGSQKIQGQHDELXAKYFEERAARRERKYQKLXYQPLYXKRYDIVNGVXEAEGXYPNDAAMDQKEDNTAEEKGVPDFWLTAMKNNDVLSDEITERDEGALKYLKDIKWHRIEEPKGFKLEFYFDPNPYFKNAGLTKTYLMIDEDEPILEKAIGTEIEWYPGKCLTQKLLKKKPKKGSKNAKPITKTEECESFFNFFNPPQVPEDDEDIDEDTAEELQNQMEQDYDIGSTIRDKIIPHAVSWFTGEAIQGDELDIDDDEEDDDDDDEEEDDEEEDEDADDEDEDDDEGSKTKKKSAHKKSGKAVGDGQQGERPPECKQQ

SEQ ID NO: 80796 - protein, 340 aa, Gossypium hirsutum
  Clone ID: GOSHI-09MAY01-C12369_2.pep
LALPLSISGNSSTSANVNMSDLGGVINELARADLLNDLKNKLQNLSRHHTEMLERLSPDVKKRVEVLREIQGQHDELEAKFFEERAALEAKYQKLYQPLYAKRYDIVNGVGEANGTTDEAAMDQGEDKAAEEKGVPDFWLNAMKNNEVLSEEITERDEGALKYLRDIKWYRIEEPKGFKLEFYFDTNLYFKNTVLTKTYHLIDEDEPLLEKAIGTEIEWYPGKCFTQNLLIKKPKKGSKNAKQITTTEDCESFFNFFNPPLFPDDDEHLDEYAADDLPYPMDPDFDLGSSLPHYIIPPAVSWFTGYAIPGHDLQSDHDDHHHFHEYHHHHHQEDDYDDHD

SEQ ID NO: 80797 - protein, 128 aa, Gossypium hirsutum
  Clone ID: GOSHI-09MAY01-C12369_1.pep
MTGEPVNPKAYPLADAQLTTTILDLVQQAANYKQLKKGANEATKTLNRGISEFVVMAADTEPLEILLHLPLLAEDKNVPYVFVPSKQALGRACGVTRPVIACSVTSNEGSQLKSQIQQLKDAIEKLLI

SEQ ID NO: 80798 - protein, 80 aa, Gossypium hirsutum
  Clone ID: AI730555.1.pep
CAAITIYCCLHSGGLSPCCPSPLLAENKNVPYVFVPSKQALGRACGVTKPVIACSVTSNEGSQLKSQIQQLKDAIEKLLI

SEQ ID NO: 80799 - protein, 40 aa, Gossypium hirsutum
  Clone ID: LIB3189-037-P1-K1-F4.pep
LALPLSISGDWATSANVNMSYLSGVINELARADLLNDLKI

SEQ ID NO: 80800 - protein, 243 aa, Gossypium hirsutum
  Clone ID: GOSHI-09MAY01-C12249_1.pep
VQTLVRKDMESENGVTVEEETIVSEKTDIEESATEEKKKEHDDADADINGEGDSNSKQQETKSEGKTSKAPANVSKTQLSRILKEPGNAKNSKVTKDKPNLRNAVPISRNQRHVLSQSLSFPARRIHGDGLVKSTDLKHSQEKSSKTHAPSSNGSASLSHPNRRGSIHVDTKPANANGGGASSRRTTIASLPSNKPAKSGPGNNGAKPSSSSEFIGSKPIAATMPSLEEEDAHSIISGPLSLP

SEQ ID NO: 80801 - protein, 95 aa, Gossypium hirsutum
  Clone ID: GOSHI-09MAY01-C112251_1.pep
LFSGSLQNLLKLGTKNVGVGRNYAALAKELGNALPKEPLLLLKPTSSYLESGGTIEDPHSLNSLDYEVELAVVIGKTARDVPENTAMNYVGGYAL

SEQ ID NO: 80802 - protein, 119 aa, Gossypium hirsutum
  unsure (1)..(119): unsure at all Xaa locations
  Clone ID: GOSHI-09MAY01-C13959_2.pep
DTLISTIPYFNKHGFGGEKVNSSSLEAWMEESKAPALDHTFKLFHDIKDRGMKIFLXLFLRGFEDEYMHVEQYKSQVRKTLMGPGVRIWGIGGDQWSRLKGLPEAKRTFKLPNSIYYMS

SEQ ID NO: 80803 - protein, 256 aa, Gossypium hirsutum
  Clone ID: GOSHI-09MAY01-C13959_1.pep
MARKIVLILVLRCLCIGLAAADWNILNPIWNINARQDSLKNYCESWRINVELNNIREFDVVPQECVAHIKKYMTSSQYDADCQRAIEEVTLYLSRCCSLKGDGKDAWIFDVDDTLISTIPYFKKHGFGGEKVNSSSLEAWMEESKAPALDHTFKLFHDIKDRGMKIFLVSSRKETLRSPTVDNLINVGYHGWSRLFLRGFEDEYMHVEQYKSQVRKTLMDQGYRIWGIVGDQWSSLKGLPEAKRTFKLPNSIYYMS

SEQ ID NO: 80804 - protein, 182 aa, Gossypium hirsutum
  Clone ID: GOSHI-09MAY01-C13919_1.pep
MGNSLPPCYLTLFLLLFISFNNVGHRNLVFANDALIEAQCHNAEVPETCIKCVKSDSRSQSANKVGIAAIIITCLSNKATTLINNMTTLASGARDKNLKVALRGCEKGFYYTKTNLIAATNRLKGKEYDQTNLLVKQALEEEFVCKMKVEVLRFNFPSSVTFDMGVYEELSTAVMRIVDRFV

SEQ ID NO: 80805 - protein, 180 aa, Gossypium hirsutum
  Clone ID: LIB3543-040-Q1-K6-A12.pep
APPYLSWCRWGGLFIFFNNVDQRNLVFADDALIETQCHNAEVPETCIKCIKSDPSKSMRGGGGGIAAIIITCLSNKATTLINNMTTLASGARDKYLKLALRGCGKGFYYAKTNLTVATNRLKGKEYDQTNLLVKQALEGEVVCKMNVGALRFNFPNSVTFDMGVYEELSTAVMRIVDRFV

SEQ ID NO: 80806 - protein, 182 aa, Gossypium hirsutum
  unsure (1)..(182): unsure at all Xaa locations
  Clone ID: GOSHI-09MAY01-C13899_2.pep
MAASNVFILLACFISLGFSSMEVSLATRNLQQVPPPFPPIPLPPPLSPIPLSPVPLLPPLSPIPLPPPFLPVPLPSAYLPVPLPPPMSPLPLIPEPPPFPSIPELRXPPLRKLPNILPLPSILDLPSFSAQPCIPPLPXNPEATNNPTIXPKPITVLPPLPSSSLPSIPFMSPPPPPPPSSH

SEQ ID NO: 80807 - protein, 131 aa, Gossypium hirsutum
  Clone ID: GOSHI-09MAY01-C13899_1.pep
MAGSNVFILIACFILLGFSSMEVSLATRNIQHVSLIEVSPITLSLFPPLPPIRSPFLPPIPPITLSPMTLAPITLTPTGTPIEEPTDPPTEKPTDPPTEPITVLPQVPSNSLPSIPFMSPSPPPPPPPSSY

SEQ ID NO: 80808 - protein, 68 aa, Gossypium hirsutum
  Clone ID: LIB3585-041-P1-K1-D12.pep
IGGGFGIKESGEIEGGNGTGKYADGNGTGKNGGGNGIGDNGGSNGTGDNGIGDNGGGNGIGGNGGGTC

SEQ ID NO: 80809 - protein, 171 aa, Gossypium hirsutum
  Clone ID: GOSHI-09MAY01-C13829_1.pep
MAASSSLLFTLLLVLLTFSDSSVQTLGLEVGINYGQIANNLPSPARVSYLLRSLNISRVKLYDADPNVLLAFANTNVEFIIGLGNEYLQNMTDPIKAQNWIQQRVQPYLTRTKITCITVGNEVYKTYDHLLWPNLLPAMQTVYNTLVNLGLDKQVTVTTAHSLDILSVSFP

SEQ ID NO: 80810 - protein, 219 aa, Gossypium hirsutum
  unsure (1)..(219): unsure at all Xaa locations
  Clone ID: GOSHI-09MAY01-C13599_1.pep
WIQRLFLDEPTSGLDSASAFFVTQTLRGLSRDGRTXVIASVHQPSSEVFELFDQVYLLAEGKTIYFGQASEAYEFFAQAGFPCPALRNPSDHFLRCINSDFDRVKATLKGSMKLRFEASDDPLEKITTTEAIRTLINFYRTSHQCYAAKEKVDEISKVRGTVLDSGGSQASFLMQSYTLTKRSFVNMSRDFGYYWLRLLIYVVVTVCIGTIFQYWTSYN

SEQ ID NO: 80811 - protein, 244 aa, Gossypium hirsutum
  Clone ID: GOSHI-09MAY01-C13549_2.pep
GTIPGIGVPMPLSVPSLDASSQGDQKQLHPGSLPFGAPPLPPGPHPSLLANQQHGYQQNPQQIQQQQQQGMQQQMPPMPMGPPNMQLQPPSHMPLLPHPHLQRPPPQMPSLGMASQMPGSLNPPSSMPTSHPMPMPGPMGMQGTMNQMPPSMPQGHFMGMNPMHSGSLPTSGGPSVGGFPNGMQNMQGPGNMGGGQMYLQGSGFNRAQGGQMPMMPGYNPYQSGGQSGMPPPPTGPTPHGQTPQ

SEQ ID NO: 80812 - protein, 151 aa, Gossypium hirsutum
  Clone ID: GOSHI-09MAY01-C13549_1.pep
QTFQFSYDNVQQKQTKTNCLGISQLFHPRQTKNSCPNEAKINTCKHSKTIGLTAEFGHVVWDLLAVEAYQTDHQTAISGSNNMLVSYELGYFTQIQLPQMRLHEMQEHSSGYTTAQQNQMCVFMSAEYRYVSKYDYNSGISNEYGSIAYRK

SEQ ID NO: 80813 - protein, 112 aa, Gossypium hirsutum
  Clone ID: GOSHI-09MAY01-C13569_5.pep
MMIMTWKENIKTKMSWQRSGKDHSVLLVLPSGIYHYKFIVDGEWRYTHDLPFIADEMGRICNLLDVLDYVPENRDSVAEFEAPASPTSSYSQAFPAVFLLISSINCGLEANL

SEQ ID NO: 80814 - protein, 155 aa, Gossypium hirsutum
  unsure (1)..(155): unsure at all Xaa locations
  Clone ID: GOSHI-09MAY01-C13569_4.pep
MGNANGRQDGANGGVDDLSGRSNGGEAVVPGAAAAGIRVPSSDSMVNTPPQSPGRSRSPLLFAPQVPVAPLPRADGHSFFNQTWRHDSPVVADSPSEKGIPVIITWNYGGNDVAVEGSWDNWXSRKMLQTSGKDHSILLVLPSGIYHYKFIVDGE

SEQ ID NO: 80815 - protein, 152 aa, Gossypium hirsutum
  Clone ID: GOSHI-09MAY01-C13569_3.pep
MFPKSKQALSSNSNSGRNSQGIRDERKSVPLKGQLQSKAGTLKSSTIKPNGMPMDSRKQHGVSNGMGPGRPGGVSNGMGPGQPGGASNGMGPGRPGRACNGTGPSRPGGVSNGTGPGQPGGANSCSRSGRAGAASNGARTGQPVGSSNGAGY

SEQ ID NO: 80816 - protein, 524 aa, Gossypium hirsutum
  unsure (1)..(524): unsure at all Xaa locations
  Clone ID: GOSHI-09MAY01-C13569_1.pep
MRGYDREEVEDYDDYDMEGEYQDEDVLEEDGDGYEEEEEEEEEEEEETRQPTQEEVEYLELRQRLKESIRRKRKHGAVGSSQEKKLPYNNFGSFFGPSQPVIAQRVIQESKSLLENHNLVSKMLTSRQSSKKNSASDGARPRQGRHIRPPKPTSELRKKVEKLKVARDYSFLEDDRGVPAPAKKPPPRNVSAPTSEARLAQMFPKSKQALSSNSNSGRNSQGIRDERKSVPLKGQLHSKAGTLKSSSIKPNGMPMDSRKQHGVSNGMGPGRPGGVSNGMGPGRPGGASNGTGPSRPGGVSNGTGPGRPGGANSGSVPGRAGAATMXAGSGRPVGASNGAGSGRPAGPKAVPSKMPIAKMEMKIPPPTSRNLPPSAHKAPPSKLHSSDSRQHLEQKRGLQERSKDKMMHQRPPVSSKPQVNKPIKPVSSQSHMKPNVQRPKKKQLSEDEKALMMIRNMFHTDRYPVCDDDDVSDMEANWDEIMKEERRSAKIARQEDEEQLRLIEEEERREQMRRMAKKRKLSQH

SEQ ID NO: 80817 - protein, 99 aa, Gossypium hirsutum
  Clone ID: AI054978.1.pep
QDEDVMEEDGDGYEEEEEEEEEEEEETRQPTQEEVEYLELRQRLKESIRRKRKHGAAGSSQEKKLPYNNFGSFFGPSQPVIAQRVIQESKSLLENQNLV

SEQ ID NO: 80818 - protein, 136 aa, Gossypium hirsutum
  Clone ID: LIB3543-034-Q1-K1-B3.pep
MQMEEKTEPMVVENLYLRSNGGEPIVPGAGPSASAVVVKVPSSDSMANSPPQSPSRSRSPLLFAPQVPVAPLPRGDGHSFFSQIWRHDSPGVVDSATEKGIPVIITWNFGGHDVAVEGSWDNWRSRSGFSPLHYRH

SEQ ID NO: 80819 - protein, 157 aa, Gossypium hirsutum
  Clone ID: LIB3585-064-P1-K2-B3.pep
MGNANGREDGANGGIENLYLRSNGGEPIVPGAGPSASAVVVKVPSSDSMANSPPQSPSRSRSPLLFAPQVPVAPLPRGDGHSFFSQIWRHDSPGVVDSATEKGIPVIITWNFGGHDVAVEGSWDNWRSRKKLLRSGKDHSILLVLPSGIYHYKFIVD

SEQ ID NO: 80820 - protein, 64 aa, Gossypium hirsutum
  Clone ID: LIB3083-076-Q1-L1-G11.pep
MGNANGRQDGANGGVDDLSGRSNGGEAVVPGAAAVGIRVPSSDSMVNTPPQSPGRSRSPLLFAP

SEQ ID NO: 80821 - protein, 120 aa, Gossypium hirsutum
  Clone ID: GOSHI-09MAY01-C13539_1.pep
MLQERHGGGPPHGVILAVVVFVVVLTPFLSGDQGEAITEAISELLTPLGLLLLPIFLLLAIQFLSSDRGSFVSAVFSTGEPDTIYGLSGSPVGGALFLLLVLFLLYNRVSIFGGGDDSDD

SEQ ID NO: 80822 - protein, 473 aa, Gossypium hirsutum
  Clone ID: GOSHI-09MAY01-C13459_1.pep
MMCYCRLFVLLALSSFVVESRHLKGNSYELSNFHPSGTNATIEPKIWAVLVAGSNGFVNYRHQADICHAYQILKNGGLEDENIIVFMYDDIAFDVENLRPGVIINKPDGDNVYKGVPKDYTGEDVNVDNLLAAILGNKTGVRGGSGKVVESGPNDHIFIYYADHGGAGILGMPSGVDLTAKDLMNTLKKKHAAKSYKSMVIYVEACESGSIFEGLLPKNMNIYAITAANANESSWGTYCPGEFPSPPSDLDTCLGDLFSISWMEDSDIHDLRKETLDQQYQLVRRRTAVDDMVGASHVMQYGNKTIAKQFVFNYMGANPKNDYYSPSSADDSSLTTTPSIVSQHDATLLHFWNKFRNAPEGSPKKTEAHKQLMDGLSLRKHIDESVNQIISVVFGQEKVPEMLNTVQSAGNPLVHDWDCFKMLVNSFKRLCGSTSRYEMKYSRAFANMCNAGVHINHATLAITQACSTSSPPP

SEQ ID NO: 80823 - protein, 166 aa, Gossypium hirsutum
  unsure (1)..(166): unsure at all Xaa locations
  Clone ID: LIB3543-062-Q6-K6-H7.pep
AECKFNLFSISWMEDSDIHDLRKETLDQQYQLVRRRXAAVDDMVGASHVMQYGNKTIAKQFVFNYMGANPKNDYYSPSSDDDSSLTTTPSIVSQHDATLLHFWHKFRNAPEGSPKKTEAHKQLMDELSLRKHIDESVNQIISVVFGQEKXPEMLNTGQSAGNPLVH

SEQ ID NO: 80824 - protein, 110 aa, Gossypium hirsutum
  unsure (1)..(110): unsure at all Xaa locations
  Clone ID: LIB3543-049-Q6-K6-C1.pep
PVRPSVLPASGKTLCGKKKMCYCRLFVLLALSSFVVXSLLLRGNSFELSNFHPSGSNATIEPKIWAVLVAGXPGSXXFWLQAAVCRACHILPVGGLADAHVLLLVSGALG

SEQ ID NO: 80825 - protein, 162 aa, Gossypium hirsutum
  Clone ID: GOSHI-09MAY01-C13419_1.pep
MGQQQSKDELLYNQVNYGNAEGIKSLFREGAGLEWMDREGKTPLILACLNPQLFDVAKTLIELGSNVNAYRPGRHGGTPLHHAAKRGLLNTVKLLLSHGANPLVMNDDCQTPLDIARVKGNVNVVRAIEDHICLFSGWMREFYGPGFIEMFVPQLLSRKVWV

SEQ ID NO: 80826 - protein, 206 aa, Gossypium hirsutum
  unsure (1)..(206): unsure at all Xaa locations
  Clone ID: GOSHI-09MAY01-C13769_2.pep
MIGSFLTRGLVTVFAYAFPAYECYKTVEMNKPDVEELRFWCQYWILVAVLTVSERIGDASVSWGPGDSEXAESAFFIYLWDPKTRGTSYVYDSFFRPYVAKHENEIDCNLLELRTRAGDMAVLYWQRAASYGQTRVFDILQYGAAQSTPRPRPARNPQAQGPRPRQPSGMPNRQPSNKAQPAQLEDEEPPSPTSSTSSTQHQKGSG

SEQ ID NO: 80827 - protein, 76 aa, Gossypium hirsutum
  Clone ID: LIB3543-060-Q6-K6-H9.pep
PASAPRAGRCHSSLTATADFITVSRRILAAPIFLFPGDLLRSTLLLFPPQVHRFGTLVLTIISEFNSVAFLFALSY

SEQ ID NO: 80828 - protein, 127 aa, Gossypium hirsutum
  Clone ID: GOSHI-09MAY01-C13709_2.pep
MQTSQKHQTRVNIHRLYHQPVKDVDQFCLPHIQILENNACSDIGSQGPSVSYQAYNDQIFTLESSTAAASIVAYDSPSAISVSSSRSPFSPQGSQSWMSDPHHSPDNTHGSPFSGSSVVDDSNGLKH

SEQ ID NO: 80829 - protein, 87 aa, Gossypium hirsutum
  Clone ID: GOSHI-09MAY01-C13709_1.pep
ATLKLAPVEDSREEDLVLEGLIGHTGSMRGDIRTCIVVKYQNMRQAQLISIHSRLVIQPVDIDPSLVFLRRLHLNRTPLVNKALDFR

SEQ ID NO: 80830 - protein, 191 aa, Gossypium hirsutum
  Clone ID: GOSHI-09MAY01-C13669_1.pep
MANNFLYFCLFCSLVVLTHSAPEEALVTQLPGFSGTFPSNHYSGYVNVDQNHGKNMFYYFVESERNPSEDPLVLWLNGGPGCSSFDGFVYEHGPFNFEAAKANESLPQLHLNPYSWSKVSNIIYLDSPVGVGFSYSKNKSDYETGDVQTAIDTHAFLLKWFELYSEFLPNPFFIAGESYAGVYVPTLSSEV

SEQ ID NO: 80831 - protein, 288 aa, Gossypium hirsutum
  Clone ID: GOSHI-09MAY01-C13609_1.pep
MAAGMNAGAPEREARRAHASMALVQLINGGYHVITKVALNVGVNQLVFCVFRDLLALSLLAPLGYVREKRIRPPMTKRLLLSFFFLGLTGIFGNQLLFLIGLSYTNPTYAAAIQPSIPVFTFLLAVMMGTERVNLLKTEGQAKVGGTLICVSGAILMVLFRGPALIGQKDADFALNDISARGQPEPSGWLVSTLLGFGLEHWHIGVLCLIGNCMCMATFLAIQAPVLAKYPANISVTAFSYFFGAILMVTTSFFMTNESTDWKLTRSELFAVLYAGIIASALNYGLLT

SEQ ID NO: 80832 - protein, 94 aa, Gossypium hirsutum
  Clone ID: LIB3083-107-Q1-L1-H8.pep
MNAGTPERGARRAHASMALVQLINGGYHVITKVALNVGVNQLVFCVFRDLLALSLLAPLGYVREKKRQEKKMVTGGLAPGLSRKLKRYWNAGLI

SEQ ID NO: 80833 - protein, 69 aa, Gossypium hirsutum
  Clone ID: GOSHI-09MAY01-C13639_2.pep
MTRGNQRDRDRERAQSRAGGKGSKTKDDGLTPEQRRERDAKALQEKAAKKAAQAAAGGNNAGGGSKTKK

SEQ ID NO: 80834 - protein, 69 aa, Gossypium hirsutum; identical to SEQ ID NO: 80833
  Clone ID: GOSHI-09MAY01-C13639_1.pep

SEQ ID NO: 80835 - protein, 48 aa, Gossypium hirsutum
  Clone ID: LIB3147-047-Q1-K1-G12.pep
LPQIHWLSSNSPSFKVYACGLPHIKISNPPFLRRLTFADRCSVSEDQS

SEQ ID NO: 80836 - protein, 186 aa, Gossypium hirsutum
  unsure (1)..(186): unsure at all Xaa locations
  Clone ID: GOSHI-09MAY01-C13629_1.pep
MATQFGKIYNGTQKTCVLPNVSKTQNPKHVPFVSFKSNLNGKTSSWGLVVKNNGKFGSIKVRSLKVSASTATAEKPSRASEIVLQPINEISGTVKLPGSKSLSNRILLLAALSEGTTVVENLLNSDDVHHMLVALGXLGLYVKHDSEKKQATVEGCGGSVPXSGKGEGQETELFLGNAGNGMANTL

SEQ ID NO: 80837 - protein, 147 aa, Gossypium hirsutum
  Clone ID: GOSHI-09MAY01-C13199_2.pep
MKSFLSFFAFLSLLLFVDTIAAARKDAGEYWGAVTKDQPMPEALQELVRIEAAVVSPDEKTKCHTSVNIELKEEKIIVNEEFEPRPNVSAYGDDANLKGDKSSSFAEDFEPRPNVSAYGGDDAGLKGQKESFTKDFDPQPNISAYNN

SEQ ID NO: 80838 - protein, 147 aa, Gossypium hirsutum
  Clone ID: GOSHI-09MAY01-C13199_1.pep
MKSFLPFFAFLSLLLFVDTIAAARKDAGEYWGAVMKDQPMPEALQELVRIEAAVANPDEKTKCHTSGNIELKEEKIIVNEEFEPRPNISAYGDDANLKGDKSSSFAEDFEPRPNISAYGGDDAGLKGQKESFTKDFDPQPNISAYNN

SEQ ID NO: 80839 - protein, 71 aa, Gossypium hirsutum
  Clone ID: LIB3149-028-Q1-K1-E4.pep
LTLAKGTPMRKPSAIHQGTLSLRKRRLLLMTTMHDGPSLHFHEMSLLLTGLGFDLWAMILNRNSTFCFLLG

SEQ ID NO: 80840 - protein, 86 aa, Gossypium hirsutum
  unsure (1)..(86): unsure at all Xaa locations
  Clone ID: LIB3147-023-Q1-K1-E12.pep
TEMXXGLGFELLINNXIFFFRLSSXCYLKWYGXLGXXLIXXVGNXGKPPIXXTSXXXECXSGXIGSPPLTLQHPHRHSPDXRFLSC

SEQ ID NO: 80841 - protein, 56 aa, Gossypium hirsutum
  Clone ID: uC-gsronu33B058d08b1.pep
GAVTKDQPMPEALQELDRIEAPVVSPHEKTKCHTSGNIELKEEKIIANEEFEPRPN

SEQ ID NO: 80842 - protein, 82 aa, Gossypium hirsutum
  Clone ID: uC-gsflnu33B090g08b1.pep
IMKSFLPFFAFLSLLLFVDTIAAARKDAGEYWGAVMKDQPMPEALQELVRIEAAVANPICLRIFGIFLNGKLWIVLAKNLEA

SEQ ID NO: 80843 - protein, 99 aa, Gossypium hirsutum
  Clone ID: GOSHI-09MAY01-C13159_1.pep
SAKEATPKNNAANRNRLLNKTSSNSRSVSDTGSRKLLTKTQKTTKTEPVKGKEKTKGQGTESADQEDQVCPSAAAETVEEDKENMDAPLTEESSLSGVM

SEQ ID NO: 80844 - protein, 87 aa, Gossypium hirsutum
  Clone ID: GOSHI-09MAY01-C13169_1.pep
MASTGGLVPITRAFLASYYEKYPFDPLPDDVSRLSSQIRSFIQDLIQGFPPTQGESLLIQEADSQPPHKMDENMWKNLELLDQFCFT

SEQ ID NO: 80845 - protein, 189 aa, Gossypium hirsutum
  Clone ID: GOSHI-09MAY01-C13119_1.pep
MMEFKHQTSTLSLIFLLMMPGFALSDVNQDKAECSNQLVGLAPCLPYVGGEAKTPTIDCCSGLKQVLDKSKKCLCVLIKDKDDPSLGLKINGTLAGTLPSTCRASASMTECISLLHLAPNSQEAKLFEGYQKLIEGHGSTLAATGNSTSRPSSAAEKSDGGQGKRWVGVEMATGISLLIFYSIYRNIGV

SEQ ID NO: 80846 - protein, 133 aa, Gossypium hirsutum
  Clone ID: LIB3585-003-P1-K1-H6.pep
MVSGAPCFAPSDFNQDQTKWSNQLGRLASLCPYVGGEAKTPTIDCCSGLKQVLDKSKKCLCVLIKDKDDPSLGLKINGTLAGTLPSTCRASASMTECISLLHLAPNSQEAKLFEGYQKLIEGHGSTLAATGNS

SEQ ID NO: 80847 - protein, 137 aa, Gossypium hirsutum
  Clone ID: GOSHI-09MAY01-C13139_1.pep
MAAAATASGGPRYAPPDPTLPEPWKGLVDGKTGYLYFWNPVTNVTQYERPRGIDSVPKSSSVPMGSSVLVQQSSEGRYRYSSEKENDRHGRGCNAVSKLESILGGNQNSRGGPFHSLIAPNGTSSYVIGGSFRGQGS

SEQ ID NO: 80848 - protein, 90 aa, Gossypium hirsutum
  Clone ID: LIB3543-034-Q1-K1-C6.pep
MAAAATASGGPRYAPPDPTLPEPWKGLVDGKTGYLYFWNPVTNVTQYERPRGIDSVPKSSSVPMGSSVLVQQSSEGRYRYSSEKENDRHG

SEQ ID NO: 80849 - protein, 150 aa, Gossypium hirsutum
  unsure (1)..(150): unsure at all Xaa locations
  Clone ID: GOSHI-09MAY01-C13089_1.pep
MHLLITVVECLQALLHFIYWDALPDMEELMGSTSKWASTLVAQHLLAAADRYALERMRLLCEAKLCEGVTINTVATTLALAEQHNCLHLKGVCLKFIALPENLKAVMQTDGFEYLREXCPGVLPELLHXAKIGEHSCISLGYRKEGIVDG

SEQ ID NO: 80850 - protein, 214 aa, Gossypium hirsutum
  Clone ID: GOSHI-09MAY01-C13349_1.pep
MARHPIAEANEESPFGTLTPDEFYARHSVSHSSEFITNARGLKLFTQSWTPLDTPITGIVAVVHGFTGESSWFLQLTSVLFAKSGFATCAIDHQGHGFSEGLDGLDTHIPNIEGVVDDCIQCFDSFRARHAPDLPAFLYSESLGGAIALYISLRQKGVWDGLILNGAMCGISAKFKPPWPLEHFLFIVAKLIPTWRVVPTRGSIPDVSFKEPWK

SEQ ID NO: 80851 - protein, 68 aa, Gossypium hirsutum
  Clone ID: LIB3189-008-P1-K1-E5.pep
MAGEPIAEANEESPFGTLTPDEFYARHSMSHSSEFITNAGGLKLFTQSWTPLDTPVTGIVSDPQRVTV

SEQ ID NO: 80852 - protein, 289 aa, Gossypium hirsutum
  unsure (1)..(289): unsure at all Xaa locations
  Clone ID: GOSHI-09MAY01-C13379_1.pep
MAENPVKWLFLILASCLCFAFVLSESNLLIKKTYIVQMHKSAMPASFSSPLEWYSSKLKSVMSDTQSEGEGDGENRIIYSYQNAFHGVAAQLTEEEAERLKQEDGVVAILPETKYELHTTRSPMFLGLEPEESTSIWSQKLADHDVIVGVLDTGIWPESASFNDTGMTPVPAHWKGTCETGRGFQKYHCNRKIVGARVFYRGYEAATGKINEKNEYXSPRDQDGHGTHTAATVAGSPVRGANLLGYAYGTARGMAPGARIAAYKVCWTGGCFSSDILSAVDRAVGDGVN

SEQ ID NO: 80853 - protein, 57 aa, Gossypium hirsutum
  unsure (1)..(57): unsure at all Xaa locations
  Clone ID: LIB3189-008-P1-K1-H6.pep
PKGNDNTFTPSPTALSTADRTXAKHRQLARMRNSHFTAFSAISKHKLFGGCYRKMGR

SEQ ID NO: 80854 - protein, 239 aa, Gossypium hirsutum
  Clone ID: GOSHI-09MAY01-C13319_1.pep
MGSVSLKIGDGTARFKRATLCSSAVNILMLFSVITTNLFALYAFTFSPKQHLDNLFHHPHRNISLISQHVSLIIKEIDSSQRKLAQMEKELLGYDTLDLSRPNLAAELKLFLQHHQLPLGKDSKTGITEMVASVGHSCEKSADLLSQYMSYKVSGPCPDDWSLAQKLILKGCEPLPKRRCFAKTVPKPGLTSLPVSLWKPVNDKILTWSGLGCKFQLFEYKKLIRDVFGALFDYGYETQ

SEQ ID NO: 80855 - protein, 278 aa, Gossypium hirsutum
  unsure (1)..(278): unsure at all Xaa locations
  Clone ID: GOSHI-09MAY01-C13289_1.pep
MARTIKNPKKAKRKNKGSKKGDGASTSSSVPTIQPRVWQPGVDELEEGEELQCDPLAYNSLHAFHIGWPCLSFDIVRDSLGSDRKDFPHSVYFVAGTQAEKASWNSIGVFKVSNISGKRRELVPKKSSEDDPDMDGESSNSDDSEDEEEGASGAPVLQLRKVAHHGCVNRIRAMGQNPHICASWADSGHVQVWDFSSHLNALAESETEGIQGSSVFNQAPLVNFRGHKDEGYAIDWSPVVVGRLATXDCKNCIHLWEPTSDSTWNVDPTPFIGHSASV

SEQ ID NO: 80856 - protein, 243 aa, Gossypium hirsutum
  unsure (1)..(243): unsure at all Xaa locations
  Clone ID: GOSHI-09MAY01-C13249_3.pep
MRDVISFVQRYPPIFVRTRSFSADSGELVDAVVPFMGESITDGTLXSFLKHPGDRVEVDEPIAQIETDKVTIDVSSPDAGVLEQLVAKVGDTVEPGTXKIAGISKSGGVTHVAPSEDKPSKEASEPCPAKAKKVETKKPRAETPPSREKPTAPSLPPPKPSAKEPQLPPKERERRVPMTRLRKRVATRLKDSQNTFAMLTTFNEVDMTSLMKLRSDYKDAFFXKQWIKLRLMFGFLKASFYLF

SEQ ID NO: 80857 - protein, 155 aa, Gossypium hirsutum
  Clone ID: GOSHI-09MAY01-C13249_1.pep
MWAVPRRRVSSSSVLGQSFRIARPSRCYSSSSNEAYAKTLVSRKGTSQVAGIVGSLGFPVGPRPLRDVISFVQRYPPIFVRTRSFSADSGELVDAVVPFMGESITDGTLASFLKHPGDRVEVDEPIAQIETDKVTIDVSSPEAGVIEQLVAKVGD

SEQ ID NO: 80858 - protein, 142 aa, Gossypium hirsutum
  Clone ID: uC-gsflmaxxa076d01b1.pep
KKEAMWAVSRRRVSSSSVLGQSFRITRPSRCYSSSSNEAYAKTLVSRKGTSQVAGIVGSLGFPFGPRPLRDVISFVQRYPPIFVRTRSFSADSDDPNRGLMASGNSSVWEEFVRDEQTGSEYKLCSSHCAGAWHRLDDPAYI

SEQ ID NO: 80859 - protein, 51 aa, Gossypium hirsutum
  Clone ID: GOSHI-09MAY01-C113221_1.pep
NSTRFFPHGIVIQRLKMLFFFSYFEQLFLVLKKLHFTFNFCPLKAYQSFLL

SEQ ID NO: 80860 - protein, 134 aa, Gossypium hirsutum
  Clone ID: GOSHI-09MAY01-C108431_1.pep
FDSRLPDQRRSIGINVLTTPTLCVQLNTLYYAINQLNKLEDSIWEHWTRKMPIEKIYIRKSMDDKSKCSTQKGTFDGSRKDINAAIDRIREFTGTKIIFWDLREPFIENLYKPSVSQSRLEAVIEPLDVELNQL

SEQ ID NO: 80861 - protein, 58 aa, Gossypium hirsutum
  Clone ID: GOSHI-09MAY01-C108001_1.pep
AIKFGLDCTSKLGKYIKEVDCTSKLGKYIKEVLNNMIHPLTIQTTKNNVNCMRFSPKA

SEQ ID NO: 80862 - protein, 86 aa, Gossypium hirsutum; identical to SEQ ID NO: 67757
  Clone ID: LIB3582-049-P1-K1-D11.pep

SEQ ID NO: 80863 - protein, 59 aa, Gossypium hirsutum
  Clone ID: uC-gsflnu33B095b08b1.pep
CDVNWSNVSQFENAILQRLTCKEVTSRGDDCYVVLFAIPSYYILFFFLIFLFLFFPLLF

SEQ ID NO: 80864 - protein, 209 aa, Gossypium hirsutum
  Clone ID: GOSHI-09MAY01-C109481_1.pep
KMLLLSDKIRSLDTSGDNPGLADMSSLDVSNKESEIKDDLTPTEQISPQKRGAKQLRAWGEETDHLLENGGSYHHYGNIKQFADVKHPFTDSSCPLFSPLDLQQHKQNTGPDSVSYGQASVPYMHLNNSGPSNQISRFPTSAKSENNGHPSTNESSCASNQAQSIESSRGLSFEVPDIITNEKMGKPFHQQDTKAPVNRNINQARVESQ

SEQ ID NO: 80865 - protein, 58 aa, Gossypium hirsutum
  Clone ID: GOSHI-09MAY01-C104811_1.pep
VILTSVILCLHLKYHDAKVPFTEKEPKIFLKKIASWTCAYYYNDRLQRSPPRLKLSLL

SEQ ID NO: 80866 - protein, 86 aa, Gossypium hirsutum
  Clone ID: GOSHI-09MAY01-C104521_1.pep
VVDIPKVGDGVLIGAGTCILGNIKIGDGAKIGAGSVVLKDVPPRTTAVGNPARLVGGRENPIKLDKIPSFTMDHTSHIAEWSDYVI

SEQ ID NO: 80867 - protein, 102 aa, Gossypium hirsutum
  unsure (1)..(102): unsure at all Xaa locations
  Clone ID: GOSHI-09MAY01-C104451_1.pep
GIAGGTGVMXGGNVGADHAVFEQGVXAGNVGNENLVEQKKANPVALLLSSAMMLRHLQFPSFADRLETAVERVISDGKYRTKDLGGTSTTQEVVDAVIAALD

SEQ ID NO: 80868 - protein, 152 aa, Gossypium hirsutum
  Clone ID: GOSHI-09MAY01-C104371_1.pep
TFAYHTYFSVTDISEVRVEGLETLDYLDNLKNRERFTEQGDAWGGGSFFDKVYLSTPTKIAILDHDRKRTFVLRKDGLPDAVVWNPWDKKAKAMADFGDDEYKHMLCVTAACVEKPIILKPGEEWKGRLEISAVPSSYCSGQLDPRRIFRSN

SEQ ID NO: 80869 - protein, 170 aa, Gossypium hirsutum
  unsure (1)..(170): unsure at all Xaa locations
  Clone ID: GOSHI-09MAY01-C105461_1.pep
LIVLRLRDDVLKEKDGGHNPSVGADALYSGGASLSVSSLLSSVPPVATLAFDRGAESGSDRGVLSSSSLYGYGTLPMGENGYGSMPSYSSKLYGGLPASSTLEILIPSNAVGKVMGKGGLNLANIRXVSGAMIEISESKSSRGERVALITGTPQQKREAENLIQAFIMAT

SEQ ID NO: 80870 - protein, 126 aa, Gossypium hirsutum
  Clone ID: GOSHI-09MAY01-C105131_1.pep
SSVLEELAKAINLVHIRQDLVESGHALLNHAYRAQQEYARTTNYCLNLAAEQDKIVIEKWLPELKTAILNAQKCLEDCKYVRGLLDEWWEQPASTVVDWVTVDRQNVGAWHSHVKQLLAFYDKEVL

SEQ ID NO: 80871 - protein, 197 aa, Gossypium hirsutum
  Clone ID: GOSHI-09MAY01-C106671_1.pep
MPSVALKLYSVFFKFLLKHRLQNLIQNAIDESSNPYGVTTRPEESVSASNPSFTDGVATKDIHIDPFTALSIRIFLPDSSLSPPEQPDLKPNLRSSGNDDPNSHNHRRSSYAPSNVGAPRNDPRRSSLEGLNLRSDNNVYRGYSPSPQNCRKLPIMLQFHGGGWVSGSNESVANDYFCRRIAKLCDVIVIAVGYRLA

SEQ ID NO: 80872 - protein, 351 aa, Gossypium hirsutum
  Clone ID: GOSHI-09MAY01-C106131_1.pep
LWSIQYQCVGAQPHVSGISTPAELDAASVAAGIPLLTYGQEDVGISPDKHALIVPPFMSRGKRVHPMPMPDPSMTLPPRPMDPKKDLAVYGYGTVAWKERMEDWKKKQNEKLQVVKHEGNNGDEFEDSDLPMMDEGRQPLSRKLPIPSSKINPYRLIILLRLAVLGLFFHYRILHPVNDAYVLWLISVICEIWFAVSWILDQFPKWYPIERETYLDRLSLRYEKEGKPSELASVDVFVSTVDPMKEPPLITANTVLSILSVDYPVDKVACYVSDDGAAMLTFEALSETSEFARKWVPFCKKFSIEPRAPEWYFAQKVDYLRDKVDPTFVRERRAMKREYEEFKVRINSLVA

SEQ ID NO: 80873 - protein, 100 aa, Gossypium hirsutum
  Clone ID: GOSHI-09MAY01-C100751_1.pep
MDRHPASGIGIGRPPPKSGRGGKYTWEGPDDMMENELSPVPAAIDEKDPNYVDEEEEGRILRGEKSDVSGFVVGEVEVAKTAQDRDGVARVEVDAHLMPD

SEQ ID NO: 80874 - protein, 106 aa, Gossypium hirsutum
  Clone ID: GOSHI-09MAY01-C100701_1.pep
QKKKLWLLNLPSKVKITIWKISWNYLHIRVNMLQREVTNTTICPRCGIGTENMDHLFRECPGYFRRTCHPSVGFFTVHYGQFGEIGMLECIRRLANLEKKKNSEFH

SEQ ID NO: 80875 - protein, 98 aa, Gossypium hirsutum
  Clone ID: GOSHI-09MAY01-C100101_1.pep
MGRSSWSRGVGNLRSFIGNSMGGLRGGANLASWVVAGTLAYFLWVKPSQDLKKQQQERAALAASDPYRYIEKRKPIPDPQENGLIYGNKKKTDSKTEE

SEQ ID NO: 80876 - protein, 72 aa, Gossypium hirsutum
  Clone ID: GOSHI-09MAY01-C100111_1.pep
REEGGIHACLSVLTGHTGPLKCLAVEEDHQMSTETNRKWIVYSGSLDKSVKVWRVSEHAPTMNEIKETYHIH

SEQ ID NO: 80877 - protein, 168 aa, Gossypium hirsutum
  Clone ID: GOSHI-09MAY01-C101451_1.pep
MEDEAEIYDGIRAQFPLAFGKQQKSQTSLEAIHNATRRSTAGAAASTASTTASNSNNKTNEALPSLSSYSKAWLDSLRNSKSPNPNPNDSVIGPPRPPPGPVPDEDDEDVMVGPPPPPPGSGEDDDNDVMIGPPRPPVGPISDSEEDEEEENRYRIPLSNEIVLKGHT

SEQ ID NO: 80878 - protein, 86 aa, Gossypium hirsutum
  Clone ID: GOSHI-09MAY01-C101791_1.pep
ADSKVEVRGFATCNDKCGCPSPCPGGTTCSCGAGEADHKRCSCGEHCGCNPCTCSQAEAAGGSGTGKMYCKCGAGCTCATCATCAN

SEQ ID NO: 80879 - protein, 172 aa, Gossypium hirsutum
  Clone ID: GOSHI-09MAY01-C101751_1.pep
MERKHHAKYSALNSWKALESGFLKINFDAAFDKGKNISCSGVIVKNFKGDVFVSKSVIHDNISSGFAAEALACLQVVMVGKELEIKYVIFEGDSLTVIKKVNTKKKDKSVIGPYIDDIQEHNANFYGCKFQHAKRAAHNLASEGLKTRVNAYSVHESVTQVLTDSEIDRGWR

SEQ ID NO: 80880 - protein, 70 aa, Gossypium hirsutum
  Clone ID: GOSHI-09MAY01-C101671_1.pep
LLRSIIMYLDKLTSQEVISLELSTGIPMLYIFKEGKFIRRGSPIAPTEAGVYAYTRKLAQYRQKLDEMLH

SEQ ID NO: 80881 - protein, 111 aa, Gossypium hirsutum
  Clone ID: GOSHI-09MAY01-C101611_1.pep
KKQSVSPLFLFSCSCLPFVCVCLLLLCVLQAFGGRTVMRVRSGSGRGSWRACEWRAAATVSLLPRVAGCCLVLGHRALGLVGCEGIQAIRVWAIGFRIRFMLDLGFVILNI

SEQ ID NO: 80882 - protein, 235 aa, Gossypium hirsutum
  unsure (1)..(235): unsure at all Xaa locations
  Clone ID: GOSHI-09MAY01-C101111_1.pep
HGCRPRVRGAILQRTFPPESPREQTXKTRYSIGSASKNLAVAELRTMVHSLFLESCASIELASRLLFVVLTVCVSHEAQFSGSKRPRGEESYPPDEGVEESQAQSEKLKDIKPRKAKKQGPVAAFDSYVLAAVCALACELQLFPLVTRGNTHSTAKDVQAMANPAKVNGSSIEYGHGIDSAIHHTHRILAILEALFSLKPSSVGTSWGYSSNEIVAAAMVAAHISELFRRSKACM

SEQ ID NO: 80883 - protein, 239 aa, Gossypium hirsutum
  Clone ID: GOSHI-09MAY01-C102471_1.pep
MYGQPTFPRSSSEFLTDSLTSPDVVSLPLNFPLSPQTQLTVAKSVESVSDVIHSGSSSSGSFNSPTSLASCCTHKPSFIRSFSSHSLPKNEFHCRFASSLNDFIDSDSAPVRRVFSTGDLHQVQQSGRKAESPLSNESSAIIEGMSRACRYSPEEKKQRIQRYRTKRKLRNFNKKIKYACRKTLADSRPRIRGRFIRNTETEKINPQVEWSHIADGEEDDEMNWISFLDIHSHQLLINP

SEQ ID NO: 80884 - protein, 71 aa, Gossypium hirsutum
  Clone ID: GOSHI-09MAY01-C102791_1.pep
TNPSPKAQNQIQTLSPTPNYFRRKASPSHIPLRRCLHVRCQRVHCPRPSPLCTKTENFISVDSYQANAGST

SEQ ID NO: 80885 - protein, 78 aa, Gossypium hirsutum
  Clone ID: GOSHI-09MAY01-C102151_1.pep
QMLPIFQTKNHNPKIKIARVLYICQIHHFVWQSTVYHHEEIHATSMKILFGRTVEVCAGGITRGSSNFWPILVHSRSS

SEQ ID NO: 80886 - protein, 108 aa, Gossypium hirsutum
  Clone ID: GOSHI-09MAY01-C102081_1.pep
NPSPLQRKENSNSQPPSMLLPNFSPPIGHHASVMAASHASEGRLTPEIPHGRDIGEPFSVTEVGLKKGAESLIFSASSGVGSIGLQRRSKTELSEPISCSASHWPWRR

SEQ ID NO: 80887 - protein, 185 aa, Gossypium hirsutum
  Clone ID: GOSHI-09MAY01-C102001_1.pep
AGLVQPWAAIVMGMLSGSIPWVSMMILHKKCSWLQQVDDTLGVFHTHAVAGLLGGLLTGLLAEPDLCRLILPRETRGAVYGGNGGVQFVKQIVAALFVIAWNVASTTIILLVIRLFIPLRMPDNQLEIGDDAVHGEEAYALWGDGEKYDPTKHGWHTSSYSEVTAPSRFVDGARGVTISLVAACM

SEQ ID NO: 80888 - protein, 96 aa, Gossypium hirsutum
  Clone ID: GOSHI-09MAY01-C102201_1.pep
PRLLCYHPSIHVKTSPFEPASFRRVRSLLFEKYNMKLRLFSGYEVENVMIFFIVLDPISPLVSLQCCFEWLPKHPRVNPFLFCIFKSWLLVSCIGR

SEQ ID NO: 80889 - protein, 64 aa, Gossypium hirsutum
  Clone ID: GOSHI-09MAY01-C102211_1.pep
FLFKYPLGDPLEISQRRCLLIMAMGVKPEVGHTCLRHISVPDTNTQMEVRHISVSDTNTQIEVM

SEQ ID NO: 80890 - protein, 127 aa, Gossypium hirsutum
  Clone ID: GOSHI-09MAY01-C103451_1.pep
QILQSKFDSNARTVASDGEIMKALQESTVGQAADFKKIQKQCMPFLRFKKDEAIKIGVQALDLKLPFGEIDVLKENLDLIKRQVGLEEVEVLSFTDSDASAKAGTHASLLNQNPPSPGNPTAIFLPR

SEQ ID NO: 80891 - protein, 210 aa, Gossypium hirsutum
  unsure (1)..(210): unsure at all Xaa locations
  Clone ID: GOSHI-09MAY01-C103601_1.pep
ANGEGGNDGSNDNFSWNCGFEGETDNVDIIALRFRQMKNFHLALMVSQGVPMMLMGDEYGHTRYGNNNSYGHDTALNNFQWQQLNARKSDHFRFFSEVIHYRQKHRVFSHEXNFLDRSDVTWHEDNWDNPDSKFLAFTLHDKGGGEIYLAFNAHDFFVKVSIPPAPPKRRWFRVVDTNLASPDDFVGEGVPGIGSTYNVAPYSSILFEAK

SEQ ID NO: 80892 - protein, 133 aa, Gossypium hirsutum
  unsure (1)..(133): unsure at all Xaa locations
  Clone ID: GOSHI-09MAY01-C103171_1.pep
GAYGVKALAEALKDKLKKXVEIVPPKKEKDGKNEGGENGGGGDGGKKKNKGGNGGAEXVDMVVVVVVRWKGARWNLWFNPTFGYMPAYSGYEHPGYGFGYGHGYSGYVPGYPVSVHPPHHMFNDENPNACAIM

SEQ ID NO: 80893 - protein, 99 aa, Gossypium hirsutum
  Clone ID: GOSHI-09MAY01-C103271_1.pep
MRSVETQASSKKDVRFRRTSSCNDAAVSEASFIEILKKPVLRGTEAANSTSLEPSDGATQAGRSGKKKGKKGRQIDPALLGFKVTSNRIMMGEIQRLDD

SEQ ID NO: 80894 - protein, 68 aa, Gossypium hirsutum
  Clone ID: GOSHI-09MAY01-C103251_1.pep
KFNSCPHLWCSEHPQMRARIELLLKQQKLTKNDIKNILQEYHDNIGDLDGAEEKEQAQTRIQKIISSF

SEQ ID NO: 80895 - protein, 109 aa, Gossypium hirsutum
  unsure (1)..(109): unsure at all Xaa locations
  Clone ID: GOSHI-09MAY01-C38989_3.pep
IYKHLYVYIERDRGKRERERGGGRGEVGSGSAERSKEAVGMMALHEALRSVCLNSDWTYSVFWTIRPRLRLRGANGCKVXDDSGSLMLIXKDGHCRGTVTVYMEANYGT

SEQ ID NO: 80896 - protein, 64 aa, Gossypium hirsutum
  Clone ID: uC-gsronu33B015f11b1.pep
SFVRCKVGDDNGSLMLIWEDGFCKGRVTTECLEEIEGEDPVRKAFSKMSIQLYNYGEGWVLGWR

SEQ ID NO: 80897 - protein, 166 aa, Gossypium hirsutum
  unsure (1)..(166): unsure at all Xaa locations
  Clone ID: LIB3825-022-Q1-K6-G11.pep
QIALADIVVFKEKKEKEVGSGSADRSKEAVGMMALHEALRTVCLNSDWTYSVFWTIRPRPRVRGGNGCKVGDDNGSLMLMWEDGFCKGRVTTECLEEIEGEDPVRKAFSKMSIQLYNYGEGLMXKVASDKCHKWVFKEPTECEPNISNYWQSSFDATIAXIQAGHG

SEQ ID NO: 80898 - protein, 77 aa, Gossypium hirsutum
  Clone ID: LIB3147-003-Q1-K1-H1.pep
MVGSGSVDRSKEAVGMMALHEALRTVCLNSDWTYSVFWTIRPRPRVRGGNGCKVGDDNGSLVRTRGRTRGRTRGTRG

SEQ ID NO: 80899 - protein, 243 aa, Gossypium hirsutum
  Clone ID: GOSHI-09MAY01-C38889_1.pep
VIGEETSETESGDSLKCHIGQEVNHLHEGLKHALKSELEKASPALGRSAIYLKESRINGLPRYLTIQFVRFFWKRESNQKAKILRKVDYPLELDVYDLCSDELRKQLEGPRQILRDEEGKKLGLKANGKSSSSKDDDVKMIDGEGSSNASGESTVTTSQEGVPSDKETRLTGIYDLVAVLTHKGRSADSGHYVAWVKQESGKWIEFDDDNPIPQREEDIVKLSGGGDWHMAYICMYKARTVLM

SEQ ID NO: 80900 - protein, 207 aa, Gossypium hirsutum
  unsure (1)..(207): unsure at all Xaa locations
  Clone ID: LIB3829-005-Q6-K6-A7.pep
YCKAVLSLESLYKWALSGTPLQNRVGELYSLVRFLQIVPYSYYLCKDCDCKTLDYSSSTQCPNCPHNSVRHFCWWNKYVATPIQHYGNGEIGKRAMILLKHKILKNIVLRRTKKGRAADLALPPRIISLRRDTMDIKETDYYESLYSESQAQFNTYVQAGTVMNNYAHIFDLLTRLRQAVDHPYLVVYSSTAAXRAGNIVNGDRDDD

SEQ ID NO: 80901 - protein, 77 aa, Gossypium hirsutum
  Clone ID: LIB3145-055-Q1-K1-E11.pep
QIDPYSYYLCKDCDCKTLDYSSSTQCPHCPHNSVRHFCWWNKYVATPVRRSGNGQIGKRALIVLKHIVLKNIFLRRP

SEQ ID NO: 80902 - protein, 78 aa, Gossypium hirsutum
  Clone ID: GOSHI-09MAY01-C38789_1.pep
PRLLHNHLVLLVPPPMSQSSRVCRKQMRSVRLMRVMTVKMRITGATLNYLGTWMHQIIASKSCQSPLSIFHNWVWSSS

SEQ ID NO: 80903 - protein, 170 aa, Gossypium hirsutum
  Clone ID: GOSHI-09MAY01-C38769_2.pep
VNGPSVKHVVKASLDDDRHDYYSIGTYHEKNGTWIPDEPKIDVGIGLRYDYGIYYAAKTFYDQNKNRRVLWGWIGESDSEAADMQKGWASVQSIPRTILFDKKTGTHLLQWPVEEIESLRLKSYEFNQVKVQAGSVVPLDVGPATQLDIIAEFEIDNEALEKTTGSNVPF

SEQ ID NO: 80904 - protein, 292 aa, Gossypium hirsutum
  unsure (1)..(292): unsure at all Xaa locations
  Clone ID: GOSHI-09MAY01-C38769_1.pep
MYHASHDKPKIDVGIGLRYDYGIYYAARNSYDQNKNRRVLWGWIGKSDXEAADMQKGWASVHSIPMTILFDKKTGTHLLQWPVEEIESLRLKSYEFNQVKVQAGSVVPLDVGPATQLDIIAEFEIDNEALEKTTGSNVTFSCSSSGGTVERGALGPFGLLVLADDSLSEQTPVYFYIAKGSDGKLKTFFCNDQSRSSVASDVNKQIYGNLVPVLEGEKLSLRVLVDHSIVESFAQGGRTVITSRVYPTKAIYGAAKLFLFNNATEASVSASLRIWQMNSAFIRPYPNDKESQ

SEQ ID NO: 80905 - protein, 161 aa, Gossypium hirsutum
  Clone ID: GOSHI-09MAY01-C38639_1.pep
LSPATRKNFCSLLEAGYSCIVVPGGVQETFLMQHDSEVAFLKSRRGFVRIAMEMGCPLVPVFAFGQSHAYKWWKPGGKLILQLSRAIKFVPMLFWGAFGTPIPYQHPMHVVVGKPIYLKKNPQPTAEEVLEVHDQFVKALEDLFERHKARVGYDDLHLKIL

SEQ ID NO: 80906 - protein, 77 aa, Gossypium hirsutum
  unsure (1)..(77): unsure at all Xaa locations
  Clone ID: LIB3145-057-Q1-K1-F5.pep
DSEVAFLKSRXGFVRIAMEMGCPLVPVFAFGQSHAYKWWKPGGKLILXLSRAIKFGPMLFWGAFGYALNYSTYLLCS

SEQ ID NO: 80907 - protein, 266 aa, Gossypium hirsutum
  unsure (1)..(266): unsure at all Xaa locations
  Clone ID: GOSHI-09MAY01-C38149_1.pep
LLYSSFFPFIVAEDDVCXESRMLESLLEITDTDADVGRMEAKNVAMDFIHEVGWLLHRSQLKSRLGQLDPSSESFSLRRFKWLMEFSMDHEWCAVVKKLLNILLDGTVGSGEHHSIYLALTEMSLLHRAVRKNCRPLVELLLRFVPEKTSDRLGFENETVADGVHKSYLFRPDVIGPAGLTPLHIAAGKDGSEDLLDALTDDPGKAGIDAWKNARDSTGSTPEDYARLRGHYSYIHLVQKKINKRPPSGHVVVDIPSAVSDCSTNE

SEQ ID NO: 80908 - protein, 302 aa, Gossypium hirsutum
  Clone ID: GOSHI-09MAY01-C38079_1.pep
PTRPPTRPLESEFFSTEPLPCDPLSLPKYPPSKELDAKLRDEEARRRVAGTKGLRPDLDRRATRESRAVPAPPANAELVMSMQKRQSNSKSRSEKFNPHPEEVASGFPIDPPRPSQAIESNADSQGNHPKRASHSGPLAHRAAWAKSGKNLDDAPKISTGADLSMMSGLVAPRTSLASDDCTEKSGFPQSKAPKMIARFPGSFKESSESGIQQDPKNNEQEKEDGRNNNKDPALLGYGSKGHKIHYSGPLLVPSGNMDQMLKDHDRQIQEAVRRARVDKAKMRKNLLEGNQISTKSLFVSGR

SEQ ID NO: 80909 - protein, 89 aa, Gossypium hirsutum
  Clone ID: GOSHI-09MAY01-C38349_1.pep
LDRLVGPVGLRTGWGTGLRRCIRLVDLGTRTDWLNWNFLMIYLIELVKPANQWPDKFEHQTDFENFGQKLTSSNSCIRFSKLIRCSICI

SEQ ID NO: 80910 - protein, 105 aa, Gossypium hirsutum
  Clone ID: GOSHI-09MAY01-C38379_1.pep
IIKPAMKPHKGPYLAPLLQLRKYGGKPPPEDVPLPQHSFSANKQNSYFGTHSASGFPLTWKMLTKVAVELESAGRVTASLRAAVAIGGMVAVRSTAIVTKTTLNF

SEQ ID NO: 80911 - protein, 153 aa, Gossypium hirsutum
  Clone ID: GOSHI-09MAY01-C38279_1.pep
PRVRGKLSQDDEALAIATTMPKLKQLEVAYLLISTEGVGKILENCPALELLDVRGCWNVKLDENLVKKFSRLKVVGPLGADYFGMKGWDDCSNYSGSSGYLAWDFVAGDVGIDYDDEISDVDWEDDQSIEDVGMRFYDGFDLENAAFDWPLSP

SEQ ID NO: 80912 - protein, 95 aa, Gossypium hirsutum
  Clone ID: GOSHI-09MAY01-C39919_1.pep
TIDISCPSMMDWFFGGLQFQLEHHLFPRLPRCHLRKVSPLVRELCKKHKLPYRSLSFWEANKSTIRTLRTAALQARDLTNPAPKNLLWEAFNTHG

SEQ ID NO: 80913 - protein, 34 aa, Gossypium hirsutum
  Clone ID: GOSHI-09MAY01-C39939_1.pep
TWNNKLIVNTFDANIARKILQIPLAKSIYDDFQV

SEQ ID NO: 80914 - protein, 182 aa, Gossypium hirsutum
  unsure (1)..(182): unsure at all Xaa locations
  Clone ID: GOSHI-09MAY01-C39879_1.pep
ENWYWFLLELKAALSTSCPITFVADIQKGLRESISEIFKGSFHGYCLRYLTEQLIRDLKGQFSHEMKRLMIDDLYNAALAPRPEAFHSYINSIKKISLEAYNWIIQSEPQYWANSYFQGARYNHMASNXFGELFYSWVSDAHELPITQMVDVIRQRVMELIYSRRAESDHWVSRLTPCMEEK

SEQ ID NO: 80915 - protein, 201 aa, Gossypium hirsutum
  Clone ID: GOSHI-09MAY01-C39819_1.pep
ETLGIGQARNYSSLESEQLAVHSSRVPKLHASDINIPRNVSCPVSPIGSPLLHSRSPQHLNGRMSPSPISSPRTTSGSSTPLTGGSGAIPYGYLKQSPYFQEGLGSMPKPSNGLYVSGSSCHDNNPDIFRGLQAGSHIFSELVPSENDILGAGRSVHGESYDGQSVLADRVSRQLLKDHAAMSPSLDLSPSSPLPYRSVII

SEQ ID NO: 80916 - protein, 80 aa, Gossypium hirsutum
  Clone ID: GOSHI-09MAY01-C39549_1.pep
MGRKADALYINPKKFGSLTKPCMKEMISFLNCMALNKVNDEKCIRQKDLLSACMDAQSTKNRKPWGSINYHLQRLNRGRK

SEQ ID NO: 80917 - protein, 142 aa, Gossypium hirsutum
  Clone ID: GOSHI-09MAY01-C39409_1.pep
LVLGAGTLPFGTLFIELFFIMSSIWMGRVYYVFGFLFIVLVLLVVVCAEVSLVLTYMHLCVEDWKWWWKSFFASGSVAIYIFLYSINYLIFDLKSLSGPVSATLYLGYSLFMGLTIMFATGTVGFLSSFWVVHYLFSSVKLD

SEQ ID NO: 80918 - protein, 95 aa, Gossypium hirsutum
  Clone ID: GOSHI-09MAY01-C39099_1.pep
RDVVQFSSATPVHIHILNHLTQEIDIIKCITVIAYEDLRAAYIKKTIQMLSSFQSPTQLKSEQQSQKSVKFIYPDRVNISNIQFTREKIKLRCFL

SEQ ID NO: 80919 - protein, 150 aa, Gossypium hirsutum
  Clone ID: GOSHI-09MAY01-C39339_1.pep
RVFTFMTALRDLAVESGLFLKKLDKKLERTLLHSYRKDLTSQVSAETDPVSLLPKVVSLLYIQVHSRALQAPGRAISVAVTRLKNKLDDSAYKILTDFQTATVTLLALISAAAGDEADCSSDRILSKKELLEGQVPALKALVLGSSGSQA

SEQ ID NO: 80920 - protein, 66 aa, Gossypium hirsutum
  Clone ID: LIB3828-026-Q6-K6-B4.pep
NKLDDSAYKILTDFQTATVTLLALISAAAGDEADCSSDRILSKKELLEGQVPALKALVLGSSGSQA

SEQ ID NO: 80921 - protein, 231 aa, Gossypium hirsutum
  Clone ID: GOSHI-09MAY01-C39279_1.pep
LQDALRIYEKPMPGFPPVEIAAGLTDVSAIYESMNDLDQAIKLLQKALKIYNDVPGQQSTVAGIEAQMGVMHYMLGNYSESYNSFGSAISKLRICRDKKSAFFGIALNQMGLACVQRYAIKEAVELFEEAKSILEQECGPYHPDTLSVYSNLAGTYDAIGRLDDAVEILEYVVQTREEKLGTANSVVDDEKKRLAELLQEAGRVVCRKARSLETLFDANPHHNSNAEGFKV

SEQ ID NO: 80922 - protein, 99 aa, Gossypium hirsutum
  unsure (1)..(99): unsure at all Xaa locations
  Clone ID: GOSHI-09MAY01-C39219_1.pep
DFWVGGFGSRQGSPKKRRTYHLSDALTKXTTHGYPNSWAALLVSLDNPRMWDMRSASWERQYLGQQFYLRVWNPVRSLANEYDIPSNVLLCGKAVGRHP

SEQ ID NO: 80923 - protein, 210 aa, Gossypium hirsutum
  unsure (1)..(210): unsure at all Xaa locations
  Clone ID: GOSHI-09MAY01-C34999_1.pep
MELSQHGSLEELMAAAPRRDSWTTFSNGVTEFFPNGWNFESFDATPPNLAFLGFSTTTTDEIENPSFECPFSDQPYPFGDGFSVSEMDASTSPFPPAHEDYPSMVDDEDQLGLLTTDHHHQQQHSLEEMKHSCKVEMEQTSNNIHGFNMGLFVEKKTKAKRLEGQPSKNLMAERRRRKXINDRLSMLKSIFPKICKMDRTSILGDTLDYL

SEQ ID NO: 80924 - protein, 335 aa, Gossypium hirsutum
  Clone ID: GOSHI-09MAY01-C34809_1.pep
NRVMLFRTALALMELYGPALVTTKDAGDAVTLLQSLAGSTCDSGQLVLTACMGYQNVNEKRLHDLREKHRSAVIAAVEERSKGLQAWRDSQGLASKLYNFKQDPKSMIMETNKTKANGDLSHSESGSTNSDEVLISLTGDADTGAVPDLQEHVVWLKVELCRLLEEKRSAVLRSEELETALMEMVKQDNRRQLSARVEQLEQEVAELRMALSQKQEQENAMLQVLMRVEQDQRVTEDARRFAEQDAAAQRYAVQVLQEKYEEAAASLAEMEKRVVMAESMLEATLQHQSGQSKVQPSPRSSHPDSSARSNQEPQQEIPARKISILSRPFGLGWRD

SEQ ID NO: 80925 - protein, 202 aa, Gossypium hirsutum
  Clone ID: GOSHI-09MAY01-C34839_2.pep
SLTSQQYESEQKGLKGLKPKAVTCRSYRVQELTPPARIHFDAAYASNTSSSASGLVGWDTRGVLIALKTVIHRNVPSPFAAEAHACLEGVKLGISLRIHSVKLMGDSKTVIKKCQETSTDKSVIGVIIRDIQQKKSDFQDLTPPYINRSENLDAHRIAKIAFEKGETIYLRGEELDSQNLASVGYRRTRGRTRARTRGRTRG

SEQ ID NO: 80926 - protein, 89 aa, Gossypium hirsutum
  Clone ID: GOSHI-09MAY01-C34839_1.pep
KKLWSLQLPSKITFTIWRISWDFIPNYVNLSIRRVVSNDRCPRCSSEVEDSLHIFRDCPGFSRGEAMTNAFPFAMRYGGYGFTDSQDPF

SEQ ID NO: 80927 - protein, 111 aa, Gossypium hirsutum
  Clone ID: LIB3582-041-P1-K1-F2.pep
IQNANMDPSDYLLQTETQDFYKKLWSLQLPSKIAFTVWRISWDFIPCFVNLRIRRAVSNDRCPWCSSEVEDSLHVFRDCHRQPGSILMQHMTVILPVQRPVLYVGTRGVSW

SEQ ID NO: 80928 - protein, 98 aa, Gossypium hirsutum
  unsure (1)..(98): unsure at all Xaa locations
  Clone ID: LIB3145-007-Q1-K1-A11.pep
FAHDDFQAWKXELSGEFPSKITFTIWRISWDFIPNFVNLSIRRVVSNDRCPRCSSEVEDSLHIFRDCPGFSRGETMTNAFPFAMRYGGYGFTDSQDPF

SEQ ID NO: 80929 - protein, 116 aa, Gossypium hirsutum
  unsure (1)..(116): unsure at all Xaa locations
  Clone ID: GOSHI-09MAY01-C34449_1.pep
MIAPDRYERFVVPEGTKXVSYERDTKIINAATFTIEREDHTIGNILRMQLHRDENVLFAGYKLPHPLQYKILVRIHTTSQSSPMQAYNQAINDLDKELDHLKNAFEVELEKHSRDF

SEQ ID NO: 80930 - protein, 116 aa, Gossypium hirsutum
  Clone ID: LIB3829-019-Q6-K6-A2.pep
MNAPDRYERFVVPEGTKKVSYERDTKIINAATFTIEREDHTIGNILRMQLHGDENVLFAGYKLPHPLQYKILVRIHTTSQSSPMQAYNQAINDLDKELDHLKSAFEVEVEKHSRDF

SEQ ID NO: 80931 - protein, 78 aa, Gossypium hirsutum
  Clone ID: LIB3135-021-Q1-K1-E3.pep
IFRVSYERDTKIINAATFTIEREDHTIGNILRMQLHGDENVLFAGYKLPHPLQYKILVRIHTTSQSSPMQAYNQAIND

SEQ ID NO: 80932 - protein, 93 aa, Gossypium hirsutum
  Clone ID: GOSHI-09MAY01-C34469_1.pep
KGLKNTSGIKINATKSMIGHCLGAAGGLEAIATVKAITTGWLHPSINQFNPEPSVEFDTVANKKQQHEVNVAISNSFGFGGHNSVVAFSAFKP

SEQ ID NO: 80933 - protein, 145 aa, Gossypium hirsutum
  Clone ID: GOSHI-09MAY01-C34769_1.pep
MRFEVLGHVYCDTCRVEFETSISEPIPGATVRLECRNRTDEKITYQSPEITAGDKGNYKIQVTGDYEESDCDVMLVKSPRADCNDPTEEWRKARVVLTTLDGVSGEIRFANNLGFKKKEALPECTKVLTEMGYFELQKELGSEAV

SEQ ID NO: 80934 - protein, 41 aa, Gossypium hirsutum
  Clone ID: GOSHI-09MAY01-C34659_1.pep
LSAEESRKISQLPQFKGFPAGEFVSDDGPYKSLEELWDGEI

SEQ ID NO: 80935 - protein, 276 aa, Gossypium hirsutum
  Clone ID: GOSHI-09MAY01-C34159_1.pep
MSCAKPGAAQSEQRNAMEAVAGGKLDEAIKSLTEAIMLNPTSAILYATRASVFVKSSQPNAAIRDADAALKINPDSAKGYKVRGMARAMLGQWEEAASDLHVASKLDYDEEIGSVLKKVEPNAHKIEEHRRKYERLRKERELKRSERQRQQKKAEAQDQEALSAFKDGQVIGVHSTSELEIKLNAATRTSRLAILYFTATWCGPCRFISPLYTSLAAKYAKVVFLKVDIDEGRDVAARWNISSVPTFFFIRNGKEVDKVVGADKNTLESKIAQYAS

SEQ ID NO: 80936 - protein, 126 aa, Gossypium hirsutum
  unsure (1)..(126): unsure at all Xaa locations
  Clone ID: LIB3145-043-Q1-K1-F11.pep
GSPHIFCNLFIFEFVQDQEALSAFKDGQVIGVHSTSELEIKLNAATRTSRLMILYFTATWCGPCRFISPLYTSLAAKYAKVVFLKVDIDKGRDVAARWNISSVPTFXLIRNGKEVDKVVGADKLHL

SEQ ID NO: 80937 - protein, 96 aa, Gossypium hirsutum
  Clone ID: LIB3135-014-Q1-K1-C7.pep
WVEGGSRVRPRVRGVFVKLCQPNAAIRDADASLKINPDSAKGYKVRGMARAMLGQWEEAASDLHVSSKLDYDEVIGSVLKKVEPNAHKIEEHRTKY

SEQ ID NO: 80938 - protein, 300 aa, Gossypium hirsutum
  Clone ID: GOSHI-09MAY01-C34399_1.pep
GTLPTGELVAIKRAQQGSMQGGLEFKTELELLSRVHHKNVVSLLGFCFERGEQILVYEYVANGSLGDSLSGKSGIRLDWARRLKVALGAARGLAYLHELANPPIIHRDVKSTNILLDERLNAKVADFGLSKPMGDSEKGHVTTQVKGTMGYLDPEYYMTQQLTEKSDVYSFGVVMLEIVTARKPIEHGKYIVREVATSMDKPRSLYNLQEILDPTIGSDTDTIPHGLENFVDLAMRCVEEARTDRPTMGEVVKEIENIMQAAGLNPNAESASSSATYEDANKGTPHHPYACKIWTEFNLG

SEQ ID NO: 80939 - protein, 65 aa, Gossypium hirsutum
  Clone ID: uC-gsronu33B109c10b1.pep
KFVDLAMRCVEEARTDRPTMGEVVKEIENIMQVAGLNPYAESASSSATYEDANKGTPQHPYGNKI

SEQ ID NO: 80940 - protein, 124 aa, Gossypium hirsutum
  unsure (1)..(124): unsure at all Xaa locations
  Clone ID: GOSHI-09MAY01-C34359_1.pep
MEMYSSANDSDLAMLDSIRQYLLSDSSDLRLTASTDFTSAPPMFCRSSSFSRLGPCFTETWGDLPLKEDDXEDMLGYGLLRDALTVGWAPFDNSTTNVALMQAGNRMNFYRRHRWKKWIPTRRG

SEQ ID NO: 80941 - protein, 96 aa, Gossypium hirsutum
  unsure (1)..(96): unsure at all Xaa locations
  Clone ID: GOSHI-09MAY01-C34259_1.pep
PMFKLVSQLYEVVPPILTELGKVKNPWPNVDAHSGVLLNHFGLTEAXYYTVLFGVSRSIGICSQLIWDRALXLPLERPKSVTMDWLENYCKKAKAA

SEQ ID NO: 80942 - protein, 115 aa, Gossypium hirsutum
  Clone ID: GOSHI-09MAY01-C35989_1.pep
MAEEGQLINCQTFASWNEQLHAANASMKLAVVSFTASWCGACRFITPVVVELAKKLPDVIFLKVDADDLKTVTRDFAVEALPTFIFMKQGKIVDKVLGARKDDLQQKITLHMLKA

SEQ ID NO: 80943 - protein, 59 aa, Gossypium hirsutum
  Clone ID: LIB3148-030-Q1-K1-B9.pep
PDVIFLKVDADDLKTVTRDFAEEALPTFIFMKHGKIVDKVLGARKDELQQIITLHMLKA

SEQ ID NO: 80944 - protein, 127 aa, Gossypium hirsutum
  Clone ID: GOSHI-09MAY01-C35899_1.pep
SCSKSDLYLATNPSKKRQFWADPKPPFWLLFSAILASLCFSYSDIPCCSCLRITSLSSSSSSSLNISSLPLSSDSELEIRRFVIVASNSPVDFWRDFVEELEQTFYTQFILGRSCPNNTLKKKSYNR

SEQ ID NO: 80945 - protein, 72 aa, Gossypium hirsutum
  Clone ID: GOSHI-09MAY01-C135871_1.pep
WNSSYLRMRVRPDIQAPLKRRKKNLLSPGNSMYVRFCYEKSTLFCYLCGCLGHGDSFCPIQLTGDVTDSDMG

SEQ ID NO: 80946 - protein, 159 aa, Gossypium hirsutum
  Clone ID: GOSHI-09MAY01-C135821_1.pep
MSAFHVSKLIITSQASATHPKFPPFSVFRKSLSFPHSVSQCQRKIATFVSSKSSEAGELPTAEDEWLSRLPDKNKPLYSHSLPCIEAWLRSLGFYQSKEDRAVWLIEKPDWHAQLSLDVTDLYIRYLKSGPGNLERDVERRFSYALSREDIENAILGGP

SEQ ID NO: 80947 - protein, 162 aa, Gossypium hirsutum
  Clone ID: GOSHI-09MAY01-C35599_1.pep
GKDEEAKKKEESLENDLANMWVLVAKLKKEVSATLESNTDKQNSHGMDNVEDPKANNTESNNVLKERQVSEVSSKPANEIPKEEPLVVRLKARMQEMKEKELKSLGNGDANSHMCKVCFESPTAAILLPCRHFCLCKSCSLACSECPICRTKISDRLFAFPS

SEQ ID NO: 80948 - protein, 392 aa, Gossypium hirsutum
  unsure (1)..(392): unsure at all Xaa locations
  Clone ID: GOSHI-09MAY01-C35489_1.pep
MKNGLDFLNLLNCDVSLKILTNLEDPSDLVRFSAVSRSWRQFVIENGLLKHLCRRMFPQLSRVDHVNELCGTAKGHAEAGSTXFMEWEALKREHKVYAFFARGCLSFAPTECIYEAIIASSTDNDPEEGIHNTLEPRDRVARRASYWSSKGQSNPAVPETLTYRVCADLCVITEINIRPFQAYFQIGKPIYSANSVRFRMGHVKSCMDNIVKESCQDCGNDKSCMDNIVKESCQDCGNEKFAWTYTSQEFPMAQENCLQNFRLPEPVLCIGGILQIELLGRVQRQEMDSLYYICVSHVQVVGRPLSPALGIQTFEHSEKFVLEALSYKQPTSPAQSSSAPTLQMRVRDLEQILNLLRGNVVDVVEYGYEWEIEDEESHQADEDEDEDEEHRE

SEQ ID NO: 80949 - protein, 91 aa, Gossypium hirsutum
  Clone ID: uC-gsflmaxxa096h09b1.pep
MGLCQSLGFCLRRSHSHEIPISSSSESSPRPSHPFPKTTPQHFNPSSSKATSSSGIGTILLKPYVDITTIYDLDKELGRGQFGITYLCRCV

SEQ ID NO: 80950 - protein, 84 aa, Gossypium hirsutum
  Clone ID: GOSHI-09MAY01-C35409_1.pep
IDFCFFLNKNIFFFLFFFFFFFFFFFFFFFFFFFFFEVNNTIKLTIFLQSSTRFKNSDTTMNLKAITPYNSSIYKETHWVTTIK

SEQ ID NO: 80951 - protein, 311 aa, Gossypium hirsutum
  Clone ID: GOSHI-09MAY01-C35439_1.pep
RVSDLLHKAGDLVSSPSLKRLLHSKADAFLSNDYYDSDIAWMELDSKLDVTIGPYETYEDSLFGYKATFEAFIGVRDEKATAQLKLFSDNLQVLEQNLPMDDTSKSKDIIAAPIRVVQLLFNAGDVKGPQTIAFNLPNDERIVKDRGTAMVILKNVSEAKFKQILNPIADACIAKEQHKLVDFESFFTHTICHECCHGIGPHTITLPDGRKSTVRLELQDLHSALEEAKADIVGLWALNFLIKKHLLPTSLEKSMYVSFLAGCFRSVRFGLEEAHGKGQALQFNWLLEKEAFVFHPNETFSVNFDKVEESK

SEQ ID NO: 80952 - protein, 165 aa, Gossypium hirsutum
  Clone ID: GOSHI-09MAY01-C35799_1.pep
MRMLSRLMNLLKACFRPRSDRFIHKNADTGGHQNGLLWYKNTGQHVNGEFSMAVVQANNLLEDQSQLESGCLSTHESGPYGTFVGVYDRLGGPETSRYVDDHLFLHLKRFTYEQQSMSVDVIRKAYQATEEGFSSLVARQWPMTPQLAAVGSCCLVGVVWCTNLY

SEQ ID NO: 80953 - protein, 173 aa, Gossypium hirsutum
  Clone ID: GOSHI-09MAY01-C35739_1.pep
KIIHKQTRNVLDTFQGSKEVKWIFVMSTSKKLYAGKKKKGMFHHSSFLAGGATLAAGRLVVEKGILKSISAYSGHYRPTDDSLNSFLSFLKGNGVNLDKVEIRRSTDDSDSYDDGNSSSSVSTFGFSASPVPTEPKINNEEKNLSLESYDTKQPETTNTYERTLSGGLQSPRT

SEQ ID NO: 80954 - protein, 442 aa, Gossypium hirsutum
  Clone ID: GOSHI-09MAY01-C35729_1.pep
MAGVGNRSFSLILYFLCLGVIIPSLEAHIAEYDDYWRERELQAKENLEKAYNPNPEEVTQHFNDHVARNLMGFRTNSTRRMLKKRKGGPCEATNPIDQCWRCDRNWEKNRKKLADCALGFGRGTTGGKDGPIYVVTDPTDDVLNPSRGTLRHAVIQNRPLWITFARGMIIRLKEELLMTSNKTIDGRGANVHIAYGAGITIQFAKNVIIHNIHIHNIFPSKGGKIKDGENHLGLRTRSDGDGISLFGATNVWLDHLSVYKCSDGIIDAIQGSTAITISNCHFTDHNDVMLFGASDSYSADEKMQITVAFTRFGKNLVQRMPRVRFGFVHVVNNDYRHWIMSAIGGSSHPTIISHGNRFRAPRNIAAKQVCKREYATEQEWKNWDWRSEGDLMLNGAIFTQSGDPKAAKKFGGYKMIAYKPAHMVPLLVRWSGTLECRPNKPC

SEQ ID NO: 80955 - protein, 133 aa, Gossypium hirsutum
  Clone ID: LIB3145-053-Q1-K1-G7.pep
HHIVVVSEVAVGNGEGGGPMNSIDDTIGALVNGKMVKPIVGCSASAKILLHLLRKQQDMSSLTQPEKPSNRLNFDCKTSRSGPELHKNKNETMSKEPPLNYRSGEIQVYTISEFLESPGRKGKRKKLWIPVES

SEQ ID NO: 80956 - protein, 109 aa, Gossypium hirsutum
  Clone ID: uC-gsflmaxxa052h11b1.pep
WYQGSRSDDRHLPFFGATQRVGVDHISVYKCSDGIIDAIQGSTAITISNCHFTDHNDVMLFGASDSYSADEKMQITVAFTRFGKNLVQRMPRVRFGFVHVVNNDYRHWI

SEQ ID NO: 80957 - protein, 65 aa, Gossypium hirsutum
  Clone ID: uC-gsflmaxxa069c12b1.pep
FVTNSTRRMLKGRIGGPCEATNPIDQCWRCDRNWEKNRKKLVDCALVFFFSLLLFTLYLFIFLFY

SEQ ID NO: 80958 - protein, 58 aa, Gossypium hirsutum
  unsure (1)..(58): unsure at all Xaa locations
  Clone ID: LIB3145-053-Q1-K1-C2.pep
DYEGSGTVLFLCNFGPLLDVLQSKLRRFDGFSGWVRVDYLVVCATDAEVFWWMLKXSY

SEQ ID NO: 80959 - protein, 228 aa, Gossypium hirsutum
  Clone ID: GOSHI-09MAY01-C35659_1.pep
SAAGGRFAAEKFVAKLPDKVIEHRSDCIFSKLTFDGVVLLGERLAQEVLDVVKRRPEVRKISFVAHSLGGLVARYAIGRLYENSTKLGQSGPLAGTLTGEHTNSSMQDLEQHSEDRIAGLEPMNFITFATPHLGSRGHKQLPLLCGLPFLEKRASETAHFVVGRSGKHLFLTDNDEGKPPLLLRMVDDGDDLKFISALHAFKRRVAYANANYDHMVGWRTSSIRRQNE

SEQ ID NO: 80960 - protein, 228 aa, Gossypium hirsutum
  Clone ID: GOSHI-09MAY01-C35669_1.pep
MDDVMSRDLISDLPQSIIESILTRLPIRDAVRTSILSSKWRYKWATLTQLVFDEKCVILSNDRCKVEDGLVNFITRTLFLHQGPIHKFQLTTTHLQCCPDIDQWLLFLSRNDIKELVLELGEGEWFRVPSCLFNCKKLTRLDLFRCEFDPPPSFKGFLCLKSLNLHQVLVSPEAIESLISGCPLLESLALSYFDSLALTIRAPNLKFLCLESEFKDICLENTPLLVAM

SEQ ID NO: 80961 - protein, 124 aa, Gossypium hirsutum
  Clone ID: GOSHI-09MAY01-C35039_1.pep
MASRLPGFGPTGIHASAVSDHDRRRSTSSSSYANWWAPLFRVSSEPDYIGSDKKSEVTERREGGSEADPRLNMARSKFYPGCFTEKKAKQLRLMITNSSSFHDVMYHSAIASRLASDFKGRSDL

SEQ ID NO: 80962 - protein, 152 aa, Gossypium hirsutum
  Clone ID: GOSHI-09MAY01-C35029_1.pep
MSSFAIRSAKLLRLSVSTTRNSSLAGVQRTSKMWYSTGSLDDFETEEAKSEEIDEILGDKPNRREPLLQGVRPGKGWNFRGVHKAIICGKVGQAPVQKILRNGRTVTIFTVGTGGMFDLRVVRDQNTPKPVQWHRIAGHNDILGAYAVQQVT

SEQ ID NO: 80963 - protein, 110 aa, Gossypium hirsutum
  Clone ID: AI055155.1.pep
RELVSSFFFFFFFFFFFFFKYCEKPLKLAGFDGIEIHGAHGYFIDQFLKDGINDRTDEYGGSLANRCKFLMQIVQAVASAIGIDRVAVKMSPAIDHLDATDFNPPFHFKS

SEQ ID NO: 80964 - protein, 93 aa, Gossypium hirsutum
  Clone ID: LIB3145-013-Q1-K1-G2.pep
PTRPPTRPEHYHKAALNAIRAGFDGIEVHGAHGYLIDQFLKDGINDRTDEYGGSLANRCKFLMQIVQAVASAIGIDRVAIRMSPAIDHLDATD

SEQ ID NO: 80965 - protein, 81 aa, Gossypium hirsutum
  Clone ID: GOSHI-09MAY01-C35299_1.pep
WLTQNLKATEDFALFGCVCNGYLDDNFGRLELFQKRRRITVVKNLQQVIDINVILLLTAGVDYTRSHSSCFCFTFNIAQVI

SEQ ID NO: 80966 - protein, 99 aa, Gossypium hirsutum
  unsure (1)..(99): unsure at all Xaa locations
  Clone ID: LIB3145-012-Q1-K1-G8.pep
IFFLFLFFFFXPLDDIYIHNLLKVFNNIVSSSFLKQLSLPKLSSKYPLQTQTKSAKSSVAFKFWVSHHIMIGYNENENEDPKEIREEAKVLVINHLDSF

SEQ ID NO: 80967 - protein, 119 aa, Gossypium hirsutum
  Clone ID: LIB3828-032-Q6-N6-H6.pep
DSKTKRKIEIANHLFLSIFSFFFVNIESSFFTICFVCLYSQIHVNVISLFGLASAVAFSLCLPLFLGYFAGLLGVNGGRFLFWCKERVEADPRAECTPGTHMETAAPRVFSSSFAEFFF

SEQ ID NO: 80968 - protein, 90 aa, Gossypium hirsutum
  Clone ID: LIB3145-029-Q1-K1-B8.pep
AAKQVLNTPPPFFPLLGFWPQPWSAVAPPSDLVANHAQKGRERGRRSLGVNGGRFLFWCKERVEADPRAECTPGTHMETAAPMGFFFLFC

SEQ ID NO: 80969 - protein, 296 aa, Gossypium hirsutum
  unsure (1)..(296): unsure at all Xaa locations
  Clone ID: GOSHI-09MAY01-C36539_1.pep
PLAVPDLQLRPLYSSTTSSPNCFQKIYRRRFASISSSSNQQTSSVGVNPYPTVPPPSSQIGSPLFWIGVGVGLSALFTWVASSLKKYAMQQAFKTMMGQMNTQNNQFANAAFPSGSPFPFPTPPSTGPVTSPSPSSAQKTSITVDVPATKVEAAPVIDPSTKGKSETEKAEPKKYAFVDVSPEETVQKSSFEDVAETSSSNNAQIPKDVSDNGAASKQDTGAFGGYQSTGKAGPGLSVDXLREMLEDPTVQKMVYPYLPEEMRTPRHLXWMLQNPQYRQQLQDMLNNMGEVELGHR

SEQ ID NO: 80970 - protein, 94 aa, Gossypium hirsutum
  Clone ID: GOSHI-09MAY01-C36459_1.pep
FSNHQVLKNRPINLILGAPKKKFFFATPGKKNLGFLKGPPFFFLYFSNFFLIKFSFFIFFFFFFFFFFFFFFFFFIFFFFFFFFFFFSVPILYS

SEQ ID NO: 80971 - protein, 81 aa, Gossypium hirsutum
  unsure (1)..(81): unsure at all Xaa locations
  Clone ID: LIB3148-007-Q1-K1-G5.pep
NXXKQRRACSLRPISRDPQVRHXTARXLGALRLRRXGAXHLQVEPARRCHRVRGXXGPQAEVGNHGRAWADGVASXRFRPG

SEQ ID NO: 80972 - protein, 435 aa, Gossypium hirsutum
  unsure (1)..(435): unsure at all Xaa locations
  Clone ID: GOSHI-09MAY01-C36799_1.pep
QTHLESIKRAAKLEAECRRLKAIGSKSSFTNDCKSPAASSIYVESFMGSQSDSGERLHVVDTDTQKMSGLEANKGEPSCSDSWASALIAELDQFKNEKVINRNVPSSSIEIDLMDDFLEMEQLAALPDTKNENQCLESKATVKQSNDGDSSLKAELEAMIHRTTELEEKLEKIEAEKAELEIALAKSQESLEASELELRDSELKLEELQRELSKAKALSVQISADANESKQLLESQLVSIEAEARMMSAKVGSLETEVEKEKALSAEITVKCQELEEELSRAXQEAELQQAAXSNVEVKIKQEDLAVAAGKLAECQKTIASLGQQLKSLATLEDFLINTTSMPEFSRGVSLITKSSEPWKLHSNETYSPKADPESKRVGADHSSPQGNKNDGNGNTPPSSSSSSIVSSTHASSEKNRNGFAKFFTRSKNGIQLEI

SEQ ID NO: 80973 - protein, 105 aa, Gossypium hirsutum
  Clone ID: LIB3829-013-Q6-N6-C11.pep
TLEDFLIDTTSIPEFSRGVSLIPKSSEPWKLHSNETYSPKADPESTRVGADHSSPQVNKNDENGNTPPSSSSSSIVSSTHASLEKNRNGFAKFFTRSKNGIQLEI

SEQ ID NO: 80974 - protein, 59 aa, Gossypium hirsutum
  Clone ID: GOSHI-09MAY01-C36789_2.pep
PSRSSGFFFSSFGMLRSIVLACKLNSSLLLGDYLLGFYHICMRVIWKFCNAKPNFDLLR

SEQ ID NO: 80975 - protein, 93 aa, Gossypium hirsutum
  Clone ID: GOSHI-09MAY01-C36789_1.pep
NQFTINGHSYFNLVLITNVGGAGDVHAVAIKGSRTGWQPMSRNWGQNWQSNTYLNGQSLSFKVTTSDGRTVVSSNVAPAGWSFGQTFTGRQFR

SEQ ID NO: 80976 - protein, 159 aa, Gossypium hirsutum
  unsure (1)..(159): unsure at all Xaa locations
  Clone ID: GOSHI-09MAY01-C36699_1.pep
MEIIENQAAVSNFDLQSKSPFYNISSTDITNVGLLGESEFVSVDSPNQASESDFPTVVNGGGLKMLLEPLSDGRDSPGSNQTRGGGSSHSNAAVKVQKVYRSYRTRRRLADSAVVAEELXWWLALNYARLNHSTISLFNYLKPETAASRWNRVRLNASK

SEQ ID NO: 80977 - protein, 180 aa, Gossypium hirsutum
  Clone ID: GOSHI-09MAY01-C36619_2.pep
TDDKVKPPSKEALEALVVESPNSETKASNASFESTSHPKTDDNVKPPSKSTQKTSSNAAETSSPDQKVLDNKRVSDKQQKVARPSVSTTESGIDKAGGLREPFQSKPEGEKLPVSALEENIVLGVALEGSKRTLPIDDEMTPRTSEAKELASTSRNGTGSSAEDKKGGQIWPTSGNPDDQ

SEQ ID NO: 80978 - protein, 245 aa, Gossypium hirsutum
  unsure (1)..(245): unsure at all Xaa locations
  Clone ID: GOSHI-09MAY01-C36619_1.pep
HASGQKTHWRIKTHLAISHLDVHKINNIVADMRKVLAKNPQVEQQRLHRRVFLENVSPENQALLILVSCFVKTSHLEEYLCVKEAILLDLLRVISHHRARLATPIRTVQKVVGDSELENVPFADSIYNHGGVSSNRPLLLIEPAYKINGEDRTKGRSAXPTGDQDSKTTVRPAADNKAGATPKPDSKSKADAKVVESPNSETKASNASFEPTSHPKTDDKVKPPSKSTQKTSSNAAETSSPDQKV

SEQ ID NO: 80979 - protein, 215 aa, Gossypium hirsutum
  Clone ID: GOSHI-09MAY01-C36099_1.pep
MNLLSWTRSTATQQGDEMIVTKEETTTDQVEEPKMANEETNVDHVEEPKIKDEIEEEDPEEDPEEYEEMEDASQPNSSIEKNEEEKAQTDAKPEKGSEKEAEKIEAMASTKSEITTKAASTDAGPEGDMSRKEQKGDPKKKVPAIDKDLLQAFRFFDRNRVGYVRVEDMRLMIHSLGKFLSHRDVKELVQSALLESNTGRDDHILYDKLVRMSDI

SEQ ID NO: 80980 - protein, 64 aa, Gossypium hirsutum
  Clone ID: uC-gsronu33B015a06b1.pep
AFRFFDRNRVGYVRVEDMRLMIHSLGKFLSHRDVKELQQSALLESNTGRDDHILYDKLVRMSDI

SEQ ID NO: 80981 - protein, 172 aa, Gossypium hirsutum
  Clone ID: GOSHI-09MAY01-C36059_1.pep
NAQKSTEQKQPQKPDFSLVKEQPKYDEWNASDGWNMPENPDSTVPPVPVSRYQGMTGRGKRHPFKGQKGGGNNYNSDHKKTNNGEADKLNSRSSAPEMAQLDSPAASKENRGGGDRSASHWQPKSSPINQRRSRPDMIKMLVLKLVGLTKRILLLRLRCRIHLNQKNKPLKV

SEQ ID NO: 80982 - protein, 168 aa, Gossypium hirsutum
  unsure (1)..(168): unsure at all Xaa locations
  Clone ID: GOSHI-09MAY01-C36009_1.pep
MYIKQSWKPLSFVAPSLKKNMVCEALSLTIPFFTSPPSRAAKLATNRWNLCRSTPRIRCSSSSAEGPVTADKLENDYALTGSAYDFERGTISITRESLSSPKKVILVRHGLSTWNEEGRVQGSSYLFVLTEAGVKQAERCRHALANMHFDQRFLSPIXRAKTTAEVLW

SEQ ID NO: 80983 - protein, 76 aa, Gossypium hirsutum
  Clone ID: GOSHI-09MAY01-C36319_1.pep
ICFPLLSTYKAKNRLYLGDDTHLYQKKRRKNQEITNQKRLFSSLSNFFSSSHYLAILERNIGDDTNEVPNISKILR

SEQ ID NO: 80984 - protein, 168 aa, Gossypium hirsutum
  unsure (1)..(168): unsure at all Xaa locations
  Clone ID: LIB3582-061-P1-K1-F5.pep
RVGYFKPKIVCXKPIPVTANPPFYLVADNARAATRSHRRTRQARKPGTGVLASYKGCAGAWREEYGGVLALGRLLLRRRRRKGTLGFLKFLGHLGSFRVLGQSLGHGVLVIGSRLCSWVCNLGLGLYIWFYLFVFNFDFLVVGSGQNLGLTIFIYSIKQTVHHNINKV

SEQ ID NO: 80985 - protein, 173 aa, Gossypium hirsutum
  unsure (1)..(173): unsure at all Xaa locations
  Clone ID: GOSHI-09MAY01-C36309_1.pep
MAFAGTTQKCMACDKTVYLVDKLTADNRVYHKACFRCHHCKGTLKLGNYNSFEGVLYCRPHFDQLFKRTGSLEKSFEGTPKIAKPEKPVDGEKPIATKVSGMFGGTRDKCFGXCKTPVYPTEKVTVNGTPYHKSCFKCTHGGCVISPSNYIAHXSRLYLQHQHGQLIKEKGNL

SEQ ID NO: 80986 - protein, 103 aa, Gossypium hirsutum
  Clone ID: GOSHI-09MAY01-C36239_1.pep
MAYSGVLKTLIRSSHLGSTTRNFSLVSSQISNHTAKWMQDSSKKSPMELINEVPPIKVEGRIVACEGDNNPALGHPIEFICLDLKEPAVCKYCGLRYVQEHHH

SEQ ID NO: 80987 - protein, 102 aa, Gossypium hirsutum
  Clone ID: uC-gsflnu33B049d06b1.pep
MAYSGVLKTLIRSSHLGSTTRNFSLVSSQISNHTAKWMQDSSKKSPMELINEVPPIKVEGRIVACEGVSIVRSRRHESPFTFSCEDDAYFVHLTCARECMHA

SEQ ID NO: 80988 - protein, 78 aa, Gossypium hirsutum
  Clone ID: GOSHI-09MAY01-C37919_1.pep
MDRSSHSVSVAFFLLLILLTTEMGPMSAEAKTCETKSGKFKGMCMSSTNCASVCKSEPGFDGGHCQGFRRQCVCTKPC

SEQ ID NO: 80989 - protein, 70 aa, Gossypium hirsutum
  Clone ID: LIB3148-008-Q1-K1-E6.pep
LTFNETRKIWIGLGTQTDPFGWTGAYGAVFVVSAFALSLVKPLSFVRSIICYISLSRKFPLFFCLSCILC

SEQ ID NO: 80990 - protein, 129 aa, Gossypium hirsutum
  Clone ID: GOSHI-09MAY01-C37889_1.pep
ELKLPSKLRIFMWRIANGFLPTMYNLKIRHLAANTLCPVCRAEEETVEHLFMDCSFTRQVLRGLGVSISTCRREPIWKKWLETEFVSQNTEARKIRSIAYWAIWYNHNKIYHEGVREQVNKVVGFVRAG

SEQ ID NO: 80991 - protein, 211 aa, Gossypium hirsutum
  Clone ID: GOSHI-09MAY01-C37599_1.pep
RISSIIPNFHEKRKELMELAASFKSSQGRPVTRPLSVARRVRNSLRQANKPQFVSAFCQTNCGDVSPNTLGAFCIDTGLPCDFNHSTCNGKNELCYGRGPGYPDEFKSTEIIGKKQFKKAVELFDKATEELKGKVGYQHAYIDFSNLQVSVPKAGGSNEVVKTCPAAMGFGFAAGTTDGPGAFDFRQGDDQGNAFWKLVKNLLNPPGSDQS

SEQ ID NO: 80992 - protein, 170 aa, Gossypium hirsutum
  Clone ID: GOSHI-09MAY01-C37589_1.pep
MQTLQEKASQWSGVDAADAFAIDDTNLFQKLGLQTFINLSTNFYTRVYDVREEEWFRSIFSNSKKEEAIQNQYEFFVQRMGGPPLYSQRKGHPALIARHRPFPVTHQAAERWLYHMEKALESTPDIDADSRVKMMNFLRHTAFFLVAGDELKTQKQQIPCNHGASKSAES

SEQ ID NO: 80993 - protein, 207 aa, Gossypium hirsutum
  Clone ID: GOSHI-09MAY01-C37539_1.pep
PIRSAVSLGSMHKERRLHQMMYADRDYDMSDANSGSTSDRSKPLVTVENCEHKGYTVVNLRCPDRPKLLFDTVCTLTDMQYVVYHATVIAEGPEAYQEYYIRHMDGCPISSKAEQQRVIHCLEAAIKRRASEGIRLELCSDDRVGLLSDVTRIFRENGLSVTRAEVKTRGSQAVNIFYVTDASGNPVKSETIDAVRKEDGLTILHVK

SEQ ID NO: 80994 - protein, 296 aa, Gossypium hirsutum
  unsure (1)..(296): unsure at all Xaa locations
  Clone ID: GOSHI-09MAY01-C37499_1.pep
MVVCKCRKATKLYCFVHKVPVCGECICFPEHQICVIRTYSEWVIDGEYNWPPKCCKCQAVLEEGAGSETTRLGCLHVIHTNCLISHIKGFPPHTAPAGYTCPSCSTSIWPPKNVKDSASRLHSLLKEAIMQTGMEKNLFGNHPPPAFASDPLVNVNSTGKWVRDGNSLPSVAIDEGYSTVAGPSKLPVTEITEIDGPSSAENYIKASSPVAPVATTRKSTVHADRQNSEISYYADDEDGNRKKYSRXRGPLRHKFLRALIPFWSSALPTLXPVTAPPRKDASNADDVPEGRLKHQR

SEQ ID NO: 80995 - protein, 161 aa, Gossypium hirsutum
  Clone ID: GOSHI-09MAY01-C37739_1.pep
NNRTWNKELIFSTFPEDVAEKIICIPLAEIPHDDFQVWNAEATGEFIVRSAYKLLQSIEDDPRAYALQYGYEEFYKKLWILNLPSKIKITIWKISWNFLATRVNLLQNKLTNTSVCPRCGAGSENMDHLFRECPGYLRRIQYHSVGHFAVPYGQSVREDQF

SEQ ID NO: 80996 - protein, 421 aa, Gossypium hirsutum
  Clone ID: GOSHI-09MAY01-C37729_1.pep
RMKSLKKEADQLKVNLLKAEAVTKAAKKEYHEETEKLNKLQSQFKAADDIRQEAYVLLQSLKKQSYEKNKSFYQYRDDAKAANDLALKGDKEALQNLCVNQVEKFMELWNNNDEFCKEYIRCNTRSTLRRLRTLNGRALGPDEEPPVIPAIPKVVNEQVAKDQTVSSSTLEERTQEKTAPAKAEIAKAKPAAKSMEQKNLTSKSEKPVKSVPPASGSTTASSRDKIEEAEEKPKITKEEEDMARKADESRKEEEAAKLREQRRLEEIAKAKEALERKRRNAEKAQARAALRAQKEAEQKEKEREKRAKKKERRKVAAAGVGDASVTDETESALTLETPAETPKDSESTEKLVTVAKRSQKPPQFTKQSKAKSIPPPLRNRGKRKMQQWMWVLVTSLIVLALFLAGNYNFSFNFGLLQKFNF

SEQ ID NO: 80997 - protein, 122 aa, Gossypium hirsutum
  Clone ID: LIB3584-009-P1-K1-A7.pep
LLEKLVFHSFLLSHLKLVKLHIHQVVLPGAVHGILEFPCKESVGLTHLLKHLLPPVMKKKKKMMLGSSNVIPARLKWIELKSEDKSVVDVQQGNFSAGKMQLNATFTWSCIYISQEMVLDDR

SEQ ID NO: 80998 - protein, 80 aa, Gossypium hirsutum
  Clone ID: LIB3145-045-Q1-K1-D5.pep
EKTIMKLVVDAETDKVLGASMCGPDAPEIMQGIAVALKCGATKAQFDSTVGIHPSAAEEFVTMRSVSRRVTARGKAKTNL

SEQ ID NO: 80999 - protein, 128 aa, Gossypium hirsutum
  Clone ID: GOSHI-09MAY01-C37689_1.pep
GERSFEQFSPEVRIKDPRNREAASFLPPIRLFHGTSDYSIPSDASINLVEALKGVGAEAEVILYEGKSHTDLFLQDPLRGGKDDLFDHVVSVIHAGDEEALAKDASAPPRKRLVLEILLRLARHISPF

SEQ ID NO: 81000 - protein, 50 aa, Gossypium hirsutum
  Clone ID: LIB3145-045-Q1-K1-C12.pep
EESFEQFSPEVRIKDPRNREAASFLPPIKLFHGTSDYSIPSDARLECLLT

SEQ ID NO: 81001 - protein, 94 aa, Gossypium hirsutum
  Clone ID: GOSHI-09MAY01-C37669_1.pep
NLKLPSLHKPEASGTCQNNARGSGSHEQFRSLRASSTSVLFRTIEPCKSAMDFYPLRWKSKLEGPKGIIDRRWSAIDHLMKWCTRWLLKYAQTN

SEQ ID NO: 81002 - protein, 79 aa, Gossypium hirsutum
  Clone ID: GOSHI-09MAY01-C37179_1.pep
PVQDPINLLPHYILTHQKTGPKWPKLLNRGQRSLGFQKPEAPQSTCLLNACRSSYSSQPRFRAPSHAVITATDRSTLPA

SEQ ID NO: 81003 - protein, 218 aa, Gossypium hirsutum
  unsure (1)..(218): unsure at all Xaa locations
  Clone ID: GOSHI-09MAY01-C37169_1.pep
MIPFLHYMEKEERSLRTCGTRQPELFLQWGNRKRLRCVRVKDPQKISHKSNAIIRRRITSRLLHKESSPFSQFNPRLTRNSQASILRSHHRKAASPEKEDTYYATKTVCXGLVDENGKIAVDSNNGEDNTRVAWPKLFIALSGPQKEEDFMAMKXGCNPPSQALQRDPHIIPRGLLLVSPGAWLTDMCQERYEVREKKSSKKRPRGLKAMGNMKSDSD

SEQ ID NO: 81004 - protein, 76 aa, Gossypium hirsutum
  Clone ID: GOSHI-09MAY01-C37029_1.pep
SPSSFMVICEASIDEYFLNATTSFILTVHQHVWSLQLGHMMTNMFGLLQLVVMIGCILNQLCETRCCTSEQKDHWV

SEQ ID NO: 81005 - protein, 67 aa, Gossypium hirsutum
  Clone ID: LIB3145-037-Q1-K1-A9.pep
SFGSNVQHLVSQSWFKIQLIMSTNCKRPNMLVIMSPNCKDQTCWCPTSIKRFVALRKYSSIELHKSP

SEQ ID NO: 81006 - protein, 157 aa, Gossypium hirsutum
  Clone ID: GOSHI-09MAY01-C37389_1.pep
VNILTHTADVALSEEQLTAIEKLKMKHKAQDAKENQNRDSVNNIVELRARNSGHSKNTGGALWDIFRREDVPKLEAYLRKHSKEFRHIYCSPVEKVIHPIHDQSFYLTMEHKRKLKEEFGVEPWTFEQNLGEAVFIPAGCPHQVRNLKSCTKVAWDF

SEQ ID NO: 81007 - protein, 269 aa, Gossypium hirsutum
  Clone ID: GOSHI-09MAY01-C37359_1.pep
PTRPPDSHGREISINNMVLITTSAITKGNMHILPEKEHMKFPEERVLGAKNWQMQILVAPVTDDASRSNDTGIRVTTIKEAFSPTSANKRKLINTSESSELEKTDTQEREPKVSRSCLDLNFPVEETLVAPIDLGPSKSESLSENSEVWLEEFFSEVYKKIHFKSFDFDGLANKIVKEISSQFQRTVGSEVLLEINEEVMVQILAAVWFSDKKGALEDWVANVLGRSFAEAEQKFNLNPQSVVKLVAREGSVVKEQAPGICLPAKIGLS

SEQ ID NO: 81008 - protein, 173 aa, Gossypium hirsutum
  Clone ID: GOSHI-09MAY01-C37319_1.pep
MAVRGRAVETLPKLMRSPRKDSASSTVTRTPALPSLRRAFSLYDQINLIDNVPDDQLRFQRYTETGFTVNGVNYEGSLLCVGNLVTSWGPRKFSEITPQSLSIFQIIRPIPEILILGCGRYIEPVDPELRRFIRSTGMKLEALDSRNAASTYNILNEEGRIVAAALLPYGVSS

SEQ ID NO: 81009 - protein, 179 aa, Gossypium hirsutum
  Clone ID: GOSHI-09MAY01-C37339_1.pep
MRRYDDRYCHTRLYVGHISSRTRTRDLERLFSRYGRILDVDMKRDYAFVDFSDPRDADDARYSLDGRDFDGSRIVVEFARGVPRGSQEYLGRGPPPGSGRCFNCGVDGHWARDCTAEDWKNKCYRCGERGHIERNCRNSPRKLSSRSPIRSRSPRRGRSRGRSYSRGLSYSRSRSFGRR

SEQ ID NO: 81010 - protein, 98 aa, Gossypium hirsutum
  Clone ID: GOSHI-09MAY01-C37329_1.pep
KNKSKKWPNPKTSPNGPKFQNQKLKSELNSAAAPTNVPSRRKQPPVAFATASSQPISKQAHRAQTVKLLEAFALSPTSSFSMHSCTCNELTTTAATSR

SEQ ID NO: 81011 - protein, 258 aa, Gossypium hirsutum
  Clone ID: GOSHI-09MAY01-C37249_1.pep
VLACANPSGSRYNPRLSVIDNIHLPPTLLSRFDLIYLILDKADEQTDRRLAKHIVSLHFEDTEIAEHDVIDLATLTAYVSYARKNIHPKLSDEAAEELTRGYVEMRKRGNFPGSSKKVITATPRQIESLIRLSEALARIRFSETVEMRDVTEAFRLLEVAMQQSATDHSTGTIDMDLITTGVSASERMRRESVLSATRNIIMDKLQLGGPSMRLLELLDEMKKQNSGSEIHLHDLRTAVATLASEGFVVLHGDSVKRM

SEQ ID NO: 81012 - protein, 114 aa, Gossypium hirsutum
  unsure (1)..(114): unsure at all Xaa locations
  Clone ID: LIB3543-029-Q1-K6-B3.pep
AYVGFFYCXEDGSSLCLQCDMAVHVGGKRTHGRYLLLRQRVEFPGEKPGNVEDPTSQQVGPNDTIRGQNQITKTTAGEKQQNHKDSPVEEKDAKVDGHHNMGSEMIDLNMKPHW

SEQ ID NO: 81013 - protein, 86 aa, Gossypium hirsutum
  Clone ID: LIB3145-040-Q1-K1-A8.pep
RTHGRYLLLRQRVEFPGEKPGNVEDPTSQQVGPNDTIRGQNQITKTTAGEKQQNHKDSPVEEKDAKVDGHHNMGSEMIDLNMKPHW

SEQ ID NO: 81014 - protein, 109 aa, Gossypium hirsutum
  Clone ID: LIB3825-025-Q6-N6-F3.pep
LPDMIRNMSQCLLAFSSENIKPDILIPNQAAEEKLRSFGSCITQQAEKPHVLIVNLKFKPVPGDNLQINNTSFQPNVQPPFLNSKQSHNKRASGVKKSDLSVWSRRSSG

SEQ ID NO: 81015 - protein, 43 aa, Gossypium hirsutum
  Clone ID: LIB3145-039-Q1-K1-F12.pep
PEDLRIHPLRSDFLTPPAISLSACFEFKNGGCIFGPRYVKTLR

SEQ ID NO: 81016 - protein, 105 aa, Gossypium hirsutum
  Clone ID: GOSHI-09MAY01-C30889_2.pep
MHTHTHTLKKKKTFKALFETQASLYNLIISSNMPRPFFHKLILSSTLQDKKLRIPDNFVKKFKDELSVAAALTVPDGHVWRVGIRKVNTIMGNRIRSMNSKTKNA

SEQ ID NO: 81017 - protein, 258 aa, Gossypium hirsutum
  unsure (1)..(258): unsure at all Xaa locations
  Clone ID: GOSHI-09MAY01-C30889_1.pep
MPRPFFHKLILSSTLQDKKLRIPDNFVKKFKDELSVAAALTVPGGHVWRVGIRKGDNKVWFQEGWPEFLDRYYIRIGYFLIFRCGGGAAFCVSIFNLYNSEINYQSNALLGSQYNHGKSYPFDELEDDECMSSAMQHLFGGSKLNHCVNWSGEVNLNAAKSANNQPIRVKLRTSGSETPPPKKPGRKKQKFDPNDQDLSVGHENDSEMRYRFYKSASARKRTVTAKKNKWAXECTQAFEPNNPFCQVXLRTSFLYRGI

SEQ ID NO: 81018 - protein, 230 aa, Gossypium hirsutum
  unsure (1)..(230): unsure at all Xaa locations
  Clone ID: GOSHI-09MAY01-C130831_1.pep
MFPFLLIIILSLSWRISASAQPAEEFLRCLSIRFHNSSSFAKLVYTQHNSSYSSVLKSSAQNLRFTTPSTPTPLAIVTPLLASHIQAAVYCCRKHGLQVRTRSGGHDXEGLSYTTAFKVSFVGVIDWVNLRSVQVNVEKATXYGLESGATIGELYYEIARKSRTLAFPAGIGHTVGVXGGHLSGGGYAVWFRKYGLGADNVIDARLIDVEGRILIKSRGRRFVWPFRRCG

SEQ ID NO: 81019 - protein, 193 aa, Gossypium hirsutum
  Clone ID: GOSHI-09MAY01-C30539_1.pep
MVASAISASFNLSLCTQSRPTSISSLSPRNSTKLIVSALPSPYGDSSTMGLSSRTAGLPMKINKKGLLESNPSYDAIQAKTGNPPVMPAVMTPGGPLDLSTVLFRNRIIFIGQPVNSQVAQRVISQLVTLATVDENADILVYLNCPGGSTYSVLAIYDCMSWIKPKVGTVCFGVAASQGALLLAGGEKGMRYA

SEQ ID NO: 81020 - protein, 99 aa, Gossypium hirsutum
  Clone ID: GOSHI-09MAY01-C30459_1.pep
PTRPAGAGSATLSMAYAAVKFADACLRGLRGDAGVVECAFVASEVTELPFFATKVRLGRTGAEEVYQLGPLNEYERVGLEKAKEELAGSIHKGIAFIKK

SEQ ID NO: 81021 - protein, 175 aa, Gossypium hirsutum
  Clone ID: GOSHI-09MAY01-C30479_1.pep
VKNGGFEKGPYVFPNTPWGVLIPPNIEDDHSPLPAWIVESLKAVKYIDSAHYFVPQGRKAVELVAGKESAIAQIVRTIVGKMYRLSFAVGDANNSCVRSLVVEAFAGKDTLKVPYESKGKGGFKRAELKFKAVSNRTRIMFLSTFYTMRSDDFSSLCGPVLDDVKLLSIQTSPNP

SEQ ID NO: 81022 - protein, 185 aa, Gossypium hirsutum
  unsure (1)..(185): unsure at all Xaa locations
  Clone ID: GOSHI-09MAY01-C30469_1.pep
HAFAHAFDALYEQCDFQAICGSGIKGKAGLSADNLAEDLGPLFESIIRCIPGPHIDKDGALQMLATNIEYDEHKGRIAIGRLHAGVLRKGMEVKVCTSEDSGRYARISELYVYEKFSKTAVERVEAGDICAVCGIEDIQIGETIADKAFGKAIXPAIKVEEPTGKMAFSINTSPFVGREGKYVTS

SEQ ID NO: 81023 - protein, 237 aa, Gossypium hirsutum
  unsure (1)..(237): unsure at all Xaa locations
  Clone ID: GOSHI-09MAY01-C30799_2.pep
MVKLCLMASHGYAPSPGLVFHQEKGASRMIKECQTLLPSKAMKHDMVQTAPFDLKCNGIKELPKPVTLLCEPKLIVDVDPKAQKPMVIDKPVAHXHTALFGSGIAEKCTRHDKXLKFLVSGSKDVDKGELDLSLLSDLIEPLMFGVHQQPYASLIYPSSEFDDQKPLPDIVGEMVQDSKLIVNSDGLVVLTSSGTEMKDILSIVAEFHLSSNSTKWRRQSGLVPFFNSHLTSKLGLL

SEQ ID NO: 81024 - protein, 416 aa, Gossypium hirsutum
  unsure (1)..(416): unsure at all Xaa locations
  Clone ID: GOSHI-09MAY01-C30799_1.pep
MLKLCLMASHGYTPSPGLVFHREKGVSRMIKECQTLLPSKAIKNDMVQTGPFDLKCNGIKEQPKPVTLLCEPKLIVDVDPKAQKPMAIDKPDTALFGSGIAXKCTRHEKLLKFLVSGSKDVDKGELDLSLLSDLIEPLMFGVHQRPYASLIYPSGEFDDQKPLPDIVGEMVQDSKLIVNSDGLVVFTSSGTEMKDILSIVAEFHXSNNSTKSRRQSGLVPYFNRTRSKKVHASTSLAPKYEVASVAPPKSPEKIKPKPSPKRKMSKKSTRERNLYKANYFHACESLLSLMVNKHRHGKMAILSLKKSGPELPQLLTQFSAGIAGTGLAVVLSVFCKVAYARAPLCTSNLFSTSLGFGLVWLSWAVNRLRDTIENISKNTGKLDMKEKEMIXRVEKSVDDIYIRAATLMAAAMLRFV

SEQ ID NO: 81025 - protein, 126 aa, Gossypium hirsutum
  Clone ID: GOSHI-09MAY01-C30719_1.pep
WFKPLIVLEEREEVYDNLEGYYDYYPYEDEDDEEDEVYYTNSPSLRIGNRRWGDSGYVRSGRQEARPVQRSRVQDSTGAGSSREPKNKETTKSTMGRRAKRTLNREAANKAAEEKHQEHLMSSRLK

SEQ ID NO: 81026 - protein, 212 aa, Gossypium hirsutum
  unsure (1)..(212): unsure at all Xaa locations
  Clone ID: GOSHI-09MAY01-C30669_1.pep
MVPLNTVRPSISCCSFSSGFDAGPPVPVPKVGFFKLPRSNGGNHAKLSLVQATEESTVATTNGRVAAVSGENAHQMATNGKAGNIVWHKSSVDKVHRQELLQQKGCIIWITGLSGSGKSTLACALCHALYSKGKLTYILDGDNVRHGLNRDLTFKAEDRAXNIRRIGEVAKLFVDAGIICIVSVISPYRKDRHACRALLPDGDFIEVFMDVP

SEQ ID NO: 81027 - protein, 164 aa, Gossypium hirsutum
  Clone ID: GOSHI-09MAY01-C30629_2.pep
IGLGRIGMAIAKRAEAFSCPISYYSRTEKPEIKYKYYPSVVELAANCDILVVACALTTETHHIINREVIDALGPKGVLINIGRGPHVDEPELVSALVEHRLGGAGLDVFEHEPEVPEELFGLDNVVLLPHVGSGTVETRQAMADLVIGNLEAHFLKKPLLTPVV

SEQ ID NO: 81028 - protein, 256 aa, Gossypium hirsutum
  Clone ID: GOSHI-09MAY01-C30629_1.pep
MESIGVLMACPMNSYLEQQLENRFKLFRFWTVPDKSSFLASHKDSIQAVVGNAFAGADAKLIEALPKLEIVASFSVGLDKIDLAKCKEKGIRVTNTPDVLTEDVADLAIGLMLAVLRKLCESDRFVRSGKWKRGQYVLTTKFTGKRVGIIGLGRIGMAIATRAEAFSCPISYYSRTEKPEIKYKYYPSVVELAANCDILVVACALTTETHHIINREVIDALPPKGVLINIPSGPHGKLTRLQKIQLRSLLKGDAAS

SEQ ID NO: 81029 - protein, 138 aa, Gossypium hirsutum
  Clone ID: GOSHI-09MAY01-C30139_1.pep
MATTHLTTQILRQAPPVCGSVRRVTTTGLSSSSPLTITFKTRKEPSPKNQKFKWARKLSLVEESSPPKPTVDVEGLATFLYDDLPHLVDDQGIDRTAYDEQVKFMDPITKHDTISGYLLNISLLKRLFRPLFQLHWVK

SEQ ID NO: 81030 - protein, 175 aa, Gossypium hirsutum
  Clone ID: GOSHI-09MAY01-C30299_1.pep
KQAKERICRLVQSGLASGAKLLLDGRNVVVPGYEQGNFIGPTILTGVTADMECYKEEIFGPVLVCMKADSLEDALNIVNRNKYGNGASIFTTSGAVARKFQTEVEAGQVGINVPIPVPLPFFSFTGNKASFAGDLNFYGKAGVNFFTQIKTVTQQWKDLPSGSGVSLAMPTSQKL

SEQ ID NO: 81031 - protein, 133 aa, Gossypium hirsutum
  unsure (1)..(133): unsure at all Xaa locations
  Clone ID: LIB3120-004-Q1-K1-A6.pep
AANTDGDVTSDAAKDATLNALVAACYGAGAQTCMALHTLGIHGDSQSSVNDLVQGRLKTYSECWTXPNADLGTVINIQARERICLFIXSGVESAAELLLEGRNIVXHDMSNXNFIGPTILTGGTADMECYNEE

SEQ ID NO: 81032 - protein, 88 aa, Gossypium hirsutum
  Clone ID: GOSHI-09MAY01-C30259_1.pep
PGPLFPRHHQRRRDSRLPQHSPGELELRADVHKPGAIHLKIQDPKSCGRGMLTIFATIARQPVFFSFKICFFLPADLLFTHILSWVAK

SEQ ID NO: 81033 - protein, 182 aa, Gossypium hirsutum
  Clone ID: GOSHI-09MAY01-C30269_1.pep
KSVPKATPQQRRFSPFTAQRRPPFELRFQQSRTRVNGAKNKGHFLLSYLLYVYAYVCVNSITEERRKSNRKKRIKRTPIDKGKKENLLLCIDFVFLIQYACPLETIQKWGFYSPENTYISLLFFLFFSFLLLFCYFSFSLSVCCWFVVQVRVWRCASAHIRRLCVKRQAIVGGAYMCAGVDG

SEQ ID NO: 81034 - protein, 181 aa, Gossypium hirsutum
  Clone ID: GOSHI-09MAY01-C30229_1.pep
RIVGTVVRSVQDDQKEQDIKILDAEVQALEELSKQLFLEIYELRILQEAAAYSRTWKGHMQNLLGYAGSVYCVYKMIKSLQSVVFKEAGSVDPVTMSITILLQFFDIGIDAALLSQYISLLFIGILITISVRGFLTNLMKFFFAVSRVGSGSSSNVVLFLSEIMGMYFLSSILLIRKKLRT

SEQ ID NO: 81035 - protein, 107 aa, Gossypium hirsutum
  Clone ID: GOSHI-09MAY01-C31939_1.pep
GMPLEGPNRAPVATPKESPHHSAVPPNVHPSALAPKPKHRPITYLAPTSSPLPNVAFAHAKPPSKSEPNKEDPDRIPSVSPSASAPFCLPTMRWLLSFLLAIITLHL

SEQ ID NO: 81036 - protein, 184 aa, Gossypium hirsutum
  Clone ID: GOSHI-09MAY01-C31509_1.pep
MEVLATSSASSTYPLFTLDNPNKPFSFTFNPIIISQVHPWKSFPVKKIEARLLCRILCKRTNLDNSGSWRSSTNAICKHKFVFHALCGPNKNFTSQSGLFAIRHGHLLRSWNTSSHQKVNSHSQKIREHFSRGFVRLVAAMLLVTSASVALSNTPSWALSEENLLFLEAWRTIDRAYIDKTFNG

SEQ ID NO: 81037 - protein, 237 aa, Gossypium hirsutum
  Clone ID: GOSHI-09MAY01-C31499_1.pep
MASSSPRTVEEIFKDYSARRSALVRALTYDVDDFYSQCDPDKENLCLYGHPNEAWEVALPAEEVPPELPEPALGINFARDGMNRKDWLSLVAVHSDCWLLSVSFYFGARLNRNERKRLFSMINDLPTVFEVVTGRKPVKDKPTVESGSKSRNSTKRSIDGQPRNNPKLADDNYEEDEEEQGDTFCGICGGGYNSDEFWIGCDNCERWYHGKCVKITPAKAEMIKFYNCPLCQKKVRQ

SEQ ID NO: 81038 - protein, 167 aa, Gossypium hirsutum
  Clone ID: AI727585.1.pep
SSSPRTVEEIFKDYSARRSGLVRALTYDVDDFYSQCDPDKENLCLYGHPNEAWEVALPAEEVPPELPEPALGINFARDGMNRKDWLSLVAVHIDCWLLSVSLYFGARLIRYDRKRLSSMTNDLLTVFEVVTGTKSIQDQSSLESGIHSRYCTISIFYGLFIISSSVL

SEQ ID NO: 81039 - protein, 45 aa, Gossypium hirsutum
  Clone ID: LIB3165-046-Q1-K1-G8.pep
ACVQLSFKNSDLFFSKFIFLVFEWKVGFFIINRFIFWLGIKENYF

SEQ ID NO: 81040 - protein, 160 aa, Gossypium hirsutum
  unsure (1)..(160): unsure at all Xaa locations
  Clone ID: GOSHI-09MAY01-C31779_1.pep
MISDKRAANAMGGKTARACDGCLRKRARWYCSADDAFLCQGCDTSVHSANQLASRHTRVRLETASSRFNASVINNSATDQDALPAWHQGFTRKARTPRQNRSIQGQQKSEGKSMGFEXLVPEVGCEDGSAEETEDQLLCRVPVFDPFSAELRDMANENGI

SEQ ID NO: 81041 - protein, 265 aa, Gossypium hirsutum
  Clone ID: GOSHI-09MAY01-C31709_1.pep
MAHCVLAPTPIQFQFQFHSRRTGFLRCFSESALKTSLPYPIHPRFPPRIFCNYDDSNRVGQTQSSSLQLYRDIERLLTDTVRQSQGAWGSSSDWSQVEGAWILKPKGSKPGSVGHFIGGIFGGAAPQLTYRLFLERLSEKGVLVIATPYASGFDYFFIADEVQFKFDRCLRFLQETVRDLPTFGIGHSLGSVIHLLIGSRYGLQRSGNVLMAFNNKEASVAIPLFSPVLVPMAQSVGPFLSQIASTPTIRMGVKTKTLSFFLLYM

SEQ ID NO: 81042 - protein, 316 aa, Gossypium hirsutum
  Clone ID: GOSHI-09MAY01-C31659_1.pep
PTRPVYQFRMAQSEIDRYLKIVPLITLVDNARVRERLEVIEKDQHEYTLDEEDRRVQDVIMKPPPARNDTMILKKTLSCSYPNMRFNEALQKENEKLRLELQRSQANYDVKQCEVIQHLLDVTEVAASIPDKSSSPKVSKKVERNYSDVDNENGHSYNDNSPKKPDSRLTSRNTSSVSSGHDLLSDRGSHRYEEWNADLLGCCSEPSLCIKTFFYPCGTFSKIATVATNRHMSSAEPCNELMAYSLILSCCCYTCCVSRKLRKALNITGGFVDDFLSHLMCCCCALVQEWREVEIRGIYGPEKTKTSPPPSQFMES

SEQ ID NO: 81043 - protein, 130 aa, Gossypium hirsutum
  Clone ID: GOSHI-09MAY01-C31189_1.pep
MLHIFLLFSLIFSSTNVLAQDFCVANTASGIVTPSGYPCIMEANVTSDDFAFSGLGLPGNTSNIISAAVTPAFVGQYPAVNGLGLSAARLDLAPGGVIPMHTHPGANELLYVVHGHITCGVISSANKAYL

SEQ ID NO: 81044 - protein, 73 aa, Gossypium hirsutum
  Clone ID: GOSHI-09MAY01-C31179_2.pep
LVFFFPHSHSFHHLQVAKSLVIGMGCGLWVLALLGEIQASSPSQKQRQGNHGNGMVLKTYPTSSSSFVFNLLY

SEQ ID NO: 81045 - protein, 111 aa, Gossypium hirsutum
  Clone ID: GOSHI-09MAY01-C31179_1.pep
MAKSLVIVMLCFLLVIVLLGEIQASSPSQKQRQGNHGNGMYGATQGSLRPQECGPRCTQRCSATAYKKPCMFFCQKCCAKCLCVPPGTYGNKQSCPCYNNWKTKRGGPKCP

SEQ ID NO: 81046 - protein, 191 aa, Gossypium hirsutum
  Clone ID: GOSHI-09MAY01-C31139_1.pep
MESKNPKSELTVMKLKPIEATPESFKEFGQVIEASPDGEKFGPTDAQLDLSKGIPRFYIMNLQNRPLKFSTITHHASVTQCLGSIGGHVWYLGIAKPSLVDSEEVESEKGKIAVQPRCGHFYVPPAIEDVRVFRIAGPKFIKLNRGTWHAGPLFKADAMDFYNLELSNTNVVDHTTHVFKKENGVIFSIDE

SEQ ID NO: 81047 - protein, 160 aa, Gossypium hirsutum
  unsure (1)..(160): unsure at all Xaa locations
  Clone ID: LIB3584-011-P1-K1-E12.pep
PSPTENEGGGGGGESELTVIKLKPIEATPESFKEFGQVIEASPDGAEFGPTDAQLDLSRGLQGFLLNLXNRPLKFSTITHHASVTQCLGSIGGHVWYLGIAKPSLVDSEEVKNEKGKIAVQSRCGHFYVPPAIDNVHVFRISGPKFIKLNRGTWHALPFV

SEQ ID NO: 81048 - protein, 87 aa, Gossypium hirsutum
  Clone ID: LIB3120-017-Q1-K1-B2.pep
MESELTVIKLKPIEATPESFKEFGQVIEASPDGAEFGPTDAQLDLSKGIPRFYIMNLQNRPLKFSTITHHASVTQCLGSIGGHVWYL

SEQ ID NO: 81049 - protein, 149 aa, Gossypium hirsutum
  unsure (1)..(149): unsure at all Xaa locations
  Clone ID: GOSHI-09MAY01-C31079_1.pep
MGAHPCFQPVSKCSIEGRSNQTVAADXDGTLLVSRSAFPYYMLIALEAGSLLRALLLLLSVPVVYSTYLXISESFAINTFIFISFAGLKIRDIELGSRSVLPKFYADDVXPETWRVFSSLGKRYIITRNPRIMVGPFAKTFLRADKVLN

SEQ ID NO: 81050 - protein, 61 aa, Gossypium hirsutum
  Clone ID: AI055069.1.pep
IWHFKRLLAVQIAFCNSPFKFRFRGFLHDHGDAVPNFCCSSSWFNLGCCLAVVELCVSRRY

SEQ ID NO: 81051 - protein, 147 aa, Gossypium hirsutum
  Clone ID: AI729056.1.pep
MIMVMRSRIFSVLVSVLVWLLLGCILSYASQEDIDCLRSIKDSLEDSFGYLNSSWNFDNTTEGFICIFTWIDCRHPDENMVLNIRLADMGLNGVFPQGIVKCKSITGLDLSSNKLYGHIPSNISQIIKYVTTLDLSSNNFSGKFPPG

SEQ ID NO: 81052 - protein, 121 aa, Gossypium hirsutum
  Clone ID: GOSHI-09MAY01-C31379_1.pep
ASLYPFPGDLNEDDQHQHHQLFNLISQPSSSSSSSSSSSSPSTSLTWPFSFSPTVQHQQAAFYQSLPQQFHDDQQDQEKIHVPQDGPLKRDCELSYLYGKRKKGLKLIIKVMILLSGMPSR

SEQ ID NO: 81053 - protein, 153 aa, Gossypium hirsutum
  unsure (1)..(153): unsure at all Xaa locations
  Clone ID: AI055140.1.pep
MLVLWIGALVFIIYITHWVNNWRNPRCNGKLPPGSMGFPFLGETLQFFKSNTTNDVPPFVKERMERSIQYPXLFPHDNLRVFFFLFCILYAFHNIIGCRYGPVFKTSIVGQPVIVSADRDLNHCVSHQGRLLFQSWYPDTXTEIFGRQNYFPT

SEQ ID NO: 81054 - protein, 144 aa, Gossypium hirsutum
  unsure (1)..(144): unsure at all Xaa locations
  Clone ID: AI054946.1.pep
MLVLWIGALVFIIYITHWVNNWRNPRCNGKLPPGSMGFPFLGETLQFFKSNTTNDVPPFVKERMERLXPVFKTSIVGQPVIVSATGDLIXXVFLQEGNCFXSWYPDTLQXTFGRQNLSSLHAFMYQVPXNMVLXLFALKPQKIP

SEQ ID NO: 81055 - protein, 70 aa, Gossypium hirsutum
  Clone ID: GOSHI-09MAY01-C31249_1.pep
MSALFNFRSFLTVVLLGICTCTYLKMQFPAILEQRTGFRGFFWKAARIGERLSPWVAVGCFTMGVSIIFF

SEQ ID NO: 81056 - protein, 134 aa, Gossypium hirsutum
  Clone ID: GOSHI-09MAY01-C31279_2.pep
MEEQILPSASAAAAAAAASASASATQHDLSPSAASSGARYKLVAPAKLPISRSACITIPPGLSPSSFLESPVLLSDVKAEPSPTTGSLIKPHAVHGSVNSSTYSVTAACSNAFDERNPSCFELRPHPRSNLAPA

SEQ ID NO: 81057 - protein, 184 aa, Gossypium hirsutum
  Clone ID: LIB3582-028-P1-K1-G2.pep
MEEQILASSSAAASATQRDLSASAASSGARYKLVAPAKLPISRSACITIPPRLSPSSFLESPVLLSDVKAEPSPTTGSLIKPHAVHGSVNSSTYSVTAACSNAFDERNPSCFEFRPHPRSNLAPADLNHLRSEQSLQIQGQYQTISYNSSALVKSEMARSSHELSLSVPFHTATSVASAPVEVD

SEQ ID NO: 81058 - protein, 73 aa, Gossypium hirsutum
  Clone ID: GOSHI-09MAY01-C32999_2.pep
TTLVVVIGVQFSAKKIKQKQMFYRIQSHTTDLQLFQQLLRSKKLASLLNRSGTWNFFGFQKERERERKKKNGC

SEQ ID NO: 81059 - protein, 87 aa, Gossypium hirsutum
  Clone ID: GOSHI-09MAY01-C32999_1.pep
ERNVSGMEIDEIQTQQGSKFSRVGNGRSESSRMGQKGSDNHYPDDEEGSEVMKRASANGGGGDALADTAAANTFRGWHHSSRIIRVF

SEQ ID NO: 81060 - protein, 76 aa, Gossypium hirsutum
  Clone ID: LIB3120-048-P1-K1-F4.pep
TTLVVVIGVQFSDKKIKQKQMFYRIQSHTTDLQLFQQLLRSKKLASLLNRSGTAKLGLSCSKRSFRTKNGKKIQEN

SEQ ID NO: 81061 - protein, 138 aa, Gossypium hirsutum
  Clone ID: LIB3825-022-Q1-K6-H11.pep
SVGGRVGEPCRAGPRNVVITGSTRGLGKALAREYLLSGDRVVVASRSPESVDMTVKELEENLKEGMTAGGLSSKNLERAKVVGIACDVCEANDVEKLANFAVSELGSIDIWVSYMAWCLYIFPSSCHSLAWRCTVVSY

SEQ ID NO: 81062 - protein, 87 aa, Gossypium hirsutum
  unsure (1)..(87): unsure at all Xaa locations
  Clone ID: LIB3120-046-P1-K1-H8.pep
ANDVEKLANFAVSELGSIDIWINNAGTNKGFRPLLQFSDEDIKQIVSTNLVGSILXTREAMRIMKNQPKGXHIFNMDGAGFGGSNTP

SEQ ID NO: 81063 - protein, 200 aa, Gossypium hirsutum
  Clone ID: GOSHI-09MAY01-C132951_1.pep
MNTHSLKLLLILLTITFPSTQCDDDLVDQICKKTPFYDLCISTLKSNSNGKDVKGLASVMADTMLSNATDTLSYIRAEINRTPDPKIERALAYCAELYIPVVKYNLPQAIDALSKGQFEFAADGISDAAKEADSCEKMISWSQELAALSDRNKLIHSLSDVAVAIVKILLKGQWTLKLWGILVTNCLCVYFFPGCEFFLF

SEQ ID NO: 81064 - protein, 84 aa, Gossypium hirsutum
  Clone ID: GOSHI-09MAY01-C32899_1.pep
WKGLLGGGGAHRGGNDVELLCKTLQVEHRLFYFDLKENPRGRYLKILEKTLATRFTIIVPSYGISWFLDLFNFYVNSDDNDLFS

SEQ ID NO: 81065 - protein, 93 aa, Gossypium hirsutum
  unsure (1)..(93): unsure at all Xaa locations
  Clone ID: LIB3165-039-Q1-K1-C7.pep
MEMVTNLASERPVVIFTKSSCCMCHTIKTLFYEFGVNPTVYDLDEIPRGFELXQALLRFGCSPSVPVVYIGGEFVGGANELISLHLNPTLIPM

SEQ ID NO: 81066 - protein, 67 aa, Gossypium hirsutum
  Clone ID: LIB3120-044-P1-K1-H10.pep
KRVFIVWHMQQELLLKITTGLSDANFVTISIAIETMHQKRKLVLPFSLFATRRMCYERADFVRTRGR

SEQ ID NO: 81067 - protein, 285 aa, Gossypium hirsutum
  unsure (1)..(285): unsure at all Xaa locations
  Clone ID: GOSHI-09MAY01-C32559_1.pep
RNETRVTSEEEGEQSCLIIRFLRDDQLSKRTSIFGLRLWVVLGICVGAAIVIVLFLISLWFTSKRQNKATGSSHNGSFKPIHNSTIPTVSKEIQEIRVDPSRHSNPDAKLHQASNPDPLPESDHVLVLHSEEDSSAISGRNRIHIEIGKDHRIAYPERGAGSGHGSGESRSGDQGTAIMAVPEVSHLGWGHWYTLRELEEATDEFAAENVIGEGGYGXIVYRGVLEDNTKVAVKNLLNNRGQAEKEFKVEVETNGRVRHMNLVRVLGYCAEGAHKMLVYEYVDNG

SEQ ID NO: 81068 - protein, 466 aa, Gossypium hirsutum
  Clone ID: GOSHI-09MAY01-C32509_1.pep
MAEGKQEKNTTSEESVKLFVGQVPKHMTEAQVLAIFEEFALVDEVNIIKDKATLSSRGCCFVICPSREEADKAVDACHNKKTLPGASSPLQVKYADGELERLEHKLFVGMLPKNVKEDEVADLFSKYGTIKDLQIIRGSQQTSKGCAFLKYETKEQALDALQAVNGKHKMEGSSVPLVVKWADTEKERLARRAQKAQFQALNKLNVDSQHPSLFGALPMGYVPPYNGYGYQAPGSYGLMQDRMPPMQNQSAFHSMIPPVNQASALRGITPDLAPRAGPKNYAMPPGSYVGSAYPAVQGVQYPMAYPGGIISHHPLTSSPGSLPQANTSSNSSSASSVGTSSGSQIEGPPGANLFIYHIPQEFGDQELTNAFQGYGRVLSAKVFVDKATGASKCFGFVSYDSPAAAQNAINMMNGCQLGGKKLKVHLRETTNRTNLINREVSHGRQQTPGRRNLDIRLTAVSAFRMD

SEQ ID NO: 81069 - protein, 207 aa, Gossypium hirsutum
  unsure (1)..(207): unsure at all Xaa locations
  Clone ID: LIB3543-040-Q1-K6-H8.pep
LSWVQVSLWGGGGRSEKKDSSKAQKAQSQASNMPNADSPHPSLFGALPMGYVPPYNGCGGEAPGSYGLMQYRLPPMQNQPAFNNMIPPVNQGSSLRGITPELAPNIAPRNYAVPPTSYVGSAYPAVPGLQYPMAYPGGIMNHRLLTGSPGSVPQANINSNSSSSSPVGTNSGGQIEGXLSAKVFVEKATGVSKCFGFVSYDSPAAAE

SEQ ID NO: 81070 - protein, 208 aa, Gossypium hirsutum
  unsure (1)..(208): unsure at all Xaa locations
  Clone ID: AI055648.1.pep
ERQARRAQKAQSQASNMPNADSPHPSLFGALPMGYVPPYNGYGYQAPGSYGLMQYRLPPMQNQPAFNNMIPHVNQGSSLRGITPDLAPNIAPRNYAVPPTSYVGSAYPAVPSLQYPMAYPWGIIDQPFGDLVNLFNGPSKHKQVFFNIFPCCTNSEGIXGPPGANLLIYHIPQEFGIKSWLSFQDLAGLNTRVCDKQPEYKGRFVVRS

SEQ ID NO: 81071 - protein, 122 aa, Gossypium hirsutum
  Clone ID: LIB3583-013-P1-K1-E11.pep
MAEGKKEKKATNEESVKLFVGQVPKHMTEAQVLAMFEEADKADNACHNKKTLPGASSSLQVKYADGELERLEHKLFVGMLPKNVSEDEVSALFSKYGTLKDLQILRGSQQTSKGCAFLKYET

SEQ ID NO: 81072 - protein, 222 aa, Gossypium hirsutum
  unsure (1)..(222): unsure at all Xaa locations
  Clone ID: GOSHI-09MAY01-C32459_1.pep
MSLSKKGIQIRDTKLNTPSKVTTLNPNAAEFVPFSLRSPSSSGSTIAADATRFAISRTLGKAVLDRSESSISNNSDDEAHQFWRRQLPDDITPDFKVINEDDSQGIGXGSLSLAGLSLHGGSEASRVPASAAGGCVFGDQQQLLHQYGNGNNSDEKFRYPSSSYGEEPISASFLNLPLKPWDEQLVNSDRLIGNGREGQLYDGNSRHAFASDILVSTHISMI

SEQ ID NO: 81073 - protein, 135 aa, Gossypium hirsutum
  unsure (1)..(135): unsure at all Xaa locations
  Clone ID: GOSHI-09MAY01-C32479_1.pep
MAVAVLATQALLCQTHCRALPRPTPFTSNPPPQPSRYPCKHHGETWPTTSFSILHSTPIVCRASRRKSTALSSISEESDQDGPLRRVLHLSLWAAEAAYILGLFLLPYAPGDPVWAISSNTINELIGXSLNFFFI

SEQ ID NO: 81074 - protein, 139 aa, Gossypium hirsutum
  Clone ID: GOSHI-09MAY01-C32409_1.pep
PRVRPRVRSSSVSSRLKPANFNSTPRQLHPLKPLNRPRHLPPPSPQRPLLFSTTKPTTISTSFTHKNLTAPPIFPHRTSLLPSSSLHVHRTPATGYAAALLDTAQSTGSLHEVRRDVRKLSRLLQNSQIQAFLNDPVFG

SEQ ID NO: 81075 - protein, 337 aa, Gossypium hirsutum
  Clone ID: GOSHI-09MAY01-C32709_1.pep
MVSKSHDVYSSWDDEFKKLVQSFPKEKGWAGSNLYFYQGFWCPSLVLKAFISFQKHFQAFNSDIIVATFPKCGTTWLKALTFSTLYRNQFPWDENPLLTFGPHQLVRFFEYDLYLNNPFPDLRNVCAYQPRLFSTHAPYATLPTSIKDSGCKIVYICRNPMDIFISLWLFSAKLRDKNQESLSLDEAFDKFYHGISAHGPFFDHVLGYWKASQENPNKILFLNFEDLKEDMDSHLKILAMFLGVPFTDDEEKQGVVEKIAKICSFENLKELEVNMKDVHTSGVPHTHFFRKGEVGDWSNYLTPFMIECLEKLIQEKLNGSGLTFKLLSETANNIASP

SEQ ID NO: 81076 - protein, 68 aa, Gossypium hirsutum
  Clone ID: uC-gsronu33B058f12b1.pep
FLEVNKKGVHTTGFPHTHFFRKGEVGDWSNYLTPFMIECLEKLIQEKLNGSGLTFKLSSKTSNNIASP

SEQ ID NO: 81077 - protein, 142 aa, Gossypium hirsutum
  Clone ID: GOSHI-09MAY01-C132601_1.pep
EIWTMQEGILFDNILIAKEENVAKSGRDTTWKPKFVVEKEKQKAEEEAAGSDDLGGFQKVVFDVLYKFADIPFLSKYKLQILDFIEKGEKQPNLTIGVLVSIVVVILTAIFMLIFSGKNQPPVENTTEVAADTSIDHRKQWR

SEQ ID NO: 81078 - protein, 170 aa, Gossypium hirsutum
  Clone ID: GOSHI-09MAY01-C32119_1.pep
LVSPNKMEKSEISQSVAELVWQLNEKSCELVVKAADTRIIHEQLGLKICECEGLQETVASLKQQLSDALESQNVSPIAPNSQQFGGMKGLQMDNEAAASKDSDEDLLSKAQVAEIEELKQKVVELTESKEHLELRNQKLAEESSYAKGLASAAAVELKALSEGSTKLMNH

SEQ ID NO: 81079 - protein, 78 aa, Gossypium hirsutum
  Clone ID: GOSHI-09MAY01-C32129_1.pep
ILAPEKWMFLFELHPVLFTLQPNKKTDYNRTKDVEQKAPSFLHNGKWWVLTSTADHVLQVARCFLPHRFKRSFTITFL

SEQ ID NO: 81080 - protein, 149 aa, Gossypium hirsutum
  unsure (1)..(149): unsure at all Xaa locations
  Clone ID: GOSHI-09MAY01-C32379_1.pep
RPRVRPRVRDLLFELSMWRCRRELRVRAGELHTSSRRDAXHYIEFWKKVPPNEPYRVILGDVRDKLYQTRERSRQMLSHGISDIPXEEETFTNIEQXFLEPLELCYRSLCSCGDRPTAGGSLSXFLRQVSTFGLSLVRLDIRQESDRHT

SEQ ID NO: 81081 - protein, 99 aa, Gossypium hirsutum
  Clone ID: GOSHI-09MAY01-C32319_1.pep
ILTSIACLLAMDLDVNMVRGRRMFCYITSCLHCPRYPERRPVYHIRFLENLCTKADAIDDKQYINSLSPQSLDVRVWEGLFHHLKERGIIQLTLNLALT

SEQ ID NO: 81082 - protein, 143 aa, Gossypium hirsutum
  unsure (1)..(143): unsure at all Xaa locations
  Clone ID: GOSHI-09MAY01-C32289_1.pep
LASAIFLCQPKLNLSNSLSFSTRREILHVQGGQCGNQIGSKFWEVICGEHGVDPTGRYNADGESSDNHLERINVYYNESSGGRYVPRAGLMDLEPGTMDSFRSGPYGQIFRPXDISSFGQSGAGNNWAKGHYTESAELIDADL

SEQ ID NO: 81083 - protein, 137 aa, Gossypium hirsutum
  unsure (1)..(137): unsure at all Xaa locations
  Clone ID: GOSHI-09MAY01-C132201_1.pep
GVSAKQEKDARFQQIKKEVIEMIKTRIPSFETKILEPPPGASDDFQETGSQERVNRRKFGMDASLENKICDLYDLYVDGLDEDAGPQIRKLYVELAXLWPNGMMDNHEIKRAICREKERRKARYNRCKEQEKVRGKK

SEQ ID NO: 81084 - protein, 134 aa, Gossypium hirsutum
  Clone ID: GOSHI-09MAY01-C33939_1.pep
FRVRPRVRPRGRWYLYSPFFITSSIPSPLIRKKIMDHMIHKAQPYFAVTDEKMMNTNNPESEHGQQPNNIVTSQLQIRSSPRSSPEALEKEAVLRRIRHHMCKYRVKRAFQALVGRDGQAQEKWMELGDAFTCP

SEQ ID NO: 81085 - protein, 139 aa, Gossypium hirsutum
  unsure (1)..(139): unsure at all Xaa locations
  Clone ID: GOSHI-09MAY01-C33859_2.pep
MACHIVVKGELKNGSEDCXLASLTYSNYQGAPVTIKKDSLPTPFAQNMVVDGLYGGLVYDVVRVKWIILWTTDCKVATKLIPTENQMGWEDIVSILQPYQSSDNLPVSCGGAFSAEAHIHANGDGSLNLTAQIMWSGCE

SEQ ID NO: 81086 - protein, 141 aa, Gossypium hirsutum
  Clone ID: GOSHI-09MAY01-C33859_1.pep
MACPPTHKVVKGELKNGSDDCLASLMYSNYQGAPVTIKKDSLPTPFAQNMLVDGLYGGLVYDVVRVKWIILWTTDCKVATKIIPTENHIVWEDIVSILQPYDSSDNLPLSCGGAFSAEAHIHANGDGSLNLTAQIMWSGCK

SEQ ID NO: 81087 - protein, 134 aa, Gossypium hirsutum
  Clone ID: GOSHI-09MAY01-C33499_1.pep
MPFKRYVEIGRVALVNYGKDYGKLVVIVDVVDQNRALVDAPDTVRSQMNFKRLTLTDIKIDINRVPKKKTLIDAMEKADVKSKWENSSWGRKLIVQKRRASLNDFDRFKLMLAKIKKAGIVRQELAKLKKETAA

SEQ ID NO: 81088 - protein, 58 aa, Gossypium hirsutum
  Clone ID: uC-gsronu33B157g05b1.pep
RPLVGQERKSSEDENCHMLTVSDLKIAIVGRHALAKLKTDTAAYTYFYLSLSLLYISV

SEQ ID NO: 81089 - protein, 111 aa, Gossypium hirsutum
  unsure (1)..(111): unsure at all Xaa locations
  Clone ID: LIB3135-004-Q1-K1-F2.pep
MPFKRYGESGRVALVNYGKDYGKLVVIVDVVDQNRALVDAPDTVRSQMNFKRLTLTDIKIDINRVPKKKTLIDAMEKADVKNKWENSSWGXKLIVQKRRASLNDFDRFKAH

SEQ ID NO: 81090 - protein, 108 aa, Gossypium hirsutum
  Clone ID: GOSHI-09MAY01-C33489_1.pep
MSFRGKRKDGEGLASDENDDHAPPNKVSKISSAVDSDDSDDVVVCEISKNRRVSVRNWNGKIWVDIREFYVKDGKQLPGKKGISLSLDQWNVLRDHAEAIDKALAENS

SEQ ID NO: 81091 - protein, 146 aa, Gossypium hirsutum
  Clone ID: GOSHI-09MAY01-C33449_1.pep
SHASAHASAEASKGVLVPVDDDEVMVETCNAEANGTYCFKASICCDYRPQLLTDLRQALDALPIKMVKAEISTLGSRLRKDFVFTGCRTTAHGDDAESWQHLACSVRRALNSVLEKASISPEYLPYSTFPKKRQRISYFDSSSSSS

SEQ ID NO: 81092 - protein, 95 aa, Gossypium hirsutum
  Clone ID: GOSHI-09MAY01-C33409_1.pep
AFSFGSGFESGNGSNPISLAIMLGGYHCLLLSSSSSSRWFANNMEAFAWISWGLRLLLASKTTLLSRESIRPSLEKFPWRPCATFFVLKNRKGER

SEQ ID NO: 81093 - protein, 61 aa, Gossypium hirsutum
  Clone ID: LIB3135-003-Q1-K1-E12.pep
YKESSARSPWKFFKEVLMLSLDSRVVFDAKRSLKPHEIHANASILFANQREDEEDDNNKQW

SEQ ID NO: 81094 - protein, 103 aa, Gossypium hirsutum
  Clone ID: GOSHI-09MAY01-C33439_1.pep
MATLGGISQVDGSANSLEIENLARFAVDEHNKKGNTMLQFKKVTNVKQQVVSGTMYYITLEAMDGDKTKVYEAKVWDKPWMDFKELQDFKVIGDAPAGCTSTA

SEQ ID NO: 81095 - protein, 137 aa, Gossypium hirsutum
  Clone ID: GOSHI-09MAY01-C33669_1.pep
ANRERSVVLSSEAKQAASEIELRLQLGSKLSDIVSSKGDVLALFNLYKDEGYVLTEQEGKFCVVLKESCSPQDMLKSLFQVNYLYWLERNAGIESRGASNDCRQGGRLQISLEYVQREFNHVKIDSESVRCVTDGLI

SEQ ID NO: 81096 - protein, 158 aa, Gossypium hirsutum
  unsure (1)..(158): unsure at all Xaa locations
  Clone ID: GOSHI-09MAY01-C33199_1.pep
TGQSTGSPAEFNLLKHSKAEEEGEKKKEKFSSKILLLIFLEAGYHVLDESTHFSSDLQPSSKFLRKQSIGILELGILSAKNLQPMKMKDGXLTDAYCVAKYGNKWVRTRTLLDTLYPRWNEQYTWEVHDPCPVITIGVFDNSHTPGSIDDAWVQKNRE

SEQ ID NO: 81097 - protein, 178 aa, Gossypium hirsutum
  unsure (1)..(178): unsure at all Xaa locations
  Clone ID: GOSHI-09MAY01-C33359_1.pep
MDIDKTDKKQFEKILSYIEHGKREGATLLTGGKHIGQKGYYIQPTIFADVKDDMIVAKNEIFGPVMSLMKFKTMEEGIKRANNTTYGLAAGVITKDLNVANTVSRSVRAGIVWINCYAVFDMDCPYGGYKMSGFGRDYGLDALNQYLQIKSXVVTPIHDSPWHCTYVRTRVMYYYPKM

SEQ ID NO: 81098 - protein, 124 aa, Gossypium hirsutum
  Clone ID: GOSHI-09MAY01-C33349_1.pep
LHASAHASENKVHVFSLCFFRSYGKQGRKKKKKKNKKIQFSSRETFGLGRSSRVAGKKLRQHHRRRRLKRMETELAKMKAEMRDSAESLMAGKVEADQAKAKLQVLKLKLLAVKEIEAFLMGFL

SEQ ID NO: 81099 - protein, 116 aa, Gossypium hirsutum
  unsure (1)..(116): unsure at all Xaa locations
  Clone ID: GOSHI-09MAY01-C33379_1.pep
LKKMFPDATEPVQYLVSHWGTDPNSLGCYSYDPVGMAGDVYDKLREPLDNLFFGGEAVTEEHQGAGHGAXRSGVLAARNCESHLLERLGDFRKLQLISFSGDALLEPIFPLQISRM

SEQ ID NO: 81100 - protein, 355 aa, Gossypium hirsutum
  Clone ID: GOSHI-09MAY01-C33369_1.pep
MEGLMQVPYDVTVRFMLTFLERNLLPDAIIRRLTRLLLASRLRSGYKPSTELQLSDLLQFAHSLKEMPIAIKTDKPKTQHYELPTSFFKLVLGKNFKYSCCYFSDESKTLEDAEEAMLELYCERSQLKDGQTVLDVGCGWGSLSLYIARKYPNCRVTGICNSTTQKAFIEEQYRDRQLQNVEIIVADIRPRVREASYDRIYSIEMFEHMKNYHDLLKKISKWMKEDSLLFVHYFCHKAFAYHFEDINEDDWITRYFFTGGTMPSANLLLYFQDDVSVVNHWLVNGKHYAKTSEEWLKRMDRSLASIKPIMESTYGKDQAVKWTVYWRTFFIAVAELFGYNNGEEWMVALFLFKKK

SEQ ID NO: 81101 - protein, 95 aa, Gossypium hirsutum
  Clone ID: LIB3135-003-Q1-K1-A3.pep
MDASYNTISSIVVLEHMKNHHDLLKNISNLLKEDRLLFPHYFCHKAFAYHFEYINEYDWITTFFFTGGTMPSTNLLLYFQDDASVVNHCLVNGKH

SEQ ID NO: 81102 - protein, 58 aa, Gossypium hirsutum
  Clone ID: GOSHI-09MAY01-C33309_1.pep
EGQDITALALNEDNTNLLVSTADKQLIIFTDPALSLKVVDQMLKLGWEGEGLSPLIKS

SEQ ID NO: 81103 - protein, 150 aa, Gossypium hirsutum
  Clone ID: GOSHI-09MAY01-C33289_1.pep
HASASVEIYRVSCGNQLVRFPFRLSNQPDRCGYPRFNLSCKDQAHTVLSLPFSGEFNVVHIDYLVQSIWLNDPDHCTPKRLLHGLNLSSTPFDLLYPRSFTFFNSSAAASTQLHQAKYISCLSGTNFYVVALPAARLDTTASVATAEHSR

SEQ ID NO: 81104 - protein, 129 aa, Gossypium hirsutum
  Clone ID: GOSHI-09MAY01-C28969_1.pep
DESGYYSWYAYGRSKLANILHAKELARHLKEEGVEITANSLHSGAIISTNLMRHHGLINTVGQMLGKYFLKNIPQGAATTCCVALNPQVKGVSGEYFLDSNIGNPSAKAKDADLAKKLWDFSCTLTNPK

SEQ ID NO: 81105 - protein, 56 aa, Gossypium hirsutum
  unsure (1)..(56): unsure at all Xaa locations
  Clone ID: LIB3543-066-Q6-K6-B12.pep
SVYTYFAFHSNLLDKTGIIPYTLCMFMKILRFITVSXKRVPPPPTATSAARLDKAL

SEQ ID NO: 81106 - protein, 204 aa, Gossypium hirsutum
  Clone ID: GOSHI-09MAY01-C28929_1.pep
MATNGCEGRLKMIAELTTNAEQIQDEVLGEILSRNAGTEYLRGYLHGQTEKQLFKKNVPIVTYEDLKPYIDRIANGETSDILLAEPITGFFLSSGTSGGQPKLMPVTAEVANKWDLFRRLYESPVIKHFDDINQAGKRLELMFARPEIETPSGLKAASVSTSIYSGSNFRTRLPKLYTSPVGTIFCPNPNQGLYCQLLFGLIQR

SEQ ID NO: 81107 - protein, 88 aa, Gossypium hirsutum
  unsure (1)..(88): unsure at all Xaa locations
  Clone ID: GOSHI-09MAY01-C28859_5.pep
ASAEQALSVLNGTIFGGRNVRLSWGRSPSTKQAQPDXSQWNSGYYGYAQGYEAYGYAPPPQEPNMYYGGYPAAYGNYQQPGAYQQPQQ

SEQ ID NO: 81108 - protein, 115 aa, Gossypium hirsutum
  unsure (1)..(115): unsure at all Xaa locations
  Clone ID: GOSHI-09MAY01-C28859_2.pep
KNPVSRGRVLQDKIPANRSGGSSHRRNRSSAEQGGDVLNGTILGGRNAGLXGGSSPSSKQAQPDQAQWNGGYYGYAQGYEAYGYAPPPHDHSMYYGGYRGXGNYQQPGAYQQPQQ

SEQ ID NO: 81109 - protein, 221 aa, Gossypium hirsutum
  Clone ID: GOSHI-09MAY01-C28859_1.pep
FKAVYPSVKSAKVVTDRTTGRSKGYGFVKFGDETEQIRAMTEMNGIYCSTRAMRIGPAANKKPVTDQQYQKAAYPNTQGNSGENDPNNTTIFVGGLDPSVSEDQLKQIFSQLGEVVHVKIPANKNCGFVQYANRTSAEQALSVLNGTILGGRNVRLSWGRSPSSKQAQPDQAQWNGGYYGYAQGYEAYGYAPPPQDPSMYYGGYPGYGNYQQPGAYQQPQQ

SEQ ID NO: 81110 - protein, 100 aa, Gossypium hirsutum
  Clone ID: LIB3829-005-Q6-N6-D4.pep
PANKHCGFVQYANRASAEQALSVLNGTVLGGRNVRLSWGRSPSSKQVQPDQAQWNTGYYGYAQGYEAYGYAPPPQDPNMYYGGYPGYGNYQQPGAYQQQQ

SEQ ID NO: 81111 - protein, 67 aa, Gossypium hirsutum
  Clone ID: LIB3048-039-Q1-L1-H8.pep
GLSRSISSREVTQGLGFPSTQCSFLMMRIGTYKLAMRIGPAANKKPVTDQQYQKHRLLWFISSYTLS

SEQ ID NO: 81112 - protein, 198 aa, Gossypium hirsutum
  Clone ID: GOSHI-09MAY01-C28679_2.pep
AFLMECRGALGSIVELKEILVHSTNWLATKALAAGKKHTAFVKTCMAFSEITIPSIPGHIKQLNLYLGTAEVALLGGLVSHSDGLIDSAINCLQSSDWMEGSRTLDSDGMLSSIRKLCSLLIMVPGNPEVGILHIPKSILLIIHSRSWSPRLKARILCAIISLSATLSQERLPYHADHTEIMGHDLLFFGDSSYVCEL

SEQ ID NO: 81113 - protein, 197 aa, Gossypium hirsutum
  unsure (1)..(197): unsure at all Xaa locations
  Clone ID: AI055176.1.pep
IFGLDEYLKVVDAYLDIVLQNQMDDHLKTILEGISKLASDKVLAEDELASLQSILVKLLSHFKDLEHVFSLNHFLQILDMMHGNSRGIVNMHILDMATRNGYVHDPTTIQLLFEISQALHSDTDLVNMXNDDNQQQARLISRFVRMVDHGVEYERHLAFLMECRGALGSIIELKEILFILILVSYKALKDGISILLL

SEQ ID NO: 81114 - protein, 126 aa, Gossypium hirsutum
  Clone ID: LIB3048-032-Q1-L1-A7.pep
LIPTGYLPYLALHWDTIMGDSMLNHILSEYYIPNYILVPESEAKKPPCVPSCPVLVFINSKSGGQLGGNLLSTYRSVLNTNQVFDLGETKPDKVLHQIYATLGSLKQRGDGFALAIESSLRIIVAS

SEQ ID NO: 81115 - protein, 87 aa, Gossypium hirsutum
  Clone ID: LIB3048-031-Q1-L1-E11.pep
LIPTGYLLYLPLNWGPFLAIGLLTLFWMDSSFQIYTWFWIQTQRTHRVYLLVTVLVYINSKSGAQFGGNLLSTYRSVFNTNQVFDLG

SEQ ID NO: 81116 - protein, 122 aa, Gossypium hirsutum
  Clone ID: GOSHI-09MAY01-C28169_2.pep
NIKLLGYGLQVVSDEARAMYNGGMAGLTYWSPNVNIFRDPRWGRGQETPGEDPVLAGKYAANYVRGLQSTTGIRLKVAACCKHYTAYDLDNWNGVDRYHFNARVRIPSCQLVFYLFVKQLIA

SEQ ID NO: 81117 - protein, 212 aa, Gossypium hirsutum
  unsure (1)..(212): unsure at all Xaa locations
  Clone ID: GOSHI-09MAY01-C28169_1.pep
QTWPRPILFPLLFITTTVFLGFFISSAESRPPFACDPRNGLTRSLKFCRANLPIHVRARDLIGRLTLAEKIRLLVNNAAAVPRLGIQGYEWWSEALHGVSNVGPGTKFGGAFPGATSFPQVITTAASFNESLWEQIGRVVSDEARAMYNGGMAGLTYWSPNVNIFRDPRWGRGQETPGEDPVLAGKYAANYXRGLQSPTGIRLKVLACCKHY

SEQ ID NO: 81118 - protein, 68 aa, Gossypium hirsutum
  Clone ID: GOSHI-09MAY01-C28059_1.pep
YLNQVEEHYQYLVAVKQSNLQTSVNKTFVRYLVFPFLHCPLRAFRETSWEGWSNGKHPCVMLTVMLLL

SEQ ID NO: 81119 - protein, 71 aa, Gossypium hirsutum
  Clone ID: LIB3829-029-Q6-K6-A1.pep
WISLQYFKIIYLNLQASSFIERVVQDESQMEGLPHDCSKVMVWELNVESSNSFYPKKWSMKNNLDIIAPLA

SEQ ID NO: 81120 - protein, 61 aa, Gossypium hirsutum
  Clone ID: GOSHI-09MAY01-C28049_1.pep
MASIGMAPTSGLREPSGNAVGVDRLPDEMNDMKIRDDKEVEAAIVDGNGTETGHIIVTTIG

SEQ ID NO: 81121 - protein, 84 aa, Gossypium hirsutum
  Clone ID: GOSHI-09MAY01-C28009_1.pep
CCSHVYFHLSPNERKKRTQTPRQSQKRSSVLTMFDIHVESKSTVEFRSLELVRPTSANSHRGFTGGSMVIEKQRHRLELKTSSV

SEQ ID NO: 81122 - protein, 94 aa, Gossypium hirsutum
  Clone ID: GOSHI-09MAY01-C28219_1.pep
QMVAAMPKDERRFLPPKANFYDRGRVTDDGGASQLRCSSLFSLFCLVFYTQITGMEKSNEPNNRKEKLRTASKFDLDSYFCVWFLVYSPLRVYS

SEQ ID NO: 81123 - protein, 196 aa, Gossypium hirsutum
  unsure (1)..(196): unsure at all Xaa locations
  Clone ID: GOSHI-09MAY01-C129551_1.pep
MSFPLTSSFRSLPSHFAASFLVNSNSAKLQSPILMSLPQNPSSFPRHISRSFTRAPPNSSAVFRPNLRVRASSKTPNQATDAKLIAISSAVTITFAVANRVLYKLALVPMKEYPFFLAQFTTFGYVAIYFSILCLPYRAGIVANEMLSLPKSRFAGIGMLXALGVAIGMASAAMLPXPVIPILNQNFLLCALLFSA

SEQ ID NO: 81124 - protein, 43 aa, Gossypium hirsutum
  Clone ID: GOSHI-09MAY01-C129641_1.pep
DPYLNLFRNIIPPIFDTLDVSPLLAFAVLGTLGSILNNSTGMY

SEQ ID NO: 81125 - protein, 168 aa, Gossypium hirsutum
  unsure (1)..(168): unsure at all Xaa locations
  Clone ID: GOSHI-09MAY01-C129031_1.pep
RSRVRPRVRPRVREGSLVIPAAGDYKPNGGHTSVAKSTDCPMGVTCGETTAGSLMGLDTLIKPNHSSTAADEQAKAADEFKKTMYGTADSGSSSDEEGVSKTNKLQIRLREQPTSGTADVNKTKEATKRLGDGLGLPIARTXSWTGQDLGQRQQQPYAATWASVTNTT

SEQ ID NO: 81126 - protein, 338 aa, Gossypium hirsutum
  unsure (1)..(338): unsure at all Xaa locations
  Clone ID: GOSHI-09MAY01-C129311_1.pep
WESGKEGCTMHVSPDQLWPHTKFLEDFINGAEVASLLDCIRLTAGPLHALAAATRPARASPAPGVSGPSGVISSVPKQPGYSPLQGLLPSSSTTNVNQAAAAVPAGNTASASASSIGNHSIHGAAMLAAGRGGPGIVPSSLLPIDVSVVLRGPYWIRIIYRKRFAVDMRCFAGDQVWLQPATPPSTPPRGGSXSGGSLPCPQFRPFIMEHVAQELNGLDSSFTSGQQTVGPANSNNPNLSSGPQLSANGSRVNLPTSAAMSRAANQXAGLNRVGNSLPGSPNLAVVSSGLPIRRPPGSGVPAHVRGELNTAIIGLGDDGRYGGGMVPVVLLKKFLGYS

SEQ ID NO: 81127 - protein, 231 aa, Gossypium hirsutum
  Clone ID: GOSHI-09MAY01-C24949_1.pep
PTRPPTRPKEVRVAVSPGKAEGHRRNNEEYMEREDFSFGNRGLERGMTNNHEGDKVGDGKPKTMPPASVITRLILIMVWRKLIRNPNTYSSLIGLTWSLISFRWNVQMPAIIAKSISILSDAGLGMAMFSLGLFMALQPRIIACGNSVAAFAMGVRFLAGPAVMAAASIAVGLRGVLLHVAIVQAALPQGIVPFVFAKEYNLHPDILSTAVIFGMLIALPITLVYYIVLGL

SEQ ID NO: 81128 - protein, 125 aa, Gossypium hirsutum
  Clone ID: GOSHI-09MAY01-C24939_1.pep
SQRGYIGEMGDVEDETFNPVVSRSSQTCRIDLLEEIIEDAKDNKKILFQAMQSIMDLMKEVELQEAAAEQAKEEAARGGMDILVKVEELKQMLPHAKEANDMHAGEVYGEKAILVTEVKELENRL

SEQ ID NO: 81129 - protein, 210 aa, Gossypium hirsutum
  Clone ID: GOSHI-09MAY01-C24859_1.pep
MPNMEEKSVSVVSDVNSGSGLIEYSSSSSRSARSRTEKEPIGRSKPHNRVAIFRDRETDRKDPDYDRNYDRYMQRFDPGFGFNSGPYTMQPMYTPAINYNTEFPQLGSTHRPQIATEHQPRPLPQHIPGPWVAPPTATGISYGHPETMMPPFNPNHVGARSTSAIYLHSSQYPLQRPGMPFIHPHEHVHQPFSQPHQHQPDASFGLARPQ

SEQ ID NO: 81130 - protein, 241 aa, Gossypium hirsutum
  Clone ID: GOSHI-09MAY01-C24849_1.pep
MPLVYVKLYTYQIFRALSYIHRSIGVCHRDIKPQNLLVNPHTHQVKLCDFGSAKVLVKGEPNISYICSRYPRAPALIFGATEYTTAIDIWSAGCVLAEMLLGQPLFPGESGVDQLVEIIKVLGTPTREEIKCMNPNYTEFKFPQIKAHPWHKIFHRRMPPEAVDLVSRLLQYSPNLRCSALDALIHPFFDELRDPNARLPNGRFLPPLFNFKPHELKGVPEEITAKLIPEHARKQCPSLGL

SEQ ID NO: 81131 - protein, 110 aa, Gossypium hirsutum
  Clone ID: LIB3145-013-Q1-K1-E6.pep
VYVKADFRHKNRPSHCLVYSSFKICNIIMETNLCSTVIYVLVCNVIVETLVVTEKKKKKKKKKKKKKKKKKKNKKKQGKKNQKKEKKLNQTLRSNNHFKKNKQKQKGGPL

SEQ ID NO: 81132 - protein, 133 aa, Gossypium hirsutum
  Clone ID: GOSHI-09MAY01-C24869_1.pep
GKNFENCLAIRKGVDFLLRTQREDGGWGESYLSCPKKVYTPIEEKESNLVSTAQAMMSLIVSGQAERDPTPLHRAAKLLINSQLPNGGFPQQGLAGVFMRNCMLHYAIYRNVFPLWALAEYRDHVWPSKYICF

SEQ ID NO: 81133 - protein, 80 aa, Gossypium hirsutum
  Clone ID: GOSHI-09MAY01-C24509_3.pep
YFLSTKRFFSAKRLVAISCYTMRLYLFVKLATWFNGPHFSNFHQYEESTYTSFISRGEHLYKFLSFFLSKIMYKHQILYQ

SEQ ID NO: 81134 - protein, 59 aa, Gossypium hirsutum
  Clone ID: GOSHI-09MAY01-C24509_2.pep
TSNIISIAIITAFHFGISIMMTYISYKRGGPLSNVGGGMLSVHTTWVACPCKMLLSDSL

SEQ ID NO: 81135 - protein, 74 aa, Gossypium hirsutum
  Clone ID: GOSHI-09MAY01-C24509_1.pep
KILFIFMSTDFHYSVLHHLLDQSHLHWECLPCNHPFEAMKKEHPWSPMQYQEHNEDLVIPKKIQSKDFGEIQTK

SEQ ID NO: 81136 - protein, 99 aa, Gossypium hirsutum
  Clone ID: GOSHI-09MAY01-C24529_1.pep
MVSLKSLVSLSSRSAAVALLVLVVSVAVQTHTTNAQSCPTELTSLNVCAPFVVPGAAVANPSIDCCNALQSVHHDCLCSTLRIASRLPSQCNLPPLTCA

SEQ ID NO: 81137 - protein, 107 aa, Gossypium hirsutum
  Clone ID: uC-gsflmaxxa090d05b1.pep
GGGGYWSPTAEVCLILDLSVGGVFEALLVLAVSVAVQTHTTNAQSCPTELTSLNVCAPFVVPGAAEANPSIDCCNALQSEHQECLCSTLRIDSRLPSQCNLPPLTCA

SEQ ID NO: 81138 - protein, 253 aa, Gossypium hirsutum
  unsure (1)..(253): unsure at all Xaa locations
  Clone ID: GOSHI-09MAY01-C24499_1.pep
GPTQEEITNRWFSQDIFGEAVQQGDLGKYNDSGDEMEVDNRDEKPVIPEKSKAKKKQDEKTSIPDKAKEKKVNNAAGPKNTKLQAASKAEDDFEIVPAPATDSSDDSSSDDSQADDAETKAEILACAKKMXRKKQRDQILDDAYNKYMFDDDGLPKWFLEEEKRHRQPIKPVTKEEIAAMRAQFKEINARPAKKVAEAKARKKRIAMKKLEKVRLLANCFSDQADIFERSKRKQIEQLYKKATPKKPQREYEV

SEQ ID NO: 81139 - protein, 101 aa, Gossypium hirsutum
  Clone ID: LIB3148-029-Q1-K1-B11.pep
PTRTTMSYLKGAAEMFENGVLAVVDVKFLADVHIRAFEDSSTIGRYFCFNQIVHTEEEAVKLVETLSPLLSSQPKYECQGSEAYAERLRTKKLNKLVEGTA

SEQ ID NO: 81140 - protein, 69 aa, Gossypium hirsutum
  Clone ID: LIB3146-005-Q1-K1-C6.pep
SYLKGAAEMFENGVLAVVDVKFLADVHIRAFEDSSTIGRYFCFNQIVHTEEEAVKLVETLSPLLSSQPK

SEQ ID NO: 81141 - protein, 54 aa, Gossypium hirsutum
  Clone ID: GOSHI-09MAY01-C24749_1.pep
GASVDCDGEKDDTKRSICQEEYVNGDEVGMLQREHRYHVTCIQNWLQTNVTYRA

SEQ ID NO: 81142 - protein, 126 aa, Gossypium hirsutum
  unsure (1)..(126): unsure at all Xaa locations
  Clone ID: GOSHI-09MAY01-C24769_1.pep
AKEARDDFQVWREEHSGEFSVRSAYKLLQEASMDPSSYLLQAETKNFYKKLWNLHLPXKITITIWRILWNFIPTLSNLRLKRVVANSFCPRCHNAEEDGIHVFLQCPGSSLSVAGREGGHYVVPFG

SEQ ID NO: 81143 - protein, 252 aa, Gossypium hirsutum
  Clone ID: GOSHI-09MAY01-C24699_1.pep
FVSKMASSLLVLATIFVLCSFGKATHPGLILTVVNNCPFTIYPAIQPNAGHPVLERGGFALHTLTHRSFPAPTVHWSGRIWARTGCTYSNGHFSCATGDCGHRIECNGLGGATPITIAQFSLHHGGHKDLSSYEVSLVDGFNIPMTVTPHEGKGLCPVVGCRANILATCPGKLQYRSPPHGPVVGCKSGCAAFGTDELCCRNHYNSPQTCRASSYSEFFKHACPATFTYAHDSPSLMHDCSSPRELKVIFCH

SEQ ID NO: 81144 - protein, 94 aa, Gossypium hirsutum
  unsure (1)..(94): unsure at all Xaa locations
  Clone ID: LIB3146-003-P1-K1-G9.pep
SAPGILLHFRPSLAQFSLYHGGHKDLSADEFSLVDGFNIPMTATPHEGKGLCPVVGCXANILTTCPGKLQYKSPAHTTAVGRKSVRAIFNTHKL

SEQ ID NO: 81145 - protein, 215 aa, Gossypium hirsutum
  Clone ID: GOSHI-09MAY01-C24679_1.pep
PSGPGNQTEDEVPLLQNIYWKELSSLVYVWIGFLIVQIIKEYLPTCSVMYWIVTSLQIPIAASVTIFEAICLCKGTRVIASKGKEITNWKMHRILLYCSCGIIAGMGGGLLGLGGGFILGPLFLELGIPPQVASATSTFSMVFSSSMSVVQYYLLDRFPVPYAAYFVLVATMAAIAGQHVVRRIIAFIVRALIIIFILALTFFINAITLCGVGIA

SEQ ID NO: 81146 - protein, 275 aa, Gossypium hirsutum
  unsure (1)..(275): unsure at all Xaa locations
  Clone ID: GOSHI-09MAY01-C24629_1.pep
VVQEEEESLFLKKTPLQKKLVEIMAKXGLRIXHDVERCLSLSVEERMRGLICNLIRLSKQRVDIEKPRHRTVITSDVRQQIMMMNQNARGEWEKKHAEAEKLRKLNEPEAETAFDGDKEKDDSRVKAVKVNKEEDDKMRTTAANVAARAAVGGDDMLSKWQLMAEQARQKREGGTDAASGSQASKDANRRPLSASGKSTKDNQESEKRGPLNPHGSGTSKKFGRNQGTTLTAHARVARTISIKDVIAVLEREPQMSKSTLIYGLYEKTCSESKAE

SEQ ID NO: 81147 - protein, 86 aa, Gossypium hirsutum
  Clone ID: LIB3829-011-Q6-N6-C9.pep
KMRTTAANVAARAAVGGDDMLSKWQLMAEQARQKREGGTDAAFGSQASKDANRRPLFASGKSTKANQEFEKRGPLNPHGSGSSCVL

SEQ ID NO: 81148 - protein, 211 aa, Gossypium hirsutum
  unsure (1)..(211): unsure at all Xaa locations
  Clone ID: GOSHI-09MAY01-C24009_1.pep
MEMTAASLTISPRKLPSDLYSYSYQNDAKTPLVMSVLASLIERTMARNERIAKNCKWALAKXAICRVFECQETPDMTIQSYLERIFRYTKAGPSVYVVAYVYLDRFRQANPGFRINARNVHRLLITIIMVASKYVEDMNYRNSYFARVGGLTTKELNKLEVEFLFMMGFKLHVNVTVFESYCSHLEREVSIGGGYHIERTLSFEVGASTEE

SEQ ID NO: 81149 - protein, 166 aa, Gossypium hirsutum
  unsure (1)..(166): unsure at all Xaa locations
  Clone ID: GOSHI-09MAY01-C24039_1.pep
MPPKFDPTQVVDVFVRVAGGEVGAASSLAPKIGPLGLXPKKIGEDIAKETAKEWKGLRVTVKLTVQNRQAKVMVVPSAAALVIKALKEPERDRKKTKNIKHNGNISLDDVIEIAKVMRPKSMAKDLRGTVKEILGTCVSVGCTVDGKDPKDLQEEISEGEVDVPLE

SEQ ID NO: 81150 - protein, 140 aa, Gossypium hirsutum
  Clone ID: GOSHI-09MAY01-C24349_1.pep
SIAQVFVAAYNKRLLRLPAEGQECGVFYDPPLKEYVLSKLPLTYQFRFLNKAAITTKNDLEDDGSPKKWRLRSIQDVEEVKCLVTIIPIWASGIISFTAMAQHGTFTLSQALKMNMHLGPKFQIPAGSMGVISTLTIGIF

SEQ ID NO: 81151 - protein, 93 aa, Gossypium hirsutum
  Clone ID: GOSHI-09MAY01-C24249_3.pep
MDKPLKRFPGMGHGLTSGEPDENIEIVFADITAWLDKRCNAVTFEQILRPLNQGFEKFDNAMVSMAATSGRTQSNGTYLCGLKRPRTQRRSAM

SEQ ID NO: 81152 - protein, 345 aa, Gossypium hirsutum
  Clone ID: GOSHI-09MAY01-C24249_1.pep
MAFEYQEDHIRNSRGTLLFTCRWLPLISSPKALVFLCHGYGMECSGFMRECGTRLAAAGYGVFGIDYEGHGRSKGARCYIKKFENIVNDCSNFFKSICAQEEYRDKSRFLYGESMGGAVALLLHKKDPSFWNGAVLVAPMCKISEKVKPHPVVVNILTKMEEVIPRWKIVPSKDVIDSAFKDPVKREAVRNNKLIYQDKPRLKTALEVLRTSMSIENGLNEVRLPFFVLHGEADTVTDPEVSKALYEKARSTDKTIKLYPGMWHGLTAGEPDENVEMVFADIIGWLDKRCNAVTLDQSLDPFDQGLEECSDNIVISMAKATGGTQANGRYLCGLKGPCARPHSAM

SEQ ID NO: 81153 - protein, 94 aa, Gossypium hirsutum
  Clone ID: uC-gsflnu33B132h01b1.pep
CSRVRPRVREKARSTDKTINLYPGMWHGLTAGEPDENVEMVFADIIGWLDKRCNAVTLDQSLGPFDQGSEECSDNIVISMATASGGTQANGRYL

SEQ ID NO: 81154 - protein, 116 aa, Gossypium hirsutum
  Clone ID: LIB3149-022-Q1-K1-D3.pep
KSKGDRCYIKKFDNIVNDCSEFFKSICAQEEYRGKSRFLYGEPDENVEMVFADIIGWLDKRCNAVTLDQSLGPFDQGSEECSDNIVISMATASGGTQANGRYLCGLKGPRARHSAM

SEQ ID NO: 81155 - protein, 209 aa, Gossypium hirsutum
  unsure (1)..(209): unsure at all Xaa locations
  Clone ID: GOSHI-09MAY01-C125991_1.pep
MVRKRVPDWLNSSLWSTTPADDRLHRCAPSPTTTTTTSSATVSEPTLQPPAPVPPPAAASKPQSTPTSPKLEIRDPVNRNSNNNSGGNDQNGDSSGVSPDDISRQAQLLAELSKKVINMWELRXIASQGIPDGAGIKSTVWKLLLGYLPPDRSQWSSELXKKRSQYRHFKKKLLMNPSKITRRLXESVGCDNDESKPEGRGLLSKSQIT

SEQ ID NO: 81156 - protein, 35 aa, Gossypium hirsutum
  unsure (1)..(35): unsure at all Xaa locations
  Clone ID: LIB3048-020-Q1-L1-H2.pep
HEQDCVRRRVMKSVMANPFCCETAAXDAMEAVWDI

SEQ ID NO: 81157 - protein, 61 aa, Gossypium hirsutum
  Clone ID: LIB3048-005-Q1-L1-E3.pep
KNRAFSYSMIQKGFVLELIEIKCLVKTGPSRSSVKRLWGINTRFPTNLQGNPFGWFRTKKV

SEQ ID NO: 81158 - protein, 84 aa, Gossypium hirsutum
  Clone ID: GOSHI-09MAY01-C25919_1.pep
ALGTRFTQFVQPVFQRCINIIQTQQLAKKQSTLKSIWHTLASFPASSYLRPPSIHLRSTSGPPPSSSSRKSRVCLFPNRQQIRI

SEQ ID NO: 81159 - protein, 85 aa, Gossypium hirsutum
  Clone ID: GOSHI-09MAY01-C25899_1.pep
MGTNYKAALIPQRIRDTIHGWGKAARRKRRLGRFTDDSTIHTETSTVMSLEEDDHQLIDIHEDDKDTYNEVELQPPPNVTSTPSP

SEQ ID NO: 81160 - protein, 61 aa, Gossypium hirsutum
  Clone ID: GOSHI-09MAY01-C25819_2.pep
AASTCVGRSFYSRGGVLDALNSFTQFARIASVEDSRREIAASFAHASHVTGRKHLFLLVIF

SEQ ID NO: 81161 - protein, 250 aa, Gossypium hirsutum
  unsure (1)..(250): unsure at all Xaa locations
  Clone ID: GOSHI-09MAY01-C25819_1.pep
MATSTMKTSFIAIILAGMVAGMVKAQCGNTCSATECCSRFGFCGTGDDFCGVNCRGGPCVNNGVSIAAIVTQEFFDGILNQAASTCVGRSFYSRGVFLDALNSFTQFARIGSVEDSRREIAAFFAHATHETGSKHLFLLVGGASXEYCDETXTDYPCNPSKGYYGRGTLQLTWNYNYGHRFRYRVQRLKTHRKPLANEPLYLPSKAAILVFGINNGGQALIKPKGSPGPLIPTPLIGRTFECPPGVGFRT

SEQ ID NO: 81162 - protein, 194 aa, Gossypium hirsutum
  unsure (1)..(194): unsure at all Xaa locations
  Clone ID: AI055037.1.pep
EFFDGILNQAASTCVGRSFYSRGVFLDALNSFTQFARIGSVEDSRREIAAFFAHATHETGSFCHIEEDGGASKDYCDETKTDYPCNPXKGSTGRGPLQLTWNYNYGPAGSXSGSTGLDAPETVANDPLISFRXAXWFWMNNVXXVMXQGFGATIRAINGDLECNVWDPTKVQSRINYYTHIGANWCRSWDYLSC

SEQ ID NO: 81163 - protein, 125 aa, Gossypium hirsutum
  unsure (1)..(125): unsure at all Xaa locations
  Clone ID: GOSHI-09MAY01-C25509_1.pep
TIASRDMDMARRTRTAQTVSDYSCNGRHAFTRTRELQRPLVGSILQSMWGVSPTHLLWSPTHNSTLVDYTWTVGQTPFGPFSKVMSLSFVQKXDATRKNFLLTSLNYNLTSAIDVLESIDAQGGV

SEQ ID NO: 81164 - protein, 86 aa, Gossypium hirsutum
  Clone ID: uC-gsflmaxxa040c07b1.pep
RDYHTILLLDRYHQSIAFRDMVIAVRTRTAQTVSDYSCNGRHVFTRTRELQRPLVGSILQSMWGVSPTHLLWSPTHNSTLVDYTWT

SEQ ID NO: 81165 - protein, 73 aa, Gossypium hirsutum
  Clone ID: GOSHI-09MAY01-C25489_1.pep
YLPNFMRNAVLDHRISGLYHPDLLLRNNNDKGNPVTEESILKFFQLAMTCCSPSPTLRPNSRRVLMMLEEIGK

SEQ ID NO: 81166 - protein, 102 aa, Gossypium hirsutum
  unsure (1)..(102): unsure at all Xaa locations
  Clone ID: GOSHI-09MAY01-C25469_2.pep
MIVNVKESTMVRPAGETPRRSLWNANVDLVVPRFHTPSVYFYRPNGAANFFDPQVMKEALSKALVPFYPMXGRLKRDEDGRIEIDCKWRRVLFVELKLILLL

SEQ ID NO: 81167 - protein, 163 aa, Gossypium hirsutum
  unsure (1)..(163): unsure at all Xaa locations
  Clone ID: GOSHI-09MAY01-C25469_1.pep
MIVNVKESTMVRPAGETPRRSLWNANVDLVVPRFHTPSVYFYRPNGAANFFDPQVMKEAXLSKALVPFYPMAGRLKRDQDGRIEIDCNGEGVLFVEAETNSVIDDFGDFAPTLELRQLIPTVDYSGGIFTYSLLGLQGNIFQMCGASLGVGCNICADGYLSHS

SEQ ID NO: 81168 - protein, 145 aa, Gossypium hirsutum
  Clone ID: GOSHI-09MAY01-C25439_1.pep
MTVEEADSSSKWSREQDKAFENALASYPEDFSDRWEKIAANVPGKTLEEIKEHYELLEDDVNRIESGCVPLPPYNSSESSAGDEGAGKKGSSHSGNCNSESNHGSKNSRSDQERRKGIAWTEDEHRLFLLGLDKYGKGDWRSISR

SEQ ID NO: 81169 - protein, 130 aa, Gossypium hirsutum
  Clone ID: LIB3493-026-P1-M1-D10.pep
KIAADVPGKTLEEMKEHYELLEDDINQIESGCVPLPPYDSSDGSAGHAGDEGTGKKGSSNLGHYNSESNQGSKSSRSDQERRKGIAWTEDEHRLFLLGLDKYGKGDWRSISRNFVVTRTPTQVACHAQKY

SEQ ID NO: 81170 - protein, 135 aa, Gossypium hirsutum
  Clone ID: LIB3165-050-Q1-K1-H11.pep
MAKLSLGSTFSIFHSRHIRPPLAGCHVTKMTVADHHPSLEVVGGARDRFLPSLHTNLRLPYNPFPLIAWNRHVETIFASFLRSIPQVRLRRECLRVKDGGSVALDWVSGDHRRLTPDSPVLILLPGLTGGSQDSY

SEQ ID NO: 81171 - protein, 90 aa, Gossypium hirsutum
  Clone ID: LIB3493-026-P1-M1-D8.pep
IPFLPCVHTNLRLPYNPFPLIDWNRHVETIFAYFLRSIPQVRLRRECLRVKDGGSVALDWVSGYHRRFSSDYTVLILLPDLTGGSLDSYL

SEQ ID NO: 81172 - protein, 87 aa, Gossypium hirsutum
  Clone ID: GOSHI-09MAY01-C25749_1.pep
PFNSLLSGYFQVYLHTAPLCHIGGLSSAMAMLMVGACHAFIPKFEATLALEAIEQHHVTSLITVPAMMADLISSVRLKRIQKGCDSV

SEQ ID NO: 81173 - protein, 97 aa, Gossypium hirsutum
  Clone ID: GOSHI-09MAY01-C25699_2.pep
GENEPCPKVGERIICRHPFSESQRAYVVPKRVEELLKCYWPGKSGKVREELPALKDIRDHCIKQLEQMRPDHIRRLNPTPYKVQSNDSNRVGGASLT

SEQ ID NO: 81174 - protein, 178 aa, Gossypium hirsutum
  Clone ID: GOSHI-09MAY01-C25699_1.pep
QGHEVDCYGILTYLVTCYAQAALGCVFKLVEINNQPRIKLSEDVSKVSIPCKKRCYRLYGREGYSLVDIMTGENEPCPKVGERILCRHPFNESKRAYVVPQRVEELLKCYWPGKSSKVREELPALQDIRDHCIKQLEQMRPDHVRRLNPTPYKVSVSAKLYDFIHFLWLNEAPVGELQ

SEQ ID NO: 81175 - protein, 201 aa, Gossypium hirsutum
  Clone ID: GOSHI-09MAY01-C25689_1.pep
MRTICDVCDSAAAIIFCAADEAALCRSCDEKVHMCNKLASRHVRVGLADPSNVPRCDICENAPAFFYCEVDGSSLCLQCDMIVHVGGKRTHGRYLLLRQRVEFPGDKPGRLEEPGLQPLSPDEVRKDLNQQSKLAVRENRQNRGVSHVPLLDDNAKGDGEVGNELIDLNARPQQVQGQASINQEQAMDVSSGNNHDSTVGS

SEQ ID NO: 81176 - protein, 150 aa, Gossypium hirsutum
  Clone ID: GOSHI-09MAY01-C25659_1.pep
ADLKFIVIKSLPRRQGFIPSLPEKTYAGDLRHLVLELNNQSKFPVKNLKMKISNPRFLNAGNQSYLNVEFSACLEKKLNVEQSVGHANAKKMLQNVFHFPEDISVQEETSLSWPLWFHAAVPGNISLYITVYYEMENVSSIMKFRTLRMH

SEQ ID NO: 81177 - protein, 98 aa, Gossypium hirsutum
  Clone ID: GOSHI-09MAY01-C25139_1.pep
MSGNAKLRRSVMFQAVLLVVLMLASSNAPVGDAIWLNVPPTGTKCVSEEIQSNVVVLSAYVVGSDDHGPVPPFSALVSFPSGHNLHLLVNVTHGQFAF

SEQ ID NO: 81178 - protein, 246 aa, Gossypium hirsutum
  unsure (1)..(246): unsure at all Xaa locations
  Clone ID: GOSHI-09MAY01-C25009_1.pep
MIRIAKNPKPLTTLTHQFLQRCTVSGTAKGKSKLKAGQPLKRSKISTKKGKGGASLDDSLPXSGRIPDEKQKLYDQCLNAPTPVRHLSPKERAREAXREKLGLISKERQREMEILKKGGRKAMGVPDEPMIMGTPGLDLITLGLVDADKIPKYELTVEDGRRLSKEYSRVLMRKHRARQAAETNLLRMKKEAIEALPEKLKEAAMIPDLTPFPANRLMASLTPPIEGYIEKVKEAAKKSSSKQKLR

SEQ ID NO: 81179 - protein, 94 aa, Gossypium hirsutum
  Clone ID: LIB3828-004-Q1-N6-C6.pep
YELTVEDGRRLSKEYSRVLMRKHRARQAAETNLLRMKKEAIDALPEKLKEAAMIPDLTPFPANRLMASLTPPIEGYIEKVKEAAKKSSTKQKLR

SEQ ID NO: 81180 - protein, 146 aa, Gossypium hirsutum
  Clone ID: uC-gsronu33B099h02b1.pep
MIRIAKNPKPLTTLTHQFLQRCTVSGTAKGKSKLKAGQPLKRSKISTKKGKGGASLDDSLPKGGRIPDEKQKLYDQCLNAPTPVRHLSPKERAREAEREKLGLISKERQREMEILKKGGRKAMGVPDEPMIMGTPGLDWIHWALSM

SEQ ID NO: 81181 - protein, 107 aa, Gossypium hirsutum
  Clone ID: GOSHI-09MAY01-C25349_1.pep
GAPWVLLVFSDLVIFIHSYESEYRGLRFVLRHPPPTAVVHWSPHCHCGSRLIWTRSGPRNKVSSGFIVQDDMGQILRSEYRIYTWASTICMVEAMAVLGCESSFEKI

SEQ ID NO: 81182 - protein, 189 aa, Gossypium hirsutum
  unsure (1)..(189): unsure at all Xaa locations
  Clone ID: GOSHI-09MAY01-C125291_1.pep
MANSMANGSRRVYRSLLCNPRTSQLSMPFCTTTPISSSAETSDSDSDPFPDFSSSQSSTPLESAKDSNTKSRLYDLPLENGFDTGIYKAILVGQVGQTPIHKKLKSGLSVTLFSLGTGGIRNNRRPHGNEEPVEYANRCAIQWHRVCVYQEHLGXFVLKHALPGTTLYLDGNLEMKVFTDPIXGMVRRL

SEQ ID NO: 81183 - protein, 82 aa, Gossypium hirsutum
  unsure (1)..(82): unsure at all Xaa locations
  Clone ID: uC-gsronu33B055d06b1.pep
GRRRGGRERGGERDKRREKEGGGKGEREKVKIRRRIESGEXREERREGKEGEEEGGENGKERWGGGXEEREEGGEGESCERG

SEQ ID NO: 81184 - protein, 572 aa, Gossypium hirsutum
  Clone ID: GOSHI-09MAY01-C25219_1.pep
ATSDIFLYRDSSLMPQNKSLRRASNWLTPGKNNAFLTYWLNARHCIGTTREPFCVTVNPDHTPKNTLLKWSTGHAIPSVAASKASLELGQIQGKRGIWFCGYDFNQDELKAGMDAAHGILGKHSSVLHSPKSMSPSFMETTARLFVTKFFQQYISMGCVILSEEGGRIFTFKGNMEKCPLKTVLKVHNPQFYWRIMKEADIGLADAYIHGDFSFLDETEGLLNLFRILVANKENSAASGSNKRRTWWSPALLTASISSAKYFVKHLLRQNTITQARRNISRHYDLSNELFTLYLGKMMQYSSGVFRTGEEHLDVAQRRKISSLIEKARIEKRHEVLDIGCGWGSLAIETVKRTGCKYTGITLSEQQLKYAQEKVKEAGLQDNIKILLCDYRQLPKEHQFDRIISVEMVEHVGEEYIEEFYRCCDQLLKEDGLFVLQFISIPEELSKEIQQTAGFLKEYIFPGGTLLSLDRNLSAMAAATRFSVEHVENIGMSYYHTLRWWRKLFLENTSKVLALGFDEKFMRTWEYYFDYCAAGFKTGTLIDYQVVFSRAGNFGTLGDPYKGFPSAYSFIDD

SEQ ID NO: 81185 - protein, 92 aa, Gossypium hirsutum
  unsure (1)..(92): unsure at all Xaa locations
  Clone ID: LIB3582-060-P1-K1-H1.pep
FVYLKEYIXPGGAVLSLDRNLSVMAGATRLSVEHVENIGMSYYYTLRWWRKLLLENTSKVIALGXDXKLMRTWEYYXDYLYXGFKTGTFIDY

SEQ ID NO: 81186 - protein, 88 aa, Gossypium hirsutum
  Clone ID: uC-gsronu33B032e09b1.pep
GLFFSQAGMDAAPGILGKHSSGLDCPKRMSPFFMGTTGRLFGTKFFQQYISMGCVIFLEEGGRIFTFQGNMEKWSLKTGLKGHYPQVY

SEQ ID NO: 81187 - protein, 78 aa, Gossypium hirsutum
  Clone ID: GOSHI-09MAY01-C25229_1.pep
QDLNFHATEEDPVTKKSIKRLILNIKPKDISSIIVGSPGEDPKMVANFKDLLQKIFVLDPQKRMTVTQALAHPFITGK

SEQ ID NO: 81188 - protein, 174 aa, Gossypium hirsutum
  Clone ID: GOSHI-09MAY01-C26989_1.pep
MDKMKLAQWGEKLKTGGAQMSRMVSGKMKEILQGPTPESKLVDEATLETLEEPNWGMNMRICSMINSEEFNGTEIVRAIKKKISGKNAASQRLSLDLLEVCTGNCEKVASEVASEKVLEEMVKMIQNPQTYHQNREKALDLIRAWGQSDDLAYLLVFHQTYMSLKDRSAQLPVR

SEQ ID NO: 81189 - protein, 143 aa, Gossypium hirsutum
  Clone ID: GOSHI-09MAY01-C26949_1.pep
RSYESYVVVMKVSAPIATHRGLKRAAIDLVTVLDISGSAMRLQMVKRAMRLIISLLDEKDRLSIVIFSSSSKRLLPLKRMSSGGRRSARRIVDALGSNRQGMSVNDALKKAAKVLEDRREKNAVASVMILSDCHDKQSQSNPT

SEQ ID NO: 81190 - protein, 175 aa, Gossypium hirsutum
  Clone ID: GOSHI-09MAY01-C26819_1.pep
MGSCASVHKSSQESAMKVGLSLGSKTDNIIIPPSPVKEKSDAVNGSKDETFFDSRAYLDSDWDDDFLSVSGDFTPSRGNSPVHHNSISIGVPKIHKAIDEGSPGSCSEASPGKKKKLVELFRDSVKEDQDVNELNTSINQHTANGKLECKPTIQDILPQNLPTVPLMSLKLILSA

SEQ ID NO: 81191 - protein, 126 aa, Gossypium hirsutum
  unsure (1)..(126): unsure at all Xaa locations
  Clone ID: AI726915.1.pep
GDTLLYPAHPRHQGXDGCXRFPHIQAPSCXWCXRLPHFXATEVPMLPEAPAHPSHQGADGARGSRTTKGRGXDGGRGPRTTKGLFCRWCPSLSHDQGFRLPMVPEVPAHPSTKVSMVHEAPARQRA

SEQ ID NO: 81192 - protein, 124 aa, Gossypium hirsutum
  Clone ID: LIB3048-015-Q1-L1-F11.pep
VADSVRGSRPSEQRGADGARGSRTTKGLGCRWCPRLPHIEAPRCRWRPRLLQYQGLSLPMVSGAPAHPNTKVPMVPEASGRPKAYATGTVQRNTDGTVRRSTVGTDRPSTTGNLTGSWGAPTSG

SEQ ID NO: 81193 - protein, 140 aa, Gossypium hirsutum
  unsure (1)..(140): unsure at all Xaa locations
  Clone ID: GOSHI-09MAY01-C26529_1.pep
AFDMLHLADAVGVDDKFWVLGYSGGSIHAWAALRYVPHRIAGAAVVAPMINPYEPSMTKEEMRSIWGESLPRRKLMYYLARRLPKLLSCFYRRSFLSGKHGRVEKLMSVSLGRPDEILTEGAXLKTFWHRDGEESVRQGN

SEQ ID NO: 81194 - protein, 66 aa, Gossypium hirsutum
  unsure (1)..(66): unsure at all Xaa locations
  Clone ID: AI054605.1.pep
TQEAYSSNKKVPTSMVLKLKEKTETNSIISFYGMKIIRNKFNFTSGILSLPSCRIHTAXRSDVVEG

SEQ ID NO: 81195 - protein, 72 aa, Gossypium hirsutum
  Clone ID: LIB3048-011-Q1-L1-H4.pep
VFYQLNLNINIVLVKLKYVIQVITNKKTRQLKNVVVKLKYVIQVITKDSGLIMSPGSELKYFSTIINEISSA

SEQ ID NO: 81196 - protein, 247 aa, Gossypium hirsutum
  unsure (1)..(247): unsure at all Xaa locations
  Clone ID: GOSHI-09MAY01-C26699_1.pep
MGFSLKLQYCLVSVMVLLPAVCYSQDYFVKSRATYYGSPDCLGTPSGACGFGEYGRSVNDANVAGVSRLYKNGTGCGACYQVRCTNPQICADNGVNIVVTDYGEGDNTDFILSPPAYARMARPDTAAHLFAYGVVDVEYQRIPCQYGGYKTQVKVHEHSKYPNYLAIVVLYQAGXSEILSVDIWQEDWXEWIGMTRAYXTVFDMANLPSGDIXLMFPVRGIAGLTLLQAPNGIPKYWKAGVAYETDI

SEQ ID NO: 81197 - protein, 90 aa, Gossypium hirsutum
  unsure (1)..(90): unsure at all Xaa locations
  Clone ID: AI054544.1.pep
CQYGGYKTQVKVHEHSKYPNYLAXVVLYQAGKSEILSVDIWQEDCKEWIGMXRAYXAVFDMANLPSGEHQLRVQVAGSAGLXWVQAPMSS

SEQ ID NO: 81198 - protein, 119 aa, Gossypium hirsutum
  Clone ID: AI054456.1.pep
TGAHLFAYGVVDVEYQRIPCQYSGYKTQVKVQEHSKYPNYLAIVVLYQAGKSEILSVDIWQEDCKEWIGMRRAFGAVFDMANPPSGEHQLRFQVRGSAGLTWVQAPNVIPKYWKAGSCL

SEQ ID NO: 81199 - protein, 82 aa, Gossypium hirsutum
  unsure (1)..(82): unsure at all Xaa locations
  Clone ID: AI055270.1.pep
MGFSLKLQYCLVSVMVLLPAVCYSQDYFVKSRATYYGSPDCLGTPSGACGFGELEESVNDANVAGVSRLYKKWTACGXLYQV

SEQ ID NO: 81200 - protein, 133 aa, Gossypium hirsutum
  unsure (1)..(133): unsure at all Xaa locations
  Clone ID: AI055299.1.pep
DYGEGDNTDFILSPPAYARMARPDTGAHLFAYGVVDVEYQRIPCQYSGYKTQVKVQEHSKYPNYLAIVVLYQAGKSEILSVDIWQEDCKEWIGMXRALAXVFDMANPPSGDISLRFQVRGSAGLHGCMPGCHS

SEQ ID NO: 81201 - protein, 75 aa, Gossypium hirsutum
  Clone ID: LIB3145-015-Q1-K1-G10.pep
MGFSLKLQYCLVSVMVLLPAVCYSQDYFVKSRATYYGSPDCLGTPSGACGFGEYGRSVNDANVAGVSRLYKNGTG

SEQ ID NO: 81202 - protein, 398 aa, Gossypium hirsutum
  unsure (1)..(398): unsure at all Xaa locations
  Clone ID: GOSHI-09MAY01-C26659_1.pep
MGISKRLLSSFALLVTCILLFVCVKASAEKTELNSRLSEENKLQGLKNSSMEEGLEDEQWINEHSVDNPEEIASMVHMSIRNSTERRKLGYFSCGTGNPADDCWRCDRHWYLRRKNLANCGIGFGRNAIGGRDGRYYVVTDPRDDDPVNPKPGTLRHAVIQDRPLWIVFKRDMVIRLKQELIMNSFKTIDGRGANVHIANGACITIQYVTNIIIHGIHIHDCKPTGNAMVRSSPSHYGWXTMADGXMALPCFGASHIWADHNSLSNCADGLIDAIMGSTAITISNNYFTHHNEVMLLGHSDSYVRDKQMQVTVAYNHFGEGLIQRMPRCRHGYFHVVNNDYTHWEMYAIGGSANPTINSQGNRYLAPFNRFAKEVTKRVERSKSKWRHWXWRSEGDMF

SEQ ID NO: 81203 - protein, 59 aa, Gossypium hirsutum
  unsure (1)..(59): unsure at all Xaa locations
  Clone ID: LIB3048-028-Q1-L1-E1.pep
GLIDAIMGSTAITISNNYFTHHNEVMLLGHSDSYVRDXQMQVTVAYNHFGEGLIQRMPR

SEQ ID NO: 81204 - protein, 120 aa, Gossypium hirsutum
  Clone ID: GOSHI-09MAY01-C26619_1.pep
IFIEIPKIPSTTLFFLFGFIPFSPRSNVSKRITHISKKCRNSRPSRKKCGCFLVNLHICFNYLPYSSRVMEAIIITAIAPIIRNNKKKVVNQHNFSLQKLSFWFAPTTRPPGLLSFTPGS

SEQ ID NO: 81205 - protein, 131 aa, Gossypium hirsutum
  Clone ID: GOSHI-09MAY01-C26199_1.pep
MVRQSRLILSLLGAVLVLLVIGNALRLAKANNSASAFVQNAIFSNKIVMFSKSYCPHCMRAKRIFAELNEKPYVVELDLRDDGAEIQYVILDLVGRGTVPQVFVNGKHIGGSDDLSDAVHNGTLQSLLAAS

SEQ ID NO: 81206 - protein, 133 aa, Gossypium hirsutum
  unsure (1)..(133): unsure at all Xaa locations
  Clone ID: GOSHI-09MAY01-C26189_1.pep
EREFQAEVEIISRVHHKHLVSLVGYCISGTIRMLVYEFVPNNTLEFHLHGKGRLTMDWPTRMKIALGSAKGLAYLHEDCHPKIIHRDIKAANILLDFKFEAKVADFGLAKIASDVNTHVFTRVXGGTFGYLTP

SEQ ID NO: 81207 - protein, 109 aa, Gossypium hirsutum
  Clone ID: GOSHI-09MAY01-C126181_1.pep
ILVVVQGTLYVGFVTSNPDNRLFTKVLYPGDVFVFPLGLIHFQFNIGHTNAVAFAALSSQNPGVVTIASAVFGSDPDINPDVLAKAFQLDKNIVNQLQSRFWSDNDSRN

SEQ ID NO: 81208 - protein, 147 aa, Gossypium hirsutum
  Clone ID: GOSHI-09MAY01-C26159_1.pep
NTARIIIIVVASVGGIPILIASSICIIRRARKTPQQLLRTDDDEVIRADSLQFDFATVRAATNNFSDANKLGQGGFGAVYKGQLPNGEEVAVKRLARDSGQGDLEFKNEVLLVAKLQHRNLVRLLGFCLEGHERLLIYEFVPNTSLD

SEQ ID NO: 81209 - protein, 125 aa, Gossypium hirsutum
  Clone ID: GOSHI-09MAY01-C26129_1.pep
QWLLAYVDLSRDAMALDPPDFIGGCEVLERALKLLQEEGASSLALDLQSQIDETLEEITPRCVLELLALPLDDAYRTKRAEGLYGVRNILWAVGGRGAAAIAGGFTRERFMNQAFLCMTTTEQGD

SEQ ID NO: 81210 - protein, 182 aa, Gossypium hirsutum
  Clone ID: GOSHI-09MAY01-C26099_1.pep
MNSNHLLLEEPIRMASILEPSKPSFFPAMTKIVGTLGPKSRSVEIISDCLKAGMSVARFDFSWGDIEFHQETLENLKTAVKSTRKLCAIMLDTGGPELQVVNKTEHPISLEADTKVILTPDQDKPATSNLLPINYHGLSKAVKKGDTIFIGQYLFTGNETTSVWLEVDEVCSEDVVCLIKNS

SEQ ID NO: 81211 - protein, 91 aa, Gossypium hirsutum
  Clone ID: GOSHI-09MAY01-C26089_1.pep
EKYDAKGWTEKGAHKYGRLNEQSWWEKWGEHYDGSGSVLKWTDKWAETELGTKWGDKWEEKFFAGIGSRQGETWHVSPSGERMYSHFIFCV

SEQ ID NO: 81212 - protein, 151 aa, Gossypium hirsutum
  Clone ID: GOSHI-09MAY01-C26399_1.pep
KMLYDGRPVDLTPEQEEVATMFAVVQETDYMSKPQFKKNFWEDWSKLLGRNHVIKSLDKCDFTPIYEWHLQEKEKKKQMSSEEKKALKEEKLMHEEKDMWAIVDGVKEKVGNFRVEPPGLFRGRGEHPKMGKLKRRIRPCDITINIGKDAP

SEQ ID NO: 81213 - protein, 258 aa, Gossypium hirsutum
  unsure (1)..(258): unsure at all Xaa locations
  Clone ID: GOSHI-09MAY01-C26339_1.pep
FLKPHCLPLFITLFSLSLSSCLGSYREHPLHPKPYHPYFHTFGVSNKPNYPTLNSADLFNYNIEIRTSAPKVVNVDDFGAKANGRDDSQAFKKAWNYACSSSQGAIMVVPKKKIYRLKPINFSGPCKSPLLLKIYGTLEATEDHSDYQDNGRRWLYFDNVENLRVEGGGIIDGNGKTWWEKSCKVNKALPCKEAPTAVTFNECTNLRVSSLRIKDAQQMHVIFQKCVNVKAFNLLVTAPGNSPNTDGXPWHVTGTQNI

SEQ ID NO: 81214 - protein, 118 aa, Gossypium hirsutum
  Clone ID: LIB3048-023-Q1-L1-C4.pep
SYMVFLKTLCLPLVITFLSLSSYCFGLGRYREEDPFHVDFRRGRAYHHPTSYRHPYFRTFGVRGQRNYHNPYYNNEIQSRLDRPSGAATPKVVNVHDFGAKSNGRDDSHAFKKARNYA

SEQ ID NO: 81215 - protein, 272 aa, Gossypium hirsutum
  Clone ID: GOSHI-09MAY01-C26219_1.pep
MASGEGFLTEEQREVLKIASQNAETPLPSPGLSSSPKSPTSLLSDQQLKVPVGGKAPTGGIAVRHVRRSHSGKSIRVKKDGAGGKGTWGKLLDTDGESHIDRNDPNYDSGEEPYQLVGSTISDPLDEYKKAVVSIIEEYFSTSDVEVAASDLKDLGSSEYHPYFIKRLVSMAMDRHDKEKEMASVLLSSLYADVISPPQIRDGFGMLLESADDLAVDILDAVDILTLFVSRAVVDEILPPAFITRAKKTLPESSKGYQVLQTAEKSYLSAPH

SEQ ID NO: 81216 - protein, 201 aa, Gossypium hirsutum
  Clone ID: GOSHI-09MAY01-C26209_1.pep
NIRVSEENPICNIALKAEDKDFETNLSDSSAFENQLLEEEDESQEVLSDRSIVPGLIASPWLHAKMTCNPGLAGGSSKRKRMNSFALLSRANTKNNSPTKQAHQGLSQVVIWNKKDSLQQDVLYTNDSSTQRSYGNNVSLPPCRTSTGRASDAMTSRNKVREILRLFQDICQKLLHEEESKINGEGKTLKRVDFLAAKILK

SEQ ID NO: 81217 - protein, 91 aa, Gossypium hirsutum
  Clone ID: GOSHI-09MAY01-C126201_1.pep
LGGVHKSIILKGICCNTSNPPRPRTRGPLSDVMPVDSPNILQTSQDCTSTDVREFLGEFTQKLRNIKARPPFKILSKLWSPTVLSPAPARD

SEQ ID NO: 81218 - protein, 41 aa, Gossypium hirsutum
  Clone ID: GOSHI-09MAY01-C27989_1.pep
MASVLLYHVVGDLTVGKPELVEFCDVETVESAIRAIGGSTE

SEQ ID NO: 81219 - protein, 136 aa, Gossypium hirsutum
  Clone ID: GOSHI-09MAY01-C27749_1.pep
KHEFHLQCILEWWQRSSQCPMCWQPISLKDPTSQELLEAAERERSFRFNPSRNAAIFHHPTLVDFELQHLPLGTNDAELDERIIQHLAAAAAMGRARHIAWREGMRNRSSIQGRPQFLVFSTHPNAPSTVPISSLV

SEQ ID NO: 81220 - protein, 238 aa, Gossypium hirsutum
  Clone ID: GOSHI-09MAY01-C27719_1.pep
MFSLNTTTTRLTPADMTKKFPPLGTTTSFTSASSTTSFTPVGLTTSSIAAGSNSSFSFGLSTANFTSSSATNSFSSSNMTSSFASPWSTGAFSNSQSPFLFGTQSSVSVDNNAADDADDENELPQPSSPSVKKSEEKGIVVVHEVKCKLYVKSTDPEDKDSWKDKGTGQLSIKCKEGISKGSKDSKPTIVVRNEVGKLLLNALLYPGIKTSAQKNSLVAIFHTSDEGGDNQEVVARTF

SEQ ID NO: 81221 - protein, 281 aa, Gossypium hirsutum
  unsure (1)..(281): unsure at all Xaa locations
  Clone ID: GOSHI-09MAY01-C27609_1.pep
MSNTHQEAIKQFLSLMGNVDEKLNDTFQNMHHGYPTETLARFLKARDWDVPKAHKMLIDCLQWRLQNEIDNILSKPIIPADLYRAVRDSQLVGLSGYSKEGLPVIAIGVGLSTYDKASVNYYVQSHIQMNEYRDRVVLPTATEKYGRHISTCLKVLDMTGLKLSALNQIKILTTISTIDDLNYPEKTQTYYIVNAPYIFSACWKAVKPLLQERTKRKIQVLQGSGKDELLKIMDYSSLPHFCRKEGSGSXRHSSDGTGDNWFSVDHTYHQQLYTYIKHQAT

SEQ ID NO: 81222 - protein, 172 aa, Gossypium hirsutum
  unsure (1)..(172): unsure at all Xaa locations
  Clone ID: LIB3584-011-P1-K1-D11.pep
DYYVQSHVXXXRCRDRVVLXPAATQKYGKHISTCLKVLDMTGLKLSALNQIKLLTTISTMGGGGYPYLTETYYIVNAPYIFSACWKAVKPLLQERTKRKIQVLQGCGRDELLKVMDYSSLPHFCRKEGSGSSRNRSNGTIDNCFSLDHSYHQQLYNXIRHQANLIESGRPIK

SEQ ID NO: 81223 - protein, 104 aa, Gossypium hirsutum
  Clone ID: LIB3493-048-P1-M1-E7.pep
ACIIVSNSKEHLPVIAIDVHLNTYDKPYLNYYVQSHIQMNEYRDRVVLPTATENYGRHIITCLTVFYMTGLKLSALHQIKILTTISTIDYSNYPEKTQTYYIVN

SEQ ID NO: 81224 - protein, 125 aa, Gossypium hirsutum
  unsure (1)..(125): unsure at all Xaa locations
  Clone ID: GOSHI-09MAY01-C27139_1.pep
YVYIRVTDKCWGLNMHEPIIWALVDLYNNLHLEQIPQSSNGTQVDPEIPVDLTHISEVRLKXSLETAPAQRPHGVLRVRSPILSARGNAFRIQGHLTEGDAQRQIHAEKFHSSCSCKPYLARFDS

SEQ ID NO: 81225 - protein, 76 aa, Gossypium hirsutum
  Clone ID: GOSHI-09MAY01-C27129_2.pep
WLKQLSTWEMCECRIGECFTWICEIGKKIYEFCLIMLLIRLLTRLILVSSSVGSVIASRNNSQEVACTSEDPLYPC

SEQ ID NO: 81226 - protein, 96 aa, Gossypium hirsutum
  unsure (1)..(96): unsure at all Xaa locations
  Clone ID: GOSHI-09MAY01-C27129_1.pep
MPQTSYSAEAFGVLTICLVALLVLLGLVCIAYLFYLHSHVLRQGFIQLSYFNGPWIIRITXILFTIWWGFGEIIRLNFLRRQGRVLNALKLKWQEN

SEQ ID NO: 81227 - protein, 115 aa, Gossypium hirsutum
  Clone ID: GOSHI-09MAY01-C27369_2.pep
NCLIYGEIPEYIGDVKKLKTLDLSYNNLTGEIPGSFHKLTKADFLYLTGNQLTGSVPQWIVERNTNADLSYNNFTWEPASPIECPRGSVNLVESYSTSVDKLLSYLGAQVGFLHV

SEQ ID NO: 81228 - protein, 161 aa, Gossypium hirsutum
  Clone ID: AI054571.1.pep
SVPQWIVERNKNADLSYNNFTWEPASPIECPRGSVNLVESYSTSVDKLSRVPSCLRHNFPCSVSSKQYKYSLHINCGGKELNISGDTTYEADIEPRGASMFYPGHGWALSSSGNFMDNDIDAGSIQSYPILLLLSNVSCIPFSTIYNSSYSSLSLTYMDSA

SEQ ID NO: 81229 - protein, 147 aa, Gossypium hirsutum
  unsure (1)..(147): unsure at all Xaa locations
  Clone ID: GOSHI-09MAY01-C27249_1.pep
ASLVRFREKRKERCFDKKIRYTVRKEVAQRMHRKNGQFASLKESTSTSSWDSSQTDLQDGTPRPKTVVRRCQHCGVSENNTPAMRRGPAGPRTLCNACGLMWANXGTLRDLSKGGRSISMDQNEPETKIDVKPSIMEGNFPGNQDEH

SEQ ID NO: 81230 - protein, 135 aa, Gossypium hirsutum
  Clone ID: GOSHI-09MAY01-C27239_1.pep
SEEEFKYLLVQHRQPVEPEHMSFRSSEDDGVDVGSMVSFGDESFEESARMDSVSRTSEECIIDLVHPDVIHDLKFIANSMFMSNYDHECRQAYVIVRKDALDECLFDLEIEKFSIEDVLKMKWGTFDSKIKRWVR

SEQ ID NO: 81231 - protein, 67 aa, Gossypium hirsutum
  unsure (1)..(67): unsure at all Xaa locations
  Clone ID: GOSHI-09MAY01-C20959_2.pep
MSEAPFXPREKLIEYQKYFQGIHKHTYLKGPYDKITSVAIPAALAASSLFLIGRGIYNMSHGIGKKD

SEQ ID NO: 81232 - protein, 67 aa, Gossypium hirsutum
  Clone ID: GOSHI-09MAY01-C20959_1.pep
MSEAPFRPREKLIEYQKYFQGIHKHTYLKGPYDKITSVAIPAALAASSLFLIGRGIYNMSHGIGKKE

SEQ ID NO: 81233 - protein, 67 aa, Gossypium hirsutum
  Clone ID: uC-gsronu33B005e10b1.pep
MSEVPFRPREKLIEYQKYFQGIHKHTYLKGPYDKITSVAIPAALAASSLFLIGRGIYNMSHGIGKKE

SEQ ID NO: 81234 - protein, 67 aa, Gossypium hirsutum
  Clone ID: LIB3272-019-P1-K1-G5.pep
MSEAPFRPREKLIEYQKYFQGIHKHTYLKGPYDKITSVAIPAALAASSLFLIGRGIYNMSHGIGKKD

SEQ ID NO: 81235 - protein, 271 aa, Gossypium hirsutum
  unsure (1)..(271): unsure at all Xaa locations
  Clone ID: GOSHI-09MAY01-C120931_1.pep
SFRPAGYIMELHCSEKNGMQMTKKFVYCTDHRSPNPDAVVVMHTPSGVFAARNVLQNVNDCPRGSRLISSKNAELPESPALDTNDFDACSAARCRVFARSKFKGAETEPIFHSPSGPSHHHIDALRALSTYKEVDDSTVFSSFKDRLYQLQRTENHRVCFGKSGIHGWGLFARKNIQEGEMVVEYCGEQVRXYVANLREAQYRSEGKDCYLFKISEEVVIDATNKGNIARLINHSCTPNCYARIMSVXGDEKXRIVLIAKTDVSAGDELTS

SEQ ID NO: 81236 - protein, 195 aa, Gossypium hirsutum
  unsure (1)..(195): unsure at all Xaa locations
  Clone ID: AI725706.1.pep
RNVLQNVNDCPRGSRLISSKNAELPESPALDTNDFDACSAARCRVFARSKFKGAETEPIFHSPSGPSHHHIDALRALSTYKEVDDSTVFSSFKDRLYQLQRTENHRVCFGKSGIHGWGLFARSNIHEREMGGEYCGNQVTRSVANLREAQYPSXGKDCYLFKFTEDFLIDAPXKGIIAPLIPFFLCPPNWFCQVH

SEQ ID NO: 81237 - protein, 257 aa, Gossypium hirsutum
  Clone ID: GOSHI-09MAY01-C20909_1.pep
MQLLVQGEEFAADYSGHQYGFPNATRKTDEEDEPKWKSHFKSGIPPPYVKPSTKPKDHRHDANVGSSLAGFDSNGVDAPVPRRRSSRRRHSKSTSGLTEVDNAEDTESARRKHRSRRRDDSRRGLQILFDDEQHKDDEEERIIDKLLIHYSKKPPSGEEGKIRRKSKSRHAHHMGSDVCEAPQKSSRDTSDDMSETISRPARSISLPPAQTAESKGTKVYARASSFESDRSSAAQHVHPKLPDYDDLAAHFAAMKGR

SEQ ID NO: 81238 - protein, 60 aa, Gossypium hirsutum
  unsure (1)..(60): unsure at all Xaa locations
  Clone ID: LIB3148-032-Q1-K1-A6.pep
LLFFYSQFLFKNLLQKKLYLSFKVYLNITFIYSISLIMILVHFFXKRISKYINASYSRWS

SEQ ID NO: 81239 - protein, 111 aa, Gossypium hirsutum
  Clone ID: GOSHI-09MAY01-C120901_1.pep
LRVRSLLLSPPLPSSFRLGFLNPSSPAVLHSSTMDSGRGSIKRAFQPLIKPRLKAKPSRPGQSRLGGFPLSLWSLNPMSEGGVPATRFDSSGVNAGGSREAHGWYGAKQKG

SEQ ID NO: 81240 - protein, 93 aa, Gossypium hirsutum
  Clone ID: uC-gsronu33B163f11b2.pep
LNPSSQVVLHWSTVDGGLGSIERAFQPLIKPRLKAKPSRPGRSRSGGFSLSLWSSNPMMEGGVPATRFGKFLFPSFFIYFKPLFYKEKDLQNN

SEQ ID NO: 81241 - protein, 302 aa, Gossypium hirsutum
  Clone ID: GOSHI-09MAY01-C20929_1.pep
ESLHILNELMVKREKEKAELEKELEIYRKKVQDHEAKERMMMLRRRKEDSIRSASSASCSNAEDSDGVSVDWNHESKEEDSFENHQIREDVNQNTPADAVLYLEESLANFEEERLSILEQLKVLEEQLISLNDEEEQQHFEDIKSVEYLYEENGNGFHEIHNFGHETNGVANGHFKGVNGKHHQDKIIPVATKAKRLLPLFDATDAETEEKILNGHENGFNSVALQHTLPELENKMITIEEEVDHVYERLPALEADREFLKHCISSLRKGDKGIYLLQEILQHLRDLRSVELRVRSNGDAAI

SEQ ID NO: 81242 - protein, 276 aa, Gossypium hirsutum
  unsure (1)..(276): unsure at all Xaa locations
  Clone ID: GOSHI-09MAY01-C20859_1.pep
GESKLHIIDISNTYCTQWPTLLEALATRSDDTPSLRLTTIVTXQKRRRFNIRRWSRRPKVRKEIGKRMEKFARLMGVPFKFNVVHHTGDLYDLDLSNLDVKDDEALAINCVGTLHSIMDTSRDIVISSFRRLKPRVITVVEEEADLDIGVDGVDFIKGFHECLRWFRVYFEALDESFNRTSNEKLMLERAAGRAIVDLVACSPSESIERREPAARWSRRFHASGFSPVGLSDEVCDDVRALLRRYKDGWSMTQCPDAGIFLSWKDQVVVWASAWRP

SEQ ID NO: 81243 - protein, 42 aa, Gossypium hirsutum
  Clone ID: uC-gsronu33B027c07b1.pep
WMKEDCSRGVFYFFKDSTQRFKLKCNLNDDAFINPTVEPFLT

SEQ ID NO: 81244 - protein, 155 aa, Gossypium hirsutum
  Clone ID: GOSHI-09MAY01-C20589_1.pep
KSLSPDTIDTNEVEDGELNEPQVATNEEGDATDELLMYSNEDEYEEFNLRIVHRKNRTGFEENKDLPIVLNSVIAGRYYVTEYLGSAAFSKVVQAHDLLTGIDVCLKIIKNDKDFFDQSLDEIKLLKLVNKHDPGDEYHILRLYDYFYHQEHLFI

SEQ ID NO: 81245 - protein, 127 aa, Gossypium hirsutum
  Clone ID: GOSHI-09MAY01-C20579_1.pep
MNKKALAILMRARMRPNHLTNFALSPISNELNQILSNSHGNRSGENGEHHAMEHGKETLNHQRSFEVVRESMHSVISMNKTEVGDSVLNEFLEGYWSLSFENRRKLLLTLAKEYYLNKAQIRELIKQ

SEQ ID NO: 81246 - protein, 222 aa, Gossypium hirsutum
  Clone ID: GOSHI-09MAY01-C20499_1.pep
MAITFSDLHTESGLKSLNDFLTGKSYISGDKLTKDDIKVYAAVLKNPGGSFPNVSQWYNCVSSHLASSFPGKAVGVSLGGKADPAQSAEAKSPAADDDDDDLDLFGDETEEDKKAAEEREAAKKSAKKKESGKSSVLMDVKPWDDETDMKKLEEAVRSVEMPGLLWGASKLVAVGYGIKKLQIMLTIVDDLVSVDTLIEEHLTVEPRNEYIQSCDIVAFNKI

SEQ ID NO: 81247 - protein, 183 aa, Gossypium hirsutum
  unsure (1)..(183): unsure at all Xaa locations
  Clone ID: LIB3829-019-Q6-K6-A3.pep
NIHRLWRTNSNLHTXSGLNALIDFLTGQTYICGDKLPKDDIKFMLLFXKNPGGSFPNVSQWYNCVSSHLASSFPGKAVGVSLGGKADPAQSAEAKSPAADDDDDDLDLFGDETEEDKKAAEEREAAKKSAKKKESGKSSVLMYFIPWDDETDMKKLEEAVRSVEMPGLLWGASKLVAVGYGIK

SEQ ID NO: 81248 - protein, 76 aa, Gossypium hirsutum
  Clone ID: LIB3149-029-Q1-K1-A2.pep
LIKGLLTGFSSLGAFLSSPGSTATRFQVSSVATAAGSLSSPNELDQLCQQVKRHAFPREASSEMERHTVIPLAHIG

SEQ ID NO: 81249 - protein, 111 aa, Gossypium hirsutum
  unsure (1)..(111): unsure at all Xaa locations
  Clone ID: GOSHI-09MAY01-C20429_1.pep
MASQSSKAAGTAAPPPEVAATGEAAPGAASSTPAQNPNAAATAVAGATALEKMMRRAERFGMPVLMSDEEKRSQXAAVEDVFGGTGSSSVKEEEKKKSRAETFGLASPSSS

SEQ ID NO: 81250 - protein, 227 aa, Gossypium hirsutum
  Clone ID: GOSHI-09MAY01-C20789_1.pep
GESAPDPGLMDEVVPDEIDREDPLNDSREMLSRSLGRDDSGSKVDGSAKAESIESGEKISQSCKVILDNNAHPSLSCNANVYSGNETTKEIKNAGKSSCINNCTYPDSDLAVATGIGPPKGESNYEEAIEFDPIIHHNQFCLWVNGNVAAAGCSGYSSSTSCSNADVVALCGWQLTLDALDALRSLGHIPVQTVQSESAASLHKDDQQTPGRSLLQRHSVNKSHGQH

SEQ ID NO: 81251 - protein, 94 aa, Gossypium hirsutum
  Clone ID: GOSHI-09MAY01-C120791_1.pep
NEKFTFSIQKPLFLFFLPLVQYSYWLFIAGITEKNQNKRPPKSNLLSPFSRIFVAFFCCCCLFADLEASLEQRTEVHTRVKAQLARRKLWPLRR

SEQ ID NO: 81252 - protein, 157 aa, Gossypium hirsutum
  unsure (1)..(157): unsure at all Xaa locations
  Clone ID: GOSHI-09MAY01-C20759_4.pep
VQSGAPEPEQICDDDNNNQLAEENIEGDITKLTGRQKKLFELRLKMNEARKANQTAMVAEKKRMEAPPESRGISKQKWLEERKKKIGKLLDANGLDLQKAYMLDTQEAAEAKYKKWEKDPAPFGWDXVFNQKTLYNAYKKRTKNIDIDLEEYNKMKE

SEQ ID NO: 81253 - protein, 134 aa, Gossypium hirsutum
  unsure (1)..(134): unsure at all Xaa locations
  Clone ID: GOSHI-09MAY01-C20759_3.pep
MEEDRRVHPDCINASNPYHECVEYCFRKIVEAKAKKGSRKTRNRATXHDQPVRCVAYQEQDVQSGAPEPEQNSDDDNNNQLAEENIEGDITKLTGRQKKLFELRLKMNEARKANQTAMVAEKKRMEAPPESKGT

SEQ ID NO: 81254 - protein, 99 aa, Gossypium hirsutum
  Clone ID: GOSHI-09MAY01-C20759_1.pep
EEYNKMKESDPEFFREASSLQYGKAPKVSEDKIDKMVKELKDREEKRKSFSRRRKFHDEKDIDSINDRNEHFNKKIERAFGKYTLEIKNNLERGTALPD

SEQ ID NO: 81255 - protein, 113 aa, Gossypium hirsutum
  Clone ID: uC-gsronu33B055f02b1.pep
PTSSLDITKLTGRQKKLFELRLKMNEARKANQTAMVAEKKRMEAPPESRGISKQKWLEERKKKIGKLLDANGLDLQKAYMLDTQEAAEAKYKKWENDPAPFVCDCLQQTILFI

SEQ ID NO: 81256 - protein, 117 aa, Gossypium hirsutum
  Clone ID: GOSHI-09MAY01-C20739_1.pep
VNQKGVMLDWVKKLHQDGKLSLLVDKDLKGNFDRIELEEMVQVALLCTQFNPLHRPRMSEVLRMLEGDGLAEKWEASQMIKTPKLRSCDNDNPPQRYSDFIEESSLVLEAMELSGPR

SEQ ID NO: 81257 - protein, 153 aa, Gossypium hirsutum
  unsure (1)..(153): unsure at all Xaa locations
  Clone ID: GOSHI-09MAY01-C20689_1.pep
MAESNVKVLGTWASPFVMRVKIALHLKSVRYEDVEEDLLAPKSELLLKSNPVYKKIPVFFHAHNPICESLIILQYIDEVWTTSASSILPSDPYERSQSRFWAAYVDDKFFPALRRLLIGATEEDKKAAFAEVVGGTCLXEELFERLSKGNFLW

SEQ ID NO: 81258 - protein, 94 aa, Gossypium hirsutum
  Clone ID: GOSHI-09MAY01-C20649_1.pep
RSIFNSLIFCSWASSSYLSSIVVNVVHHVTGGHGHPDWLTNDINAGRLDYFYYILAVMSAFNFLYFLYVAHRYRCKGQARIEPKSEPDVELSSM

SEQ ID NO: 81259 - protein, 257 aa, Gossypium hirsutum
  Clone ID: GOSHI-09MAY01-C20159_1.pep
GNRGGPTRPTVRNVTILAPIFEAPNTDGIDPDSCGEMVIEDCYISVGDDAVAIKSGWDQYGIAYGRPSRNILIRNLIIRSMVSPAFSLGSEMSGGVSNVTPENVLVWSSRRAVRIKTAAGRGGYVTDITYRNLTFDNARVGIVIKTDYNEHPDDDFDRKALPIIRDISFTEIHGHGVRVPVRIHGSKDIPIRNVTFRDISIGITYKKKHIFQCAFVEGRVIGTIFPAPCENLDRYDEEERLVKLSAAQNVTDIDYDI

SEQ ID NO: 81260 - protein, 69 aa, Gossypium hirsutum
  Clone ID: uC-gsflnu33B025a11b1.pep
QGRWSLLPALQALNKLSYMLSMIFSTPFDEIFAPCILQVHELRAMYLGKLMSLIIGRAFRSKSSSGCSL

SEQ ID NO: 81261 - protein, 164 aa, Gossypium hirsutum
  Clone ID: GOSHI-09MAY01-C20049_2.pep
VAVKYIERGKKIDENVQREIINHRSLRHPNIIRFKEVVVTPTHLAIVMEYAAGGELFERICSAGRFSEDEARFFFQQLISGVSYCHSMQICHTDLKLENTLLDGSPTPRLKICDFGYSKSAVLHSQPKSTVGTPAYIAPEVLSRKEYDGKIADVWSCGVTLYVM

SEQ ID NO: 81262 - protein, 109 aa, Gossypium hirsutum
  Clone ID: GOSHI-09MAY01-C20049_1.pep
MEERYDPVKELGSGNFGVARLVKDKKTKELVAVQYFERGKKIDENVLREIINHRSLRHPNIIWFKEVVVTPTHLAIVMEYAAGGELFERICSAGRFSEDEVSLYLHSTC

SEQ ID NO: 81263 - protein, 559 aa, Gossypium hirsutum
  Clone ID: GOSHI-09MAY01-C20389_1.pep
YSSGDLPGWIFKSGLNEVSLSENKLGVNLSNPISASPRTPLQKIQVLDLSHNSFSGELTYDIGVLSSLQFLNLSRNSLIGPVPGTVGELKALDVLDLSHNQLNGSIPMEIGGAFSLKDLRLNAYFLGGKIPTSIENCTSLSTLIISQNNLSGPIPAEIGKLNNLQNVDLSYNNLAGTLPKQLANLPHLLSFNISHNNLQGELPAGAFFNTISPTAVSGNPSLCGSAVNKSCPAVLPKPIVLNPTSSSDSISEEPPTTVGHNRIILTISAVIAIGASAVNVVGVIAITVLNLRVRSSTSRSAAALTFSAGDDFSHSPTTDANSGKLVMFSGEPDFSTGAHALFTKDCELGRGGFGAVYKTVLQDGRSVAIKKLTVSSLVKSQEEFEREVKKLGKIQHSNLVALEGYYWTPSLQLLIYEFVSGGSLYKHLHEGSVGNYLSWNDRFGIILGTAKSLAHLHQSNIIHYNLKSSNVLIDGSGEPKLGDYGLARLLPMLDRYVLSSKIHSALGYMAPEFACRTVKINEKCDVYGFGVLVLEVVTGKRPVEYMEDDVVVLCDMVRG

SEQ ID NO: 81264 - protein, 148 aa, Gossypium hirsutum
  Clone ID: GOSHI-09MAY01-C20379_1.pep
GNFVVQALISHARTKDQMELIWEELGLKFADLLGMGRSGVIASLIAACQRLQTHEYKCCEALATAVGSKNETSKFIVPRILFLDGYFSYDDKSSWSWPGGAKMHVMGSLILHAIFKFQSEWIQPYILSVTSMDAEHVLEAPQDARGAA

SEQ ID NO: 81265 - protein, 65 aa, Gossypium hirsutum
  Clone ID: GOSHI-09MAY01-C20299_1.pep
TKYTSIRVRSLNKHKKFVHARLFSLINKHYTNNSRTVHRSVYLHPYTPMIRFDRTIPLKNLLKSI

SEQ ID NO: 81266 - protein, 95 aa, Gossypium hirsutum
  Clone ID: GOSHI-09MAY01-C20209_3.pep
MGKGTGSFGKRRNKTHTLCVRCGRRSFHVQKSRCSACGYPGSRIRKYSWSVKAIRRKTSGTGRMRYVRHLPRRFKTGFREGTQATPRKKAAVAAS

SEQ ID NO: 81267 - protein, 95 aa, Gossypium hirsutum
  Clone ID: GOSHI-09MAY01-C20209_2.pep
MGKGTGSFGKRRNKTHTLCVRCGRRSFHLQKSRCGACGYPASRIRKYNWSVKAIRRKTTGTGRMRYLRHVPRRFKTGFREGTQATPRKKGAVAAS

SEQ ID NO: 81268 - protein, 95 aa, Gossypium hirsutum
  Clone ID: GOSHI-09MAY01-C20209_1.pep
MGKGTGSFGKRRNKTHTLCVRCGRRSFHLQKSRCGACGYPASRIRKYNWSVKAIRRKTTGTGRMRYLRHVPRRFKTGFREGTEAAPRKKAAVAAS

SEQ ID NO: 81269 - protein, 59 aa, Gossypium hirsutum
  Clone ID: GOSHI-09MAY01-C20229_1.pep
VNLKNRKKQHSKTHNALSPQCFLPLNTSSFWIISPKYLPLALICNIPSIFHNPNMKYEP

SEQ ID NO: 81270 - protein, 67 aa, Gossypium hirsutum
  Clone ID: GOSHI-09MAY01-C121961_1.pep
KMNIYIYIRSSTLALFVVPFPCSLPAGSSSKMPHIPITLNQGHIVCILAICPRWLYGCKNIVLAMQK

SEQ ID NO: 81271 - protein, 163 aa, Gossypium hirsutum
  Clone ID: GOSHI-09MAY01-C21599_1.pep
LISAQLANASEITTGDAVYEEQVRSGDASATELFELGAVMLRRKFYPAANKFLLQAIEKWDGDDQDLAQVYNALGVSYVRDGKLEKGINQFETAVKIQPGYVTAWNNLGDAYEEEKRLQVCTEKHLKKVLLFDPNNKIARPRRDALKDRVEMYKGVPIKSKDR

SEQ ID NO: 81272 - protein, 114 aa, Gossypium hirsutum
  unsure (1)..(114): unsure at all Xaa locations
  Clone ID: GOSHI-09MAY01-C21589_1.pep
ATAKDLSAKECLPCNTNDLRAMTEETASKLIPKVDGWNMANEGGTLKLKRSWKVKSFTKGLEMFQLISDICXAEGHHPDLHLVGWNNVTVEIWTHAVGGLTENDFILAAKINTT

SEQ ID NO: 81273 - protein, 251 aa, Gossypium hirsutum
  unsure (1)..(251): unsure at all Xaa locations
  Clone ID: GOSHI-09MAY01-C21569_1.pep
KLGRKXGNGSFGELYLGVNVQSGEEVAVKLEPVKTKHPQLHYESKLYMLLQGGTGIPHLKWFGVEGEYSIMVIDLLGPSLEDLFNYCNRKFSLKTVLMLADQLINRVEYMHSRGFLHRDIKPENFLMGLGRKANQVYVIDYGLAKKYRDLQTHKHVPYRENKNLTGTARYASVNTHLGVEQSRRDDLESLGYVLMYFLRGSLPWQGLKAGTKKQKYDKISEKKMLTPIEVLCKSYPSEFTSYFHYCRSLRF

SEQ ID NO: 81274 - protein, 197 aa, Gossypium hirsutum
  Clone ID: GOSHI-09MAY01-C21539_1.pep
LISYRDLVGVAYSDEETKAMAAEIEVVDGPNDEGEMFTRPGKLSDRFPQPYANEQAARFANGGAYPPDLSLITKARHNGQNYVFALLTGYRDPPAGVMIREGLHYNPYFPGGAIAMPKMLIDGAVEYEDGTPATEAQMGKDVVTFLSWAAEPEMEERKLMGFKWIFVLSLALLQAAYYRRLRWSVLKSRRLVLDVVN

SEQ ID NO: 81275 - protein, 258 aa, Gossypium hirsutum
  Clone ID: GOSHI-09MAY01-C21489_1.pep
MGSGNWLRSFICLKKYKPNRSKQAKTPSIQVHSSNEKSNGDERVEEHEGPEVAAAGSSQSSPGIAVEQRAAAKIQKAFRSYRARKAVRRLRDAGRFKNILIQGHTVKKQTTSTLSYLHSWCNVQSQIRARRICMVTEGRLKQKKMENQMKLEAKLHELEVEWCAGSETMEEILSRIQQREEAAVKRERAMAYAFSHQWRANASQYLGQASYGAGKENWGWSWIERWIAARPWEVRIHSQPIHPKKTHGRQASKSEKEM

SEQ ID NO: 81276 - protein, 115 aa, Gossypium hirsutum
  Clone ID: GOSHI-09MAY01-C21459_1.pep
CCGCTSNVETTYVAVRSLDENHLGTYHTCFRDTLLPTHLWYPLPRFLQTWLLNYLAGTLLYLISGFLWCFYIYYLKRNVYVPIDAIPTNKAMLLQIYVAMNAMPWYCALPSLPNT

SEQ ID NO: 81277 - protein, 139 aa, Gossypium hirsutum
  Clone ID: GOSHI-09MAY01-C21769_1.pep
EVHKKKHEKKSSPSRKVVIRNINYISSKRNGDKGSDSEDNSDEDEFIDGDSLKQQVEEAVGSLGKRHKSTSHHHKKHNGSKHRNSVSYDEDELVTKNPEGEKRSNPWDTFQNLLLQDKDLDSSEVDKQPARFQDKYFAA

SEQ ID NO: 81278 - protein, 79 aa, Gossypium hirsutum
  Clone ID: LIB3083-071-Q1-L1-H1.pep
KSSPSRKVVIRNINYISSKRNGDKGSDSEDNSDEDEFIDGDSLKQHVEEAVGSLGKRHKFTSHHHKKHNGSKLLNCVFY

SEQ ID NO: 81279 - protein, 94 aa, Gossypium hirsutum
  unsure (1)..(94): unsure at all Xaa locations
  Clone ID: GOSHI-09MAY01-C21719_1.pep
MLDGIWGRGFASKCKSLIKLIKSRIDVIRRKRSATLMFLKKDIADLLANGLDINAYGRVEGYIXESVLSSCYDFVEKCCEFVSKHVSLMQKLSD

SEQ ID NO: 81280 - protein, 112 aa, Gossypium hirsutum
  unsure (1)..(112): unsure at all Xaa locations
  Clone ID: GOSHI-09MAY01-C21619_1.pep
MKKAIGQTVRELKREVNKKVLKVPGIEQKVLDATSNEPWGPHGSLLADIAMATRNYHEYQMIMTVIWKRLSDTGKNXWRHVYKALTVLEYLVGHGSERVIDDIREHAYQISA

SEQ ID NO: 81281 - protein, 102 aa, Gossypium hirsutum
  Clone ID: GOSHI-09MAY01-C21639_1.pep
FVSSLLLRPLDFRKEMEPKASMKNNQTLDDIMKQSSSSNSDSLSHLDSPHSPLRSDHGDSVPPDPQNTSSPHVPPAVSPPVDNCKALVAFDKSTQFNANSSP

SEQ ID NO: 81282 - protein, 273 aa, Gossypium hirsutum
  unsure (1)..(273): unsure at all Xaa locations
  Clone ID: GOSHI-09MAY01-C21139_2.pep
KEYMLAFGHGSAKLAGQAQSKEKTLXKMERGGLTEKVVADPRLRFRFVDVGKLPPPVLQFVEVTFGYTPENLIYKNLDFGVDLDSRIALVGPNGAGKSTLLKLMTGELTPIDGMVRRHNHLRIAQFHQHLAEKLDMEMSALQYMIREYPGNEEEKMRGAIGKFGLSGKAQVMPMKNLSDGQRSRVIFAWLAFRQPHLLLLDEPTNHLDIETIDSLAEALNEWDGGLVLVSHDFRLINQVAEEIWVCENQAATRWEGDIMDFKQHLKSKAGLSD

SEQ ID NO: 81283 - protein, 213 aa, Gossypium hirsutum
  Clone ID: AI054556.1.pep
KTQDFSGGWRMRIALARALFMNPTILLLDEPTNHLDLEACVWLEENLKKFDRILVVVSHSQDFLNGVCTNIIHMQNKKLKLYTGNYDQYVQTRSELEENQMKQYKWEQEQIASMKEYIARFGHGSAKLARQAHSKEKTLAKMERGGLTENVVMDKVLVFRFGDVGKLLHRSAVWEVTFGSRLRIDLQNLTWVTGLMMHCGPMCRKVTVNCDSE

SEQ ID NO: 81284 - protein, 83 aa, Gossypium hirsutum
  unsure (1)..(83): unsure at all Xaa locations
  Clone ID: LIB3146-010-Q1-K1-D10.pep
MDGWAPVTILNWQFIPFGEKLDMEMSALXYMIREYPGNEEEKMRGAIWKFGLSGKAQVMPMKNLSDGQRSRVIFAWLAFRQPH

SEQ ID NO: 81285 - protein, 111 aa, Gossypium hirsutum
  Clone ID: GOSHI-09MAY01-C21059_1.pep
EIDDTPPVTSSLSHEAVQAKGGKETDREKLLGAADDSTPRVRTAQEIIAKYRKAGDASSAAAHARNKLVERREKLERISRRTEELQSGAENFASLADELVKAMENRKWWQI

SEQ ID NO: 81286 - protein, 231 aa, Gossypium hirsutum
  Clone ID: GOSHI-09MAY01-C121051_1.pep
PRVRPRVRPRVRGAAKGLAFLHSAEIKVIYRDFKTSNVLLDSNYNAKLSDFGLAKDGPTGDKSHVSTRVMGTYGYAAPEYLATGHLTAKSDVYSFGVVLLEMLSGRRAVDKNRPSGEHSLVDWAKPYLANKRKMFRVLDSRLEGQYSMEGAFKGATLALRCISTEPKFRPRMNEVVIVLEQPPNSNESGSNLSNNTSSTPRIRRRSAEYPSGGRSTTTTAYPRPSASPLYD

SEQ ID NO: 81287 - protein, 267 aa, Gossypium hirsutum
  Clone ID: GOSHI-09MAY01-C21259_1.pep
LVLPPSLVDPLHMQYLPHSFSSTYGASVQHGHLSSTGASGGQIDSFVQKESSGAAYIGDPKVQPPINGRLSIPNPGKVGSIGGGFYGGHHSMGVIAQYPTSPVASPLMPSSPVGGMTPLGRRNETRFPPKAGPYSAWQGQRVSSFEDSKRHSFLEELKSSNARKFELSDIFGRIVEFSVDQHGSRFIQQKLEHCCFEDNESVYKEVLPHASRLMTDVFGNYVIQKFFEHGSCQQRNELADQLVGNMLNFSLHMYGCRVIQNALEVID

SEQ ID NO: 81288 - protein, 177 aa, Gossypium hirsutum
  Clone ID: GOSHI-09MAY01-C21269_1.pep
MAADGNKRKRPNILVTGTPGTGKTTTSSALAEATNLRHINIGDLVKEKNLHDGWDDDLQCHIINEDLVCDELEDVMEEGGNIVDYHGCDFFPERWFDLVVVLQTDNTVLYDRLSKRGYEGAKLSNNIECEIFQVLLEEAKESYSEDIVKALKSNNIDDITRNVSSLTDWIRSWPPTS

SEQ ID NO: 81289 - protein, 108 aa, Gossypium hirsutum; identical to SEQ ID NO: 69781
  Clone ID: GOSHI-09MAY01-C22929_1.pep

SEQ ID NO: 81290 - protein, 54 aa, Gossypium hirsutum
  unsure (1)..(54): unsure at all Xaa locations
  Clone ID: LIB3145-047-Q1-K1-B12.pep
PGEVNLDPLKRPPLFFFFFFLNGVFFFFFNFFFFIFIFYIFXXVFFXEEQKLIH

SEQ ID NO: 81291 - protein, 108 aa, Gossypium hirsutum
  unsure (1)..(108): unsure at all Xaa locations
  Clone ID: LIB3148-007-Q1-K1-D11.pep
LTFNVLDPIAPKKDKPPFFNGKPAXNNSGKQNKKKWITGKQKENVNNMVLFDQATYDKLLSEAPKYKLITPSILSDHMKINASLTRKSITEFIAIRSIRLDSSHTNQQ

SEQ ID NO: 81292 - protein, 84 aa, Gossypium hirsutum
  Clone ID: GOSHI-09MAY01-C22859_2.pep
EEIYRIQTGWKVPDPQLREELRISISEKVIPAYRSFMGRFGSQIESGRNSGKYIKYTPEDLENYLLDLFEGSPLILHHMRRKNS

SEQ ID NO: 81293 - protein, 177 aa, Gossypium hirsutum
  Clone ID: GOSHI-09MAY01-C22859_1.pep
KLYEDGALHCIFLMNNILYIVQKVKDSELGKLLGDNWVRKRRGQVRQYATNYLRACWMKALYCLKDEGMGGSFEQWPPSVTLKERFKTFNACFEDIYRIQTGWKVPDPQLREELRISISEKVIPAYRSFMGRFGSQLESGRHSGKYIKYTPEDLENYLLDLFEGSPLVLHHMRRKST

SEQ ID NO: 81294 - protein, 201 aa, Gossypium hirsutum
  Clone ID: GOSHI-09MAY01-C22869_2.pep
PFLAELLRLEEQAKQQGVGRWSKVPGAAEASIRNLPPSAIGDPSNLDAMGLLAANKGSPMQGIVEQVRDGSTVRVYLLPDFQFVQVFVAGIQAPSMGRRAAAETVVETDLTSDEQNGDASAEPRAALTSAQRLAASSTASSEVSPDPFGPEAKYFTEVRCLNREVRIVLEGVDKFSNLIGSVYYPEGDTAKDLALELVENG

SEQ ID NO: 81295 - protein, 212 aa, Gossypium hirsutum
  Clone ID: GOSHI-09MAY01-C22869_1.pep
PRPPRVRPRVRPRLRPRLRLKQICTSVDQNGDASAEPRAALTSAQRLAASSTASSEVSPDPFGPEAKYFTEVRCLNREVRIVLEGVDKFSNLIGSVYYPEGDTAKDLALELVENGLAKYVEWSANMMEDDAKRRLKSAELQAKKARLRMWTNYVPPATNSKAIRDQNFTGKVVEVVSGDCIVVADDSIPYGSPLAERRVNLSSIRCPKMGNP

SEQ ID NO: 81296 - protein, 194 aa, Gossypium hirsutum
  Clone ID: GOSHI-09MAY01-C22569_1.pep
KFLDEKLRAGNKGTSEEELEGTLDKALVLFRFIQGKDVFEAFYKKDLAKRLLLGKSASIDAEKSMITKLKTECGSQFTNKLEGMFKDIELSKEINESFKQSSQARTKLPSGIEMSVHVLTTGYWPTYPPMDVRIPHELNVYQDIFKEFYLSKYSGRRLMWQNSLGHCVLKADFPKGKKELAVSLFQTVVLMLFN

SEQ ID NO: 81297 - protein, 112 aa, Gossypium hirsutum
  Clone ID: GOSHI-09MAY01-C22509_1.pep
EIGGGQGPALFPANMGDQVGSRMSSLYTTSMQHENISPHMSATALLQKAAQIGSTTSNNTTSTLLRGLRSSLSGATKSDRPVFSPNFGSNFEGGNGSETLRSNMEDDSNLQG

SEQ ID NO: 81298 - protein, 149 aa, Gossypium hirsutum
  Clone ID: GOSHI-09MAY01-C22429_1.pep
PTRRAINVVCSSPEAAARVKSQLKRIARPMYSNPPVHGARIVANIVGDSALFKEWNAEMEMMAGRIKNVRHKLFDSLSSKDKSGKDWSFVLKQIGMFSFTGLNKAQCDNMTNKWHVYMTKDGRISLAGLSLAKCEYLADAIIGSYHNVS

SEQ ID NO: 81299 - protein, 67 aa, Gossypium hirsutum
  Clone ID: GOSHI-09MAY01-C22779_2.pep
KPYTTEKYLTHSRGDFIDHPKTLTSLKSGDLEKQSLGIHDLFVVQTFWFHLRLSKLLFLSHIWVQGE

SEQ ID NO: 81300 - protein, 150 aa, Gossypium hirsutum
  Clone ID: LIB3493-048-P1-M1-B6.pep
NPAETGTELSTLVELMSQSIAVFDDEYMRSIQGEQGFEAIAEHLNQLELLFSFEKPDIFAFTSWINTDFHKLDFGWGQPCSFAILGKAGPEFRNFTVLVETKYGKGIEAWITLDETKMSALQKDHEFLNFAFSSPKFQACKRLWKHFDDQ

SEQ ID NO: 81301 - protein, 124 aa, Gossypium hirsutum
  unsure (1)..(124): unsure at all Xaa locations
  Clone ID: GOSHI-09MAY01-C22189_1.pep
MGSLLSSNRLSQEDTQMALDKVKHIVSSXPVVVFSKTYCGYCNRVKQLFAQLKASYKAIELDQESDGGEMQAALAEWTGQRTVHNVFIAGTHIGGCDSVIAKYQAGQLLNLLSDAGAITVDINA

SEQ ID NO: 81302 - protein, 78 aa, Gossypium hirsutum
  Clone ID: GOSHI-09MAY01-C122161_1.pep
LRDSNSYWTPKQNKLFERALAVYDKDTPDRWQKVAAAVGEKSVEEVRRHYEILVRDLMYIESGQIPIPNYKSTGSNRR

SEQ ID NO: 81303 - protein, 315 aa, Gossypium hirsutum
  Clone ID: GOSHI-09MAY01-C22009_1.pep
MASLATFNFVMFLIVLASSLHFTADARRLVESDQPDQPLLFQYHNGPLLSGKISVNLIWYGKFKPSQRAVVSDFVTSVASSKPTIAQPSVATWWKATEKYYQLSKKPYSLAITLGSQILDENYSLGKSLTNQQIMELASKGGQKNAINVVLTSADVAVEGFCSSRCGTHGSGLGGSSKGHNSNFPTRPVGNSETQCPGQCAWPFHQPIYGPQNPPLVAPNNDIGLDGMVINLASLLAGTVTNPFGNGYYQGPKEAPLEAASACPGIYGKGAYPGYAGDLPVDATTGANYNAHGVNGRKYLLPALFDPSTSTCSTL

SEQ ID NO: 81304 - protein, 218 aa, Gossypium hirsutum
  unsure (1)..(218): unsure at all Xaa locations
  Clone ID: GOSHI-09MAY01-C22029_1.pep
NKVLVKCLGMNGKLLVDALAHGSSQPVHLEIDISNYVGENGNGNYSAQYKNLDKLVSNLDKEVISKLYGSVSTSGSSSNPSSLETGSRRNVNGDGVRINEPTGPQPHPSGVVIPPVNPVGGRYLFPGPGAGMYPTRGDFGGGDMLLGPNDPRWFGGLGGDHGFPGAQPGXVPPGARFDPYGPPGVPGFEPNRFIRNPPRRPGGGTHPDLEHFGGGDFI

SEQ ID NO: 81305 - protein, 318 aa, Gossypium hirsutum
  Clone ID: GOSHI-09MAY01-C22399_1.pep
KVTLGQYESHIVFTLPGLYRVVDGIDVFDPKFNIGCPAADMSIYFPYTEEKRRLMKFHPEIEELVYSPPANTEHLCVLKDRNKPILFTMARLDRVKNLTGLVEFYAKNSRLRELVNLVVVGGDRRKESKDLEEKAEMKKMYELIEKYKLNGQFRWISSQMNRVRNGELYRYICDTKGAFVQPPIYEAFGLTVVEAMTCGLPTFATCYGGPAEIIVHGKSGFNIDPYNGDLAAETLANFFEKCKADPSYWDEISQGGLKRIQEKYTWQIYSEKLFSLTGVYGFSKHVAYQEQRGRKRYIEMLHAWMYNNRVKTVPLAVE

SEQ ID NO: 81306 - protein, 232 aa, Gossypium hirsutum
  Clone ID: GOSHI-09MAY01-C22369_1.pep
MSGTGKVVCVTGASGYIASWLVKFLLQRGYTVKATVRDPSDRKKSEHLLALDGAKERLRLFKAQLLDEGAFDSVVDGCVGVFHTASPFYHNIKDPQAEMLDPAVKGTLNVLRSCAKVPSIKRVVITSSIAATVYNGRPLGPDVVVDETWFSDPAFCEKSKLWYMLSKTLAEEAAWKFAKENGIDMVTINPGLVIGPLLQPTVNTSVEPILKLINGAKTFPNATFRLIDVRDV

SEQ ID NO: 81307 - protein, 208 aa, Gossypium hirsutum
  Clone ID: GOSHI-09MAY01-C22219_1.pep
DQVRCKVLKPIGVRFVLPVLPISLIFAGYSLAALEERGSRNGEKKRSSCICNKWRSKKQLAIFFLLASNIPMALYMSLIHQRGTEDAMNYLSKEAAKGKVKSIVFLMPCHATPYYSTLHNNLPMRFLDCTPNKGMPTESDRFMMDPVSFAVDFAKNWSHPSHIVLFDSEERHLKDFLISHSFREVRRFFHAHFKVDRDLQASVVVYAD

SEQ ID NO: 81308 - protein, 154 aa, Gossypium hirsutum
  unsure (1)..(154): unsure at all Xaa locations
  Clone ID: GOSHI-09MAY01-C123841_1.pep
SAGPDYIPGLGTWHVIRELPGTLHYEHRERHCPDEAPTCLVPLPEGYKRSVKWPKSRDKIWYYNVPHTKLAEVKGHQNWVKVTGEYLTFPGGGTQFVNGALHYIDFIQESVPEIAWGKRTRVVLDVGCGXACLRGFRFERNVLAMSFAPKDEHE

SEQ ID NO: 81309 - protein, 63 aa, Gossypium hirsutum
  unsure (1)..(63): unsure at all Xaa locations
  Clone ID: GOSHI-09MAY01-C23819_1.pep
LPEAFSSELQKKFAXSTTVAELPGKKGLEVLIQGGVIDDVARHLLEQYGIPKRYIEVLDKTRK

SEQ ID NO: 81310 - protein, 70 aa, Gossypium hirsutum
  Clone ID: uC-gsflnu33B091f01b1.pep
FASAFLIDPEALASELQKKFACSTTVAELPGKKGLEVLIQGGVIDDVARHLLEQYGIPKRYIEVLDKTRK

SEQ ID NO: 81311 - protein, 67 aa, Gossypium hirsutum
  Clone ID: LIB3146-005-Q1-K1-B6.pep
KANEARSSHSWTCSSFASQRSVDFEIFFRGINFSLFLFFFAEFLNSSCLFFSVNLMECKWYWSCNYD

SEQ ID NO: 81312 - protein, 90 aa, Gossypium hirsutum
  Clone ID: LIB3083-105-Q1-L1-B9.pep
MRQGVLTPGRVRLLLHKGLWTLKYFSEHCTRAVYTAPIKTISNQKYRDFYGKFDVGLLTGDVSLRPEASCLIMTTELLRSMLYRGADIIR

SEQ ID NO: 81313 - protein, 155 aa, Gossypium hirsutum
  unsure (1)..(155): unsure at all Xaa locations
  Clone ID: GOSHI-09MAY01-C23529_1.pep
VDSGTKLSKIQSRISKLKEKRKXDFGPEKEFYAFYGHCFETNQNKYVYKVCPYKQASQEEGYTSTSLGNWDQFEESYRMMVFSNGENCWNGPDRSMKVKLRCGLKNEITDVDEPSRCEYVAILSTPAVCLEDKLKELQHKLDLMNKEQPREHDEL

SEQ ID NO: 81314 - protein, 100 aa, Gossypium hirsutum
  Clone ID: GOSHI-09MAY01-C23419_1.pep
RKTTEVCSRNRNKSIAMASKSSSSHSSTRVCRCAPTNHPGSFRCSLHRNSDRVSSKSAATPHVNRQRERQSKAAMMLMMSNVSSSSSKSSLIKSLSDADH

SEQ ID NO: 81315 - protein, 148 aa, Gossypium hirsutum
  Clone ID: GOSHI-09MAY01-C23429_1.pep
MADVEEPKKLESEIPSDPPPPPTEAAVEKSVTPPPPTEEKPADSTDKPPEPIEKAAESTEKKSTEVSVDRDAVLARVATEKRISLINAWEESEISIAEYKAQMKLSSIAAWENTKKAAIEAELKRTEEKLDKQKAEYVEKMKNKAALI

SEQ ID NO: 81316 - protein, 193 aa, Gossypium hirsutum
  Clone ID: GOSHI-09MAY01-C23789_1.pep
VEVPSAVYQASSPVETNKGNLSTVASGNSGSGSLKSTLKSSSLNPNAFYKGGGLSSGNLSQGYPDPRFSYDGVQSPIPWLDMSMSCNGQSEHAANGGFSYSSNLSSGRNQNLHPFPHVMNLHNVRPSSGVGQGYGYMYPNNMAYSHYRGGSGFGSYGYGARKKGLGWYNVGSNNKYRFQGYGKENMDGLNELN

SEQ ID NO: 81317 - protein, 202 aa, Gossypium hirsutum
  Clone ID: GOSHI-09MAY01-C23659_1.pep
HASAALTQLQKGKERCSYDHPRVRSVFMPKLRGKFFATENFCYTSKFFRLRQRAFLSDLIMAGKHFCEEDWSKLKKKHQSLNEEDLLRYCFSSAYFVALLHDSLEIALDDERISFANQVNDIPLDWALGAFILQSTSISDVQQTDWITIIMSSDSSTLISITAISAILMFAAWSISKWRKPQLKTVYDLEKGRYIITRIGRS

SEQ ID NO: 81318 - protein, 102 aa, Gossypium hirsutum
  unsure (1)..(102): unsure at all Xaa locations
  Clone ID: LIB3083-105-Q1-L1-H1.pep
IPFSLEEDWTKLVNKHQSLNEEDLLRYCFSSAYFVALLHDSLEIAXMIXRISFANHVNHIPLDWALGAFILQSTSISDVQQTDWITIIMSSDSSTLISITDI

SEQ ID NO: 81319 - protein, 145 aa, Gossypium hirsutum
  unsure (1)..(145): unsure at all Xaa locations
  Clone ID: GOSHI-09MAY01-C23189_1.pep
SMGRGGYIRMERNLANTATGKCGIAIEASYPIKXGQNPPNPGPSPPSPIKPPTVCDNYYSCPESNTCCCVYEYYGYCFAWGCCPLEAATCCDDHYSCCPHDYPICNLNEGTCLMSKGNPMAVKALRRTPATPFWAHGSVGVKNNA

SEQ ID NO: 81320 - protein, 385 aa, Gossypium hirsutum
  unsure (1)..(385): unsure at all Xaa locations
  Clone ID: GOSHI-09MAY01-C23149_1.pep
PTLPPTRPPTRPPTRPPTRPKEREKVDFRNHVIQWFEVLDGLLGKHWRNIGLFFNCTFLLFGSVIQLIACASNIYYINDNLDKRTWTYIFGACCATTVFIPSFHNYRVWSFLGLMMTSYTAWYLTIASLLHGQIDGVKHSGPNKMVLYFTGATNILSSFGGRAVSGEIMHAMWKPQKFKMIYLIATLXYVLTLTLPSASAVYWAFGDLLLTHSNALSLLPRSGFRDTAVILMLIHQFITFGFACTPLYFVWEKFIGVHETKSVFKRALARLPVVIPIWFLAIIFPFFGPINSTVGSLLVSFTVYIIPSLAHMITFAPSSARENAVERPPSFLGGWAGMYSINIFVVVWVLIVGFGFGGWASMLNFIQQINTFGLFTKCYQCPHKA

SEQ ID NO: 81321 - protein, 188 aa, Gossypium hirsutum
  unsure (1)..(188): unsure at all Xaa locations
  Clone ID: uC-gsflnu33B114e02b1.pep
LDACRPGPEFRIRPTRPALVWKHWRNIGLFFNCTFVLFXGSEIQLIACASNIYYINDNLDKRTWTYIFGACCATTVFIPSFHNYRVWSFLGLMMTSYTAWYLTIASLLHGQIDGVKHSGPNKMVLYFTGATNILYTFGGHAVTVEIMHAMWKPQKFKMIYSIATXYVLTLTLPSASAVYWAFGICFLP

SEQ ID NO: 81322 - protein, 128 aa, Gossypium hirsutum
  Clone ID: LIB3083-097-Q1-L1-F1.pep
LSGILFQLFYGLMGSWTAYLISLLYVEYRTRKEREKVDFRNHVIQWFEVLDGLLGKHWRNIGLFFNCTFLLFGSVIQLIACASNIYYINDNLDKRTWTYIFGACCATTVFIPSFHNYRVWSFLGLMMT

SEQ ID NO: 81323 - protein, 138 aa, Gossypium hirsutum
  unsure (1)..(138): unsure at all Xaa locations
  Clone ID: GOSHI-09MAY01-C23179_2.pep
MEGIPLGCFRSLLXILLWWGFSVTVIFMILWIFQTLDFKSPLSLSCVHFICSSIGAYLVIKVLKLIPLLPVDPQDRWKRIFPMSFVFCIIIVLXGNVCLRYIPVSFLLTIGSFSPASAVFPRLVVWRSYSTRHFWSLF

SEQ ID NO: 81324 - protein, 302 aa, Gossypium hirsutum
  unsure (1)..(302): unsure at all Xaa locations
  Clone ID: GOSHI-09MAY01-C23179_1.pep
MEEGRLCQWSVCRSLLAIVQWWGFNVTVIIINKWIFQKLDFKFPLSVSCVHFITSSFGAYMVIKVLKLKPLIVVDPEDRWKRIFPMSFVFCVNIVLGNVSLRYIPVSFMQTIKSFTPATTVFLQRLVWRKYFDRRIWASLVPIVGGILLTSVTELSFNMFGFCAALFGCLATSTKTILAESLLHGYKFDSINTVYYMAPFATMILAVPALLLEGNGVTDWFHAHPAPWAALIIIFSSGVLAFCLNFSIFYVIHSTTAVTFNVAGNLKVAVAVLISWLIFRNPISGLNAVGCCIPPXGCSFYG

SEQ ID NO: 81325 - protein, 60 aa, Gossypium hirsutum
  Clone ID: LIB3272-043-P1-K1-D11.pep
HWRIARRDLKTPHCRNLPSSITLPYPSLSVSSTERTKTQITKFETQHRNFALRLLKGLYK

SEQ ID NO: 81326 - protein, 147 aa, Gossypium hirsutum
  unsure (1)..(147): unsure at all Xaa locations
  Clone ID: GOSHI-09MAY01-C23169_1.pep
MAKRSNSCSLRYKKDQLGCMWGLISMLDFRHSRSTRRLLADRRCGDRNAVGAPNARNKPEMLTSSAEDCPRPLDGEEERTAIDACKPSVKKLLEEEMSGEVAKKEASNTEVEVKQFYSXMETNGRKNWNRKNKTCKKSSSSSLHMDV

SEQ ID NO: 81327 - protein, 212 aa, Gossypium hirsutum
  Clone ID: GOSHI-09MAY01-C23049_1.pep
MEKRWGKKWALICLFLFNWARNVSSLSVTVSDMECVYEYVLYEGDTISGNFVVVDHDIFWSSDHPGIDFTVTSPGGNTVHSLKGTSGDKIEFKAPRSGMYKFCFHNPYSTPETIAFYIHVGHIPTDHDLAKDEHLNPINVKIAELREALESVTAEQKYLKARDTRHRHTNESTRKRVIGYTVGEYLLLVAASVLQVIYIRRLFSKSVAYNRV

SEQ ID NO: 81328 - protein, 133 aa, Gossypium hirsutum
  Clone ID: GOSHI-09MAY01-C23039_1.pep
MSWQTYVDEHLMCDIDGTGHHLSAAAIVGHDGSIWAQSSNFPKCQPKEITDIMKDFDEPGHLAPTGLHLGGAKFMVIQGEPGAVIRGKKGSGGVTIKKTAQALVFGIYEEPVTPGQCNMVVERLGDYLAEQGL

SEQ ID NO: 81329 - protein, 59 aa, Gossypium hirsutum
  Clone ID: GOSHI-09MAY01-C98529_1.pep
SLRSLYESYLKKNMLSKPFNKIHTPTDIKNTWLHSTYPAGDFLGLPRKMKLKSCFQELK

SEQ ID NO: 81330 - protein, 116 aa, Gossypium hirsutum
  Clone ID: GOSHI-09MAY01-C98729_1.pep
VNGSMDRRYVGNLNLSFAYVEGESLLMGLKEVAVSSGSACTSASLEPSYVLRALGVDEDMAHTSIRFGIGRFTTEEEIDRAVELTVKQVEKLREMSPLYEMVKEGIDIKQIQWAQH

SEQ ID NO: 81331 - protein, 188 aa, Gossypium hirsutum
  Clone ID: GOSHI-09MAY01-C98029_1.pep
RPRGKGIPSNLPCSKRNTQSYVQRQLLEQSSPSKSSAGTTPKHEDYCQSNWQQFQATGLEESRLQEQACGERINGPSKLESLADMITKHQSTYKEFIQMSDTDSPSKTESTGEKECHAHGFCSNKKEASEQDQALGDQCEKHITILRTCLRKHDSARKLLHLKVSFYLSPDNEERKRKVAESEGFITC

SEQ ID NO: 81332 - protein, 183 aa, Gossypium hirsutum
  Clone ID: GOSHI-09MAY01-C98209_1.pep
MASVFLPFTSVHLQCQVIVRPIRASVSGKPSVSEPPVTTLSEKLPLKKIPGNYGIPFVGPIKDRLDYFYNQGRDEFFKSKIQKYQSTVFRTNMPPGPFISPDPKVIALLDGKSFPVLFDVSKIEKKDVFTGTYMPSTDLTGGYRILSYLDPSEPKHAKLKQLIFFLLKSSAKRVIPEFEACYT

SEQ ID NO: 81333 - protein, 309 aa, Gossypium hirsutum
  unsure (1)..(309): unsure at all Xaa locations
  Clone ID: GOSHI-09MAY01-C99939_1.pep
QTQGLYEEFKDHPNCSRLIADSLDPSGGVLPAQVSNKLKQLGLKVAPKKRIRNDGRNFTSSSDQQGGGSTLNDSNNLEGSSQRQPLNTRKRVSAFSKDQEAMIKDLFEQFKDHKRCSYMIANALDADNKFTAAQVSPKLKQLGLYVPRQKKSEEXMRLRDEELNDLSANEMHDSDNETLLSFKNRKKDNGGLFNQEFPGQNMEREASDDADDETLSSVFKKTRKLPLKSKNEKLAAVATGERYKISGAVVANDVTERKMDFMVSKAQRYVNSPEGNDTQTMINGNGVVSSQLQIAGSSPEGLDKQVVFR

SEQ ID NO: 81334 - protein, 159 aa, Gossypium hirsutum
  Clone ID: GOSHI-09MAY01-C99489_1.pep
VGSSGMAAGQFLDLKGGNTVDFIQEKKYGAMGECSAVCGGLLAGARDDEIERLRRYGRAVGVLYEVVNDVLLSKSTEKEGTEGQEKKGKGYVRLYGIEKSMEIMEELRSKAKNELDGFEKYGDCVAPLYSFIDYAINRGFNVSDLESMMCFFFMLVNLH

SEQ ID NO: 81335 - protein, 126 aa, Gossypium hirsutum
  Clone ID: GOSHI-09MAY01-C99459_1.pep
PSAFPVDPAFAAAWAYTCPYAQRVWITRNCKVPALEHNNEVKGESLDLIKYIDSHFEGPSLFPDDPAKKQFADELLSCIDSFYKTVTSSFKGEGTEAGIAFDNIETALTKFEDGPFFLGQFSLICD

SEQ ID NO: 81336 - protein, 59 aa, Gossypium hirsutum
  Clone ID: GOSHI-09MAY01-C99609_1.pep
RKKGKFELVNSEWEKKDEIIWICMVIMAVQDSSIHASNMGLTLIDTQSISFRHIFFASL

SEQ ID NO: 81337 - protein, 159 aa, Gossypium hirsutum
  Clone ID: GOSHI-09MAY01-C99059_1.pep
MDLRALSACLVAVVCSSEQPPLRPLGSPAGDGASVIIKSVLERASQLLSHPSGNCSMPNYTLWRASFDEFFALLTKYCVSKYETIIQSIHNQPQPTTEVIGLEAIRREMPCELLRASLPHTNESQRKLLMDFSQRSVSMNGSSSPAGSTSRINSESVRV

SEQ ID NO: 81338 - protein, 190 aa, Gossypium hirsutum
  Clone ID: GOSHI-09MAY01-C99069_1.pep
MNLMLKANPNPNPNPKDDAKKTRTVDLGNGSSVIYVPRFLAYDVAWEFFNYLDNHIPWTRPTLRVFGRSCTQPRDTCYVASAGLPDLIYSGYQPHAHSWDDFPPLKDILDAVHKMLPGSTFNSLLLNRYKGGNDYVGWHSDDEKLYGSTPEIASVSFGCERDFILKKKSGKSSQERRSDDKPPLKRSRKS

SEQ ID NO: 81339 - protein, 362 aa, Gossypium hirsutum
  unsure (1)..(362): unsure at all Xaa locations
  Clone ID: GOSHI-09MAY01-C94869_1.pep
MAIAAAISLSLPPQTRRSPASIAAPFRSTSSLHFDSLRSNFSSLKNPNLRVSASSMSIGTPEKISTTSFLDRRESGFLHFVKYHGLGNDFILVDNRDSTEPRITPEQAVKLCDRNFGIGADGVIFAMPGVNGTDYTMRIFNSDGSEPEMCGNGVRCFARFIAELENLHGKQSFTVHTGAGLIVPEIQEDGKVKVDMGXTILKASDVPYKLPANKDQPAVKADINVDGVTWNVTCVTXGNPHCVTFGNRQSQNLTVDELNLAAIGPKFEHHEMFPARTNTEFVEVXSHEHLKMRVWERGAGATLACGTGACAVVVAAVLEGRAGRSCTVDLAGGPLDIEWKEEDNHVYMTGPAEVVFYGSVAV

SEQ ID NO: 81340 - protein, 198 aa, Gossypium hirsutum
  Clone ID: GOSHI-09MAY01-C94509_1.pep
MALFWRGLIILPLLFVYASSHFIYTKRHFDKPEVVGFKDLDYLHGDGGGFLSGPIEADDGVKASKTVVEAESDDDDNDDDDGDKKSKKKNEKKNKKNKKEKKNSKKDKKYDESFHTLPVESLVNEKGGDGNTDDSSQLVGYNVVTAQTTFKGSWELFVENSGVSAMHVVLLPNINQALIFDATVWKVSKLKLPGPPCR

SEQ ID NO: 81341 - protein, 84 aa, Gossypium hirsutum
  Clone ID: GOSHI-09MAY01-C94409_1.pep
KTTVYPQQPFQYPLHKKMKKVLFLPYYAVRENKQHYLLDIDPPNKVDDRNPSLIQPLETLPPHRPIISSSPKHLPSQPPHSANR

SEQ ID NO: 81342 - protein, 137 aa, Gossypium hirsutum
  Clone ID: GOSHI-09MAY01-C94769_1.pep
RARAWNVFMHYWSNCSEMGLTKFFEMFQYLAGQSAKLNQAVKQVNHVDQVHKKSDDRSLNVPPPPSPNGLRSPMARNKAWSSAAINRVNSPRFSQSQEDTSPAEYEFDNDDDSIPYSPCNSRLQQARLKLRRTKTHN

SEQ ID NO: 81343 - protein, 147 aa, Gossypium hirsutum
  Clone ID: AI726545.1.pep
MGILSEMRDVWVQRRAKFFIIPSPAEEQKKLRAQQSSQGFFFFWLIILPHLVESNLYFKKVGILSEMRDVWVQRKAKFFIIPSPAEDQKKLRAQQSSQESIRAGLKAAAITGIFTAVPTLIAVRKVAWAKANLNHTAQALIISGSVF

SEQ ID NO: 81344 - protein, 154 aa, Gossypium hirsutum
  Clone ID: LIB3828-009-Q1-K6-D6.pep
MALAGSLPNQITPLLSLFFKLSLIIILPHLVESNLYLKKMGIPSEMRDVWVQRRAKFFIIPSPAEDQKKLRAQQSSQEGIRAGLKAAAITGVFTAVPTLIAVRKVAWAKANLNHTAQALIISGASIAAYFITVDKTVLESARKNSRAQFDNKTA

SEQ ID NO: 81345 - protein, 199 aa, Gossypium hirsutum
  Clone ID: LIB3828-005-Q1-N6-H9.pep
RELEPLYFSIYFFSLRKPHSCSLFINALTGITMAMGLFYYGLRDTTATYSTNFLNIIPIVTFVFSIFLRMEKLGLGSKAGKIKTVGAIICVGGALTTSLYKGKAFYLTHDHHPHYHSPAVAATMAVSSPHWTRGTFMLVGSCLCYATWYILQVKLLEVFPSRYRATLITCIMASVQSTAIGLCLDRNKAALQNRVGTCS

SEQ ID NO: 81346 - protein, 177 aa, Gossypium hirsutum
  unsure (1)..(177): unsure at all Xaa locations
  Clone ID: LIB3828-019-Q1-K6-C11.pep
EAGSTWLWLFINASTGITMAMGLPYYGLRDTSPTYSTNLLNIIPIVTYVFYIFLRMEKLGLGNKACKINTAGAIICVGGALTTSLYKGKASYLTHDHHPHYHSPAVAATMAVSSPHWTRGTFMLSGSRLRYATRYILHAKXLEVSPSRYKTTLITCIMGXCVQSTDLGLCINMTNAA

SEQ ID NO: 81347 - protein, 117 aa, Gossypium hirsutum
  Clone ID: GOSHI-09MAY01-C94349_1.pep
GCMKASSKMQVRTVPLRTLMKLMQMKLLNLVHINHMMCHMWILPSIALPGRIGRDWLFRAAAPVAGIIGVVLILWLGKPLIGRRGSIPSWGQHQIQVANASSLNQRGSRGRRWWSLF

SEQ ID NO: 81348 - protein, 81 aa, Gossypium hirsutum
  Clone ID: uC-gsronu33B154e11b2.pep
LSSAQIEPAKKLDMNNYLIGQEILSLAETDVPPEDLVFHKFYMNKMNSSKKPKKKRINTVMGPASNSGCKCIITKPKGQQG

SEQ ID NO: 81349 - protein, 117 aa, Gossypium hirsutum
  Clone ID: GOSHI-09MAY01-C94269_2.pep
SNQKKKTKIQRHIVRTRIEHNQSKSREGGFPSSFNPLFLYLFQLIRFHFTSKKKKGNAFPRKRATRSLPLRRNRTVEGVLRLKQGLQSSNGLVSIHGGRPESRGTLGIRLRSTKRGG

SEQ ID NO: 81350 - protein, 142 aa, Gossypium hirsutum
  Clone ID: GOSHI-09MAY01-C94269_1.pep
ASYSFLFFEYQNHKPTKEKKRDGGSKVLRDFFDSKVTFFITLYCFRDFCCIFARKKKTLQLIKSPGFIAEWGKHKKEKSKIQCSSLFLFVLLCVCPFSASTRCVALGYGAVLAAETLASYGGWAWGDVVAACEGCGARTPLP

SEQ ID NO: 81351 - protein, 90 aa, Gossypium hirsutum
  Clone ID: GOSHI-09MAY01-C95999_1.pep
CLFISVAFISLTYVVVGKESRWLAVCATVIGSTIMLTTIGSMCYFVILHRMEESKLRSIRKAESRSRSFSMSVASDSEILNNEYKRMYAL

SEQ ID NO: 81352 - protein, 70 aa, Gossypium hirsutum
  Clone ID: GOSHI-09MAY01-C95959_1.pep
TVLGRSYPINRVQICAGNKCQTQIFQEERVEKHNSYLHRKGTSGREHNNIIRSSNWPKRCIAFYLQSPNR

SEQ ID NO: 81353 - protein, 111 aa, Gossypium hirsutum
  Clone ID: LIB3825-004-Q1-K6-E11.pep
RASRVKKKTKNRVRVLFSCFFSTTILTFVRKKNKKKGKTQTLILFLCLYLFVCEIRTKLCWTFFFFLFFFLCLSYKYKIVRLSGMTVACVRALFWPGPLETKNNQIKSQDH

SEQ ID NO: 81354 - protein, 128 aa, Gossypium hirsutum
  Clone ID: uC-gsflnu33B144c04b1.pep
PNHLPPLQIRPVSPRPKLMFRKMKTLAHTCAVPPSHVRPRHARCPMVASLHQNGRFSPPLTLHGPGNPEPVVGRRSPCFVVETDSQKEKGGLFSRVLEPSKAPSSGALSQSQKIPSHGLNHRPRWYCA

SEQ ID NO: 81355 - protein, 178 aa, Gossypium hirsutum
  unsure (1)..(178): unsure at all Xaa locations
  Clone ID: GOSHI-09MAY01-C95719_1.pep
LNWVLGGNSSNLEGRSLSCRLSDKASDQLQTWFEDNDALEQTINGEWFLLSVGNEAATSQPICLSRDENKSFVIGSEKNENFPGKSVVIRSPQVSKTHXAQIIYKEGAFFLIDMQSEHGTYIEHEGRRSWIPSNVAIRLRPSDVIEFGSDKKAALRVKVMRSPPKIAYNEDGQLLQAV

SEQ ID NO: 81356 - protein, 186 aa, Gossypium hirsutum
  Clone ID: GOSHI-09MAY01-C95629_1.pep
TVFNIRERTVASLISLGAAPGALTDPTPEYPLGRTPADLASANGHKGISGYLAECDLSSHLLSLNLDKQGSASTTDSRPDVIQKILELNTAPLNYGDASDGPSLKDSLAAVRNAMQAAARIHQVFRVQSFQNRQLKEYGNDKYGTPPERALSLLAVKSNKPGQHDERVHAAASRIQNKFRGCKCRY

SEQ ID NO: 81357 - protein, 188 aa, Gossypium hirsutum
  Clone ID: GOSHI-09MAY01-C96819_1.pep
NKKRRGNKKKNKKKKSGSGHKPLDINRFVLDTCRRLKEKKSYMVYTAVGCQGGRAEGAQGTEVDAIQSCGGQMTADGRRCRTGGGILWNIIKAREPAAYREIMKKAKEFEKHFKQQNVRQAPAQRKEISSQETTLSNGTAASVPQGAGLIPNDPAEEFRAEGARKSVHDRIRVPVSYEDLLGEDSKDD

SEQ ID NO: 81358 - protein, 70 aa, Gossypium hirsutum
  Clone ID: uC-gsflnu33B111d03b1.pep
MEKSVFVKDVQQLNGNLHHSFSSVSQRDVTYSCGSCGYELNLSSSSRNTATIGSKYGKLIKRGMISFFNI

SEQ ID NO: 81359 - protein, 84 aa, Gossypium hirsutum
  Clone ID: GOSHI-09MAY01-C96589_1.pep
TTEALSCRASCYKEVGEYKKAVADCSKVLEHDESNVSVLVQRALLYESMEKYKLGAEDLRTVLKIDPGNRIARSTVHRLAKMAD

SEQ ID NO: 81360 - protein, 107 aa, Gossypium hirsutum
  Clone ID: GOSHI-09MAY01-C96679_1.pep
FGVTSPCLHSIKYLSCCNHKRIKAKHGLDTRLTEAIRMKSHKAQNGFRTASALFLLFSDSSLLSSESSSSSPYDINCIKVSGTASSLALLVTLILSCNFLGDVEDVN

SEQ ID NO: 81361 - protein, 41 aa, Gossypium hirsutum
  Clone ID: GOSHI-09MAY01-C96619_1.pep
GNLELMATNVSLIITQLECHRMFIYSFLYGPFLFLFSLLRR

SEQ ID NO: 81362 - protein, 113 aa, Gossypium hirsutum
  Clone ID: uC-gsronu33B012c07b1.pep
VAANEKAEAEKILQIKRAEGEAESKYLSGLGIARQRQAIVDGLRDSVLGFSVNVPGTTAKDVMDMVLVTQYFDTMKEIGAACKSSAVFIPHGPGAVRDVATHIRDGLLQATHQ

SEQ ID NO: 81363 - protein, 46 aa, Gossypium hirsutum
  Clone ID: LIB3825-007-Q1-N6-C8.pep
LYDFFLRQDKTSISSFLRIIPGFNVYLFSSGCHFYIMSTGCAYGVG

SEQ ID NO: 81364 - protein, 235 aa, Gossypium hirsutum
  unsure (1)..(235): unsure at all Xaa locations
  Clone ID: GOSHI-09MAY01-C96119_1.pep
MERSSLLNEMEGPKENVACQDLIELEKTTSKQIAALKKELEEKSEALKDMENQNSCLTVKQVLTNQELQDARKESIRGLNDFLNNQTNLXVNRMGEIDQKAFKVACSLKFQDEDWREPCAKACSLWQHNVQDPKWHPFKMINIRGNLHTPIAQKTEIIDKDDEKLKELRNEYGDTAYEAVSTALMEMNEYNASGRYLVPEVWNRKEGRTATMKEIVQYVIEQLKIHKCKRKRRFS

SEQ ID NO: 81365 - protein, 153 aa, Gossypium hirsutum
  Clone ID: GOSHI-09MAY01-C96349_1.pep
STAIMDLIESRWEELVGEMPLKVCYPAMETHEWRIITGCDPKNTRWSYHNGGSWPVLLWLLTAACVKTGRPQIARRAIEIAEARLLKDHWPEYYDGKLGRYIGKQSRKAQTWSIAGYLVAKMMLEDPSHLGMIAIEEDKQMKPILRRSYSWTL

SEQ ID NO: 81366 - protein, 168 aa, Gossypium hirsutum
  Clone ID: GOSHI-09MAY01-C96379_1.pep
PRVRPRVRLTWALDPKTGASLPTSTRTVKALTEVEAFALIAEELKFVAGQFRRLHSRQVQHTFRFHSQQWRTWAACFIQAAWRRYSKRKIMEELRRKEEEEEAAAAGSDGTRNNSGGGSYSIGATFLASKFAANALRGIHRNRNAKSAKELVKLQKPPEPDFTAEDGD

SEQ ID NO: 81367 - protein, 65 aa, Gossypium hirsutum
  Clone ID: uC-gsronu33B178d04b1.pep
SNVAANIKITSWITYQSASSAVKSGSEGFCSFTNSFATFLASKFAAHALRGIHPNRNADAWADEK

SEQ ID NO: 81368 - protein, 50 aa, Gossypium hirsutum
  Clone ID: LIB3825-033-Q6-N6-A2.pep
DIIREHGRRDHFYVIDINYFPGYGKMPGYEHIFTDFLLSLVQSRYKKRSV

SEQ ID NO: 81369 - protein, 52 aa, Gossypium hirsutum
  Clone ID: LIB3825-008-Q1-N6-H6.pep
IFRLHGRRDPFYVIETDSFPGKGKKPGSEHIFTDFLLSLAQSRYKKVNSWKP

SEQ ID NO: 81370 - protein, 99 aa, Gossypium hirsutum
  Clone ID: GOSHI-09MAY01-C96329_1.pep
NSWNRNKKQQIADSDESFTKDQTPTALILNFSDIDSVPSVEDLNKTFSPYGPLVSPGAEVFKKEHPSPKWFSKAEQMQKWPSAVPESTAFSVPHLLVTA

SEQ ID NO: 81371 - protein, 234 aa, Gossypium hirsutum
  Clone ID: GOSHI-09MAY01-C97969_1.pep
QSYIARGQLLALRENRKLPDGYEYTVKTTEKFENVWLRGAFIALQAWKKAMYSDPKNITSNWFGPNVCDYKGVYCVRAMDDPKLKVGAGIDLNHADIAGYLPVELGLLTDVALIHLNSNRFCGIIPESLSELTLMHEFDVSNNRFVGAFPKVVLSWPSVKYIDLRFNNFEGCLPPELFKKDLDALFLNDNRFTCNIPETIGKSTVSVVTFANNKFKGCIPRSIGKMSNLDEIIF

SEQ ID NO: 81372 - protein, 117 aa, Gossypium hirsutum
  unsure (1)..(117): unsure at all Xaa locations
  Clone ID: GOSHI-09MAY01-C97469_1.pep
PTVQSATGAYCYGGQRYGYGGYGXGIDGSYGNAGYGAAGGRSGGTPNSNASARGGDLQGCGGGYMGGGFGDVASDSSQRSGYYGGRQANGPHGGQGGYGGGFGGALGRPLNRGVPIG

SEQ ID NO: 81373 - protein, 112 aa, Gossypium hirsutum
  unsure (1)..(112): unsure at all Xaa locations
  Clone ID: LIB3828-006-Q1-K6-D10.pep
TKMGSLKMRDQAYLQMPDIFGVVIXXXXXXXXXXXXXXXXXXXXXXXXXXXXXXXXXXXXXXXXXXXXXXXXXXXXXXXXXXXXXXXTLTGGDEKKMTMKYTKNPARSPRGR

SEQ ID NO: 81374 - protein, 57 aa, Gossypium hirsutum
  Clone ID: uC-gsronu33B154d03b2.pep
QLYVENVLTSERERMRCCNIEFKYLMHSSQTFVYGGILLAGFFVYFIVIFFSSPPGQ

SEQ ID NO: 81375 - protein, 67 aa, Gossypium hirsutum
  Clone ID: GOSHI-09MAY01-C97349_1.pep
YYQIHGLRKLISVGPSICKNKLMQTSTKLNLQGRYFPSTCCRPIMRRVSINRLFDHVTDEEINNGFP

SEQ ID NO: 81376 - protein, 153 aa, Gossypium hirsutum
  Clone ID: GOSHI-09MAY01-C97379_1.pep
RFAQSSKELFLIPLLLAGVVSILYWRFFDDLRPYAVVQFVPCIVIPLMAILLPPMYTHSTYWLWAAGFYLLAKVEEAEDKVISKWPPHIVSGHPLKHLCAAMVPVFLTLMLAKRTTETNRISLLKTWKVSWTKVNENGPRVESGEYVLPQCSI

SEQ ID NO: 81377 - protein, 156 aa, Gossypium hirsutum
  unsure (1)..(156): unsure at all Xaa locations
  Clone ID: GOSHI-09MAY01-C90819_1.pep
MVTTIPQTPNTPIQSVLIVGNYCHDVLLQGGAVVAETLGGAASFISNVLTGLSVSFHLTSKVGVDFKYPVXPRPHRRSPLSKTTVFHAYFDQGYTKMXHQDRVLKRVEVCDPINPSDLPDRKFDFGMAVGVGGEILPETLERMVEICDAVFVDIQA

SEQ ID NO: 81378 - protein, 225 aa, Gossypium hirsutum
  Clone ID: GOSHI-09MAY01-C90709_1.pep
MRGTSSPYADRKHFESTPPNGWEKIFPGRPHGYGKNFPLLNYGANNGVLSRNNSQSSLGSASIKTSVDEDITSIQSFVAGFKKQLANGQIQSTELEVDESRKSMKDVGLDPMHDASSTPLHWPQEFERLQRAILELWQACNVSLVHRTYFFLLFKGDPADSIYMEVELRRLTFLKESFSEGNQAAEDGRTLTLASSVRSLHREKQTLSRLLRKRFTEEEREKLYK

SEQ ID NO: 81379 - protein, 446 aa, Gossypium hirsutum
  unsure (1)..(446): unsure at all Xaa locations
  Clone ID: GOSHI-09MAY01-C90639_1.pep
LVDHYGKKLEDIEENMRLERSEVSLATQEVRAAFVSFKSRYGAAVAFHMKQSINPTEWVTELAPEPNDVYWPFFXSSSFMRRWLSKIVVIVACILLTILFLIPVLVVQGLTNLNQLEIWFPFLKSILTITFVSQVITGYLPSLILQLFLKIVPPIMEFLSSIQGYICHSDIEKSACNKVLWFTIWNIFFATVFSGSVLYQVSIFLDPKHIPAKLASAVPAQASFFIAYVVTSGWTSTSSELFRIIPLIWSLIRKPFSCCSDEEFEVPSIPYHRDIPRILFFGLLGITYFFLAPLILPFLLVYLCLAYIIYRNQFLNVYAPKYETAGKFWPIVHNSMIFSLVLMQAIAIGLFTLKKLPLASTLIFPLPVLTLLFHEFCRKRFLPNFFAYPAEVLIKRDREDRYXPKMADFYDNLVAAYQDPALLPIQFSANSDSLNSPLISAAQVRH

SEQ ID NO: 81380 - protein, 98 aa, Gossypium hirsutum
  unsure (1)..(98): unsure at all Xaa locations
  Clone ID: uC-gsflnu33B070g04b1.pep
PAKLASAVPAQASFFIAYVVTSGWTSTSSELFRIIPLIWSLIRKPFTCCSDEEFEVPSIPYHIDIPRIFLFGXLLGITYFFLAPLILSFLLDSLLISY

SEQ ID NO: 81381 - protein, 222 aa, Gossypium hirsutum
  unsure (1)..(222): unsure at all Xaa locations
  Clone ID: GOSHI-09MAY01-C90109_1.pep
FLLFCLCARFLFGISLSDRPKWKQFLICSSGFFFGYLVNGICEEYVYNRLQFSYGXYFTFVQGFVYLFLIYLQGFSPKKMVNPWKTYVKLSAVLMGSHGLTKGSLAFLNYPAQLMFKSTKVLPVMVMGAFIPGLRRKSPAHEYVSAILLVLGLILFTLADAQTSPSFSVIGVIMVIGAVVMDSFLGNLQEVIFNMNPETTQMEMLFCSTVVGLPLLIPPRVL

SEQ ID NO: 81382 - protein, 247 aa, Gossypium hirsutum
  Clone ID: GOSHI-09MAY01-C90049_1.pep
LSGGLGWVWGDSIYQIEMIKFIKKTYPQLDVIGGNVVTMAQAQNLIQAGVDGLRVGMGSGSICTTQEVCAVGRGQATAVYKVSSIAAQHGVPVIADGGISNSGHIVKALVLGASTVMMGSFLAGSTEAPGAYEYKNGQRVKKYRGMGSLEAMTKGSDQRYLGDTAKLKIAQGVVGAVTDKGSVLKFIPYTMQAVKQGFQDLGASSLPSAHELLRSGTLRLEVRTGAAHPEGGVPCLVSYEKKFLRDF

SEQ ID NO: 81383 - protein, 220 aa, Gossypium hirsutum
  unsure (1)..(220): unsure at all Xaa locations
  Clone ID: GOSHI-09MAY01-C91939_1.pep
YTSLITSPFLCERFLAIALEVARGMEYIHSQGVIHRDLKPENILIDEEFXHLKIADFXGIACEEAHCDLLADDPGTYRWMAPEMIKRKPYGRKVDVYSFGLILWEMVAGTIPYEDMNPIQAAFAVVNKNLRPVVPGDCPPAMRALIEQCWSLHAEKRPEFWQIVKVLEQFESSFNQDGTLNSVPNLTCQDHKKGLLHRIQKLGPVHLQSNASSMLKPKFT

SEQ ID NO: 81384 - protein, 154 aa, Gossypium hirsutum
  Clone ID: GOSHI-09MAY01-C91929_1.pep
VLIWKTHFAEIGWDVRVALRVCGAFHGKEYIQAQKMRNRQMQIHNNIFAMADVIVAPTTGRTAYSIVDDALKTGEVDCINGAAPIRYQIAGNFGGVPAVTVPVGYDKAGLPIGLQFMGKPWSEPTLMHVAYAMQALCISEYRKPKVFYDLLHKN

SEQ ID NO: 81385 - protein, 77 aa, Gossypium hirsutum
  Clone ID: GOSHI-09MAY01-C91879_1.pep
TLGDYLLKSQEPTVNGMLAGDTGVISRKGKTKTMGKGLRKRLTGSQFSKNINKVVQGKGSKFKAAGNSRVLLRESIT

SEQ ID NO: 81386 - protein, 186 aa, Gossypium hirsutum
  unsure (1)..(186): unsure at all Xaa locations
  Clone ID: GOSHI-09MAY01-C91829_1.pep
VLSVSYGLEEYAATVVNAIRVVCDRKSVKHPIICSESGRAIVSHHSILIFEAMSTTDTAPSMNQINLPFIELSEDARSDYWNMSDAVMRHDNETCLFYADQLKQRCVEQFKEGSLGIEQLAAVDGLFDLVTKIIDGTELVRTYLINLSIFTSIPDFXSIGQNFPIVPVIPKFCSARAQLLKPRYEK

SEQ ID NO: 81387 - protein, 95 aa, Gossypium hirsutum
  Clone ID: GOSHI-09MAY01-C91589_1.pep
HRTARHLVSALSTPETGAPSNCLHLQRPETRGHVGGVPTPSSKSNPKGGGAFSVVFFLGGLRRHGLQGCFKRVKNPGSCGFNHRSQVEATAPRGR

SEQ ID NO: 81388 - protein, 180 aa, Gossypium hirsutum
  Clone ID: GOSHI-09MAY01-C91629_1.pep
WDLSKIFCFSVNTESIAYMITYGLSAAASTRVSNELGAENPRKAKTAMVVSLKLSILLALTVVVALAFGHNIWAAFFTNTASIINQFASITPFLLISITIDSFQGILSGVARGSGWQVLAVWANLGTFYLIGMPVAGLLAFKFKLYAKGLWIGLICGLSCQAAALLLLTLCRKWTKIELS

SEQ ID NO: 81389 - protein, 201 aa, Gossypium hirsutum
  unsure (1)..(201): unsure at all Xaa locations
  Clone ID: GOSHI-09MAY01-C91199_1.pep
LSLLCECNGLPEVATYLEKVIKVNDYQETRFVNRIVSSMFNTVSXKKIAVLGFAFKKDTGDTRETPAIDVCKGLIGDKAKLSIYDPQVNQDQIQRDLSMKKFDWDHPVHLQPMSPTSVKDVSVVWDAYTATKDAHGICILTEWDEFKNLDYQKIFNDMQKPAFVFDGRNVVDAEKLRKIGFIVYSIGKPLDDWLKDMPAVA

SEQ ID NO: 81390 - protein, 201 aa, Gossypium hirsutum
  Clone ID: GOSHI-09MAY01-C91169_1.pep
AKASVGTAMKSFNSVILKFPKIDESLRNCKAVFEQFDEDSNGAIDNEELKKCFNKLQISFTEEEEISDLFKACDFNQNMGIKFNEFIVLLCLVYLLKDNAPGHEGKSRMGMPNLEATFETFVDAFVFLDKNKDGFVSKNEMVQAINESGERSSGRIAMKRFEEMDWDKNGSVSFKEFLFAFTNWVGIDDAEDDEDEEEGTV

SEQ ID NO: 81391 - protein, 87 aa, Gossypium hirsutum
  Clone ID: GOSHI-09MAY01-C91349_1.pep
SYSRGIPKVGIYFLSILGVIWVFINLFTPKKPQNKFFTKTLFEKKIQWVNFFPNALKIYILIFDTILKNKKYFPQKKKKKKKKKKKK

SEQ ID NO: 81392 - protein, 129 aa, Gossypium hirsutum
  Clone ID: GOSHI-09MAY01-C91329_1.pep
LLSSSHKPFSMARGIPNYDDGGSFYDHTGGGGGSGGQYFTQSSSLSTSSPSDSLYHSSINRGTIGDVFFGTDDIRDTRDLLYKEDVLESYQKETAQKYLRQRSKKRSISNFGCVEFLKLLLLYCCRCII

SEQ ID NO: 81393 - protein, 62 aa, Gossypium hirsutum
  Clone ID: GOSHI-09MAY01-C91299_1.pep
ARTAQNVEEAFVKTAAKILQNIQEGVFDASNESSGIKIGYGRAQGPSGARDGAVAQSGGCCG

SEQ ID NO: 81394 - protein, 51 aa, Gossypium hirsutum
  Clone ID: GOSHI-09MAY01-C91219_1.pep
MLIQHLSALKYTFPPPPPSPSPPPPSFENTPLPPIRGVSYASPPPPVIPYY

SEQ ID NO: 81395 - protein, 62 aa, Gossypium hirsutum
  Clone ID: uC-gsflmaxxa009e06b1.pep
MLGDFLNRLLLLVFGYAYPAFECFKMVEKNRVETEELRFWCKYWILVAFLTIIERITDIFVS

SEQ ID NO: 81396 - protein, 178 aa, Gossypium hirsutum
  Clone ID: GOSHI-09MAY01-C92989_1.pep
MACLDMYNSEHKGHHHHCPPMSPRISFSNDFVETQQVMKQERNSREAPVSSDFEFSVSNYSMMSADELFFKGKLFPFKDNCNNQMQRTLREELLAGDDDDNNVTLTPPKGSTRWKGFLGLKRTHIGSKKADKINEVSMERMGDNKRFAFVHEDTHVAKTSQELLTEGGSGYRNVEIGI

SEQ ID NO: 81397 - protein, 62 aa, Gossypium hirsutum
  Clone ID: GOSHI-09MAY01-C92909_1.pep
NSVVDPQNLLEEKEAIEEKLALSDYELRLAREDVMKLKTELQRKVDLLRDKLSSKFSYLFDI

SEQ ID NO: 81398 - protein, 199 aa, Gossypium hirsutum
  Clone ID: GOSHI-09MAY01-C92559_1.pep
APFYTLGPLTTDIAPGYDHITSAIGAANIGALGTALLCYVTPKEHLGLPNRDDVKAGVIAYKIAAHAADLAKGHPHAQAWDDTLSKARFEFRWMDQFALSLDPMTAMSFHDETLPSEGAKVAHFCSMCGPKFCSMKITEDVRKYAEEHGYGNPEEAMQHGMDAMSAEFLAAKKTVSGEQHGEVGGEIYLPASYVNSSDR

SEQ ID NO: 81399 - protein, 205 aa, Gossypium hirsutum
  Clone ID: GOSHI-09MAY01-C92419_1.pep
RSSLRGLGKPEVSATQKVSHTVVTSTVKKPFGAKKTGKTGGLGARKLTSKPSEILYDQKPEEPVAPVTSSTKNTVPVASSFPSRFEYVENGQSSEFNSGGPQVVSHIAPPKSSSFFADFGMDRGFQKNSISNSPKVQVQETDEARRKFLNAKSISSGQFFGDQTRAADNDAQVTLQKFSGSTAISSADLFGKDADHDLTASDLIN

SEQ ID NO: 81400 - protein, 39 aa, Gossypium hirsutum
  Clone ID: GOSHI-09MAY01-C92159_1.pep
DEWVETKLKLHCIMNIICTCIDLLNVLYIMLKFCYDAIN

SEQ ID NO: 81401 - protein, 238 aa, Gossypium hirsutum
  Clone ID: GOSHI-09MAY01-C92109_1.pep
RLARLAISFIAIFVLFTVSHARLIVPDQAVTSEEIVAELPESDSTTTNVILLPNEKPNSEPAKTVDSKHDVDDASEADPDLVSVPLTIISFRPVKGHFPRHPLVPFRNGHDCRYHRRFRPLNSRFQRKRYVSHGNGMALSDERSRSDPESIRLGHQIRGRWTRFPNNGAESKEHVDFRKVRPYNHEHEQDHDNNDHHSHHRYQHQRRHHRRGEEDERRESEEKDGGFIKRFRKFLINF

SEQ ID NO: 81402 - protein, 130 aa, Gossypium hirsutum
  Clone ID: GOSHI-09MAY01-C92089_1.pep
TNPWLHLQYFIASHIRRLISIRAKFIREPSKHHSALPAVLDLYSTLICLNTIPTLHFLEIHVYQIRVRHVLISRYSCSTNKQIHLKKAAFIDGDYSISSDGGNVKLEDFFSLMNKQLWKCEKNEYLNKNK

SEQ ID NO: 81403 - protein, 251 aa, Gossypium hirsutum
  Clone ID: GOSHI-09MAY01-C92039_1.pep
MATRLAALRLRSHLLRNCSTLSTLRSPPSISHPAPPPISTTHHYIMSPTLRFLYTSTRRIPTRPKKVDIGARARQLQTRRLWTYALTFSCVAGFVVLVLNNFQDQLVFYVTPTDALEKYTKNPSKTKFRLGGLVLEGSVVQPSSSKEMEFVITDLITDILVRYEGSLPDLFREGHSVVVEGFVKPFTEEIKRDVSTRGVSSKARSGDCYFSATEVLAKHDEKYMPQEVAAAIEKNKKMIEDGLEGAKESVA

SEQ ID NO: 81404 - protein, 173 aa, Gossypium hirsutum
  Clone ID: AI731566.1.pep
MATRLAALRLKSHLLRNCSTLSTLRSPPSISHPAPPPISTTHHYIMSPTLRFFYTSTRRIPTPLPSFYNFAPARQLHTRRLWTYALTFSCVSGLVVLVLTNFQDQLFFYVTPTDPLHKYIKNPSKTNFTLRGLVLQGNVVQPTSSKQMEFVLTHLDTDIPVSYQSSPPHLFTV

SEQ ID NO: 81405 - protein, 593 aa, Gossypium hirsutum
  unsure (1)..(593): unsure at all Xaa locations
  Clone ID: GOSHI-09MAY01-C93959_1.pep
EKIAELVENKTLEGINDIRDESDRSGMRVVIELKRGADPSIVLNNLYRLTALQSSFNCNMVGILDGQPKQMGLKELLQAFLEFRCSVVERRARYKLSQAQDRRHIVKGIVVGLDNLDRVIDIIKEAKGNAAASAGLKEEFNLSDKQAEAVLDINLRRLNLLERKNFVDESASLMEQISKLTELLSSRKNILQLIEQEALELKNKFSSPRRSILDDSDGGQLEDIDVGPEEGMLLAFTEKXDVKRMKPSTFNLQNRGTIGKSVGKLRVNDAMSDFIVCRSHDHVLYFSDRGIVYSAYAYKIPESSRTAAGTPLIQIISLSEGERITSIVPVTEFAEDQFLVMLTVNAHAFALALDYFSAIRSTGIIAIQLVPGDELKWVRCCTNDDLVAMASQNGMVILSSCDIIRALSRNTRGAIAMRLKEGDKMASMDIIPAPRHTDLDKAAEDSISYDKGGSGPWLLFVSENGYGKRVPLSSFKQSPLNRVGLIGYKFSSEDRLAAVFVVGFSLTEDGESDEQVVLVSQSGTVNRIKVRDISIQSRYARGVILMRLEHAGKIQSASLISASAEEAAELLPGMQSEEATTNAGTAEGISMSS

SEQ ID NO: 81406 - protein, 195 aa, Gossypium hirsutum
  Clone ID: GOSHI-09MAY01-C93869_1.pep
KRTEHTQRAIEKHADDEEAADLSKSTAALKNHKMNSDQSRGEDTEMGDENLTDREESDKEVGSVSQERCSEDTKGSPNHSEEAHEVKSDADSYLSEEADSISKNAEKEDEEEKAANELASEVSRERDPTASKATEREVKETEESDQIETKSRVSKKSSKGLMSSSVDVDSGISDDEPLCKWKLKVGKSGSKKPVQ

SEQ ID NO: 81407 - protein, 68 aa, Gossypium hirsutum
  Clone ID: GOSHI-09MAY01-C93839_1.pep
METVRFGSGKKPAESKKHFLWPIPPTGALTGSVLDVSQAYRICYQSNAPGWRHFSHSIARNFLRLGKY

SEQ ID NO: 81408 - protein, 72 aa, Gossypium hirsutum
  unsure (1)..(72): unsure at all Xaa locations
  Clone ID: GOSHI-09MAY01-C93589_1.pep
SQLCGKIDHLVXMCYHRFDETFSGAIVSSQSGHRQYSSPAHDQSWYLDSGATNHITPDVANLLTVSPYTGWF

SEQ ID NO: 81409 - protein, 133 aa, Gossypium hirsutum
  Clone ID: GOSHI-09MAY01-C93519_1.pep
KYKVQFLNSPSSKSKLQDITNLNPNPNLKPITLIPITAQNYIGPNSPKYFRNRNPRVSTSSAAARFQPTAPYGLLAPQPRPRLCTPMHSPRTCATHTPYLQANTKATAQQRGKNKKRKVYFSFHFFVSAIKAM

SEQ ID NO: 81410 - protein, 78 aa, Gossypium hirsutum
  Clone ID: GOSHI-09MAY01-C93509_1.pep
EKLSLATLHYMDYQYYHDKIKIGKSRKNRRTGIIFLLDSCNSSNTFCSQISSQTPSAIALYFASAMLCLFLWFCFCTV

SEQ ID NO: 81411 - protein, 64 aa, Gossypium hirsutum
  Clone ID: LIB3825-010-Q1-K6-A10.pep
EISQPRFLTGTILISFLYVQMQLCSHYVLQGNFEILRWFLSSKQNNVIFTIYILCLLILIPDLP

SEQ ID NO: 81412 - protein, 75 aa, Gossypium hirsutum
  Clone ID: GOSHI-09MAY01-C93799_1.pep
LGGGGMLSVGLIRYVNLFFHASGSTSECLLPRLVDNFRWVLLFQIPHLGSFIWEQPLGGGLNFVAHRLMWWNDHV

SEQ ID NO: 81413 - protein, 138 aa, Gossypium hirsutum
  Clone ID: GOSHI-09MAY01-C93649_1.pep
QPTMALMDEATKAFTEVPNEAQSRGSRRTAARNDGRHQGSSRDIAREEIGIEVRLLSVESSLEELKRMIWDLKAKAKLVEDLVNLVIKAVIDNDFNIEQATMVMIDEGTGAFTEALNESRPVVGGSGGGHEDSSSKHN

SEQ ID NO: 81414 - protein, 195 aa, Gossypium hirsutum
  unsure (1)..(195): unsure at all Xaa locations
  Clone ID: LIB3825-012-Q1-N6-D3.pep
MAASTLCCSSSPLVSDRAKPSCSIKAVTPFSXSFPSKNPCISRLSLVRAQAAGDNNKDTSVDVHVNKDNQGTAVEKRPRGLAVDVSPFGKYLHFGYVPFIIHFHTILTXSLMTGLLDPLSPLRSMRQMLDTMDRIFEDAMILPGSRSRTGGQVRAPWDIKDDEQEIKMRFDMPGLTKEDVKVSVEDDTLVIKGEH

SEQ ID NO: 81415 - protein, 150 aa, Gossypium hirsutum
  unsure (1)..(150): unsure at all Xaa locations
  Clone ID: uC-gsronu33B172b07b1.pep
MAASTLCCSSSPLVSDRAKPSCSIKAVTPFSVSFPSKNPCISRLSLVRAQAAGDNNKDTSVDVHVNKDNQGTAVEKRPRGLAVDVSPFGLLDPLSPLRSMRQMLDTMDRIFEDAMILPGSKSRTGGQVXAPWDIKDHEQEIKMRFDMPGL

SEQ ID NO: 81416 - protein, 165 aa, Gossypium hirsutum
  Clone ID: GOSHI-09MAY01-C93019_1.pep
HASDLFQKICEKRILMGRLTSTVEIPERRRQSDRESGRYASESDGSPDYRRRRRSPSYEAYERDHQSRKDYQQRNPSGSSEYRNPRRRSPVESPERRRRFDRENGRYASESDDSVDYRRRRRSPSYDVYDRDQPRNRHRSESPGDENPRRRNPAHDGTLNCLAKK

SEQ ID NO: 81417 - protein, 135 aa, Gossypium hirsutum
  unsure (1)..(135): unsure at all Xaa locations
  Clone ID: GOSHI-09MAY01-C88559_1.pep
LRRQLFGRXKRRRSHSRSKSPNRRRSSHDERPHGSRDHGRRYNDRDNYHESRSRRHRSTSPGHRSGRSRSPGGKRNHSPIREGSEERRAKIEQWNREREQQENANNFEKDAANNNKKNGRNEYLRNDDKNYQQQE

SEQ ID NO: 81418 - protein, 192 aa, Gossypium hirsutum
  Clone ID: GOSHI-09MAY01-C88569_1.pep
MHYWVRAFASDFSGTPPQPRSGHTAVPIGKSKIVVFGGLLDKKFLSDITVYDIENKLWFQPECTGNGSDGQVGPSPRAFHVAVAIDCHMFIFGGRSGNRRLGDFWVLDTDIWQWSELTSFGDLPSSRDFSAASAIGNQKIVMYGGWDGKKWLSDVYILDTISLEWMELSVTGSLPPPRCGHTATMVEKRLLV

SEQ ID NO: 81419 - protein, 216 aa, Gossypium hirsutum
  unsure (1)..(216): unsure at all Xaa locations
  Clone ID: GOSHI-09MAY01-C88709_2.pep
KLDVLDPNACPKRSDDGLPXEDKLLSACFNQLYKXMDPDFATTWCNFLKRVPNRALWLLRFPAAGETRLRAYATQQAVQPDQIIFTDVAMKWEHIRRSALADLFLDTPLCNAHTTGTDVLWAGLPMVTLPLEKMATRVAGSLCLATGVGEEMIVSSLKEYEEKAVSLALNRPKLQELSDKLKAARMTCPLFDTARWVRNLERAYCKMWSVYRSGQQ

SEQ ID NO: 81420 - protein, 134 aa, Gossypium hirsutum
  Clone ID: GOSHI-09MAY01-C88709_1.pep
RSALADLFLDTPLCNAHTTGTDVVWAGLPMVTLPLEKMATRVAGSLCLATGVGEEMIVSSLKEYEEKAVSLALNRPKLQELSDKLKAARMTCPLFDTARWVRNLERAYCKMWSVYRSGQQPRHIRVTENDEEFA

SEQ ID NO: 81421 - protein, 145 aa, Gossypium hirsutum
  unsure (1)..(145): unsure at all Xaa locations
  Clone ID: LIB3825-002-Q1-K6-B4.pep
FAWARLRAYATQQGVQPDQIIFTDVAMKSEHIRRSALADLFLDTPLCNAHTTGTDVLWAGLPMLTFXFEKMATRVAGSLCCSPPGEEMIXSSLKEYEEKAVKLALNTQESSTTFLPYKINLPRCPRRYLQCTPTFKQILHDSLAL

SEQ ID NO: 81422 - protein, 137 aa, Gossypium hirsutum
  Clone ID: GOSHI-09MAY01-C88649_1.pep
VRPNDSTEHIFETRVKGTVGYLDPEYMKTYQLTTKSDVYSFGILLIEILTGRRPVELRRPGEERVTPRWAFNKYNEGHVVELVDPRMEVVDAEILTKMFALAFQCAAPVRSDRPEMKSVGEQLWAIRADYVKTSSRG

SEQ ID NO: 81423 - protein, 97 aa, Gossypium hirsutum
  Clone ID: LIB3825-020-Q1-N6-C5.pep
SMRAKVADFGFARVGPMDSDRTHISTKVKGTVGYLDPEYMKTYQLTTKSDVYSFGILLIEILTGRRPVELRRPVEERVTPRWVSLFFLILLSLTPLL

SEQ ID NO: 81424 - protein, 144 aa, Gossypium hirsutum
  Clone ID: GOSHI-09MAY01-C88609_1.pep
KYSPIFNVHLQATGSIAQIHYPKLVLSPISLNSFNPNPTNLNPKPSPKTRSPNQRKLPANPRDQNPKLSHRSYLQHASSLRATSPYGSIHQLATVPAKKTKTTQQNNNNNRPADIKKGRNNRKKRGKNHFCNIRQYKGPIASFL

SEQ ID NO: 81425 - protein, 95 aa, Gossypium hirsutum
  Clone ID: uC-gsronu33B038f10b1.pep
LAAKTEKLTANPKDQNPKLSHRSYLQHASSLRATSPYGSIHQLATVPAKKTKTTQQNNNNNRPADIKKGRNNRKKRGKNHFCNIRQYKGPIASFL

SEQ ID NO: 81426 - protein, 197 aa, Gossypium hirsutum
  Clone ID: GOSHI-09MAY01-C88169_1.pep
ADLRNRSKEALQYMHTKTCLPIEENARSILTPYAFNALQHEIVQSMQYATTELANGSYLVRHYKKMEGEYLVIWISQDEQIHCSCKEFEHSGILCRHCLRVLTVKNYFEIPEKYILFRWRLESSLVALEDQNGQCNSDEYAQVFHSLAATLLTESLFTKERFNHVHRELTRLLEHVRNMPVSNEFASNMAANNISES

SEQ ID NO: 81427 - protein, 143 aa, Gossypium hirsutum
  unsure (1)..(143): unsure at all Xaa locations
  Clone ID: GOSHI-09MAY01-C88009_1.pep
MDAGFAYERXGVPIGRRAPFRWLYEVPWGMSKAVTYVKKHYGSPNIILSENGMDDPGNLTFPESLYDINRVSFYRSYLKELKRAMDDGANVPGYFAWSILDNFEWLLGYPPRFGLVYVDPNDLKRYPKLSAYWFKQMLERKNF

SEQ ID NO: 81428 - protein, 164 aa, Gossypium hirsutum
  unsure (1)..(164): unsure at all Xaa locations
  Clone ID: LIB3831-002-Q1-K6-G2.pep
RVKASVPSPLYGWEDISRNSIGIIHSLEDDGDIGIAFCFRSKPFCCSVTDVERVPPFEVGQEVHVMPSVSQPRLGWSNETPATVGKISKIDMDGALNVKVDGRHSLWKVSPGDAERLSGFEVGDWVRSKPSLGTRPSYDWNTIXKESXAVVHSVQDTRYLELAC

SEQ ID NO: 81429 - protein, 182 aa, Gossypium hirsutum
  Clone ID: LIB3543-059-Q6-K6-G11.pep
EIETDGLLMIEIPNDHPWQADPSDMERVEDFKVGDWVRVKASVPSPLYGWEDISRNSMGVIHSLEDDGDIGIAFCFRSKPFCCSVTDVERVPPFEVGQEVHVMPSVSQPRLGWSNETPATVGKISKIDMDGALNVKVDGRHSLWKVSPGDAERLLGFEVGDWVRSKPSLGTRPNYDWNTIGK

SEQ ID NO: 81430 - protein, 218 aa, Gossypium hirsutum
  Clone ID: GOSHI-09MAY01-C88289_1.pep
MAIESYVVVHNIAKRHNVGTLARSATAFGVAELILVGRRDFNAFGSHGSTSHLRFRHFHSLTDARLFLKEKDCDICGVEITEDAVSITDHPFKKSTAFLLGNEGTGLSAKECEICDFFVYIPQYGGGTASLNVTVAASIVLHHFGVWAGFSKRIRDGNKFVVAEKPLKQVSRKYCTETDDRIIEERKSRGESASNGFFEDGKNGVSSSNLLDSLFPDE

SEQ ID NO: 81431 - protein, 149 aa, Gossypium hirsutum
  unsure (1)..(149): unsure at all Xaa locations
  Clone ID: AI054498.1.pep
MAIESYVVVHNIAKRHNVGTLARSATAFGVTELILVGRRDFNAFGSHGSTSHLRFRHFHSLTDARLFLKEKDCDIAGLEITEERCFHNXHPFKKSTAFLLGNEGTGLSAKNVRYGDFFVYIPIGEGGTASXNVTGAASLFCIIWNWAGF

SEQ ID NO: 81432 - protein, 145 aa, Gossypium hirsutum
  Clone ID: GOSHI-09MAY01-C88219_1.pep
FFLFFGVAALTVIQASQISRNITTNEMANVMRYSYLKGPGGRFRNPYDHGCWKNCSDFLIKGYNEDIQVIEDAAHSEGIGMVQMTRENGSLGNKNGHIAINVNSSKTNTHQGHLHSSQCTYSKLETESGTVGLGHGSGRSSAYSV

SEQ ID NO: 81433 - protein, 64 aa, Gossypium hirsutum
  Clone ID: GOSHI-09MAY01-C89959_1.pep
QRPGSLGRGGGTSSGVYGFVQTRQPGALFFSTLVGCLLLVMGVLFVTQHLNSMKGKPRAASGPR

SEQ ID NO: 81434 - protein, 279 aa, Gossypium hirsutum
  Clone ID: GOSHI-09MAY01-C89969_1.pep
MVFEKTPIFFMVVLVLVSLDLCFGSELGMSPAHGDHGHHHHCDHGHGHDHHHHHRHVEAPAWAVAWVPEELAEEEDMKLYGFGPYLDDHDRDRDHHHQDLSSLGLWLRALGCSLLVSLASLVCLVILPVIFIQGKPSKAVVDSLALFGAGAMLGDAFLHQLPHSFGGAHSHSHDDHGDHAHHTHTGHDNTHAHSLRDLSVGLSVLAGIVLFLIVEKLVRYVEENSGGASGWSHGHHHHHHKSNKNLKKKDEDAAHRNSSQPVGDTPDNSLNADNATQPE

SEQ ID NO: 81435 - protein, 160 aa, Gossypium hirsutum
  unsure (1)..(160): unsure at all Xaa locations
  Clone ID: GOSHI-09MAY01-C89849_1.pep
MPEINVPTHFRCPISLDLMKDPVTLCTGITYDRENIERWIEAGNETCPFTKQVLETFDLIPNHILRRMIQDWCVQNRSLGVERIPTPRIPVSQCEVSAVGSRIVGATRRGDGKXCGELVRKIKNWGKESERNKLCIMENGTGCILSASFESFARDSFEKQ

SEQ ID NO: 81436 - protein, 247 aa, Gossypium hirsutum
  unsure (1)..(247): unsure at all Xaa locations
  Clone ID: GOSHI-09MAY01-C89139_1.pep
NSPLSLKXIKDAGYEKMTVVQEATLPVILKGKDVLAKAKTGTGKTVAFLLPSIEIVSKLPPVDRDVKRPPIHVLVICPTRELAIQAASEAKKLLKYHPSIGVQVVIGGTRLALEQKNLQANPCQILVATPGRLRDHLENTAGFATKLMGVKVLVLDEADRLLAMGFRKDIERIIAAVPKQRQTLLFSATVPEEVHQICHIALRRDHEFINTVQEGTEDTHPLVRQVHMVAPLDMQFSLLYVLLKEHI

SEQ ID NO: 81437 - protein, 420 aa, Gossypium hirsutum
  unsure (1)..(420): unsure at all Xaa locations
  Clone ID: GOSHI-09MAY01-C89049_1.pep
NLFDGGLDEVVLVSSAHQFKTLSGYEAADERNSWDSFKYLVADEESRYNASINMPIAGETSQNVTLMVSVEDTGIGIPLIAQDRVFMPFMQADSSTSRNYGGTGIGLSITKCLVELMGGHISFVSRPQVGSTFSFTAAFGRCKKASFSDXPKKSNTEDLPSSFRGLKAIVVDGKPVRAAVTRYHLKRLGMLVEVGSSVKMAASAGGKNGSSCGTKNQPDIILVEKDSWLSGEDGGLSLGMLDRKQNGHVFKLPKMILLATNITNAELEKAKAAGFSDTTIMKPVRASMVAACLQQVLGIGKKRQAGKDMLNGSLVLRSLLYRKKILVVDDNMVNRRVAAGALKKFGAAVECADSGKAALKLLQIPHYFDACFMDIQMPEMDGFEATRRIRKMESQANEQINGKWHVPILAMTADVIHATL

SEQ ID NO: 81438 - protein, 104 aa, Gossypium hirsutum
  Clone ID: GOSHI-09MAY01-C89039_1.pep
EEKLSLAKSHPAVNDVPELEEELEFESDPELESESIYQESDMLDELSEDESSDVDEEDREQHIEHEDLSALKLPELRALAKSRGLKGFSKMKKSDLVAILSSSS

SEQ ID NO: 81439 - protein, 196 aa, Gossypium hirsutum
  Clone ID: GOSHI-09MAY01-C89029_1.pep
MVPKLLFSTFTILITCLFSFGIAQPCPRPRPCPSISPPPRPTRTVSYVRPRPPLYDPSLRLLPRQPNNNPGPLANRARILAITQELKRNITFDPQNYTPTWVGNNYCLFKGFICDTVPDLNITGLAGIDFNGARFGGNLNFYRFIQNLPDIAIFHANSNNFSGVINQGLSGLRYSYEIDLSNNKFIGGFPSNVLSA

SEQ ID NO: 81440 - protein, 189 aa, Gossypium hirsutum
  Clone ID: GOSHI-09MAY01-C89339_1.pep
EEKMDEEECGENGRSSETFGNEIEEGEAHEGGAVWDVFRRQDVPKLQDYLKKHFREFRYVHCCPVSQVFHPLHDQSFYLTMDHKAKLKLEYGIEPWTFVQKLGEAVLIPAGCPHQVRNIKSCIKVALDFVSPENVGECVRLTEEFRLLPRDHREKEDKLEVKKMTVHAVQQAVKYLDPNAEVELAYKVN

SEQ ID NO: 81441 - protein, 212 aa, Gossypium hirsutum
  Clone ID: GOSHI-09MAY01-C89299_1.pep
MAKAVRLWFQRFSASDMVLGLVLTNVAVFLLWRIADRRFMMDNFMVSLDNFKSGRLHTLITSAFSHIDIEHIVSNMIGLYFFGYNIGRIFGPEYLLRLYLAGAMGGSVFYLVHHAFLAKGQATRMMDPSRTPGLGASGAVNAIMLLDIFLNPKATLYFDFIIPVPAMLLGIFLIGKDILRIIEGNSHISGSAHLGGAAVAAIAWARLRRGRF

SEQ ID NO: 81442 - protein, 178 aa, Gossypium hirsutum
  Clone ID: GOSHI-09MAY01-C84999_1.pep
MAENGEEKLLAVARHIAKTLGQNDTMADDILQIFSNFDGRFSREKLSEKMVDDNNPRGCAALERAVNSLDRQISQYVALDHPIWAHTADSSAFLDAIDDLIRTMRDWEPMAAEKSVSACLVRADDLMHQAMFRVGDEFRSLMDRGAESFELNRSNHESTGNLSFDSDDDNEENEDGLL

SEQ ID NO: 81443 - protein, 206 aa, Gossypium hirsutum
  Clone ID: GOSHI-09MAY01-C84449_1.pep
GEGRNEVEDEFYNKGPLCASQDALLRVHTVVANAIAAMGDSEKKRADKYREECQILVPSSQSSNIIGKAGSTIKKLRGKTRASIKVTAKDAGDPSHSCAMDFDNFVQITGEPEAVKKALFAVSAIMYKFSPREEIPLETTVAEAPPAQSIIIPSDVPIYPPGGLYPNPDPILPSRSVPPILGAAHVSDLQGYGDTGSTWPVYSSAL

SEQ ID NO: 81444 - protein, 82 aa, Gossypium hirsutum
  Clone ID: GOSHI-09MAY01-C84769_1.pep
MESELVLHNGGCHCKKVRWKVQAPISVIAWKCNCSDCSMRGNVHFVVPRQRFELLSDSNQFITTYTFGSHTAKHTFCKVCGI

SEQ ID NO: 81445 - protein, 121 aa, Gossypium hirsutum
  unsure (1)..(121): unsure at all Xaa locations
  Clone ID: LIB3582-029-P1-K1-C6.pep
MESELVLHNGGCHCKKVRWHVQAPTSVVAWKCNCSNCSMRGTIHFVVPRQRFELLGDSEEFITTYTFGTHTAKHTFCKVCAITSFYTQRSNPDGIAVTLAXLDPGTLSHVEIRNFDGKNWE

SEQ ID NO: 81446 - protein, 157 aa, Gossypium hirsutum
  Clone ID: GOSHI-09MAY01-C84659_1.pep
AKSNSFVGTHEYLAPEIIKGEGHGAAVDWWTFGIFLYELLCGRTPFKGAGNEETLTNVVLESLKFPDSPLVSFQARDLIRGLLVKEPENRLGTEKGAAEIKQHPFFEGLNWALIRCAVPPELPELYEFGILSMMSPEAESNYLECKGTGDHLEFELF

SEQ ID NO: 81447 - protein, 222 aa, Gossypium hirsutum
  unsure (1)..(222): unsure at all Xaa locations
  Clone ID: GOSHI-09MAY01-C84069_1.pep
FFVRGASGSKFLNYINKHIIPVFDKLPEXRKLDLLKGLAEISPYTTPQDSRQILPSVVQLLKKYMPRRKTGEETNFTYVECLLFSFHHLAHKAPNATNSLCGYKIVTGQPSDRLGEDFSEYYKEFTERLSSIEDLTRATMKKLTQGMAEHNKAMAAAKSDEAKESIKTQKQNTTTGLRTCNNILPMTKPLHSKTPAFIGDKSVNLSWKEPVKPSVPYSATGT

SEQ ID NO: 81448 - protein, 72 aa, Gossypium hirsutum
  Clone ID: GOSHI-09MAY01-C85419_1.pep
NAYIFYKSLKITKKIPRWPQILAHTPNSKNSKMTLLQICPIVISNYAPINGWHRAVLSFNSKCQNGRGNLQK

SEQ ID NO: 81449 - protein, 66 aa, Gossypium hirsutum
  Clone ID: GOSHI-09MAY01-C86929_1.pep
MESGYEGPGEFYGGYGAGAAAGGYGRSYDAGLGGGNGGGAAGGSSFYGSRGGYSGAGSGRYHPYGR

SEQ ID NO: 81450 - protein, 264 aa, Gossypium hirsutum
  Clone ID: GOSHI-09MAY01-C86859_1.pep
MSQGQPRRPQQPAGQGENQEPIKYGDVFNVSGELANKPIAPQDAAMMQTAETQVLGQTQKGGTAAVMQSAATRNEQVGVVGHNNITDIAGEQGVSVAETDVAGRRIITEAVAGQVVGQYVQATPVMTSQVGAVQQNAITIGEALEATAKTAGDKPVDQSDAAAVQAAEVRATGSNVIIPGGLAATAQSAAAHNATLDRDEEKIKLNQVLTGATAKLPADKAVTRQDAEGVVSAELRNNPNVATHPGGVAASMAAAARLNENVNA

SEQ ID NO: 81451 - protein, 176 aa, Gossypium hirsutum
  Clone ID: GOSHI-09MAY01-C87929_1.pep
KRIRLEEGKSEEKKKKRRRKKKKDKGSSSSSSSSSSSSSSSSSSSSSSSSDSDSDKKKKRKEKKKQEKEDDKEPKEDEHKEKKDDETKEKKKKKKRDKDHEEGEGKGKVKDLSKLNRMLERTNKRLEILIARKADIEMRIKEAEEKKCSEAAAAAAAAAAAAAKAAVEEQITEATL

SEQ ID NO: 81452 - protein, 78 aa, Gossypium hirsutum
  Clone ID: GOSHI-09MAY01-C87859_1.pep
PNLKPVVLVVCLRVSVRFLISFVLTVVNMGDESERGNTSSQSCNSLTFFFLSLYFITIILLEIVTVINAPFACFRRSI

SEQ ID NO: 81453 - protein, 219 aa, Gossypium hirsutum
  Clone ID: GOSHI-09MAY01-C87689_1.pep
PGRPCVRLGYLPLELAQYLSPLIEKYCLSFEGYVISVPKRSLDAVPIQIVCQNSIFNGKKGCDEFEALHLWQKALQVVEFAKNRPPNTTKYQQNFCLLLKEVLTSSPHLFTKDKKKFIESFTSLSEDSQRLFVRLYTRKGPWFRLSTIMYPEICNPQQAVKELSATGYLYLFEDTTKLHDDEMKDLLSLLTVSELRDILCTLRKVWIFYVYFLLFFVAL

SEQ ID NO: 81454 - protein, 187 aa, Gossypium hirsutum
  unsure (1)..(187): unsure at all Xaa locations
  Clone ID: GOSHI-09MAY01-C87679_1.pep
PRVRRTLRELKLLRHLRHGNVIALKDVMMPTHRRSFKDVYLVYELMDTDLHQIIKSSQVLTNDHCQYFLFQLLRGLKYLHSANILHRDLKPGNLLINANCDLKICDFGLARTSNAKGQFMTXYVVTRWYRAPELLLCCDNYGTSIDVWSVGCIFAELLGRKPIFPGTECLNQLKLIINILGSRRRRI

SEQ ID NO: 81455 - protein, 133 aa, Gossypium hirsutum
  Clone ID: GOSHI-09MAY01-C87019_1.pep
GRVGGRVGLVGTIKQLISMYGCFPSLRNLYLNNNYLTGGFPAKIAGLTNLEILYLSYNKLSGVIPHEIIHLPRLTSLHLDHNQFAGRIPEALYRHPFFIEIVDRYIAGNSFQKGAKSIGVPRILELADSEFLV

SEQ ID NO: 81456 - protein, 113 aa, Gossypium hirsutum
  Clone ID: LIB3828-031-Q6-N6-B9.pep
LLRLLFKTFACSYLNNNYLTGGFPAKIAGLTNLEILYLSYNKLSGVIPHEIIHLPRLTSLHLDHNQFAGRIPEALYRHPFVKEMYIAGNSFQKGAKSIGVPRILELADSEFLV

SEQ ID NO: 81457 - protein, 165 aa, Gossypium hirsutum
  Clone ID: GOSHI-09MAY01-C87309_1.pep
PASDLSFGPSGNDSSAQNDWKGAWWHSSFTVHSGFVEDDSPFSTGGQKGTYYFEFSRPLRTMDRLQQDVQFTIGGSSKMSVALWYPVDGNPWSGSGHYTINCDWVSFDIASGGSKLTKSAKSSSSWDAASAFSLLFSVAALCVAIFVAYQVSRPKNIPFTPMENL

SEQ ID NO: 81458 - protein, 194 aa, Gossypium hirsutum
  unsure (1)..(194): unsure at all Xaa locations
  Clone ID: GOSHI-09MAY01-C80789_1.pep
MEEEKGKLVRSLTDAVNQIAPIGDYRCAVKKEFCNLARRLKLLTPMFEEIRESKEQIPEETVKALVSLKEALVSAKELLRFGSEGSKIYLVLERDQIMHKFHEVTARVEQALSGISYENLDISDEVKEQVELVLAQFRRAKGRVDVXDVELYEDLLSLYNKSNDAAADPDVLRRLAEKLQLVGIAELRRITSST

SEQ ID NO: 81459 - protein, 157 aa, Gossypium hirsutum
  Clone ID: GOSHI-09MAY01-C80149_1.pep
MARMLPKTLLLCHSIFHRHSSFLRRFSSKAELYEIDLDSASSSASAVNKMEEIIHSIIVQKSTPDWLPFLPGSSFWVPLPRQGSKRASDFMDQLTNQLTPDEYLSLTTGRGWPCVNFFVSDGHYTDVTSMDVELKFPEQEEGEVKVEILIGSGDRTS

SEQ ID NO: 81460 - protein, 149 aa, Gossypium hirsutum
  unsure (1)..(149): unsure at all Xaa locations
  Clone ID: AW187730.1.pep
MEDSSSQPFDHDQTAPGASKFLSDLPSRGHLSSTIISSNLGGMRVYICEHNTSPPEMQHIKTDQQNILIRSLMLNNNKGGSSSKDVKAAAEGPXKRAAEKVMDSSASPKKANTKNNSQSVGSSSSFTVERLRALLKERGHSPKGKKACS

SEQ ID NO: 81461 - protein, 150 aa, Gossypium hirsutum
  Clone ID: LIB3585-051-P1-K1-A11.pep
DQTAPGASKFLSDLPSRGRRSSTIISSNLGGMRVYICEHNTSPPEMQHIKTDQQNILIRSLMLNNNKGGSSSKDVKAAAEGPRKRAAEKVMDSSASPKKANTKNNSQSVGSSSSFTVERLRALLKERGHSPKGKKDELIARLRCVNESAE

SEQ ID NO: 81462 - protein, 158 aa, Gossypium hirsutum
  Clone ID: GOSHI-09MAY01-C80299_1.pep
MPPQVSHGGAFQIGPSVLFCNGGGSGSSPEHGGTARRMKFHGKKLLPLLVLVLSCLSILRLLKIAMIASHSSAPECSLECSNFLSNATPEVDSESGGRHEPTPAATAANATLLTPKEFMVLSKLVTRKAPCNLLVFGLQSQYYNLSSINAGGITVFLE

SEQ ID NO: 81463 - protein, 166 aa, Gossypium hirsutum
  Clone ID: GOSHI-09MAY01-C80229_1.pep
MENQCQNGNETLLKVSTLNCIDLSNPDIHQSVSLLKQACLDCGFFYVVNHGISQEFMDEVFGQSKSFFELPLNEKMKVLRNEKHRGYTPVLDELLDPDNQVHVGDYKEGYYIGVEVPEDDPEAEKPFYGPNVWPEDGLLPGWRQTMEKFHHQALEVAKAVARIIRL

SEQ ID NO: 81464 - protein, 126 aa, Gossypium hirsutum
  unsure (1)..(126): unsure at all Xaa locations
  Clone ID: GOSHI-09MAY01-C81829_1.pep
TMGLFRRLFGAKKSDKTRSDXERRRWSFARSSNPTSSTSHIDHALTTAPCGDTLGARKHAIAVAAATAAVAEAALAAAHAAAEVVRLTXGGGGPAGNNRRLVQEVAAVRIQTXFRGYLARRALRAL

SEQ ID NO: 81465 - protein, 139 aa, Gossypium hirsutum
  unsure (1)..(139): unsure at all Xaa locations
  Clone ID: GOSHI-09MAY01-C81579_1.pep
MGSGKGATSSAQQMESSVQDLRERYRLELENLTLTTQPVKTSRFFLLAILQYIKRSASYLLAKGGWLMLSSTLIXVLGILLVTIEGPHEKHVEEVSQYVRFGLWWIALGVASSIGLGSGLHTFVLYLGPHIALFTIKAI

SEQ ID NO: 81466 - protein, 224 aa, Gossypium hirsutum
  Clone ID: GOSHI-09MAY01-C81199_1.pep
GTAVLRRGRRSGGNRSPFNPVIVLRGGTATPSPSGGDSSVEQNGRGFELYYDDGSGSGLRPLPPTMSEFLLGSGFERLIDQLSQMEIQNAGRNEQPPASKAAVEAMPTVEINETHIDDELCCAVCKEQFELGTKVRNMPCDHLYHSNCILPWLQLRNSCPVCRHELPAATVDGDEGAETDRVYSNLDETPVGLTVWRLPGGGFAVGRFQGIRGDGENRGLQWFT

SEQ ID NO: 81467 - protein, 161 aa, Gossypium hirsutum
  Clone ID: GOSHI-09MAY01-C81109_1.pep
MSSSSASSRKALSKIACNRLQKELVEWQSNPPSGFKHKVTDNLQRWVIEVNGAPGTLYANETYQLQVDFPEHYPMEAPQVIFLHPAPLHPHIYSNGHIRLDILYDSWSPAMTVSSICISILSMLSSATAKQCPEDNDRYVKNCRNGRSPKQTRWWFHDDKV

SEQ ID NO: 81468 - protein, 68 aa, Gossypium hirsutum
  Clone ID: GOSHI-09MAY01-C81399_1.pep
ALPAFREKGIQMTPLFYSFIYQLNFKHKGEEAIQRRLKLRHWKPRVLLLSSHINRHIKHSQNRSALFC

SEQ ID NO: 81469 - protein, 124 aa, Gossypium hirsutum
  Clone ID: LIB3585-014-P1-K1-A10.pep
FSSNAQWLAVSSDKGTVHVFSLKISAGSPGTTQSRSTSEPVVSSHSSLSFIKGVLPKYFSSEWSVAQFRLVEGSQYLVAFGHQKNTVVILGIDGSFYRCQFDPVNGGEMTQLEYHNFLKPEAAF

SEQ ID NO: 81470 - protein, 94 aa, Gossypium hirsutum
  unsure (1)..(94): unsure at all Xaa locations
  Clone ID: LIB3825-002-Q1-N6-D12.pep
YPITKYIEPVIFPFISSLSKGVLPKYSVSEWSVAQFRXVEGSQYLVAFGHQKNTVNGLKQTINNRFYRCXFDPVNGGEMTQLEYHNFLKPEAAF

SEQ ID NO: 81471 - protein, 57 aa, Gossypium hirsutum
  Clone ID: LIB3272-057-P1-N1-G9.pep
FRLVEGSQYIVAFGHQKNTVVILGIDGSFYRCQFDPVNGGEMTQLEYHNFLKPEAAF

SEQ ID NO: 81472 - protein, 157 aa, Gossypium hirsutum
  Clone ID: GOSHI-09MAY01-C83599_1.pep
GRVGSRACHALLFNLPYTTRRLGNLAPNLIVKVSAPRKSRRCLNPFVSTASLMGSVSALKEPLEHPIPRTDDSLVPVLHGVKIADPYRWLEDPDAEEVKDFVQKQVKLTESVLQQCEAKDKLREKITKLFDHPRYEVPFKRGSKYFYFHNTGLQAQN

SEQ ID NO: 81473 - protein, 121 aa, Gossypium hirsutum
  unsure (1)..(121): unsure at all Xaa locations
  Clone ID: GOSHI-09MAY01-C83579_1.pep
PRVRPRVRPRVRGRVGEKIADGYGGLVLATHNLESGKLAASKARNLGIEKGNQKLEFAQLYGMSEALSIGLRNAGFQVSKYLPYGPVDMVMPYLXRRAEENRGLLSTSSLDRTLMGKEVKR

SEQ ID NO: 81474 - protein, 155 aa, Gossypium hirsutum
  Clone ID: GOSHI-09MAY01-C83779_1.pep
MEFDSIDCMTSSDVIDDDDEIHHPNQLSSLLKSHSNNGSSNSIVSPAVHSSTTSVHELLECPVCTNSMYPPIHQCHNGHTLCSTCKTRVHNRCPTCRQELGDITCLPLQKVAESLELPCKYTSLGCPEIFPYYSKLKHEALCNFRPYNCPYAGSE

SEQ ID NO: 81475 - protein, 52 aa, Gossypium hirsutum
  unsure (1)..(52): unsure at all Xaa locations
  Clone ID: LIB3493-036-P1-M1-D6.pep
NWYKQDIPKVHVHWWCFTDPQVTQYCCCSHCXYGXXTMXXKHHDTQITRPRD

SEQ ID NO: 81476 - protein, 179 aa, Gossypium hirsutum
  Clone ID: GOSHI-09MAY01-C83399_1.pep
IASFDQELRAVVQESMEQRKLELRGRPTLNMMIPMNVFEGSIKDHHGRVVGGESGDEALDEEAGGSREVQVKVLVKRGNKQQTKQMYIPRDCTLVQSTKQKEAAEFEEKQDIKRLVLEYNDRVEEENNGLGTQTLNWPSGNSRAYGRGNSWEGSSGRGGGSRHRHHSHSGSGSYYGRKK

SEQ ID NO: 81477 - protein, 83 aa, Gossypium hirsutum
  Clone ID: GOSHI-09MAY01-C58818_1.pep
THACAGVLSSLILSVSISTNTQLDMVSWNFHFYSYRYFSIVIGVEKCFLEMKIYYILLLFFLFCFRSYCTIKVRNKINILLVI

SEQ ID NO: 81478 - protein, 140 aa, Gossypium hirsutum
  Clone ID: GOSHI-09MAY01-C58558_2.pep
ETIGYIFSFGAVGALLGAILYQNILKDHPFPDLLSWIQLFYGLAGMLDLILVLRINLKFGIPDSVFVVIGEAVTQMIGRLKWMPLLVLSAKLCPSGIEGTFFALLMSIDNFGLLSSSWGGGLLLHTLNVTRTKFGNLWLA

SEQ ID NO: 81479 - protein, 95 aa, Gossypium hirsutum
  unsure (1)..(95): unsure at all Xaa locations
  Clone ID: GOSHI-09MAY01-C58558_1.pep
MKKTKNEAAKKKRRLEYPDSDFVVIGEAVXQMIGRLKWMPLLVLSAKLCPSGIEGACFALLMSIDNFGLPSSSWGGGLLLHTLDGTRTKFGNLWL

SEQ ID NO: 81480 - protein, 170 aa, Gossypium hirsutum
  Clone ID: GOSHI-09MAY01-C58478_1.pep
AAWVKVDWKLPDPKGIVSRILLTILSFFMMIYTILHTAARRITKKLPDTVSDHCQNVTKLTSDATQQAESRPPSPIPPFTQADLLSSVLKRLGELEEKVNILQAKPSEMPYEKEELLNAAVCRVDALEAELIATKQALYNALMRHEELLAEIDRQEKANFLKLQKKKFCW

SEQ ID NO: 81481 - protein, 144 aa, Gossypium hirsutum
  Clone ID: GOSHI-09MAY01-C58418_1.pep
ALVQVWLRRVQVLLTQQQDGVQPVVNRALLCLPRHKHVKFISQAAILEFKSGVPDRGRSMFEGVLREYPKRTDLWSIYLDQEIRLGDEDVIRALFERAISLSLPPKKMKFLFKKYLDYEKSRGDEERIESVKRKAMDYVESTLT

SEQ ID NO: 81482 - protein, 199 aa, Gossypium hirsutum
  Clone ID: GOSHI-09MAY01-C58778_1.pep
VVLQAVAMYKSKDPKTSDEEEMLENLFDCLCCLLMPLENKERFVKAEGVELMIIIMKQKKSAYASAIRALDFSMTKYPPACERFVDVLGLKTAFAAFMGKIPISKKNKKERYQEELEERLVSLIASLFGGILRGSRRERLLSKFVENECEKIDRLMELYIRYSDRVTAETQRLEQLELDDLEMDEEEKYNRKLESGLTL

SEQ ID NO: 81483 - protein, 59 aa, Gossypium hirsutum
  Clone ID: LIB3149-042-Q1-K1-F1.pep
GTSLLPAHTAFIAEESETDSEESDVSGSEGDDTSWISWFCGLRGNEFFCEVDDEYIQDD

SEQ ID NO: 81484 - protein, 61 aa, Gossypium hirsutum
  Clone ID: LIB3149-042-Q1-K1-F2.pep
YKQVTKCEVLLYYLLILPLLQRSQKPTANNQTLIVFIYMTRLGFQWPASCNAKNSFVNFIH

SEQ ID NO: 81485 - protein, 67 aa, Gossypium hirsutum
  Clone ID: LIB3149-042-Q1-K1-G1.pep
MQWKLLRFFFFFFLMIASYKTGCTPISPAHTAFIAEESETDSEESDISGFEGDDTNWISWFCGLRSN

SEQ ID NO: 81486 - protein, 162 aa, Gossypium hirsutum
  Clone ID: GOSHI-09MAY01-C58318_1.pep
MAFLSKIGNMLRQTSTTQINAQLSASSPSLFHVFRCMSNMPSSKLLGGGISYQTDDQGLREAFSKYGEVVEARIIVDRETGRSRGFGFVTYTSSEDASSALQALDGQTLHGRQVRVNYATERAPRNFGGGGYGGGGYGGGGYSGGGYGGGGYGSGGGGYGGG

SEQ ID NO: 81487 - protein, 91 aa, Gossypium hirsutum
  Clone ID: GOSHI-09MAY01-C59978_1.pep
FEQIVLILLCPEYLNYEDGKFSKSRGVGVFGDMAQDTGIPADIWRFYLLYIRPEGQDSAFSWTDLLLKNNSELLNNLGNFINRWELVRGQS

SEQ ID NO: 81488 - protein, 46 aa, Gossypium hirsutum
  Clone ID: GOSHI-09MAY01-C59898_1.pep
GIGFLDDPRRLNVALTRARYGIVILGNPKVLSKQPLWNGLLTHYKV

SEQ ID NO: 81489 - protein, 99 aa, Gossypium hirsutum
  Clone ID: GOSHI-09MAY01-C59848_1.pep
MTQTPAFDKPKVELHVHLDGAIKPETILYYGRRRGIALPANTAEGLLNVIGMDKPLTLPEFLAKFDYYMPAIAGCREAIKRIAYEFIEMKAKEGVVYVE

SEQ ID NO: 81490 - protein, 99 aa, Gossypium hirsutum
  unsure (1)..(99): unsure at all Xaa locations
  Clone ID: GOSHI-09MAY01-C59828_1.pep
MIIYRDLISHDEMFSDIYKIREIADGLCLEVEGKMVSRTEGNIDDSLIGGNASAEGPEGEGTESTVITGVDIVMNHHLQETSFTKEAYKKYIXDYMKSI

SEQ ID NO: 81491 - protein, 154 aa, Gossypium hirsutum
  Clone ID: GOSHI-09MAY01-C59518_1.pep
MGKEGKMGRVFASLVLVLVVVQASHARNVPSHVGLDNRQTTMPGASTEEQTLQADAPKADSPKGTSGIDDKKNFIYGGVGGFAGMGGYGGIAGGIPFLGGLGGIGKFGGIGGAAGIAGYTGIGGLGGLGGVGGLGGGIGGGGSLRGGSGIFPSP

SEQ ID NO: 81492 - protein, 60 aa, Gossypium hirsutum
  Clone ID: GOSHI-09MAY01-C59498_1.pep
MDGVSSSSNNQTDASTSGGGTQTATQPQPMPQPVAGHSANGPPPFLSKTYDMVDDPATDA

SEQ ID NO: 81493 - protein, 146 aa, Gossypium hirsutum
  Clone ID: GOSHI-09MAY01-C59408_1.pep
SQISSCLCANEAKTYHWNITAVKLGHINFTISTKILDSNEPCGGQKGFVPQKGRSDTLIKPVLVKPEGVLVEKTHSSLLCPKGKVASESVSLDLPVDVVPDSTKAYVTVLGDIMGTALQNRDGLVQMPSGCGEQNMVLCAPIIYVL

SEQ ID NO: 81494 - protein, 126 aa, Gossypium hirsutum
  unsure (1)..(126): unsure at all Xaa locations
  Clone ID: LIB3196-048-P1-M1-G1.pep
MAVGATECISPKDSTKPNNGVLAKITSHXVGTTFEVLGXLETMIDALASWHMNXWTSVVVGGSSXARMLTTNRMCFFTGRTWKGCVFXGLKSRDDVPKLVTEFLAKKFDLDQXITHVLPFKKINEG

SEQ ID NO: 81495 - protein, 119 aa, Gossypium hirsutum
  Clone ID: LIB3196-006-P1-M1-D3.pep
GFSTGYGAAVKTGKVKPGSTCVVFGLGGVGLSVIMGCKSAGASRIIGIDLNKDKFEKAMAVGATECISPKDSTKPISEVLSEMTGNNVGYTFEVIGRLETMIDALASCHMNYGTSVVVG

SEQ ID NO: 81496 - protein, 67 aa, Gossypium hirsutum
  Clone ID: GOSHI-09MAY01-C59708_1.pep
KELVNKTDELELVSTHYTEERVTLEVQSPHILSPSGLLTATNPRSISSESSGVTRTSVSEDPSLRRV

SEQ ID NO: 81497 - protein, 183 aa, Gossypium hirsutum
  Clone ID: GOSHI-09MAY01-C59648_1.pep
FIWVVRPPVENDSAATVFKSNGVYNDFLDYFPEGFLNRTCKNGLVVPKWAPQTEILSHPSIGGFLSHCGWNSSLESIVNGVPMIVWPLYAEQKMNATVLAEHIGVATRSKLLAPQGVVGRGAIAAMIRKFMVDKEGEAIRAKVKMLKSCAVKALSNGGSSYNALATVAEECKIGMQRRNAKTG

SEQ ID NO: 81498 - protein, 143 aa, Gossypium hirsutum
  unsure (1)..(143): unsure at all Xaa locations
  Clone ID: GOSHI-09MAY01-C59678_1.pep
ELSGGRLAQAGVRSTAGGEREALASRARGQGGPHGRRRSRDRCLSVRAGDEXPGLQSGWTCPPAAEGRDARSGGLAERDMTWSGVTARTEGARPAFLNTLGWWGCGKKRVCFFTSPTESAHYSCPLGSQNPQHEXNGATQLKP

SEQ ID NO: 81499 - protein, 80 aa, Gossypium hirsutum
  unsure (1)..(80): unsure at all Xaa locations
  Clone ID: LIB3196-005-P1-M1-D8.pep
AEALAFKSRGQRGPHGRRRSRDPCLSVRAGDEARSTVGVDVPTSXRRPGRQVRRTCRAGHDMVRCDCEDRMGAYGLTEHP

SEQ ID NO: 81500 - protein, 89 aa, Gossypium hirsutum
  Clone ID: GOSHI-09MAY01-C59088_1.pep
LVNVLKSLSKGKVWILSLKVWFSLLLLSFIPALPFQAIFFIGLPLAFIAFYVYDKKEHEIDAFILETFSMGCKLKSGIARKLVASKKND

SEQ ID NO: 81501 - protein, 70 aa, Gossypium hirsutum
  Clone ID: GOSHI-09MAY01-C59348_1.pep
QYLQKLHISNILCSALRSRFWMRDQLANLEHSLFRTINNNLPWINFALVSSAVILRDTLVDTNTHPSHPP

SEQ ID NO: 81502 - protein, 107 aa, Gossypium hirsutum
  Clone ID: LIB3583-004-P1-K1-F9.pep
YEEELLNMNNGCLENRKKEHDNSQKRPKSYKFGSKSDDFALAIAKVAVAQLCESVGFQGFHLSALETLSDISVRYIYSIGKTANLNANLAGRVEGNVFDIIHGLRRF

SEQ ID NO: 81503 - protein, 81 aa, Gossypium hirsutum
  Clone ID: LIB3165-033-P1-K1-F7.pep
YQTRFLKQRDENPETLRFHIVAPLQPSRLLGQNRHFCYRICKTLAVFVNCHVLFFYSPNTHCSCSIILPRIISCSFIFFFF

SEQ ID NO: 81504 - protein, 136 aa, Gossypium hirsutum
  Clone ID: GOSHI-09MAY01-C54088_1.pep
LRNSILVSAMCYSKAPKMNNNDVMSDILLRLPLKDLVGCKCVCKWWNTLISDPIFKLNYSLRNPQYNISGFFLQKFLYLELHSKLLFFPCEGRVDAAPKPSLSFIEDDKGVCIQHSCNGLLICSSFRCGEEDRKYY

SEQ ID NO: 81505 - protein, 147 aa, Gossypium hirsutum
  Clone ID: GOSHI-09MAY01-C54238_1.pep
MAPISLPNKPHAVCIPYPAQGHVNPMLKVAKLLHFKGFHITFVNTEYNHKRLLKSRGPHALNGLPDFRFGTIPDGLPPPDIDATQDIPALCDSTSKHCLAPFRRLLVELKATSGVPPVTCIVADGCMSFTLEAAKELGIPSVLFWTP

SEQ ID NO: 81506 - protein, 129 aa, Gossypium hirsutum
  Clone ID: GOSHI-09MAY01-C55998_1.pep
MGMVFGRITVETPKYEVGQSSADYEIRKYPPAVAAEVTYDPSQFKGNKDGGFSLLANYIGALGNTQNAKPEKIAMTAPVITKSPGNESEKIPMTAPVVTKGDNNNMVTMQFLLPATYKTAEEAPKPLDE

SEQ ID NO: 81507 - protein, 136 aa, Gossypium hirsutum
  Clone ID: GOSHI-09MAY01-C55888_1.pep
MAYIPPHKRHSKDAESPTPTPTPTPESFIPKFKRNVQLRASNTKADRSGRIVYSNYAISRWFAVGLDDGNGDTSSVHLKPVSVESIERKTGEKPAILVKSNLNKENNEAKGSPWSSIAENILPDLLSSFEKVRAET

SEQ ID NO: 81508 - protein, 160 aa, Gossypium hirsutum
  Clone ID: GOSHI-09MAY01-C55858_1.pep
MAAAAHIDIEPAIPEEETTSNSLIRNTRCCFCFPCFSSRRTPAVGVAFWQRIGSSHVQSDTGFWSSSVRAFKKVREWSEIVAGPRWKTFIRRFNRSKSGGGIVSGGRHGQFHYDPLSYALNFDEGPGQNGNLEDDNDFGAFRAFSTRYASVPGSEKTPLA

SEQ ID NO: 81509 - protein, 278 aa, Gossypium hirsutum
  unsure (1)..(278): unsure at all Xaa locations
  Clone ID: GOSHI-09MAY01-C55408_1.pep
AGVNRKISAASARAHTRRAKQNASFKLPSGICTKILLVLFAGILAWAYQAIQPPIPKTCGSPDGPPVTASRIKLKDGRYLAYKEHGVPRDAAKYKIVYVHGFDSCRHDAVVANTLSPEIVEALGVYIVSFDRPGYGESDPNPKRTVQSLPLDIEELADQLGLGSKFYVIGFSMGGQVIWSCLKYIPHRLAGAALLAPVVNYWWPGFPTNLVTEAYQQQXTQEQWAVRVSHYAPLAYYWWNTQKWFPSSSVVAHSTDILNSEDKKLLPEIVSTRTTRQY

SEQ ID NO: 81510 - protein, 132 aa, Gossypium hirsutum
  Clone ID: GOSHI-09MAY01-C55668_1.pep
MESIRSPYWCYRCNRFIRIRVRSPHDSLNCPDCGGGFIEEIETPSRSPIHHRFPVAAMYSDTPSPALSPSPTATPHFRRTRRNAGDRSPFNPGVVLRGPTSESDGIVTERGNRNFQLYYDDGSGSGLRPLPA

SEQ ID NO: 81511 - protein, 95 aa, Gossypium hirsutum
  Clone ID: GOSHI-09MAY01-C55118_1.pep
LTHKSFHLEKCRNDYEGFEDEELRESLIHPLRDFTETRVKQKSVWARLKNSKACIMAPGGGICKDLIQAWITIAKYDKATSRAEVKRFPLRKATT

SEQ ID NO: 81512 - protein, 206 aa, Gossypium hirsutum
  unsure (1)..(206): unsure at all Xaa locations
  Clone ID: GOSHI-09MAY01-C55288_1.pep
MAMYIVSRRLSAGSTTSQLVTSLRYATCWRSFSTSFREERDTFGPINVPSDKLWGAQTQRSLQNFEIGGERERMPEPIIRAFGVLKKCAAKVNMEYGLDPTIGKAIMQAAPEVAVGILNDHFPLVVWPTGSXGTHSNMNAHEVIAYRAAEILGXQRGEKLVHPNDPVDRSQSSNDTFPTVMHIAAAMEINSRLIPKLKILHSTLHS

SEQ ID NO: 81513 - protein, 120 aa, Gossypium hirsutum
  Clone ID: GOSHI-09MAY01-C56548_1.pep
LVGQTLTEICQRACKYAIRENIEKDIERERRRSENPEAMEEDVEDEVAEIKPAHFEESMKFARRSVSDADIRKYQAFAQTLQQSRGFGSEFRFAETGSRTAASDPFAASAGGADEDDLYS

SEQ ID NO: 81514 - protein, 161 aa, Gossypium hirsutum
  Clone ID: GOSHI-09MAY01-C56488_1.pep
PIESLILISAFSSILMALFLSLLLILLTPSTNADWPPSPGYWPSSKFRPMSFHKGFKNLWGPSHQSVHHNALTIWLDKTSGSGFKSVRPFRSGYFSASIKVQPGYTAGVITAFYLSNNEAHPGFHDEVDIEFLGTTFGKPYTLQTNVYVRGSGDGKIIGGK

SEQ ID NO: 81515 - protein, 194 aa, Gossypium hirsutum
  Clone ID: GOSHI-09MAY01-C56438_1.pep
GFDDGCYEDWSRDLLVARKILGNERLPRIPHTMILEGGSIHVDGEGTCLTTEECLLNKNRNPNMTKEEIENELKAYLGVEKVIWLPRGLYGDDDTNGHIDNLCCFAKPGVVVLSWIDDEKDPQYERSMEAFTVLSNEKDARGRKLEIVKLHVPGPLYMTDEEADGLVQDGDPKARLPGTRLAASYVNFYIANGA

SEQ ID NO: 81516 - protein, 94 aa, Gossypium hirsutum
  Clone ID: GOSHI-09MAY01-C56338_1.pep
NPYGFSRFFSKSSPFIVKVGIPEFLNGVGHGVETHVAKLESEIGDFQKLLVTRTLKLKKIGIPCKHRKLILKYAHKYRLGLRRPRAEPVKSGIN

SEQ ID NO: 81517 - protein, 201 aa, Gossypium hirsutum
  Clone ID: GOSHI-09MAY01-C57868_1.pep
MADLTDSVMPSAVITPLSTTPNTRTLPVREDCWSEEATSTLVDAWGRRYVELNRGNLRQKDWQDVADAVNALHGHTKKTHRTDVQCKNRIDTIKKKYKIEKTRVSSSNGTLTSSWPFFERLDALIGSNFAAKKLSTSPKISPKPSPRLSPRIPGSPPVALPLLLPYRRTPPAPTAIVALPQKKPLWTMGISKRNILLLLLL

SEQ ID NO: 81518 - protein, 209 aa, Gossypium hirsutum
  Clone ID: GOSHI-09MAY01-C57598_1.pep
MAAMATTLSSLSSTPKPSFLDHKSSFHGTPLASRFTPIKSSSQTATISMSLTPPYDLQSFKFQPIQESYVAREMTRRYMMDMITYADTDVIIVGAGSAGLSCAYEISKNPNIRVAIIEQSVSPGGGAWLGGQLFSAMVVRKPAHRFLDELGIQYDEQEDYVVIKHAALFTSTIMSKLLARPNVKLFNAVAAEDLIVKENRVAGVVTNWA

SEQ ID NO: 81519 - protein, 121 aa, Gossypium hirsutum
  Clone ID: uC-gsflmaxxa011b05b1.pep
MAAMATALTSLSSSPKPSFLDHNKSSFSGTPIPSRFTPIKSSSHNSNISMSLTPPYDLQSFEFQPIKESYVSREMTRRYMMDMITYADTDVIIVGAGSAGLSCAYEISKNPNIRVAIIEQS

SEQ ID NO: 81520 - protein, 154 aa, Gossypium hirsutum
  Clone ID: GOSHI-09MAY01-C57518_1.pep
MKKPFNSIATSSQTHFEESEEEEEIESSSEEEKSDDTIDSDEEEEIERELAEVTFGELQKARADGTDSISRKPQTETKRRRANKNRPMELSSKKPVRSFRQVIQAPKKVVRDPRFESLCGNLDVEGFRKRYNFLFENNLPAEREEVQKQLKKPE

SEQ ID NO: 81521 - protein, 119 aa, Gossypium hirsutum
  Clone ID: GOSHI-09MAY01-C57798_1.pep
SDALHADELDKSLDVLDQMMKFSIGVTPALQEFVRGAFGKVGRTEELDRVLNENRWRFPGRQPRPFGQSPRSPSGHAEMGGAQSSGSPQMAGATAISQPLLKCQGRSHCHAPPPRYYAG

SEQ ID NO: 81522 - protein, 127 aa, Gossypium hirsutum
  Clone ID: GOSHI-09MAY01-C57778_1.pep
DRLKGFDKFRHETSQSQTAISDLEKYLDEPVFPRNCNFNILNWWRVHTPRYPILSMMARDVLGTPMSTVSQESAFHAGGRVLDSCRCPLTPETRQALICTQDWLRMQSDDPGPSSSHYALPLYVETN

SEQ ID NO: 81523 - protein, 112 aa, Gossypium hirsutum
  Clone ID: GOSHI-09MAY01-C57648_1.pep
LWGSKVDAQVEETSLKLMRDALEWPLSVSLYSDLNDNEGEEEVDGEEETGHSRRSLFWTRMRYYISYSALSANRIPCPPRSGRSYYTNNCFKAHGSVHPYSRGCSRITRCRR

SEQ ID NO: 81524 - protein, 52 aa, Gossypium hirsutum
  Clone ID: GOSHI-09MAY01-C57308_1.pep
SSGSSFNASIPDFLQDRRFNTPPTSSSASLPRDHGLLQDIVPTQMRKEAKEQ

SEQ ID NO: 81525 - protein, 95 aa, Gossypium hirsutum
  Clone ID: GOSHI-09MAY01-C50998_1.pep
DIGAYYRIYEASSYHFIHTISQQLKPVINGRSDYGPNTGNSLTKNDNNMNKKHGFSSANTNVRLYCFYFGIPFPTSNVLAIFPSLFYSLISQACM

SEQ ID NO: 81526 - protein, 118 aa, Gossypium hirsutum
  Clone ID: GOSHI-09MAY01-C50978_1.pep
RVFFSLKIPLNFDFDEARVHRWPNHKVSSPFSFFPPWPTNSLLPKLQSATTVAYSSLDGCFLALRSPLSFDFNKAKGNSWHSRKVCMAWRGGYARMEASARGNGGWGLCRSCWCMLQH

SEQ ID NO: 81527 - protein, 101 aa, Gossypium hirsutum
  Clone ID: LIB3493-028-P1-M1-D6.pep
RVFFSLKIPLNFNFNEARVNRWPNHKSLKNHFSIDLPSTSIPTKQREDPWRTRTLLWEHGTTVRWRRPCRSGMFQKLLVLLGILGVLGLEFYGLWVLDLNV

SEQ ID NO: 81528 - protein, 96 aa, Gossypium hirsutum
  Clone ID: uC-gsflmaxxa040d11b1.pep
VLFSYFPPWPTNSLLPKHQSATTVAYSSLDDCFLALRSPLSFDFNEAKGNSWHPRKSAAGGASWRSRSWECTKAQRNTCDVARLLVRAAAQEEKKP

SEQ ID NO: 81529 - protein, 147 aa, Gossypium hirsutum
  Clone ID: GOSHI-09MAY01-C50878_1.pep
TSAYYRGALGAMLVYDITKRQSFDHVARWVEELRAHADNSIVIMLIGNKADLVDLRAVPTEDAVEFAEDQGLFFAETSALSGDNVDKAFFKLLGEIYGVLCKKSLECGNGKLNGADHATALKGSKIEVIAGPDLEMSEMKKLSTCSC

SEQ ID NO: 81530 - protein, 195 aa, Gossypium hirsutum
  Clone ID: LIB3825-032-Q6-K6-H11.pep
MYGQSQPMNIPASIADNDVSASAPADSVSYDAHPLDDGVGVDDVSADPLYVTSTPSDLAIVQRVDGASQLTLSFRGQVYVFDAITPEKFHAVLLLLGGSELTSGPHGVEMSAQNQRVVLDFPRGSNQPHRAASLDRFRQKRKERCFDKKVRYSVRQEVALRMQRNKGQFTSAKKSEGAHSWGSSQEDDNLADGIC

SEQ ID NO: 81531 - protein, 50 aa, Gossypium hirsutum
  Clone ID: LIB3146-021-Q1-K1-F8.pep
PRVRFDAITSEKFHAVLLLLGGSELTSRPYGVEMSAQNQWVVLDFTRGFN

SEQ ID NO: 81532 - protein, 59 aa, Gossypium hirsutum
  Clone ID: LIB3146-021-Q1-K1-G8.pep
PRVRFDAITFEKFHAGLLLGGVSELTSCPHGVEMSAQNQRVVLDFFCGFNQLNKASSLD

SEQ ID NO: 81533 - protein, 200 aa, Gossypium hirsutum
  unsure (1)..(200): unsure at all Xaa locations
  Clone ID: GOSHI-09MAY01-C50588_1.pep
TAEVHNLSERRRRDRINEKMRALQELIPRCNKSDKASMLDDAIAYLKSLQMQIQMMSMGCGMVPMFPGVQQYISPMGIGMSMGMDMGIIRPMMSFPNVVAGSALPTSAAAAHLGPRIPMPAFHMPPSVPAPDPSRFQPKQSXDPIPNPLVMQNLNQAQQYIGLHQTMQIPHPQGQAMAQPSSRRGAEKVENHPTGRSISF

SEQ ID NO: 81534 - protein, 72 aa, Gossypium hirsutum
  Clone ID: GOSHI-09MAY01-C50548_1.pep
QNKYNLAAAVIVVKRETWRRRELWNRVEDFRALTGIAISSPIISLIVGSEKKALKASRNSYVGNLSLFCEIE

SEQ ID NO: 81535 - protein, 158 aa, Gossypium hirsutum
  Clone ID: LIB3582-014-P1-K1-B3.pep
ELRRKHNLLLVIDDAHGTFVCGKSGGGVAEEFECERDVDICIGTLSKAAGCHGGFIACSKRWKQLIQSRGRSFIFSTATPVPIAAAGHAAVIVAKRETWRRRELWNRVEDFRALTGIAISSPIISLIVGSEEKALKASRKLLKSGFHVTAMRPPTVPP

SEQ ID NO: 81536 - protein, 100 aa, Gossypium hirsutum
  Clone ID: LIB3828-022-Q1-N6-G2.pep
TLHSMKLVIGSARSMTEKYAKAGAGESSCSYQCTETKVDSTMSLFIGRFLHERPVEEERPPSMAVSELNQLSHYSEVKYPLACYFIRMCYISSTMSNLSL

SEQ ID NO: 81537 - protein, 45 aa, Gossypium hirsutum
  Clone ID: LIB3146-018-Q1-K1-B2.pep
TVPSMKLVIGTARSMNEKYAKAGAGESSCSYQWYYQNVLYFLNNV

SEQ ID NO: 81538 - protein, 127 aa, Gossypium hirsutum
  Clone ID: GOSHI-09MAY01-C50578_1.pep
MALLQMHTLPHQIPSLSPIVFSSKTHSKNSLFFSTTKVRPFSLSTQPRKLLCKPPLGKYVREDYLVKKMSSQEIEELVRGERRVPIIIDFYATWCGPCILMAQELEMLAVGAEKNAIIAKVESDDEY

SEQ ID NO: 81539 - protein, 203 aa, Gossypium hirsutum
  Clone ID: GOSHI-09MAY01-C50528_1.pep
RNHQGLAAAIIKLWEKSLVAKIAVKRGIQNTNNKLMAEELKNLTGGVLLLRNKWVVVIYRGKDFLPTNVAAALAERQDLTKQIQDAEEKLRIKAVEPALSGEDKGQAPAGTLAEFYEAQARWGRDISAEEREKMIEEASKAKHAKLVKRVEHKLAIAQAKKLRAERLLAKIEASMIPAAPDYDQETITDEERVMFRKVGLRMN

SEQ ID NO: 81540 - protein, 183 aa, Gossypium hirsutum
  Clone ID: GOSHI-09MAY01-C50458_1.pep
LYVLQWFQVFPPQLWAVAYFEGVRYGHFTLGVTELLYNWALECHELPVVQMMEHIRLQLTSWFNNRRETGIRWTSILVPSAEKRISEAIADAHCYQVLRANEVEFEIVSTERTNIVDIRSRVCSCRRWQLYGLPCAHAAAALISSGQNAHLFAEPCFTVASHRETYSQMIHPIPDKSVWKELG

SEQ ID NO: 81541 - protein, 95 aa, Gossypium hirsutum
  Clone ID: GOSHI-09MAY01-C50748_1.pep
LWAIWGDRNNRIHKKTHKTVKVVKINFDAAFDERSRQLSRGLVARNSKGRVLVSCSEITSELHRLLLLRLSHVAQQFDSVLTCNRHQLSLRVIQQ

SEQ ID NO: 81542 - protein, 145 aa, Gossypium hirsutum
  Clone ID: LIB3165-052-Q1-K1-B11.pep
ITSFRQKRTRLKGYMAVKLDMSKAYDRGSESMDHLEFAQWLIWVFLQSSPSQSKVVCCVLWAIWGDRNNRIHKKTNKTVKVVKINFDAAFDERSRQLSRGLVARNSKGRVLVSCSEITSELHRLLLLRLSHVAQQFDSVLTRTRG

SEQ ID NO: 81543 - protein, 80 aa, Gossypium hirsutum
  Clone ID: LIB3146-020-Q1-K1-F12.pep
FQYQYGKNYHISMCYKNRTWSSRSGSSGCFCRVLHLRVRLSAVHYGKFGVTEITGFYKKTNNPAKVVNINFKTAFDESER

SEQ ID NO: 81544 - protein, 245 aa, Gossypium hirsutum
  unsure (1)..(245): unsure at all Xaa locations
  Clone ID: GOSHI-09MAY01-C50718_1.pep
DAWAFTEIEEATLNFDPSLKIGEGGYGSIYKGNLRHTTVAIKMLHSNSLQGPSEFQQEVDVLSKMRHPNLVTLIGACPDAWTLIYEYLPNGSLEDRLSCRGNSPPLSWQTRIRLATELCSVLIFLHSSKPHGIVHGDLKPANILLDANFVTKLSDFGICRLLSDNTTICCRTDPKGTFAYMDPEFLSTGELTQKADVYSFGVILLRLLTGRQALGIIKEVQYALDXGSLKNLLDPLAGDWPFVQA

SEQ ID NO: 81545 - protein, 187 aa, Gossypium hirsutum
  unsure (1)..(187): unsure at all Xaa locations
  Clone ID: AI728511.1.pep
SCRHEEHIFREDVYLSRLPVSVILSWYQRQGYICSMADLIKEELERFAKPEEVMIFFSAHGVPDSYVEDAGDPYKDQMEECVYLIMQELKSRGIGNDHTLAYQIRVGPVHWLKPYINEVLVELGQKGVKSLLAVPISFVSEHIETLEEIDMEYKHLALESGIENWGRVPALGCTSSFITDLXDAVVE

SEQ ID NO: 81546 - protein, 55 aa, Gossypium hirsutum
  Clone ID: LIB3146-018-Q1-K1-H3.pep
KSLLRCHYILSSPFPQLEEIDMEYKHLALESGIENWGRVPALRMLIHWWTVSNGM

SEQ ID NO: 81547 - protein, 242 aa, Gossypium hirsutum
  unsure (1)..(242): unsure at all Xaa locations
  Clone ID: GOSHI-09MAY01-C50388_1.pep
DSFINGFDSYTVSQKNELCGVSSVLDDDVFSQIQQQQQEIERFIAXHTGKVRFELEERRKRQSTMLITAIQEGAMKKXLMEKEEEMQRMGKLNWILQERVKSLYVENQLWRDLAQTNEATAKSLRTNLEQVLAHVSDERHLSGGGAAALADDAESSCGSSDEGWRTVVPPQPQGSGGCAPDKAVVVGNHNIRKCRKCGERESSVLLLPCRHLCLCTVCGSTLVGTCPVCDSITNASVHVNMS

SEQ ID NO: 81548 - protein, 56 aa, Gossypium hirsutum
  Clone ID: LIB3543-060-Q6-K6-E12.pep
ALALFVILLPMPVFMLTCHETILFFFPPSLVRFLYLVKTPPGKQKKKCKYLFRNGS

SEQ ID NO: 81549 - protein, 59 aa, Gossypium hirsutum
  Clone ID: GOSHI-09MAY01-C50248_1.pep
RNKKFMMESLVKGPSITNPCTLPPPYDTRALAVFLRRKNNSILQVKKWEKGYWESLNKQ

SEQ ID NO: 81550 - protein, 269 aa, Gossypium hirsutum
  unsure (1)..(269): unsure at all Xaa locations
  Clone ID: GOSHI-09MAY01-C51868_1.pep
LSMDDGKXFALKRLXKLNEGFDRFFERELEILGSIKHRYLVNLRGYCNSPASKLLIYDFLAGGSLDEALHERSEQLDWEARLNIIMGAAKGLAYLHHDCSPRIIHRDIKSSNILLDSNLEARVSDFGLAKLLEDEESHITTIVAGTFGYLAPEYMASGRATDKTDVYSFGVLVLEVLSGKRPTDASFIEKGLNIVGWLNFLITENRQREIVDPNCVGMQAESLDALLSVAIQCVCSNPEDRPSMHRVGQCLNXRVMTPYPSDFYDSNSD

SEQ ID NO: 81551 - protein, 120 aa, Gossypium hirsutum
  unsure (1)..(120): unsure at all Xaa locations
  Clone ID: LIB3146-035-P1-K1-C6.pep
NKKGREEKMRKDEEIERKVRGGGEKEEKKEDEXEEESKVVERXEEGKRRERRREREGRRKKGREEEEKRKKKKREKERKKIKKKKREKKRRNKXRRKEEEKREKKGRRRRKKAGAKTPKL

SEQ ID NO: 81552 - protein, 116 aa, Gossypium hirsutum
  Clone ID: uC-gsflmaxxa014c08b1.pep
GVRWNIIMGSTKGLAHLHHDWSARIIHRDIKSSNILLDSNLEARVSDFGLAKLLEDEESHITTIVAGTFGYLAPEYMASGRATEKTDVYSFGVLVLEVISGKRPTDASFIEKGLNI

SEQ ID NO: 81553 - protein, 155 aa, Gossypium hirsutum
  unsure (1)..(155): unsure at all Xaa locations
  Clone ID: uC-gsflmaxxa014c09b1.pep
RYFLAGGSLDEALHERSEEQNPXALSRIITRTRRGLSHTHHGXSPRIIHRDIKSSNILLDSNLEARVLDFGLAKLLEDEESHITTIVTGTFEYMAPEYMGSGRATEKTDVYSFGVLVLEVISGKRPTDASFIEKGLNIVGSXKFLITENRKREIL

SEQ ID NO: 81554 - protein, 63 aa, Gossypium hirsutum
  Clone ID: LIB3149-046-Q1-K1-E6.pep
KRIVKLNEGFDLFFERELEIVGSIKHRCLVNLRGYCNSPASKLLIYDYLAGGSLDEALHGEAP

SEQ ID NO: 81555 - protein, 64 aa, Gossypium hirsutum
  Clone ID: uC-gsronu33B051g11b1.pep
EIKLDQFIMYAHIVLFIVIVCILFFFFKSNFHPSNYYCNNEALSYKNGINNKDLTKAQIFSICT

SEQ ID NO: 81556 - protein, 180 aa, Gossypium hirsutum
  unsure (1)..(180): unsure at all Xaa locations
  Clone ID: GOSHI-09MAY01-C51808_1.pep
MDEDHSNSGFLETGKADRSVWLMKCPVVVAKPWKSQTASSSDSQPVAKVVLSLDPRKPDDPSSMQFTMEMAGSEIGNIPKSYALNMFKDFVPMSVFSETTQGRVAMEGKVEHKFGMXPLEQNLEEYGWLCRERANKSMIKNRQIQVIDNDRGVHMRPMPGMVGLISSNTLEKKKTTPVKQ

SEQ ID NO: 81557 - protein, 145 aa, Gossypium hirsutum
  Clone ID: GOSHI-09MAY01-C51508_1.pep
TFKWQKKKFRRMIRFLHELGINQMKFQIHWANRNCCHFTTGPGAQAAPAHHPVIMQTLLVPPATRSGICLVAVGPLLPTHRRRPAITFSSPNFIASLETRKPKPLISPFAFWNPLSVERSKLLLSRSSSPSSSSGSPGSTFPNDD

SEQ ID NO: 81558 - protein, 131 aa, Gossypium hirsutum
  Clone ID: GOSHI-09MAY01-C51528_1.pep
PRVRVFQPGLNEKLDRTSPHWDDIPEIVLADEPYVGHEFESEASAHAFYNAYATRVGFIMRVSKLSRSRRDGSAIGRALVCNKEGFRMPDKREKIMRHRAETTVGCRAMILVRKVSSGKWVVTKFVKEHTH

SEQ ID NO: 81559 - protein, 127 aa, Gossypium hirsutum
  Clone ID: GOSHI-09MAY01-C51408_1.pep
QRQLAIAENEQHRLWRQARMKTDIHLLITKVPELEIVDCFDAIERHLLGEMQLQQSGRAISDSAAMCQKLKGDLQAVFNVLPNDMQQLLLLNPQRAALLQGSSSPELTILPGRPSIQVGVVSSNSPR

SEQ ID NO: 81560 - protein, 246 aa, Gossypium hirsutum
  Clone ID: GOSHI-09MAY01-C51778_1.pep
MFIRMVPIVVLILSLVSYSGLLLIFAVMHDLRLIHTDLKPENILLVSPECVKVPDYKGTSRFPKGSSYFKRLPKSSAIKVIDFGSTTYERQDQSYIVSTRHYRAPEVILGLGWSYPCDIWSVGCILVELCTGEALFQTHENLEHLAMMERVLGPLHQHMLKRVDRRAEKYVRRGRLDWPDGAASRESMRAVLKLPRLQNLIMQHVDHSAGDLIHLLQGLLRYDPIDRLTAREALRHPFFSGDKFRR

SEQ ID NO: 81561 - protein, 115 aa, Gossypium hirsutum
  Clone ID: LIB3825-034-Q6-K6-A12.pep
RSQKRAPGVIKSSGYQCGCQTCNFSKVINAYEFERHAGCKTKHPNNHIYFENGKTIYGIVQELRSTPQNMLFDVIQTITGSPINQKCFRIWKESFLAATLELQRIYGKDEMKQLS

SEQ ID NO: 81562 - protein, 81 aa, Gossypium hirsutum
  unsure (1)..(81): unsure at all Xaa locations
  Clone ID: LIB3146-033-Q1-K1-C3.pep
RHAGCKTKHPNNHIYFENGKTIYGIVQELXSTPQNMLFDVIQTITGSPINQKCFRIWKESFLAATLELQRIYGKDEMKQLS

SEQ ID NO: 81563 - protein, 88 aa, Gossypium hirsutum
  Clone ID: GOSHI-09MAY01-C51708_2.pep
KSQQIIRLESKEGWHMKVILYINKRRLQTAAETGTSLQLLCFSTFPNYLVIIFFYSFQLHLFTRMDLYSSLTHSQIPTNVQLVNNQSE

SEQ ID NO: 81564 - protein, 211 aa, Gossypium hirsutum
  unsure (1)..(211): unsure at all Xaa locations
  Clone ID: GOSHI-09MAY01-C51708_1.pep
DAWADAWADAWADAXSKCTDRRRYNLKHVPKSKDGIFWMSWQDFQIHFRSIYVCRVYPPEMRYSVHGQWRGYSAGGCQDYNSWHQNPQFRLRASGPDASYPIHVFITLTQGVSFSRTAAGFRNYQSSHDSQMFYIGMRILKTRGRRAAYNIYLHESVGGTDYVNSREISCEMVLEPEPKGYTIVPTTIHPGEEAPFVLSVFTKASVVLEPL

SEQ ID NO: 81565 - protein, 127 aa, Gossypium hirsutum
  Clone ID: GOSHI-09MAY01-C51738_1.pep
PKQVHKQPNVITHQLHTKAKKEPGTCKFFSFSRSLRVDPLKKNERWPLELNLELFFFIREVMQNVRSDTNHSYPHPKHGYVGLQLLQGRRLVWLAHKHAWEHRCFYLILCVAYCRLESWSTERGAKT

SEQ ID NO: 81566 - protein, 114 aa, Gossypium hirsutum
  Clone ID: GOSHI-09MAY01-C51688_1.pep
MGVKYWVISVFSTALSFIALQLRTEFSLLQTDGLITENFIHTENVNHVPELLLGSYSIMALVANFVLNVFILVILTLKTVFFGQLYSSEIRKLIERIIKYVIYKANFGPPPKPK

SEQ ID NO: 81567 - protein, 85 aa, Gossypium hirsutum
  unsure (1)..(85): unsure at all Xaa locations
  Clone ID: AI725894.1.pep
ARRAGGIREDVVNREDVHQEHEFLRGCYSMKALVANLVLHVFIVVIRTLKTVFSGQLYSSEIRKLIERIIKYVMYKAXWGPPPKP

SEQ ID NO: 81568 - protein, 66 aa, Gossypium hirsutum
  Clone ID: LIB3146-032-Q1-K1-H12.pep
PKSKNDRNPSSPMPMCAAQSRLPPSIACAPSPPRRPYRLTLPPPTPAIPRTPRGRPSKFSSPSLKS

SEQ ID NO: 81569 - protein, 78 aa, Gossypium hirsutum
  Clone ID: GOSHI-09MAY01-C51628_1.pep
PTSALDPISTQNIEDVIVKLKKKRRMTVVMVSHSIKQIQRVADVVCLLVNGEIVEILKPNELSEAKHPMAQRFLQLSS

SEQ ID NO: 81570 - protein, 68 aa, Gossypium hirsutum
  Clone ID: GOSHI-09MAY01-C51148_1.pep
CAKKQNMHILLVFNTRTNTMVVSLWVLTLNVLIFLLFLLQVPFLSHSIYMIKEYEWGDTFDPPQKGGV

SEQ ID NO: 81571 - protein, 67 aa, Gossypium hirsutum
  Clone ID: GOSHI-09MAY01-C51178_1.pep
FMNLHNSIRDDRYLIGRRLHNFGENSEEKQNEAGSSSETQISDLRDTGIIQHDREVDVGLRLRRAAN

SEQ ID NO: 81572 - protein, 433 aa, Gossypium hirsutum
  Clone ID: GOSHI-09MAY01-C51168_1.pep
ENKAQAFQRSGRFVPSKKIQELTNKLIQFMEVHIYPLENEFNKLARSDLRWTVHPEEERLKELAKKEGLWNLWIPFDSAARAKELIFNGSERAHCTHDRLLGAGLSNLEYGYLCEIMGRSLWAPQIFNCGAPDTGNMEVLLRYGTKEQLNEWLVPLLEGKIRSAFAMTEPQVASSDATNIECSIKRQGDSYIINGTKWWTSGAMDPRCRILILMGKTDFTAPKHKQQSMILVDIKTPGICVKRPLTVFGFDDAPHGHAEVSFENVRVPAKNILLGEGRGFEIAQGRLGPGRLHHCMRLIGTAERGMQIMAERALNRKTFGKYIAQPAPPPSRPAKCRIELEQTRLLVLEAADQLDRLGNKKARGTIAMAKVAAPNMALKVLDRAIQVHGGAGVSSDTVLAHLWASARTLRIADGPDEVHLGTIAQLELRRAKL

SEQ ID NO: 81573 - protein, 78 aa, Gossypium hirsutum
  Clone ID: LIB3825-015-Q1-N6-G5.pep
MNFVIVETFECWMEQLAAPNMALKVLDRAIQVHGGAGVSSDTVLAHLWASARTLRIADGPDEVHLGTIAQLELRRAKL

SEQ ID NO: 81574 - protein, 123 aa, Gossypium hirsutum
  unsure (1)..(123): unsure at all Xaa locations
  Clone ID: GOSHI-09MAY01-C51388_2.pep
MGGTSFSKLLLAFCLALLYLSPQLGQTRVPYDKKAIGINGQRRILVSGSIHYPRSTPDMWEDLFQKAKDGGLDVIETYVFRNVHEPSXGNYKLEGGYDLGRFIKTVRKXGLYAQLRIGPYVCA

SEQ ID NO: 81575 - protein, 259 aa, Gossypium hirsutum
  Clone ID: GOSHI-09MAY01-C51388_1.pep
MERSSCSRLLIVFCCALCLECQLVQCSVTYDRKAIVINGQRRILFSGSIHYPRSTPEMWEDLIQKAKDGGLDVIETYVFWNVHEPSPGNYNFEGRYDLVRFVKTIHRAGLYAHLRIGPYVCAEWNFGGFPVWLKYVRGISFRTDNEPFKRAMQGFTEKIVGLMKSHNLYQSQGGPIILSQIENEYRAQSKLLGAVGYNYFSWAAKMAIETETGVPCVMCKEQDAPDPVINTCNGFYCDSFQPNKPYKPTMLTEAWSGWF

SEQ ID NO: 81576 - protein, 175 aa, Gossypium hirsutum
  Clone ID: GOSHI-09MAY01-C51378_1.pep
MAGRLGRRVVHFANLPIKLLMPNTFTNITEIALKTIPSASKIEIKRVLESLYGFDVDKVRTLNMDGKKKKRGGFLIARPDYKKAYVTLRTPLSISENLFPIQVIKEEKDSINKTSKSKSIVEEGEKKKHWLDGKVKDDGSHRGKGKGKGSYASPVAVTAAVEERPSSLEQHEESY

SEQ ID NO: 81577 - protein, 218 aa, Gossypium hirsutum
  Clone ID: GOSHI-09MAY01-C52908_1.pep
MAEGENKLKLYSYWRSSCSFRIRIALNLKGLEYQYIPVNLLKGEQFSPEFQKLNPIGYVPVLVDGDMIISDSFAIFMYLEEKYPQHPLLPSDLAKKALNFQAANIVSSSIQPLQNLAVLKYIEEKVSPDEKIPWTKFHIEKGFEALEKLFKDHAGKYATGDEVSMADLFLAPQILAGIERFNVDMAKFPLLSRLNEAYSELPEFQNAKPENQPDAPSA

SEQ ID NO: 81578 - protein, 140 aa, Gossypium hirsutum
  Clone ID: LIB3146-046-Q1-K1-D8.pep
LSLNGTEDIQISVDKFYGDPRPEHKLINTGFYHIRSNNRTISLFEKWYSLNNSTWKKEQDVLIDLLRQGIVTQLHLRVRFLETRHFSGFCEDSRDVSYVTTVHANCCRHINAKVRDLTAVLRDWKRFKAAVTKYPNAAGN

SEQ ID NO: 81579 - protein, 126 aa, Gossypium hirsutum
  unsure (1)..(126): unsure at all Xaa locations
  Clone ID: LIB3146-046-Q1-K1-D4.pep
PTRPLTLSPFLFYGHARPVRKFINTSFSHIRANNTTISLVEKXYPLNNSTXKKEQDVLIDLLRHGIITQLXLQVRFLETRHFSDFCEDSRDVSYVTTVHTNCCRHINAKVKDLTSVLRDWNKFKAA

SEQ ID NO: 81580 - protein, 82 aa, Gossypium hirsutum
  Clone ID: LIB3146-044-Q1-K1-H10.pep
VYVKIQRKFRVRESVTREEGISTLATPKIGILLNTCCLDFQKYEFNLTFKCDPIERNEKLQVFFCFLEGRPVFNTSRLPTRP

SEQ ID NO: 81581 - protein, 59 aa, Gossypium hirsutum
  Clone ID: LIB3196-053-P1-M1-F2.pep
ILFLEENFIFKFSKKEVILGLRKNPEKIRVRESVTREEGISTLATPKIGILLNTCYLNF

SEQ ID NO: 81582 - protein, 173 aa, Gossypium hirsutum
  Clone ID: LIB3583-035-P1-K1-D8.pep
EPEFSPILFRTSPSDLQFQQVFLKDTDERACAYIAGPAPNRWGFTIDGKDLLESVADIPITDEAQLHSEEGNNDQKDLRRKLREHPLFFGITMGLLAEVINSRLFTTVRDSLGLTYDVSFELNLFDRLKLGWYVISVTSTPSKVYKSVDACKNVLRGLHSNKVAPRELERAKR

SEQ ID NO: 81583 - protein, 89 aa, Gossypium hirsutum
  Clone ID: LIB3146-039-Q1-K1-G8.pep
HASAHASGPTRPPTRPLRRKLREHPLFFGITMGLLAEVINSRLFTTVRDSLGLTYDVSFELNLFDRLKLGWYVISVTSTPSKVYKSVDA

SEQ ID NO: 81584 - protein, 70 aa, Gossypium hirsutum
  Clone ID: GOSHI-09MAY01-C52168_1.pep
IKIQKILAVICYCLLSFSVVVFVCCRCAWRGGVICGTWHEWKNQLKAAVAEASKVSAENSLGVFILGYLG

SEQ ID NO: 81585 - protein, 76 aa, Gossypium hirsutum
  Clone ID: LIB3146-040-Q1-K1-A9.pep
SNVHFLHSPATKINRLKLLNLTQKALNTPKYPKPKILREFWEETLETQATTAFSRFFHSCHAQQITPPRHAHLQQT

SEQ ID NO: 81586 - protein, 85 aa, Gossypium hirsutum
  Clone ID: GOSHI-09MAY01-C52058_1.pep
KQLHLECGLEDLIQLEVSLWTMTTSATWRSTTPSISVKNGNRRLHTKESLSANWFALCPLFVKSPLGVTIVHSFTLFLFCHPYPV

SEQ ID NO: 81587 - protein, 186 aa, Gossypium hirsutum
  Clone ID: GOSHI-09MAY01-C52338_1.pep
MGLSVENSVTQSHTRTHKTFLITNYILLGAASACIFLILSLRLFPSLCGFFLILLHVVTIAAAVSGCSVATSGSNKFYAAHMVVMVLTSIFQGSVSVLILTRTSDFLGYLKSYVREDDGAVILKLAGGLCVAVFCLEWMVLGLAFVLRYYAFVEGHGVGNGSQAAYQRNEKVQDEDLKKWPWPIQV

SEQ ID NO: 81588 - protein, 180 aa, Gossypium hirsutum
  Clone ID: GOSHI-09MAY01-C52258_1.pep
PVLYRPDQPVGLRFMTLNPGTVPRMYHSTANLLPDGRVLIAGSNPHYFYKFGAEFPTELRLETFSPEYLSPDRANVRPVIEGIPETVRYGEAFDVFVSVSLPVVGIIEVNFGNAPFATHSFSQGQRLVKINVTPSVPDSGRYRIKCTAPPNGAVAPLGYYMVFAVNQGVPSVARWVHLVA

SEQ ID NO: 81589 - protein, 118 aa, Gossypium hirsutum
  unsure (1)..(118): unsure at all Xaa locations
  Clone ID: GOSHI-09MAY01-C52268_1.pep
DLYAVHKSPAKYFLDEMYSGNSLRRTTTLGSEKERERVYDTIFRLPWRCEVLIDVGFFVCFDAFLSLLTIMPTRILIKLWRFLTARQFKRLSAAELCDFXCFLVLACGVILLGQTCMA

SEQ ID NO: 81590 - protein, 124 aa, Gossypium hirsutum
  Clone ID: LIB3829-025-Q6-N6-A3.pep
LCAENDCKRCGNLDVNQPCIGKTDCSVCHSSNGVLCRACLKIRYGEELEEVRENKEWMCPHCIEEKGINPYWICNSSLCLKNRKMTPTGIAIYRARELGYKSVAHLLMDELQRKNPSRLMICSK

SEQ ID NO: 81591 - protein, 59 aa, Gossypium hirsutum
  Clone ID: LIB3146-061-Q1-K1-H1.pep
SVFFKVSQLGKTGISSRQNLCRMLIPVEASFDSSNPMDYYISHKDWSLFPLSRGGATKP

SEQ ID NO: 81592 - protein, 128 aa, Gossypium hirsutum
  Clone ID: GOSHI-09MAY01-C53598_1.pep
TFSDLFFTRKDVARILRIPLALTPHEDFLIWGGETSSEFRVRSAYKLLQRSNGNPRAYALHTIYRKFCKQLWSLNLPTKVKITIWRLSWNYLPTKVNMQHMKLAVSTSCPRCGDNVETMNHLFRECPG

SEQ ID NO: 81593 - protein, 77 aa, Gossypium hirsutum
  Clone ID: LIB3146-058-Q1-K1-G3.pep
NYESFILGMPWVIEQLNTCQGRLFHSGRSSRLTLAVHIRRDRAGQLQVLWPEIRKEKFSHPVQKFTMTYRLLLLLKP

SEQ ID NO: 81594 - protein, 130 aa, Gossypium hirsutum
  unsure (1)..(130): unsure at all Xaa locations
  Clone ID: GOSHI-09MAY01-C53588_1.pep
MDFKTLKLMIFHGSLARRVLLRALMVITALSIVPLLQIISGVDLESGYSSSFIFPGTFAFSKAWGSFKMVQYGGNGNLTTSVVKELMGKNILNYIAXALCVVEGSMSTVIGLKDLGFFDVHWVYKHPLFL

SEQ ID NO: 81595 - protein, 62 aa, Gossypium hirsutum
  Clone ID: GOSHI-09MAY01-C53748_1.pep
GKCSVRSAYKLLQGATADPRNYLVHAEIKNLCRKLWNLQLPTKITLSICRISRDLNPHFSSL

SEQ ID NO: 81596 - protein, 161 aa, Gossypium hirsutum
  Clone ID: GOSHI-09MAY01-C53728_1.pep
DDPSSDDEQQESKRGRSKLERWTSHKERDYSINSKSSASSKFKEIEKIDNVDAAESNKTLDEPGKLVEPAENHHPLSDNKTAGAPETKETDTWPLDDRHLDTVEKLKKRSERFKLPMPKEKDAMAIKKMESEALPSAKNETPADSEVKPERPARKRRWISK

SEQ ID NO: 81597 - protein, 108 aa, Gossypium hirsutum
  Clone ID: GOSHI-09MAY01-C53668_1.pep
VEDNDDFIASESDRQMLLIKQQDEELDELSASVERIGGVGLTIHEELLAQEKIIDDLGSEMDSTTNRLDFVQKKVAMVMKKASAKGQIMMILFLLGLFIILFILGFLT

SEQ ID NO: 81598 - protein, 78 aa, Gossypium hirsutum
  Clone ID: uC-gsflnu33B098b04b1.pep
PLFWVLSPVEFVEIILFEPKSSIILYCTISSSCIVSPSLPILSTLALSCFRSLILVGYCGVFFYKSPLFCSHKLGRVV

SEQ ID NO: 81599 - protein, 228 aa, Gossypium hirsutum
  Clone ID: GOSHI-09MAY01-C53128_2.pep
MDKSHILSISVAVVGAVCFLVHHLLNSMWFRSERLRRKLWMQGIKGPSPSLIYGNLPEMQKIQLNALTSTPNNADIVAHDYTSSLFPYFVQWRKEYGPIYTYSTGTRQHLYVNQAELVKEMNQCISLDLGKPSYITKRLAPMLGNGILRSNGPLWAQQRKIIAPEFFMDKVKVMVELMVESMPPLVRKWEDSIEAQSGVMADIRVDEDLRGFTADVIARTCFGSSYSK

SEQ ID NO: 81600 - protein, 242 aa, Gossypium hirsutum
  Clone ID: GOSHI-09MAY01-C53128_1.pep
KAGPIYTYSTGTRQHLYVNQAELVKEMNQCISLDLGKPSYITKRLAPMLGNGGRGANGPLWAQQRKIIAPEFFMDKVKVMVELMVESMQPLVRKWEDSIEAQSGVMADIRVDEDLRGFTADVIARACFGSSYSKGREIFSKLRKLQTAISKQSFLFGVPGYGLLPMKKQNEILSLEREIESLIWETVKERESKCKEACSSEKDLLHLILEGALNDQSLGEDSSKRFIVDNCKNIYFAGHEST

SEQ ID NO: 81601 - protein, 192 aa, Gossypium hirsutum
  Clone ID: GOSHI-09MAY01-C53388_1.pep
PCTGLEFGAEDLEGPIVSGSSQGSGEYSARVGIGKPPSQVYMVLDTGSDVNWVQCAPCADCYQQSDPIFEPSLSSSYSPLKCDTQQCKYLDDSECRNDRTCVYEVSYGDGSYTVGDFVTETITLGSDSVNNVAIGCGHNNEGLFVGAGGLLGLGGGQLSFTSQLNASSFSYCLVDRDSDSASTLEIRFVFSS

SEQ ID NO: 81602 - protein, 73 aa, Gossypium hirsutum
  Clone ID: GOSHI-09MAY01-C53368_1.pep
NKKTLNQLLPPLTSVPSPMPVGHLLHSPSQCLHLRLFDFLDSDLAADDVSPMTGPMIGAGAPAEKKNKALLSF

SEQ ID NO: 81603 - protein, 62 aa, Gossypium hirsutum
  Clone ID: GOSHI-09MAY01-C48778_1.pep
QGNSPLRVPINSHMKLAWILIIFLNMLKLKPFIGNYGNYTSPQKCGLRYGDLHGISFRPLTI

SEQ ID NO: 81604 - protein, 130 aa, Gossypium hirsutum
  Clone ID: GOSHI-09MAY01-C48648_1.pep
MKSHRRHRKVATVKNDYKQLDRFESGEGDKMKKQRFKRKLLRYEELPDYLKDNEFILNYYRCEWPLKDILLSVFSLHNETINIWTHLAGLLIFVGLTVFSSMEDFGDGSLITSFSKAQVSRPVMMMMNDV

SEQ ID NO: 81605 - protein, 142 aa, Gossypium hirsutum
  Clone ID: GOSHI-09MAY01-C48128_1.pep
HASAHYGGLNAAFLEEKKSVWVMNVVPVTARSTLPLILDRGFPGALHDWCEPFPTYPRTYDLLHANGLLSHLTSERCGLMELFIEMDRILRPEGWVVLSDKLGVIELARAHATQIRWDARVIDLHNGSDQRLLVCQKPFVTK

SEQ ID NO: 81606 - protein, 238 aa, Gossypium hirsutum
  unsure (1)..(238): unsure at all Xaa locations
  Clone ID: GOSHI-09MAY01-C48098_1.pep
GKDFRFYFDFEHLKEVASVVEESEFLRGWKKWNRGRKRKVPVKKVTTYKVTPMQLKKDKSTIIWRQFDAPEPENYWYRVCEGQAAKYIQRPWHALWKSKRLMNIVTEISGQMDWDFDAVHVVRGEKAQNIELWPRLDADTSPDALLTKLKEMIQPWRNLYIATNEPFYNYFDKLRSQYKVHLLDDYMELWSNKSEWYNETTLLNDGKPPESDGYMRGAVDTDVLYSAKTRVXTFYNLT

SEQ ID NO: 81607 - protein, 128 aa, Gossypium hirsutum
  unsure (1)..(128): unsure at all Xaa locations
  Clone ID: LIB3493-030-P1-M1-F11.pep
KDFRFYFDLEHLKEVASAVEESEFLRVRNKWNKRLERKGPLKTDTSYEDTPMQLTMDQSTISXQHADAPYPGNXSYRVCEEQAANYIHRPWHALWKSKRLMNIVTEISGQMDWDFDAAHVVRGEKAPN

SEQ ID NO: 81608 - protein, 248 aa, Gossypium hirsutum
  Clone ID: GOSHI-09MAY01-C48008_1.pep
MADYHFVYKDVEGASTQWDDIQRKLGNLPPKPPAFKPDPFEPAPDPDSVPKDKSWIDEKTEEELEEIEDDVDDDRFLEEYRKKRLAEMRKAVKISKYGSVMPISGSDFVREVSQAPQDVWVVVILYKEGFPECGLLLQCLEELAVKYPATKFVKIISTDCIPNYPDRNLPTLLVYNNGAVKANYVGLHSFGRRCTPEGVALVLCQSDPVLNDGQSGSNASVLEGVRKRFIEKVVTEHEDHDDDGSSSD

SEQ ID NO: 81609 - protein, 53 aa, Gossypium hirsutum
  Clone ID: GOSHI-09MAY01-C48288_1.pep
EMVSKLTSECWDKRITSSPWNKFSSSESACLSNCAQRYMDLTLIIMKRVQSMQ

SEQ ID NO: 81610 - protein, 156 aa, Gossypium hirsutum
  Clone ID: GOSHI-09MAY01-C49898_1.pep
MGSVAKKGLQKYLLQLQHHPLRTKAITAAVLSGISDTVSQKLSGIPKLQLRRILLKMLFGFAYLGPFGHYMYMLLDKIFKGKRDSKTVAKKVVLEQLTTSPCNNLLFMIYYGVAVEGRPWMHVKTRIKQEYPKVQMTAWTFWPVVGWINHQYMPLQ

SEQ ID NO: 81611 - protein, 89 aa, Gossypium hirsutum
  Clone ID: GOSHI-09MAY01-C49888_1.pep
RKATSEDAPAPAEDKKLATWGTEVPEDLVLDEKLLTEALKKEDERRREEKDERKRKYNVRWNDEVTAEEMEAYRMKKVHHDDPMKDFLN

SEQ ID NO: 81612 - protein, 190 aa, Gossypium hirsutum
  Clone ID: GOSHI-09MAY01-C49798_1.pep
LYFLSHPNIVRYYGSELGEETLSVYLEYVSGGSIHKLLQEYGAFKEPVIQNYTRQILSGLAYLHGRNTVHRDIKGANILVDPTGEIKLADFGMAKHISACGKMLSFKGSPYWMAPEGGMNTNGYNLAVDIWSLGCTILEMATSKPPWSQYEGVAAIFKIGNSKDVPEIPDRLSNEAKSFIRLCLQRDPSA

SEQ ID NO: 81613 - protein, 150 aa, Gossypium hirsutum
  Clone ID: GOSHI-09MAY01-C49688_1.pep
MMNTTKSTFSLASLMMAAASVCAATGPDFFDPFSSSSDQKLKTHQNQVGGDDGFYGPDDFDIPGFEKGWGNGIMGGGYGGGFGGPSGSFSKGGIVRPSVVCKEKGPCYNKKLTCPAKCFTSFSPSGKGYGVGGGGGGCSMDCKEKCIAYC

SEQ ID NO: 81614 - protein, 81 aa, Gossypium hirsutum
  Clone ID: GOSHI-09MAY01-C49178_1.pep
RFWQKFLRTFSNLNYRRLIGSATCHWCQHEAETREHLFRECPTEKRIYSVRCVAPEGTRLKINFDAASAFAAEAVEGLQAL

SEQ ID NO: 81615 - protein, 268 aa, Gossypium hirsutum
  Clone ID: GOSHI-09MAY01-C49378_1.pep
MAISLKSTAAGLVQLKNHNTHSPSRFPSFKPLVSTKRFTPMAALATSQTLGISETFSKLKNQGKVAFIPYITAGDPDLSTTAEALKVLDSCGSDIIELGVPYSDPLADGPVIQAAATRSLARGTNLNAILSMLKEVAPQLSCPIALFAYYNPILKRGVEKFMSAIRDVGIQGLVVPDVPLEETRLLRREALKNKIELGMLTTPTTPTDRMKAIVEAAEGFVYLVSSVGVTGARASVSDRVQTLLTEIKEVTTKPIVVGFGISKPEHVE

SEQ ID NO: 81616 - protein, 135 aa, Gossypium hirsutum
  unsure (1)..(135): unsure at all Xaa locations
  Clone ID: uC-gsronu33B007c03b1.pep
MGIYTSMMGDGGGVDSCGSGIIELGVPYSDPLADGPVIQAAATRSLARGTNLNAILXMLKEVAPQLSCPIALFAYYNPILKRGVEKLMSAIRDLGILCLVXPDVPLEETELLIREAFLNLLIVLXIVTTPTTPTD

SEQ ID NO: 81617 - protein, 84 aa, Gossypium hirsutum
  Clone ID: GOSHI-09MAY01-C49248_1.pep
PQVRNLRVSASFSAVSYAGPFQLVKQEPSMPLSPTSHQLALINELSRNVGVLRESPLSVHRNLRPHTSVNAEIVGIPFDSSRRG

SEQ ID NO: 81618 - protein, 420 aa, Gossypium hirsutum
  Clone ID: GOSHI-09MAY01-C44958_1.pep
MLPTGAKDTHLRDSSNQKVHPQPMEESMNQNPEAVEALISKLFTNISSLKSAYIQLQTAHTPYDPEKIQAADKLVISELKNISELKNFYREKNPKPVCVSPQDSRLAAEIQEQQTLLKTYEVMVKKFQSEIQNKDSEIRQLQEKIEDANQKRVKLEKNIKLRGLSMKESEGSGEENGFFPADLTPELFTSAVESAYKAIHDFSKPLINMMKAAGWDLDAAADSIEPNVVYAKRAHKKYAFESHIYQRMFSGFQQENFSIKLDNVTVNKESFFQQYLALREMDPLDMLGQNPDSLFGKFSQSKYLMVVHPKMEASFFGNLDQRNYVTGGGHPRTPFYQAFLKLAKSIWLLHRLAYSFNPNVKVFQVKRGSEYSEVYMESVVKNLIMDETNEKPKVALMVMPGFWIGGTVIQSRVYLFRYEG

SEQ ID NO: 81619 - protein, 182 aa, Gossypium hirsutum
  Clone ID: GOSHI-09MAY01-C44908_1.pep
PRVRNLGTIYVDCGKLDQAATCYMNALEIKHTRAHQGLARVYFLRNQRKAAYDEMSKLIEKAHNNASAYEKRSEYCDRETAKNDLNMATKLDPLRTYPYRYRAAVLMDDQKETEAVEELSKAIAFKPDLQMLHLRAAFYESMGDMKSALCDCEAALCLEPNHMDTLDLYNRARDRAISPQEM

SEQ ID NO: 81620 - protein, 71 aa, Gossypium hirsutum
  Clone ID: GOSHI-09MAY01-C44578_1.pep
YLKPTTKSRIPPPPTSFRDTPIGYHIKIPTSQFLGTDGVYGIILANGVFIKAHWGGGNLGGIPPFSPSAHN

SEQ ID NO: 81621 - protein, 147 aa, Gossypium hirsutum
  Clone ID: GOSHI-09MAY01-C44788_1.pep
QQLIQRYDPDPAAEAAAATVLASKLGADSGLKVYVGDESEYNVPGGKSHDVEVVPSSGIRKRKQLHTRSSSAGSTPLLHSDEEIPHSAGMEGPRASEHGQLVVVDHHCPQGPASHDGGWLARIAALLVGEDPTQSYALICGNCHMHN

SEQ ID NO: 81622 - protein, 171 aa, Gossypium hirsutum
  Clone ID: GOSHI-09MAY01-C44668_1.pep
QGGNLQIVNQTIHFDDSVYAKSPASNVESKKSLKRFHLYLYSDDVDQGNGTLSMVANVTLGFNEKKFKDADARSPSSSLRNLQKGKGVIIIKDNLVVSGVGSTQQSYNYDSSKFCYSRNISSSNYTILHDEVQNTCNKRAKSHFGYGLSRRWSFPARRAFLTSHVVDPNGN

SEQ ID NO: 81623 - protein, 108 aa, Gossypium hirsutum
  Clone ID: GOSHI-09MAY01-C44608_1.pep
DADYYATQFQITGIPGALNYYRNFDRNWELSAPWWKSQIKVPVKFAMGDLDLVYTMPGMKDYIHNGGFNRDVPFLEEALVINGVSHWIHQEIPDQINQLLFDFFSKFH

SEQ ID NO: 81624 - protein, 155 aa, Gossypium hirsutum
  unsure (1)..(155): unsure at all Xaa locations
  Clone ID: uC-gsronu33B111a03b1.pep
LRFRSRNFVVTGXPTQVARGAQKYFIRLNSMNKDRRRSSIHDITSVGNADISAPQGPITGQTNGAAAGGSSGKSAKQPPQHPAALAGVGVYGAPTMGQPIGGGPLVSAVGTPVNLPAQAHMAYGVRASVPGAVVHGAPMNMGPATYPIXHTSAHR

SEQ ID NO: 81625 - protein, 120 aa, Gossypium hirsutum
  unsure (1)..(120): unsure at all Xaa locations
  Clone ID: LIB3148-022-Q1-K1-C3.pep
PTRPPTRPPTRPRTRGSAPQGPITGQTNGAAAGGHPXKSAKQPPQHPAALAGVGVYGAPTMGQPIGGGPLVSAVGTPVNLPAQAHMAYGVRASVPGAVVHGAPMNMGPATYPIPHTSAHR

SEQ ID NO: 81626 - protein, 125 aa, Gossypium hirsutum
  Clone ID: GOSHI-09MAY01-C44078_1.pep
KAWEVLDHIMAKYICQKRKDLNQGMMAQTVDGGVDILTSYILEEKSCDDKFLRDTILNMTLAGRDTTSSALTWFIWLVSRHPIVENKIIEELQSIIPAEETKKRRLLNAKEVKNLVYLQGALCEA

SEQ ID NO: 81627 - protein, 114 aa, Gossypium hirsutum
  Clone ID: GOSHI-09MAY01-C44368_1.pep
MEGDICSGFGNGGQVDGKVLQTFQKSFVQVQDILDQNRLLINEINQNHESKIPDNLSRNVGLIKELNNNIRRVADLYADLSSSFTRSMEASSEGDSAGMYEPDGKASQKRIRSG

SEQ ID NO: 81628 - protein, 62 aa, Gossypium hirsutum
  Clone ID: GOSHI-09MAY01-C44298_1.pep
KGLKPVCVNYLVNGVGEEGTVVVLPRNEKDGGNNGKMVTITLPQHLLLKLNNGLQIDWNIVI

SEQ ID NO: 81629 - protein, 165 aa, Gossypium hirsutum
  Clone ID: GOSHI-09MAY01-C44248_1.pep
MAKTKPGKKDLDSYAIKGTNKVVRPGDCVLMRPSDSDKPPYVARVEKIEADHRNNVKVRVRWYYRPEESIGGRRQFHGAKELFLSDHYDVQSAHTIEGKCIVHTFKNYTKLENVGAEELFCRFEYKAATGGFTPDRVAVYCKCEMPYNPDDLMVQCEGCKDWFHP

SEQ ID NO: 81630 - protein, 150 aa, Gossypium hirsutum
  unsure (1)..(150): unsure at all Xaa locations
  Clone ID: GOSHI-09MAY01-C44278_1.pep
LSNEDAWTLFSDKVGQNLMSSIDLQPIAKSIVERCAGLPLVIVIVASSMRSEDSFPIWRNALAELNRNISSIIEIKDKVYQQLXFSYDRLKDQRIQNCFLTCASYREDSGILKEQLIRDWVGKGLIEEMGSLEANMDKGQAILRTLVENC

SEQ ID NO: 81631 - protein, 162 aa, Gossypium hirsutum
  Clone ID: GOSHI-09MAY01-C44268_1.pep
MEGSSSQLFDDDQKSSGASKFLFNLPSRGHLSSTVISSNLGGMRVYVCEHNTSPPESQHIKTNQQNILIRSLMLNDKNGDSSSKDVKAAAEGPRKRAAERVMDSRASAKKANTQEGSSSRAEKDYHSLTVERLRALLKERGLSPKGKKDELIARLKCVNGSS

SEQ ID NO: 81632 - protein, 270 aa, Gossypium hirsutum
  Clone ID: GOSHI-09MAY01-C45918_1.pep
MCSSSWKTMAVALLLIELWFTIESSVAHPDKIVKLPGQPPRLSFQQFSGYVTVDYKKHKALFYYFVEAETDPASKPLVLWLNGGPGCSSLGVGAFSENGPFRPNGEFLVKNDYSWNREANMLYLETPIGVGFSYSTNTSSYEAVDDEITARDNLVFLQNWYNKFPNYRHRDLYITGESYAGHYIPQLAKLMVEFNKKQNLFNLKGIALGNPVLEFATDFNSRAEYFWSHGLISDSTYNMFTSVCNYSRYVSEYYRDSVSPSCSKVMSQVS

SEQ ID NO: 81633 - protein, 115 aa, Gossypium hirsutum
  unsure (1)..(115): unsure at all Xaa locations
  Clone ID: GOSHI-09MAY01-C45928_1.pep
RRDGMGFRNLNLFNIALLAKQGWRLLCNPNSLLARTLKAKYFKDSDFLNSRLGNLPSLPWQSIWAAKGLLQKGXGWRIGDGKSVSIWGDPWVPLRKWMWKGFYMSHCLCIRMMIS

SEQ ID NO: 81634 - protein, 105 aa, Gossypium hirsutum
  unsure (1)..(105): unsure at all Xaa locations
  Clone ID: GOSHI-09MAY01-C45448_1.pep
HASVYVKKLAVFIGYPFSFEEEQGGVVKKLIDLCSFENLSNLDVNKTGKRHEDDDEATNKTFFRKGXVGDWQNHLTPEMANRLDNIVEQKLSGTGLSFELNNGSS

SEQ ID NO: 81635 - protein, 81 aa, Gossypium hirsutum
  Clone ID: LIB3148-039-Q1-K1-G2.pep
YKMVLPIPNIAFYEEGQKGYQINGIEKERKHDLYMFIESILFSIFLEFSFPPFQKYLSLFFFFFFFKNLKSLDPPMWEETD

SEQ ID NO: 81636 - protein, 132 aa, Gossypium hirsutum
  unsure (1)..(132): unsure at all Xaa locations
  Clone ID: GOSHI-09MAY01-C45478_1.pep
HASALIPILCRALEHVAEFXRRNFNRSTLYRKYLEDPCLWVESNTTTLSILSSHAEIGVGFLLIISLFSWQRNIIQTFMYWQLLKLMYRAPVTTGYHQSVWAKIGRTVNPLVQQYAPFLNGPVSAIQRWWLR

SEQ ID NO: 81637 - protein, 105 aa, Gossypium hirsutum
  Clone ID: GOSHI-09MAY01-C45438_1.pep
MARQSFVLALVFIALVGLVSAANTASKAPSAVPVPDDDTIGNTDDGAGASSPGASNDAVAAPLGSEQEAKSMAPAPSSDATTTGVSAVGAAALTGAAAIATYFVF

SEQ ID NO: 81638 - protein, 150 aa, Gossypium hirsutum
  unsure (1)..(150): unsure at all Xaa locations
  Clone ID: GOSHI-09MAY01-C45788_1.pep
LVSAATMEECPTTGTMVGHWVRKFTFLCTDRESMFGRMIWXSGRAYYCVXTREYTYASVPTKNKPRRVDLYYSSWLIRAVESRRGDGQLTACEVLLFHHEDMGIPWKIAKVGVRQGMWGTVKKIDPGLRAYQKERTSGNTLSHCAFMAQI

SEQ ID NO: 81639 - protein, 114 aa, Gossypium hirsutum
  unsure (1)..(114): unsure at all Xaa locations
  Clone ID: GOSHI-09MAY01-C45768_1.pep
LELGPEWVRXQVKDLVKNREIVIEALSPLGEGAVLGGKGAIYLWATLPEKCMDDVKVVHWLAHRHGVVAIPGSACGSPGHLRISFGGLMENDCRAAAQRLKTGLEELVKHGLVQ

SEQ ID NO: 81640 - protein, 156 aa, Gossypium hirsutum
  Clone ID: GOSHI-09MAY01-C45118_1.pep
SSKARLHQLSDADKIVVAFPDDGAWKRFHKLLDHFPTVICTKVREGDKRIVRLKEGNPTGCHVVIVDDLVQSGGTLIECQKVLFAHGAAKVSAYVTHGVFPKRSWERFTQKNNRSEKGFAYFWITDSCPQTVKAIENTAPFEVLSLAGSIADALQI

SEQ ID NO: 81641 - protein, 84 aa, Gossypium hirsutum
  unsure (1)..(84): unsure at all Xaa locations
  Clone ID: LIB3148-035-Q1-K1-D1.pep
PRVRPRVRPRVRPRVRAKVSAYVTHGVFPKRSWERFTQKNNRSEKGFAYFWITDSSXQTVKAIENTAPFESLSLGGSIADALQI

SEQ ID NO: 81642 - protein, 79 aa, Gossypium hirsutum
  Clone ID: GOSHI-09MAY01-C45138_1.pep
MQVRAAPDRLSEKVEQSIKEAQEACSDDPASGECVAAWDEVEELSAAASHARDRLKDNDPLENYCQDNPETDECKTYDN

SEQ ID NO: 81643 - protein, 92 aa, Gossypium hirsutum
  Clone ID: GOSHI-09MAY01-C45068_1.pep
LVFVSLKASFVFGSGVTQKGHVITSVETALFVCSMVMGVAHIIVAYRTSCRERRKLLVYKIDIEAISACKSGFSRYEKILQDERVKLHLNLR

SEQ ID NO: 81644 - protein, 92 aa, Gossypium hirsutum
  unsure (1)..(92): unsure at all Xaa locations
  Clone ID: uC-gsronu33B012d11b1.pep
LVFVSLKASFVFGSAVTQKGHVITSVETVLFVCSMVMGVAHIIATYRTSCXERRILLDDKIDDECIKFHVSGFSRYEKSLQDERVKLHLNLR

SEQ ID NO: 81645 - protein, 69 aa, Gossypium hirsutum
  unsure (1)..(69): unsure at all Xaa locations
  Clone ID: GOSHI-09MAY01-C45318_1.pep
IASGSAKQLIKXFSLEGEQLGVIRYQHTFMAQKIGSVSCLTFHPYQVLLAAGAADACVSIYADDNSQTR

SEQ ID NO: 81646 - protein, 265 aa, Gossypium hirsutum
  unsure (1)..(265): unsure at all Xaa locations
  Clone ID: GOSHI-09MAY01-C46858_1.pep
SIRPTTRREWGGVYLKNPFQPLENACEELRTSRMFLKLLEAVLKTGNRMNIGTNRGDAHAFKLDTLLKLADVKGADGKTTLLLWVVQEIIGTEGARLSDADQTQSSTVNEDARGRKLXGLQAVSSLSSELTNVKKAAAMDSEVLNSDVLKLSRGIENISDVLRLNEKMALDESLEKFSESMNKFMKMAEEEIIRIQAHESVALSLVKEITEYFHGNSTKEEAHPFRIFMVVRDFLTVLERVCKEVGMINERTVVSSAHKFPVPVN

SEQ ID NO: 81647 - protein, 84 aa, Gossypium hirsutum
  Clone ID: GOSHI-09MAY01-C46878_1.pep
SAYCSLAAAYFWNINAFLQKAITNRHGNKTQILNLINLTIIPLKKKKKIFLLNTYLFTIFGGALFRGPNFIPRCLEVIIFFLGP

SEQ ID NO: 81648 - protein, 162 aa, Gossypium hirsutum
  Clone ID: GOSHI-09MAY01-C46828_1.pep
MTNFSNGVHVLMIPFPASGHIFPLMDLAHQILLRGLTVTIMVTPKNLHYLNSLLSLHSSSNLQTLVLPFPSHSSIPHGVENMQDVDISFVPDFAAALSKLQDPLVNWFENHVLPPTAIVSDMLLCSWTLLLAFRLGVPNVCFVVTNAHAVSSWWVNDLDSMP

SEQ ID NO: 81649 - protein, 138 aa, Gossypium hirsutum
  Clone ID: GOSHI-09MAY01-C46448_1.pep
VECMATSDNVVRAGLTPKHRDIQTLCSMLTYNQGYPEILSGLALSPYITRYLPPFDEFEVDRCILPKGSSVVFSAIPGPSIFLAFVGEGKMKTGCWKGIVTEGDVVFEPANTELVITATTSELQLYRAGINSRFFHGQ

SEQ ID NO: 81650 - protein, 106 aa, Gossypium hirsutum
  Clone ID: GOSHI-09MAY01-C46408_1.pep
MAESLGPRLYSCSNCLNRVSLHDDIISTCFQGRNGRAFLFSHAMNITLGPKEDRHLLSGLHTVADIYCADCHQVLGWKYERAYEVSQKYKEGKFILEKAKIVKEDW

SEQ ID NO: 81651 - protein, 285 aa, Gossypium hirsutum
  unsure (1)..(285): unsure at all Xaa locations
  Clone ID: GOSHI-09MAY01-C46718_1.pep
VIYVEACESGSIFEGIMPEDLNIYVTTASNAQESSWGTYCPGMEPSPPPEFITCLGDLYSVAWMEDSETHNLKRETIEQQYKTVRERTSNFNSYTSGGSHVMRRASTSIKAEKIYLYQGFDPASVNFXPNELSHDTQMEAINQRDADILFLWHMYKNSEDGSKKKEILKQISETMRHRIHLDGSIDLIGTVLYGPAKGSVILNTIREPGLPLVDDWQCLKSMVRLFETHCGSLTHYGMKHMRAFANICNSDVSQSAMEEACVAACSMQQXHDPTQWHPSNHGYSA

SEQ ID NO: 81652 - protein, 105 aa, Gossypium hirsutum
  unsure (1)..(105): unsure at all Xaa locations
  Clone ID: GOSHI-09MAY01-C46678_1.pep
MKSDDGQLVVLSNDVTLKIKXAMAEGLMCETVQEFRESVVNPFSERFMWADSSPRGHTWSVMDDVVLRGKYNRCPLKKPSKGGDIKGLKLILLHNSHYAHLNSVR

SEQ ID NO: 81653 - protein, 89 aa, Gossypium hirsutum
  Clone ID: GOSHI-09MAY01-C46638_1.pep
CDSHVILMNIVVGPNLNQTQSPTDYPKLSPHLSARYTKQNTSPNTNKTKKEMRNPASGKPAPQAGLRTSRNSESCATPPPHDLRLARVF

SEQ ID NO: 81654 - protein, 108 aa, Gossypium hirsutum
  Clone ID: LIB3582-028-P1-K1-D4.pep
SVFTRIFKFNKPTWWSDLLYGQNWVYYWVIGSNLILRCTWTYKLSAHLRHNYLTVFTITALEMLRRFQWIFFRVENEWNKISKSSIQLPMTDIPNEDEKLVDLSDHTV

SEQ ID NO: 81655 - protein, 58 aa, Gossypium hirsutum
  Clone ID: LIB3148-048-Q1-K1-G11.pep
MICYCDVIQHLSRVYKSKYRTARYENLIKRGNQHATTAGRVGGRVGGRVDGRVDGRVG

SEQ ID NO: 81656 - protein, 73 aa, Gossypium hirsutum
  Clone ID: GOSHI-09MAY01-C46318_1.pep
LFVLVFLFFPRIEYDSFLLIRIFVLDILAPLVPNFEIIEECLNCTIGLQRSCSQVILSPNKLPIIPLNHWFLS

SEQ ID NO: 81657 - protein, 203 aa, Gossypium hirsutum
  Clone ID: GOSHI-09MAY01-C46298_1.pep
QKTRHLSICHGRDIDIENDAHYNNPLTSCSVISTTTTVATSISFSVSGPKQNKKTSKNSVAIKGSKKAVGDLERKQPVYRGVRMRSWGKWVSEVRQPKKKSRIWLGTYPTAEMAARAHDVAALAIKGCSAHLNFPELAKTLPRPASTSPKEIQAAASQAAASTYLDTSRWSNNIEPEDKVSRRPRQEQVPVSRSDNMCSTSPF

SEQ ID NO: 81658 - protein, 138 aa, Gossypium hirsutum
  Clone ID: GOSHI-09MAY01-C47818_1.pep
RSTQRPVKDPLLLIKEKFRSLVAIPRFPKRGSSKKDADNNEESNMQEEASDEEEEGYSDMDSYLSDGGFGDDEGGEDDDYADDWSDDDDGDAPPDFDDDDELVNVGSSKPTTQAAFSAKKEEERRVPVFPDGRPRERW

SEQ ID NO: 81659 - protein, 58 aa, Gossypium hirsutum
  Clone ID: LIB3135-037-Q1-K1-C2.pep
QRSFQEIRFGISSNTKLDSFPRKITNLFKPSHDKHLFRSQKEWGVNLISCLESFNQRS

SEQ ID NO: 81660 - protein, 133 aa, Gossypium hirsutum
  Clone ID: GOSHI-09MAY01-C47448_2.pep
MEKWSFMLVIALVVVHASARNVPTTTTVPTSTTRSSVPSGATGVGDQKNFLTYGGVGGYSGIGSNGLPFGGVGGLGGITPLGGARGLGGGVGGIGGVRGLGGSNGLGGLGGFGGFGGERGACCGFGGGVRGAV

SEQ ID NO: 81661 - protein, 84 aa, Gossypium hirsutum
  unsure (1)..(84): unsure at all Xaa locations
  Clone ID: LIB3149-049-Q1-K1-E12.pep
AHESHYXLQVHLLHQWPXTPPPSPLAPPRGVIPPRPPLPPNGKPLEEVLLVANTSSTTWYTTASSASGHSCSCGHISCTSVNNN

SEQ ID NO: 81662 - protein, 228 aa, Gossypium hirsutum
  Clone ID: GOSHI-09MAY01-C47798_1.pep
MGRRKSTNTTQTSTNSSNKFEGANIRFQDADDKEIASNSSNLDDSIVAVDKASEDISMGEPDVSFVGCDAGDDKTSADYYFDSYSHFRIHEEMLKDVVRTKTYQNVIYRNKFLFQNKVVLDVGAGTGILSLFCAKAGAAHVYAVECSHMADMAKQIVETNGLSDVITVLKGKIEEIELPVAKVDIIISEWMGYFLLLENMLNTVLYARDKWLVNDGVVLPDKASLYLT

SEQ ID NO: 81663 - protein, 49 aa, Gossypium hirsutum
  Clone ID: GOSHI-09MAY01-C47718_1.pep
YYKCSSVRGCPARKHVERALDDASMLIVTYEGDHNHSLSVAETTILESS

SEQ ID NO: 81664 - protein, 56 aa, Gossypium hirsutum
  unsure (1)..(56): unsure at all Xaa locations
  Clone ID: LIB3135-036-Q1-K1-A8.pep
SKRRASCRGDKTLPSQQSTVWLASINNRKIGCSSMKIQVWWFVQQIENGYDHPXAW

SEQ ID NO: 81665 - protein, 123 aa, Gossypium hirsutum
  Clone ID: GOSHI-09MAY01-C47728_1.pep
MMKHCLVYHPSQPIVVTNILPNICNQFMCGVNHSPYLVQKQVPIFTLAEIIRTENNIKKNHPLAKTGPVLPVSRLAIGRKLEEFISPCGKLKERTMLRFPFLPYDQSNRLPEELCLLFLSCQP

SEQ ID NO: 81666 - protein, 153 aa, Gossypium hirsutum
  Clone ID: GOSHI-09MAY01-C47148_1.pep
MSGDEKNPAVVVDHQHHQYGTFQGVSNYPPPPPPQHHGPAIGFPQPVPPPGLHEPSAPPPQYYPQGYQTVPGYAVAEGRPVRERRLPCCGIGFGWFLFIIGFFLGAIPWYIGLFVLLCARIDYREKPGYIACTIAAVLATIAIILGVTKGIDD

SEQ ID NO: 81667 - protein, 61 aa, Gossypium hirsutum
  Clone ID: GOSHI-09MAY01-C47018_2.pep
HGKTSQQNQNTPLTFTALLNNQYPCSSIHLMLVDSQGHRVVEWLTLRFLRADNWIRWKSII

SEQ ID NO: 81668 - protein, 160 aa, Gossypium hirsutum
  Clone ID: GOSHI-09MAY01-C47018_1.pep
PRVPKKPLEGFGVLIPSKEQRRGLKTLGPPFSSVMFPDRAPNNLYLFTTFVGGNRNKELAKVSTDELKHIVTSDLQQLLGVEGEPTFFNHFYWSKAFPLYGRNYASVLGAIEKMERDLPGFFYAGNHKGGLSVGKSIASGCKAADNVITYLESSHDKLLK

SEQ ID NO: 81669 - protein, 106 aa, Gossypium hirsutum
  Clone ID: LIB3135-025-Q1-K1-D5.pep
GPSQTDASAHAYRQLHSLFPLMPYQDPGRVIKTLGALFSSQILTDHTPNNLYLYTTFVGGNRNKELAKVSTDELKHIVTSDLQHLLGVEGEPTFFNHFYRSKAFSL

SEQ ID NO: 81670 - protein, 220 aa, Gossypium hirsutum
  Clone ID: GOSHI-09MAY01-C47338_1.pep
MSKMRYDRKPPLAKSPIRVRPRRVLRSNSTSLQTPPGSLTKSQKPVRAWTGEESVIRPEYRSISCELQALATMVKREVGNGEKENAGFGETSVGAKSTSLFERGRFYEEYSARRNERLKRRKGETGTESKSGHHHGLGVNIESSKKRESKKLESFRKSVSAAYSVERNESQTPRYLLRSMSKANENKFKKPPLAVNNYNSSMSVTGPASKTTPRRVGRRV

SEQ ID NO: 81671 - protein, 86 aa, Gossypium hirsutum
  Clone ID: GOSHI-09MAY01-C47258_1.pep
MSSTSRAWIVAASIGAVEALKDQGICRWNYTVRSVAQHAKNHVRSASQAKNLSSQSSAAISKGLNKSKQSEESLRTVMYLSCWGPN

SEQ ID NO: 81672 - protein, 86 aa, Gossypium hirsutum
  Clone ID: LIB3582-010-P1-K1-C3.pep
MSSTSRAWIAAASIGAVEALKDQGICRWNYTARSVVQHAKNHVRSASQVKNLSSQSSAAISKGLLQSKQSEESLRTVMYLSCWGPN

SEQ ID NO: 81673 - protein, 94 aa, Gossypium hirsutum
  Clone ID: LIB3135-043-P1-K1-F2.pep
MSSTSRAWLVAASIGAVEALKDQGICRWNYTVRSVVQHAKNHVRSASQAKNLSSQSSAAISKGLNTSKQSEESLRMVVHLPTTISRKNQHCIWL

SEQ ID NO: 81674 - protein, 66 aa, Gossypium hirsutum
  Clone ID: GOSHI-09MAY01-C40988_1.pep
YSGCLYSTIGTSNSCGSGNGLPTLGKHYREANVVEEEQSEKCILVPKTLRIDNPNEASRSPIWATL

SEQ ID NO: 81675 - protein, 85 aa, Gossypium hirsutum
  Clone ID: GOSHI-09MAY01-C40548_1.pep
ASTHAYAHTSAHSSETFMREEGRGTQGRERGRGSQPAGRSPADRRPLSVAGASHSARWPEKVLGRWSREWVNGGWLNVRGFAVTS

SEQ ID NO: 81676 - protein, 49 aa, Gossypium hirsutum
  Clone ID: LIB3135-062-Q1-K1-A8.pep
RIIRNCMKYFERGYFFFYFFFFFFFIFFFFFFFFFFFFFFFFSNICTKF

SEQ ID NO: 81677 - protein, 64 aa, Gossypium hirsutum
  Clone ID: LIB3147-031-Q1-K1-F3.pep
YEHAMDSKCDIGVVDVYNPEIQRVSKRVQNFCICLRNFEGVEYDIYFLFCLKKTRFNKRNKTQL

SEQ ID NO: 81678 - protein, 175 aa, Gossypium hirsutum
  Clone ID: GOSHI-09MAY01-C40568_1.pep
DIAETVLLNILRGDIARLSRCTSIITGEDGPIPRCKPFKYTYEKEIVMYAYFKKLDYFSTECIYSPNAYRGFARELIKDLERIRPRAILDIIKSGEDFRISTTTKMPEQGTCERCGYISSQKWCKACVLLEGLNRGLPKLGIGRTQGLNSDGKKDRKRDSRTPSIESKQCGSLEF

SEQ ID NO: 81679 - protein, 51 aa, Gossypium hirsutum
  Clone ID: LIB3146-059-Q1-K1-C6.pep
SDLIHGIQKWCKACVLLEGLNRGLPKLGIGRNQGLNSDGKKDRKRDSRTPS

SEQ ID NO: 81680 - protein, 203 aa, Gossypium hirsutum
  Clone ID: GOSHI-09MAY01-C40448_2.pep
SVLLGYLMSLGLSPFTIVICFTLATFIILSPFAFYFERSLWPNRLTLKLIIQLVFISFGGVTLFQFLYLKGINLTSPAVATAMPNLAPGLIFIIAWIFRVEKVVLTYLYIKIKIVGTFVCVAGAVTMSIMQSTDSSGDAMMDHPAVDNDGGDKNKIIGCMYLMAAVLVLSSSGVLQAATLGDFPAPMSLCAITFVMWTGYNFI

SEQ ID NO: 81681 - protein, 175 aa, Gossypium hirsutum
  unsure (1)..(175): unsure at all Xaa locations
  Clone ID: GOSHI-09MAY01-C40448_1.pep
LFQSLFLKGIXLTSPAVATAMPNLAPGLIFIIAWACRLEKVDLSCLCSKVKIGGTLLCVLGALTMSLMHSSVSPESARMFAAPTSDFVFNKDKIIGCMYLMAAVLVLSSNVVLQATTLGDFPAPMSLCAITSLIGVIITALVQLVENHVFQWSWPLGDVRELLGFSLLGSAVGGT

SEQ ID NO: 81682 - protein, 89 aa, Gossypium hirsutum
  Clone ID: LIB3543-060-Q6-K6-C2.pep
VGHSATPLPTTPVKDPSHRAIGGDSEHTTLPAWKNETSFDDLAIKSLRSQELERQEADDENSEVGDFDPVDGTSHRRLSWPPSVKKNGL

SEQ ID NO: 81683 - protein, 58 aa, Gossypium hirsutum
  Clone ID: LIB3147-033-Q1-K1-C3.pep
KNLNAKKQMMKIARWGTLILSMVQATGDCLGLHQLKRMVCKCKYLLALVCFLSSKYCL

SEQ ID NO: 81684 - protein, 410 aa, Gossypium hirsutum
  Clone ID: GOSHI-09MAY01-C40658_1.pep
MTTVVPTSEEDPVLPVVRFTADLSWADAGPEVAEPLVTRLCMEAQECMVMGRWLDLASLMLTSAELVFPKVSDKDLECIFTVICNLASKLENPDDELEMAKLISTKISQQPNDKPAMRLKILFNLYNLLEGPDSRFFVYMQALNLALNGKVIDHIVPSFKKIDSFLKEWNIGVKDQRNLFLTIANVLKENKSSGKDSFKFLTKYLATFSGEDSYVIREAKEEAVRAVIEFVKAPDTFRCDLLDMPAVGQLEKDAKYALVYQLLKIFLTQRLDAYLEFQAANSTLMKSYGLVHEDCITKMRLMSLVDLGSYESGQIPYALIKDTLRINDDEVELWIVKAITAKLIDCKMDQMNQVVIVSRCTERIFGQHQWHSLRLKLATWRGNVASLISTIQANKAVEEGSQAMQGMAIR

SEQ ID NO: 81685 - protein, 118 aa, Gossypium hirsutum
  Clone ID: GOSHI-09MAY01-C40648_1.pep
QTLQGVSFYIGVHEFENVFLLISQSFLQFGICCLAIPIAHNSAGPKMDIVLDEDGQQTGFLAQNVEEYADAVLKIAKMPESERLKIATAARRRATRFSEQRFYNDLKAAIRPIICGSS

SEQ ID NO: 81686 - protein, 180 aa, Gossypium hirsutum
  Clone ID: GOSHI-09MAY01-C40108_1.pep
MSQNSPTSGSISIHHSQQQAAALAPLKKDSSSSSSVAGFFGKNGYKFWVLTAIILLAFWSMFTGSVSLKWSSGNLTSFSYDSDFSIREDLDVLELEEREKVVRKMGDVYTHSTGIRLPRFWLDAFEAAYENLSSDVNGVRDNAISEIAKLSMQSLNLVPPSVQSKISSSQGRKKTNKEAY

SEQ ID NO: 81687 - protein, 72 aa, Gossypium hirsutum
  Clone ID: LIB3147-027-Q1-K1-D5.pep
LLFGPTYGRNLRIWYLITEWFKAGDFINCWEQVSGLPVLLLTRVEKILVRTPYPMSRPKLLLVSVLVLNRPT

SEQ ID NO: 81688 - protein, 109 aa, Gossypium hirsutum
  Clone ID: uC-gsronu33B116f07b1.pep
STRSSAPRILRINKVVNYVVEKMVLDKPIDTGSTDGSLAPGHGGQLQHSAVADGSFKSGLKPWPKPRPSVEILCNNQVLSTDMSLATVRAYIWKKPEDLVLNYRVVQGR

SEQ ID NO: 81689 - protein, 245 aa, Gossypium hirsutum
  Clone ID: GOSHI-09MAY01-C41978_1.pep
DAWAAIKGHLSLAPIDMKPQPIILAYIDLNLETLAAARMLTSTGPGQTHWGDSGANNPAPATNSADAQLKQELAAIFKKIGDKQTCTIGLYELYRITQLYPKVDIFAQLQNASEAFRTYIRDGLAQMEKNAAAGRTPSSVPMSTPPPASLSSSSPEFGPLSPVQTNSLNDSKLSSTKPEPTSFNLPPSYTEDYRGAGNAINTARVRAPENALADQRNERLSWVTSGHWTHQRRIKLHYSCVEHGI

SEQ ID NO: 81690 - protein, 113 aa, Gossypium hirsutum
  unsure (1)..(113): unsure at all Xaa locations
  Clone ID: GOSHI-09MAY01-C41838_1.pep
ARRPVPVLGVLIDRKVFEPKPHAAEVDAVFDVPLEMXIKDENRIAQEREMLGEKYLLHFFDYETENKKYLIWGLTAGILIRAASVVYQRPPAFPEQSPKYEFLRDVGKITDAH

SEQ ID NO: 81691 - protein, 187 aa, Gossypium hirsutum
  unsure (1)..(187): unsure at all Xaa locations
  Clone ID: GOSHI-09MAY01-C41588_1.pep
MEYEDQINQAMDPKYECLLFDLDDTLYPLTSGISSEVTKNIQEYMIKKLGIKDNVPELCVSLYKHYGTTMAGLKAIGYNFEYDDFHSFVHGRLPYAMLKPDPVLKNLLLSIPIRKIIFTNAXKNHAARVLNRLGLEDCFXRIIWFENFNPINKKTLQLVMISNQTLPFVTSMDTAVLFLILSLSFQV

SEQ ID NO: 81692 - protein, 139 aa, Gossypium hirsutum
  Clone ID: GOSHI-09MAY01-C41548_1.pep
EENDELHKRIEVRKMIPKRNLDEMGSSSPVKSQEMKRSRFATIGSPLPNSSHVNGLHEQRATSLTERMRLYESAISGRLTTCYPAASAVPHGLTVGSLPRNGVAQMVGINGVGSSSMMTSIGAISRSSYSRAHGEIEVN

SEQ ID NO: 81693 - protein, 85 aa, Gossypium hirsutum
  Clone ID: GOSHI-09MAY01-C41508_2.pep
MDDDALNMRNWGGYEPSFKGHLGLQLMSSMVERDAKSFIPGRDPNLMITTNTTFHQRDPIVSQAHIPMNSLRDSWIADRDKFFNM

SEQ ID NO: 81694 - protein, 143 aa, Gossypium hirsutum
  Clone ID: GOSHI-09MAY01-C41508_1.pep
MDDDALNMRNWGYYEPSFKGHLGLQLMSSMVERDAKSFIPGRDPNLMITTNTTFHQRDPVVSEAHIPMNYVRDSWIADREKLFNMFPATTPNYAVLPETSAAHSLSILQPPPDSSTRDERVASSVEELPANKDSVEPKKRQGG

SEQ ID NO: 81695 - protein, 289 aa, Gossypium hirsutum
  Clone ID: GOSHI-09MAY01-C41448_1.pep
DWHFSCGTKEYKVLMDQFHHVSAAFLELEKGYQEAIEDITLKMGAGMAKYICKEVETVDDYDEYCHYVAGLVGLGLSKLFHAYGSEYLAPESLSNSMGLFLQKTNIIRDYLEDINEIPKSRMFWPRQIWSKYVKKLEDLKDEENSVKAVQCLNDMVTNALLHVDDCLKYMSALRDPAIFRFCAIPQIMAIGTLALCYNNIKVFRGVVKMRRGFPADVPFISASFPGLTAKVIDRTKSMTDVYGAFYDFSCILKAKVDKNDPNAQKTVSRLDSILKTCRDSGVLTKGYHT

SEQ ID NO: 81696 - protein, 78 aa, Gossypium hirsutum
  unsure (1)..(78): unsure at all Xaa locations
  Clone ID: LIB3493-019-P1-M1-H7.pep
VAKYHQTWRTLKRTRKTRVKGSXQCLNDIGHLNALLHVRXDALKYMSXLRDPAIFRFCAIPQIMAIGTLALCYNNIKV

SEQ ID NO: 81697 - protein, 80 aa, Gossypium hirsutum
  Clone ID: GOSHI-09MAY01-C41468_1.pep
FWGPQKKNFNLQAPGRKLGSPKTAPPVFFFFFFFFFFFFFFFFFFFFFFFFFFFFFFFFFFFFFSERKLKQIYGSLITVL

SEQ ID NO: 81698 - protein, 105 aa, Gossypium hirsutum
  Clone ID: GOSHI-09MAY01-C41798_1.pep
MASSRTSTPLLSLLLCLVLLCEVGMLMAQLSAAQAPGPQDACPNKCAKRCNLSWKPKMCNKTCIACCHRCPDHCVPDGPRACRDSCPCYSQIKTPNKVKVPLDFT

SEQ ID NO: 81699 - protein, 149 aa, Gossypium hirsutum
  Clone ID: GOSHI-09MAY01-C41748_1.pep
MTDPNLDLQESGWEELRREARKIEGDLDVKLSSYAKLGARFTQGDTGSPTVGSSRSWKSMEMEIQSLLEKLLDINDAMSRCAASAASTTSVTQKLARHRDILHEFTQEFRRIKGTINSMREHAELLSSVRDDINEYKASGSMSPRMQLL

SEQ ID NO: 81700 - protein, 102 aa, Gossypium hirsutum
  Clone ID: LIB3828-009-Q1-K6-B10.pep
MTDTNLDLQESGWEELRKEARKIEGDLDVKLSSYAKLGARFTQGDAGSPTLGSSRSWKSMVIEIQSLLEKLLDINDAMSRCAASAAPTTSVTQKLARHRDIL

SEQ ID NO: 81701 - protein, 52 aa, Gossypium hirsutum
  Clone ID: uC-gsflnu33B026g04b1.pep
MTDPNLDLDESFRKELRREARKIEGDLDLKVCPYAKLGARFTQGDTGSSSVA

SEQ ID NO: 81702 - protein, 426 aa, Gossypium hirsutum
  Clone ID: GOSHI-09MAY01-C41778_1.pep
CLRIIFTQDLKILFWEFCARRHEELFPRRLVAPQVNQLLQVAQKCQSTISEGGSEGVSQQDLQTNSNMVLTAGRQLVKSLESQSLNDLGFSKRYVRCLQIAEVVSSMKDLIDFCREHMAGARGGLKNYPRHASAAKLQMQKMQEMEQLANVQGLPTDRNTLNKPMALHPGINNPLGNNHHMGGRGTLSGSAQAALALTNYQNLLSRQNSMNSNPNSLHQEASSFNSSNQSPSSNFQGPAAILPGSMQRPPARASASPLLPTPQQQQQQQQQRQLSGNLMQKNHPQSPQGNQVLQQQMMQQLYHDMSNNNTAVQQQQQSLSGQNGNASVGRNGMGYGNNTAAPAVATSNVPGSVAGPAPSRSNSFKGASNSDSSAAGGNTGFNHRAPDLSQTLHLQDHIVSDIAQEFLDNGVFNNELDDNIGYGWKA

SEQ ID NO: 81703 - protein, 154 aa, Gossypium hirsutum
  Clone ID: GOSHI-09MAY01-C41718_1.pep
GRVGIYARKPMALQKNTITAQNRKDPSQNTGIAIHACRILPASDLVASNGSFETYLGRPWKLYSRVVFMLSYMNNHVHPKGWLEWNTTFALDTLYYGEYMNYGPGAAIGQRIRWPGYRVITSEIEASKFTVQQFIYGSSWLPSTGVAFLAGLQV

SEQ ID NO: 81704 - protein, 187 aa, Gossypium hirsutum
  unsure (1)..(187): unsure at all Xaa locations
  Clone ID: GOSHI-09MAY01-C41698_1.pep
MTGSLCVRRAVYYDPETGKEDPXSKSGVCSNSLCNSKPADKVQITGPSGKIMLLPEDNPNANHIMIATGTGVAPFRGYLRRMFMEDVNXKFKGLAWLLLGVANKDRLLYGDEFSNYLKDYPDQFRYDLALSREQKNKSGGKMYVQDKIEEYSDEISKLLDDGAHIFFCGLRGMMPGTQETLKRITNG

SEQ ID NO: 81705 - protein, 77 aa, Gossypium hirsutum
  Clone ID: GOSHI-09MAY01-C41688_1.pep
RRMGSKRLTGFIDSTFLSAYISSTGGNSFAGELSTRRVASKHHSLISIVTVSNVFEVNKVVNLFVFFFSFILFLLDS

SEQ ID NO: 81706 - protein, 100 aa, Gossypium hirsutum
  Clone ID: GOSHI-09MAY01-C41648_1.pep
TEGDVAEALRLFKVSTMDAARSGINQHINITPDMANEIKQAENQIKRRLGIGNRISERRLIDDLTRMGMNESIVRRAILIMHQRGEVEYQRERHIIVRKV

SEQ ID NO: 81707 - protein, 76 aa, Gossypium hirsutum
  Clone ID: uC-gsronu33B048d05b1.pep
LLYYFFFFYFYFFFFIFFFFSLETIHPLNPLKCKIKTSCRDVQHNITQLFVSPVIPDQDHHYNWNLELHLAIKLLP

SEQ ID NO: 81708 - protein, 296 aa, Gossypium hirsutum
  Clone ID: GOSHI-09MAY01-C41628_1.pep
FLYLTNDGISEEAAQAVSELIPSTEKLKVLQFHNNMTGDEGAIAISDIVKRSHALEDFRCSSTRVGTDGGVALAEALKTCTRLKKLDLRDNMFGVGAGVALSKALAPAPAPAEVYLSYLNLEDDGAEALANALKESAPSLEVLDMAGNDITAKGAASLAACIASKQFLSKLNLAENELKDEGAILIGKSLGPARPPSRPVDMSTNAIRRAGARLLAQVVVKIPGFKLLNINGNFISDEGIDEIKELFKSSPDMLGSLEDNDPEGEDYEDEDEDEENAEEGNELESKLKDLKIEQGE

SEQ ID NO: 81709 - protein, 126 aa, Gossypium hirsutum
  Clone ID: GOSHI-09MAY01-C41188_2.pep
MGQAFRKLFDTFFGNSEMRVVMLGLDAAGKTTILYKLHIGEVLSTVPTIGFNVEKVQYKNVMFTVWDVGGQEKLRPLWRHYFNNTDGLVIITALSLLLKKWNTFSPSNCSSDCFGNLSKLKDLFVK

SEQ ID NO: 81710 - protein, 165 aa, Gossypium hirsutum
  unsure (1)..(165): unsure at all Xaa locations
  Clone ID: AI729733.1.pep
MGQAFRKLFDTFFGNTQMRVVMLGLDAAGKTTILYKLHIGEVLSTVPTIGFNVEKVQYKNVMFTVWDVGGQKKLRPLWRHYFNNTDGLIYVVDSLDRERIRQAKQEFQAIINDPFMSNAIILVFANKQDLKGAMTPMEVSEGLGLXQIXNRKWHIQSTCALRGDG

SEQ ID NO: 81711 - protein, 337 aa, Gossypium hirsutum
  unsure (1)..(337): unsure at all Xaa locations
  Clone ID: GOSHI-09MAY01-C41168_1.pep
MQESSSQLSATSYQSVPTFPLHSTNEKAIPLLGSGTAEYPFGASIDTMKQTILEAIEVGYRHFXDPLALYQTEQPLGEAISDALRLGLIKSRDELFITSKLWCSDAHHDCVLPALKXTLKNLKLEYLDLYLIHWPVSVKPGEYELPVKKKDLVPIDLKSVWEAMEECQALGLTKSIGVSNFSCKKLETILSTAKIPPAVNQVEMNPMWQQKKLRKFCDEKGILIESYSPLGAKGTLWGTNRVMECELLXRLPIARGKSALASGLXEWAHEQGVLCALVKSFNKERMKQNLDILDWKLTADESHKISQLPQCKGFPGAAFLSDDGPYKSVEELWDGEI

SEQ ID NO: 81712 - protein, 131 aa, Gossypium hirsutum
  Clone ID: GOSHI-09MAY01-C41018_1.pep
PTRPPALQQLMIQQLLQEMSNNNTGVQQQSVNGQNENGSAGRNTSALATATSTVSGSVAGPALSQSNSFKATSNDNSLAAGGDNRFNRGQPDLPQNLHSQDDTVPDIANDFMDNGFFNNDLDYNIGYGWKA

SEQ ID NO: 81713 - protein, 116 aa, Gossypium hirsutum
  Clone ID: GOSHI-09MAY01-C41028_1.pep
MCFGMEQEVGEAVIQLGNSDGSNSSSSDPVTRVRKLLFRRMLVGIKDGRFFLGTFHCLDKQGNIILQDTIEYRSTRRSSPSPMEQRCLGLVLIPSSCQNSCHVDCSVEEQLSLLKV

SEQ ID NO: 81714 - protein, 131 aa, Gossypium hirsutum
  unsure (1)..(131): unsure at all Xaa locations
  Clone ID: GOSHI-09MAY01-C41398_2.pep
MQALQPSASLRPSSLKPLKNPKPNPHFPNVSTLPPRPAKKFSSITASSPTVSAPKREKDPKKRVVITGMGLVSVFGNDVDAYYEKLLAGESGIGIIDRFDASKFPTRFAGQIRGFTSXSYIDGKNDRRLDD

SEQ ID NO: 81715 - protein, 477 aa, Gossypium hirsutum
  unsure (1)..(477): unsure at all Xaa locations
  Clone ID: GOSHI-09MAY01-C41398_1.pep
MEALQASSLRASPLKPLQKPKLNIHFPNASRLVPRPTKKFSSITASSPTVSAPKREKDPKKRVVITGMGLVSVFGNDVDAYYDKLLAGESGIGLIDRFDASKFPTRFAGQIRGFSSQGYIDGKNDRRLDDCLRYCIVAGKKALEDADLGGDKLSKIDKERAGVLVGTGMGXALTGGFSDGVQXILIEKGYRKITPFFIPYSITNMSSALLAIELGFMGPNYSISTACATSNYXCFYAAANHIRRGEAELMIAGGTEAAIIPIGLGGFVACRALSQRNDDPRTASRPWDKDRDGFVMGEGAGVLVMESLEHAMKRGAPIIAEYLGGALDWLAHLMTDPRADGFGVSSCIERSLEDAGVSPEEVNYINAHATSTLAGDLAEINAIKKVFKNTSDIKINATKSMIGHCLGASGGLEAIATVKAITTGWLHPSINQFNPEPSVEFDTVANQKKQHEVNVAISNSFGFGGHNSVVAFSAFKP

SEQ ID NO: 81716 - protein, 168 aa, Gossypium hirsutum
  Clone ID: GOSHI-09MAY01-C41378_1.pep
NKKTKPYEESRGTEIGEFTLSDLESCEVRLIGCCNAVFVNRLKNCKVYMGPVIGSILIEEVEGCVFVLASHQIRIHLAKSCDFYLRVRSRPIIEDSNVVRFAPYCLDYEGIEMDLEKAGLSEETGNWGNVDDFKWLRAVQSPNWCVLPENERVGKVRTEDIGSKSEGS

SEQ ID NO: 81717 - protein, 73 aa, Gossypium hirsutum
  Clone ID: LIB3147-040-Q1-K1-A1.pep
VLKFIYKSHARISKKTHQEIVSKVILFCFSSFFFKSDPQYKLKIGKKKGDLPRLMFAPSRGPYFPGRRRLLGG

SEQ ID NO: 81718 - protein, 88 aa, Gossypium hirsutum
  Clone ID: LIB3149-029-Q1-K1-B10.pep
PSSLCLTVGLLALYHCPYLHLLHPHMSRSMFSHMFHASRSPQLQHHASCLRHREGLTSPVAGDFWVVEGLRISLSAKSRGGGKCEDFK

SEQ ID NO: 81719 - protein, 78 aa, Gossypium hirsutum
  Clone ID: GOSHI-09MAY01-C41248_1.pep
MSEEKGRPLPKFGEWDVNDPASAEGFTVIFNKARDEKKTGGKPESPAKSDSNVKPGADPGKTQPKKWFCCVQAPPAES

SEQ ID NO: 81720 - protein, 298 aa, Gossypium hirsutum
  Clone ID: GOSHI-09MAY01-C41268_1.pep
QYSTTPFVDEMYDRLKETLSDYEVIICRWPEYIFVLENAISDIEKAIVEALDKQYADVVTPLKENMAPKKFGLKYVQKLAKRSVCAYTVPDELGILLNSMKRMLDVLRPKIETQFKSWGSCIPDGGNTAPGERLSEVTVMLRTKFRGYLQAAVEKLAENTKLQNATKLKKILQDSKETVGESDIRCRMGPLKEQVTSSAYHLHTVFETHVFIAICRWYWDRMGQDVLSFLENRRENRSWDKGSRIAGSILDDTFASQMQQLVGNALPEKDLEPPRSIMEVRSMLCKDAHNSKDNSFFY

SEQ ID NO: 81721 - protein, 90 aa, Gossypium hirsutum
  Clone ID: LIB3829-019-Q6-K6-B5.pep
MKFALMHWLCHFLISPLKSSKFFHVQFFCFLTLYPVVDTQILDDTFASQMQQLVGNALPEKDLEPPRSIMEVRSMLCKDAHNSNDNSFFY

SEQ ID NO: 81722 - protein, 54 aa, Gossypium hirsutum
  Clone ID: GOSHI-09MAY01-C41228_1.pep
ENRLDPRRPRTLGRTRGYNLIYPWIYLRRCLPSSCESRLKFGFIMFSWFIGEAF

SEQ ID NO: 81723 - protein, 75 aa, Gossypium hirsutum
  Clone ID: GOSHI-09MAY01-C42958_1.pep
WLRFPFFLSATESAKAETRARRLVLYERSVMKNQGTIRVCDFVFTVYHCSCVINHGNACSVYSFVILFAKVLYIC

SEQ ID NO: 81724 - protein, 100 aa, Gossypium hirsutum
  Clone ID: GOSHI-09MAY01-C42908_1.pep
EREGISVGIGFLSHIRILDGPRQQRRALNFEDATLCRPTESGQQDRKSGFIRVEVVTASLSFLTNFQDVYKLWAFVAKFLNPSFIREGTLPTVAEEESET

SEQ ID NO: 81725 - protein, 109 aa, Gossypium hirsutum
  Clone ID: GOSHI-09MAY01-C42938_1.pep
RLKNIGSPPESERKRAELDALARRLQGITKSVSRYPTFRRHFEEFVNKLSEDLSKDSGSSNSSRSSNRSHQSKNTVLRFFSSRSFKRSSSQNMSDQESQSVLARDAEIE

SEQ ID NO: 81726 - protein, 127 aa, Gossypium hirsutum
  Clone ID: GOSHI-09MAY01-C42928_1.pep
MSNKPRESVVIRSVWSENLDSEFEIIRSIIDVFPIISMDTEFPGVVVRSEGAGGGHRSRRIDATENYQSLKANVDILKLIQIGLTLSDADGNLPNLGTENRFIWVFNFKDFDVGNDVHAPCFRSAFF

SEQ ID NO: 81727 - protein, 72 aa, Gossypium hirsutum
  Clone ID: GOSHI-09MAY01-C42508_1.pep
IFSSIAPWYFIFSCPCLSGLSSLSSVASFLLSSSSASSAFLDNQFSRSVFLRLSIVTLVSSCATPLPDLEIF

SEQ ID NO: 81728 - protein, 280 aa, Gossypium hirsutum
  Clone ID: GOSHI-09MAY01-C42418_1.pep
MGSNQAAVSFLTNLARAAFGLGAGATVLNASMYTVDGGQRAVIFDRLRGVLDKTADEGTHFLIPWLQKPFIYDIRMKPHTFSSVSGTKDLQMVNLTLRVLSKPKVEKLPEIYQHLGLEYDEKVLPSIGNEVLKAVVAQFNADQLLTERPQVSALVRNSLTQRARDFNIELADVAITHLSYGSEFSRAVEQKQVAQQEAERSKYVVAKADQERRAAIIRAEGESEAAKLISEATATAGMGLIELRRIEASREIAATLARSPNVAYLPGGQNMLLAMNPSRP

SEQ ID NO: 81729 - protein, 74 aa, Gossypium hirsutum
  Clone ID: GOSHI-09MAY01-C42748_1.pep
IIVLLFSTIAVMTSLVALSFYGASQLKFHWVERYDKVLVGSVLCLVGILTLIFHHHDGDEGLHGQHLRRKVIGL

SEQ ID NO: 81730 - protein, 148 aa, Gossypium hirsutum
  unsure (1)..(148): unsure at all Xaa locations
  Clone ID: GOSHI-09MAY01-C42778_1.pep
PRVRADWLVEKCTELGASSVTPVLSPRSSTISDNRVERLQRGILAAAKQCQRLHEMKLNHPMKIDNLIPLGAKSKQSFIAIAEGTPLGSALTATXKEPRGLIIVGPEGDVTEKEGDLITEAGATAVGLGPHRLRVETATIAILATLTL

SEQ ID NO: 81731 - protein, 311 aa, Gossypium hirsutum
  unsure (1)..(311): unsure at all Xaa locations
  Clone ID: GOSHI-09MAY01-C42738_1.pep
PFMIDLYPYYAYRDSPXKVSLDYAMFESSSEVIDPNTGLLYTNMFDAQIDALYFALMALNFKTIKVMVTETGWPSKGSPKEKGATPDNAQTYNTNLIRHVLNDTGTPAKPGEELDVYIFSLFNENRKPGLESERNWGLFYPDKTSIYNLDFTGKGVLDMTNSTDGSKNGTTWCIASSKASEADLQNAIDWACGPGNVDCSAIQPSQPCFEPDNLASHASFAFNSYYQQNGPSDVACSFGGKGVKVDKDPSYDNCIYLTAGGINKTASSNMTATANTSSSAHTDVCSWICVFLLTTLIAVILNTGNVFHVAC

SEQ ID NO: 81732 - protein, 158 aa, Gossypium hirsutum
  Clone ID: GOSHI-09MAY01-C42058_1.pep
MSRRPVNPSRRYGDAGGGAALFSLSKSRSPPLLSIVLIVLGALLIVAYFHSGSGSGGIRSLVSRVEGDFSCTFEVLRALPILKKAYGGGIHKVLHIGPDSCSVVSNLLKEEETEAWGVEPYDIEDADANCKRLVRNGIMRVADIKFPLPYRPKSFPLV

SEQ ID NO: 81733 - protein, 345 aa, Gossypium hirsutum
  Clone ID: GOSHI-09MAY01-C42348_1.pep
YTEAKTYASRTILFLRGDGTLKSVAIELSLPKMEEDKIGCVNKVYTPAEHGVEGWIWMLAKAFVNVNDSGHHQLVSHWLNTHAVIEPFVIATNRQLSVVHPIYKLLHPHFRDTMPINALARELLINANGIIERTFCPGKYSLEMSSVIYKSWNFMDQALPNDLKKRGIADGDIKSLDDLDRLLIKDYPYAVDGLKIWFAIENWVRDYCSFYYKTDEMVQRDPELQAWWKELREVGHGDKKDEPWWPKMQNLEDLIQSCTIIIWIASALHAAVNYGQYAYGGYFPNRPTLSRRFMPEKGTPEYAELEKNPEKVFFRIMSSQLQSLIVITVVETLSNHASDEVYLGQ

SEQ ID NO: 81734 - protein, 84 aa, Gossypium hirsutum
  Clone ID: GOSHI-09MAY01-C42328_1.pep
SSRVRIDSSIMKRVNDILQRAKLPTAPPETMTVEMFKSVMAVDKKVADGLLRLILLKGPLGNCVFTGEYDRKALDDTLSAFCKS

SEQ ID NO: 81735 - protein, 87 aa, Gossypium hirsutum
  unsure (1)..(87): unsure at all Xaa locations
  Clone ID: LIB3147-055-Q1-K1-G1.pep
SXKTXSQXKIWXLRLCKMQXKWYSSRRPFYHXLAQVKTQFXPERTLSEGXNASSSPSXPPFYIQHAMTDFLNXXRQWDGRAWXRTRE

SEQ ID NO: 81736 - protein, 68 aa, Gossypium hirsutum
  Clone ID: GOSHI-09MAY01-C43988_1.pep
SSLGEIDEKIERKPFLLRGMLSGSRPSTRSMDFFFIYQSLRDDDDLIINHRLMTSDQASFPPIICFQF

SEQ ID NO: 81737 - protein, 132 aa, Gossypium hirsutum
  Clone ID: GOSHI-09MAY01-C43958_1.pep
LFELVKLMRESIVTMDDEYLNAIQGEKGFKIIGEYINQLETMFSIEKPDVFSSTSWVNIKYYELDFGWGNPQWVAPFGEAGSEFNNNVVFIETKCGKGIEAWITLDEKRVRVLEKDAEFLKFATPNPEISSL

SEQ ID NO: 81738 - protein, 103 aa, Gossypium hirsutum
  Clone ID: GOSHI-09MAY01-C43968_1.pep
PTVRQSGTSFPSNLLFFINIYTYICINNKNKEQEEEERLEKEQNHKERKKKTFVVLLFFFLYNLCMCFCIESPIYRFSKMALYSQDKTNKHYNEICIFICCWF

SEQ ID NO: 81739 - protein, 129 aa, Gossypium hirsutum
  Clone ID: GOSHI-09MAY01-C43848_2.pep
MAYVERGVVKSKRSIWRLRTIIDFFWAIINFIGVFFSTMFSMEKSDAYRKSSGSSKKWYGGPGGPGSGPYGGGGGPRRPSRGLDNVRGIDHSKCCALLLLCLGTSNYQCFFITRPCSPSLFSPSICQLK

SEQ ID NO: 81740 - protein, 103 aa, Gossypium hirsutum
  Clone ID: GOSHI-09MAY01-C43848_1.pep
MAYVEGGVLKSKRSIWRLRTITDFFWAIINFIGVFFSTMFSMEKSDAYRKGFGSSKKWDGGPGGPGSGPYGGGGGPRRPPRGMDNVRGIDHSSLPACGSCCGG

SEQ ID NO: 81741 - protein, 96 aa, Gossypium hirsutum
  Clone ID: uC-gsronu33B098c02b1.pep
VVKSKRSIWRLRAIIDFFWAIINFIGVFFSTMFSMEKSDAYRKSSGSSKKWDGGPGGPGSGPYGGGGSPRRPSRGLDNVRGIDHSSLPACGSCCGG

SEQ ID NO: 81742 - protein, 87 aa, Gossypium hirsutum
  Clone ID: uC-gsflnu33B022d07b1.pep
MAYVEGGVLKSKRSIWRLRTITDFFWAIINFIGVFFSTMFSMEKSDAYRKGFGSSKKWDDGPGGPGSGPYGGGALFIFIHLFYIYLF

SEQ ID NO: 81743 - protein, 102 aa, Gossypium hirsutum
  Clone ID: GOSHI-09MAY01-C43868_5.pep
GGKAYIYHPFKFRSFDWLQPKYNPGVSKGKIQNKIIILSKGNFRNFKPLRVYPLNIALLWGKAFNPPWVSKTKPVFSFSPAKAGNSWLGFLFIGFLAFKKGF

SEQ ID NO: 81744 - protein, 136 aa, Gossypium hirsutum
  Clone ID: GOSHI-09MAY01-C43868_4.pep
KNWTVKVCDFGLSRFKAGTFISSKSVAGTPEWMAPEFLRGEPSNEKSDVYSFGVILWELVTMQQPWSGLSPAQVVGAVAFQNRRLAVPPNTSPKLASLMESCWADDPAERPSFANIVEALKKFLKSPLQLVQMGTQ

SEQ ID NO: 81745 - protein, 314 aa, Gossypium hirsutum
  Clone ID: GOSHI-09MAY01-C43868_3.pep
VGEPGNLHGPDSSINGGFLSSMPSPFQISHLKEFQQPYMDNSSYCQIIDSKSSSSHYRNPLHSGGVEKSQQLKDNGLLGNQKPSIHAATDRDSFGKGMPLETAAGSTMNSRHCRDKVAKEQTLKPGRPASGSPVVKSEKQLKVNLPSQSDLEEIGAELDNQGRFSTVSIPRYLHLEPSLAMDWLEISWDELRIKERVGAGSFGTVHRAEWHGSDVAVKVLTVQDFHDDQLKEFLREVAIMKRVRHPNVVLFMGAVTKRPHLSIVTEYLPRGSLYRLIHRPSAGETLDQRRRLRMALDVAQGINYLHCPNPPIVH

SEQ ID NO: 81746 - protein, 235 aa, Gossypium hirsutum
  Clone ID: GOSHI-09MAY01-C43868_2.pep
PRVRPRVRPRPRVRFLREVAIMKRVRHPNVVLFMGAVTKRPHLSIVTEYLPRGSLYRLIHRPTAGETLDQRRRLRMALDVAKGINYLHCLRPPIVHWDLKSPNLLVDKNWTVKVCDFGLSRFKGGTFISSKSVAGTPEWMAPEFLRGEPSNEKSDVYSFGVILWELITMQQPWNGLSPAQVVGAVAFQNRKLAIPPNTSPKLVSLMESCWADDPAQRPSFGNIVITLKKLLKSPL

SEQ ID NO: 81747 - protein, 76 aa, Gossypium hirsutum
  Clone ID: GOSHI-09MAY01-C43868_1.pep
IYGGESIYLLGPTRFHEGNQMGKVLPPMASFLFWKATAPTTYNLQHHKKRGDGIMKYSIEILQQLVNYVDIYDRLW

SEQ ID NO: 81748 - protein, 59 aa, Gossypium hirsutum
  unsure (1)..(59): unsure at all Xaa locations
  Clone ID: LIB3825-003-Q1-N6-H1.pep
SPAQVVGSVAFQNRKLAIPPNTSPKLVSLMESCWADDPAQRPSFGXIVIALKKLLKSPL

SEQ ID NO: 81749 - protein, 98 aa, Gossypium hirsutum
  Clone ID: GOSHI-09MAY01-C43828_1.pep
MTGVTNQEEDKKPADQTAHINLKVKGQDGNEVFFRIKRSTQLKKLMNAYCDRQSVEFNSIAFLFDGRRLRGEQTPDELEMEDGDEIDAMLHQTGGTMA

SEQ ID NO: 81750 - protein, 105 aa, Gossypium hirsutum
  Clone ID: GOSHI-09MAY01-C43488_1.pep
PALARLKAYEGVPSPYDKVKRMVIPDALKVLRLLKGHKYCLLGRLSSEVGWNHYDTIRELEKKRKERAQVTYERKKELNKLTVKAEKASEAKLGSQLDILAPVKY

SEQ ID NO: 81751 - protein, 196 aa, Gossypium hirsutum
  Clone ID: GOSHI-09MAY01-C43748_1.pep
LEIFPYSVFYMFFEQYLDIWKTALINLAIAIGAVFIVCLVITCSLWTSAIILLVLAMILVGVVGVMAILGIQLNAVSVVNLVMSVGIVVEFCVHITHAFSVSSGNRNERVKEALGTMGASVFSGITLTKLVGVLVLCFSKTEVFVVYYFQMYLALVLLGFLHRLVFLPVVLSMGRPLSRGIQVEKQEERPSVSSQP

SEQ ID NO: 81752 - protein, 180 aa, Gossypium hirsutum
  Clone ID: GOSHI-09MAY01-C43628_1.pep
PRPQPVRILVKRDELTLEGIKQFYVNVEKEEWKLETLCDLYETLAITQSVIFVNTRRKVDWLTDKMRSRDHTVSATHGDMDQNARDIIMREFRSGSSRVLITTDLLARGIDVQQVSLVINYDLPTQPENYLHRIGRSGRFGRKGVAINFVTTDDERMLYDIQRFYNVVIEELPSNVADLI

SEQ ID NO: 81753 - protein, 164 aa, Gossypium hirsutum
  unsure (1)..(164): unsure at all Xaa locations
  Clone ID: LIB3585-017-P1-K1-B6.pep
PRVRPRVRPRVRPRVREEWKLETLCDLYETLAITQSVIFVNTRRKVDWLTDKMRSRDHTVSATHGDMDQNARDIIMREFRSGSSRVLITTDLLARGIDVQQVSLVINYDLPTQPENYLHRIGLSGRFGRKGVAINFVTTDDERMLYXIQRFNXCVIEELPSNVA

SEQ ID NO: 81754 - protein, 135 aa, Gossypium hirsutum
  Clone ID: LIB3148-015-Q1-K1-A7.pep
FCFGAQWPLMYAIISEIFGLKYYSTLYNFGSVASPVGSYILNVKVAGHLYDQEALKQLKALGRTRNHGEDLTCNGGQCYRKAFLIIIATTLFGFLVSGILVIRTRSFYKSDIYKKFREEAQVAETDMGSSSTSKQ

SEQ ID NO: 81755 - protein, 39 aa, Gossypium hirsutum
  Clone ID: GOSHI-09MAY01-C43108_1.pep
LVELDVKWWMLHTTMQSLVPVYLTDKTVSWLLHFQIPFM

SEQ ID NO: 81756 - protein, 69 aa, Gossypium hirsutum
  Clone ID: GOSHI-09MAY01-C43068_1.pep
AFGCGHHSCVWLCERPRNLPGVSMSNADQNKALLLILLFFLKKKYTFPMILLLICYFCDRFEEVNMWCL

SEQ ID NO: 81757 - protein, 93 aa, Gossypium hirsutum
  Clone ID: GOSHI-09MAY01-C43308_3.pep
YCLDPRVRFRKRGKRKKAVETLTAMASTYVLRFMHQHMVHTLLYMHSSPSSMAFHTSVHFSSTPNFINLRSPILPRRERHCSLCLFNDHMCIT

SEQ ID NO: 81758 - protein, 62 aa, Gossypium hirsutum
  Clone ID: GOSHI-09MAY01-C43308_2.pep
MSNTCGNCDCSDKSQCVKKGSSNTMVIETEKSYISTVVAEVPTENDCKCGDNCSCTNCTCGR

SEQ ID NO: 81759 - protein, 128 aa, Gossypium hirsutum
  Clone ID: GOSHI-09MAY01-C43308_1.pep
LASCVRRPKFILCSGGNPSAYIPTYTAQNSPSSALFSGNIWRNLSSWMPQRGTTAQPAQDDPRFPGRGRTLGSVQNTAVNSDSNLQARLLDNSRPTSPSDIAAAGAGERLSNERQLQVSDAHVVVKQT

SEQ ID NO: 81760 - protein, 112 aa, Gossypium hirsutum
  unsure (1)..(112): unsure at all Xaa locations
  Clone ID: AW186874.2.pep
GRTLGSVQNTAVNSDSNLQXRLLDNSRPTSPSDIAAGGAGERLSNERRLQVNDAVAVGAGGYPLPQMPQVASEEQIQKLLSMGFERTQVEVAIAAADGDLNVAVEILMSQQG

SEQ ID NO: 81761 - protein, 93 aa, Gossypium hirsutum
  Clone ID: GOSHI-09MAY01-C43278_1.pep
QKASIAGTAIMSNSYVSTGASWLSNAFTAVARAAEDVGMLTKEKVGKAEEEKKGSVYKERARIIEDFAELHLDESTKAEPSVGLVDSTTDKQA

SEQ ID NO: 81762 - protein, 45 aa, Gossypium hirsutum
  Clone ID: GOSHI-09MAY01-C43208_1.pep
FSPCYQFSLSFLGKHTLLQDLSFNIELVRTYQGVLDFGHVNLDII

SEQ ID NO: 81763 - protein, 145 aa, Gossypium hirsutum
  Clone ID: LIB3582-007-P1-K1-A4.pep
MANLNASTSLVPSESSEQRGSVVVDSNVNVLPPPMNQQKQTSSDGSVAILWDIENCPVPSDVRPEDVAGNIRMALRVHPVIKGAVMMFSAYGDFNAFPRRLREGCQRTGVKLIDVPNGRKDAADKAILVDMFLFALDNPPPSSIM

SEQ ID NO: 81764 - protein, 124 aa, Gossypium hirsutum
  Clone ID: LIB3825-015-Q1-K6-D5.pep
MANLNASTSLVPSESSEQRGTVVVDSNVNVLPPPMNQQKRTSSDGSVAILWDIENCPVPSDVRPEDVAGNIRMALRVHPVIKGAVMMFSAYGDFNAFPRRLREGCQRTGVKLIDVPNGRKDAAD

SEQ ID NO: 81765 - protein, 187 aa, Gossypium hirsutum
  Clone ID: GOSHI-09MAY01-C78068_1.pep
HASEFIVPHRDPSLLPRQWRIALGTQKSYKQDAAKKEKRRLYESERRKRKATNSTNWQHASDKEDCQYTGVENCSGDDDMDNAEESYVHEGFLADWRPGISKLFSPEHPCSIIGDKNPPNDMLTEEGANVREQSNSYMSAVTRPLSGHNLGSAHVLNHSQPPYTFSHCASNALQPKHSVPNMIFNTS

SEQ ID NO: 81766 - protein, 188 aa, Gossypium hirsutum
  Clone ID: GOSHI-09MAY01-C79978_1.pep
MANQFYGYSSPSPSASTLHRYLDSDAASQSQSHLLQQLHPSAAAAAAAAASLIKRPSQVLYHQNVLDAQNTLGQIEAWYSASSLVKRPRLESASNLPIYPQRPGEKDCAHYMLTRTCKFGDSCKFDHPIWVPEGGIPYWKEVPPVPAGESLPERPGEPDCPYFLKTQRCKFGSKCKFNHPKDKLDAPG

SEQ ID NO: 81767 - protein, 216 aa, Gossypium hirsutum
  unsure (1)..(216): unsure at all Xaa locations
  Clone ID: GOSHI-09MAY01-C79828_1.pep
MSTPLSSRSFRVESTLNPKSSLGSQKESRQQDPYGIFDMEESIPRDIGPYKNLVIFASNSMDPKCISSSIPLLKKLRVLMSNLQKVDLRSLTYQQKLAFWINMYNACIMHGXLQYGVPNTPEKFLTLMNKATLNVXGGXHYSAQAMEHYILRKPASSNMKEAYQKDDKDDQEAIVRKLYGLQLMDPNVTFALSCGTRSSPAVRIYTADGVATELEK

SEQ ID NO: 81768 - protein, 76 aa, Gossypium hirsutum
  Clone ID: GOSHI-09MAY01-C79548_1.pep
RKLDRTVWNLSTFHAYVNYHVKCSEGFMHSRMRRRVESLIQALNCAKPDQEKTKKTPQTRSFKRLNLKDSRTNSSS

SEQ ID NO: 81769 - protein, 353 aa, Gossypium hirsutum
  unsure (1)..(353): unsure at all Xaa locations
  Clone ID: GOSHI-09MAY01-C79518_1.pep
KYRPFGVYKDARSVLVIHNLAHQGVEPAATFKNLGLPSNWYGALEWVFPTWARTHALDTGEAVNILKGAIVTSDRILTVSKGYAWEITTVPAADGLNQLLSSRRSVLTGITNGIHIAEWDPSSDEHIAFHYSAASLSGKVQCKTALQQELGFPIKPGCPLMGFIGRLDYQEGXLTLIHWAIPELMEDDLQFVMLGSGDPLYEDWMRSAENTYRDKFRGWVGFSVPISHRITAGCDILLMPSRFEPCGLNQLYAMRYGTVPVVHATGGLRDTVENFNPYAGEGRGEGTGWTFSPLTKDCMLNALKTAIRTYRDHKSTWEGLTRRCMQKDFTWENAAIQYEQVFEWASIDPPYIM

SEQ ID NO: 81770 - protein, 261 aa, Gossypium hirsutum
  unsure (1)..(261): unsure at all Xaa locations
  Clone ID: GOSHI-09MAY01-C79498_1.pep
RGGGDLTATAIGKHWGYEEMQVWKDVDGVLTCDPNIYQHAXPVQYLTFEEAAELAYFGAQVLHPQSMRPAREGDIPVRVKNSYNPNAPGTLITRNRDMSKAVLTSVVLKRNVTMLDIVSTRMLGQFGFLAKVFSIFEDLGISVDVVATSEVSISLTLDPSKLWSRELIQQASELDHVVEELEKIAVVNLLQHXIISLIGNVQRSSLILEKAFHVLRTNGVNVQMISQGASKVNISLIVHDNEAEQCVRALHSTFFESDPPE

SEQ ID NO: 81771 - protein, 92 aa, Gossypium hirsutum
  Clone ID: LIB3829-035-Q1-N6-D1.pep
QSANLYINKPFYIPPLNICFAKSSASTYHPEQKPEGRISPSVKQPKIKMNMIHTSIYKEGSTVFYVKNHRDKAREVWIFRRGCNIGPFLFFR

SEQ ID NO: 81772 - protein, 79 aa, Gossypium hirsutum
  Clone ID: LIB3585-058-P1-K1-A10.pep
TSPFTFPSPPALFNICFSKSSASTYHPEQKPEGRISPSVKQPKIKTNMIHTRIYKEGSTVFYVKNHRDKAREVWIFRRG

SEQ ID NO: 81773 - protein, 200 aa, Gossypium hirsutum
  unsure (1)..(200): unsure at all Xaa locations
  Clone ID: AI730491.1.pep
PGDCIIDGGNEWYENTERRIQEVSNKGLLYLGMGVSGGEEGARNGPSLMPGGSHQAYSNIQDILEKVAAQVEDGPCVTYIGEGGSGNFVKMVHNGIEYGDMQLISEAYDVLKHVGGLSNDELXEIFAEWNRGELESFLIEITSDIFRVKDDLSDGFLVDKXLNXTGMXGYGKWTVQQAAELSVAXPTIAASLDCRYXSXF

SEQ ID NO: 81774 - protein, 65 aa, Gossypium hirsutum
  unsure (1)..(65): unsure at all Xaa locations
  Clone ID: LIB3584-021-P1-K1-E11.pep
HRAIFRVKDDLXEGFLVDKILDKTGMKGTGKWTVHQAAELSVAAPTIAAPLDCRYLSGLKEEWEN

SEQ ID NO: 81775 - protein, 126 aa, Gossypium hirsutum
  Clone ID: GOSHI-09MAY01-C79028_1.pep
MAMTIEVLAGLAFMFSASILLQILACALYNNWWPMLSALMYVLVPMPCLFFGGGSTQFLTSRDGGGWIDAAKFLTGASAIGSFAIPIILRHAHMISTGAMFIEFTSFIIFVCTVLCFHRASLEDDW

SEQ ID NO: 81776 - protein, 103 aa, Gossypium hirsutum
  Clone ID: GOSHI-09MAY01-C79348_1.pep
MALTLWFNKKIADPLIQILRKGAEPKQLAFSSALGITLGIFPICRVTGLLCGMAIALLGSHCHPPTVMLGNFLATPIELSLVVPFLRFGEALSGGPHFPLTSD

SEQ ID NO: 81777 - protein, 236 aa, Gossypium hirsutum
  unsure (1)..(236): unsure at all Xaa locations
  Clone ID: GOSHI-09MAY01-C79228_1.pep
PRVRDGQKQKVQDIHAQKLKSLEAQILDLKKKQENQVQLLKQKQKSDEAAKRLQDEIQSIKAQKVQLQHRIKQEAEQFRQWKASREKELLQLRREGRRNEYQRHKLLALNQRQKXVALRKTEEAAMATKRLKELLEARKSAARDNSAIANGNGTNGQTNEKALQRWLDHELEVMVNVHEVRFEYEKQSQVRAALAEELAVLKQVDELDSKGPSPSRGKNGCAKGSSLSPNARVARI

SEQ ID NO: 81778 - protein, 187 aa, Gossypium hirsutum
  unsure (1)..(187): unsure at all Xaa locations
  Clone ID: GOSHI-09MAY01-C74978_1.pep
MTGWGLVFLGWCVWFFFFSRRDSFITHRVLXHAXTEESSRAAIMGANTFQPGSSHTNLQVPQFNPHDIQAFSLKQEQHQRFTPLKPDIPPWLATQPMLGAGAGLSSSSSSIFSPSLTLHENPTPIPTLDPTLPPYHPTTVLSPHMSATALLQKAAQMGATLSNKPGSSSAPATTTAMRPHLQTQRVC

SEQ ID NO: 81779 - protein, 175 aa, Gossypium hirsutum
  Clone ID: GOSHI-09MAY01-C74458_1.pep
MHTGKVHVALVASPGMGHLIPVLELGKRLVSHHGISATIFVVTMDASLSRSQLLKVSGITDDFLDVVLLPAVDISARVDKTTGILRQMAMMVHEALPSLRSAILAMEVQPIALIVDMFATEAFVVAEEFMMFKYVFVTTNAWFLALTVHGPNLDREVDQDDHINNQKPIHIPGCE

SEQ ID NO: 81780 - protein, 162 aa, Gossypium hirsutum
  Clone ID: GOSHI-09MAY01-C74408_1.pep
FSVPKTRTLVIALQQRPSPSAVRITGPEQGSGNFCGYSSAVRGPSFRQPGSVRTYTKLTNHNRLIANRSKGNFLVLLLLFFLFGYKKPMKSNVNGIFSQKTHYTLNTKKQSKIKVISDLFLHVSICFFFVPAHKSFTQNIRRKRTYLFFFFGRTPSSPCLLR

SEQ ID NO: 81781 - protein, 151 aa, Gossypium hirsutum
  Clone ID: GOSHI-09MAY01-C74018_1.pep
HASVGAVNGMHLNGKVDETCMQSREIWTGVTYAVAANMILAGMEKEAFATAEGIFIAGWSEEGFGYWFQTPEAWTMDGHFRSLIYMRPLAIWGMQWALSIPKAILDAPKVNMMDKILISPATFSLSLTETGVRKIANKAKCFGNSVLHCAC

SEQ ID NO: 81782 - protein, 71 aa, Gossypium hirsutum
  Clone ID: LIB3825-028-Q6-K6-D10.pep
ISDPITKETKRAVPRLCNVPSTHATPLSIYCSHNATYRHVSQLLYQFTRRRFMSLGYSNDDNLDSKLKNLV

SEQ ID NO: 81783 - protein, 90 aa, Gossypium hirsutum
  Clone ID: LIB3583-037-P1-K1-B1.pep
MGDSSASCINLVQHLIEECLIFNMSKEECMEALSKHANIKPVITSTVWDELEKENKEFFEAYLKGRDQRATEIEKRQRIQKKLNTFSSTQ

SEQ ID NO: 81784 - protein, 165 aa, Gossypium hirsutum
  unsure (1)..(165): unsure at all Xaa locations
  Clone ID: GOSHI-09MAY01-C74338_1.pep
MASSSASFIIIIITTVLLPSLSSQLSDLFPSNNPPPFLGKHSHPIKQPNHHQQYRYETRYFSQPVDHFSFLDLPRFXQRYLINTEHWVGPSRSGPIFLYCGNEGDIEWFAVNTGFVWDIAPRFGAMILFPEHRYYGDSMPFGSKEEAYRNATTLSYLTAEQALAD

SEQ ID NO: 81785 - protein, 55 aa, Gossypium hirsutum
  Clone ID: GOSHI-09MAY01-C75878_1.pep
GLLKSNAHNSEEVTLYYAPLIIHWRRLELKKKENQQTHLRFHSVLQVPLNKTGAK

SEQ ID NO: 81786 - protein, 231 aa, Gossypium hirsutum
  Clone ID: GOSHI-09MAY01-C75588_1.pep
NKITKRIRFLGVYFSSYNLRIDFYRSVFLVQPGSAPKHAPKKVKSTVKLDKLDDMSKEWVDSDFLIFNSGHWWTPTKLFDMGCYFQAGRSLKLGMGIASAFRTALETWVSWVESSVNRNRTRVFFRTFESSHWIGRNRNSCKVTRRPWLKTKGRDHSRISDIIIDVVKKMTTPVTVLHVTPMGAFRSDAHVGTWSDKQSVADCSHWCLPGVPDTWNEILLSMMLSKDGVTV

SEQ ID NO: 81787 - protein, 166 aa, Gossypium hirsutum
  Clone ID: GOSHI-09MAY01-C75768_1.pep
INLPFISFSTHFQFLSIKILIQLKFKRYLDFGLLFSFGLKMAILKSYGACLRESSFQFPRSHRIDNYKRRNVKWRSPQAAIIPDFHLPMRSFEVKNRTSAEDIKALRLITAIKTPYLPDGRFDLEAYDGLVNMQIENGAEGVIVGGTTGEGQLMSWDEHIMLIGHT

SEQ ID NO: 81788 - protein, 206 aa, Gossypium hirsutum
  Clone ID: GOSHI-09MAY01-C75688_1.pep
MGCVLGKQSQSSSSDRRRRRNSEAPPNPSRARRRRSSDESSSVVSVIDAVDGAMDVKGLEGRRQQQRKARHTSDFPVSVPAPETWRTPLDANLQGWPSWLMAVAGEAIRDWTPRRASTFQKLDKIGQGTYSNVYKARDLLTGKIVALKKVRFDNLDPQSLKFMAREILVLRKLDHPNVIKLEGLVTSRMSSSLYLVFEYMEHDLAG

SEQ ID NO: 81789 - protein, 116 aa, Gossypium hirsutum
  Clone ID: GOSHI-09MAY01-C75648_1.pep
IHPEWCRVSKEKQWKARKEKEKKIKERETPHHSRGENPGNPDANSPQKHQENKIFIKFGLPAMQAHLSWQRSWMTKIDQDSAPSKSILRPFCPDILHILFISITTCESHIGHRSDG

SEQ ID NO: 81790 - protein, 196 aa, Gossypium hirsutum
  unsure (1)..(196): unsure at all Xaa locations
  Clone ID: GOSHI-09MAY01-C75618_1.pep
MRFFLHTHPQLMAIPMRLQSFASAQKWEGGVSMVQGASRGIGLEFVKQLLEKNGKGHVIATCRNPTKATALLELKNQFAERLNVLPLDVTVESTIEESARSITKRYGSLNLLINASGILSIPSVLQPETTLSKVQKSSMMLAYEVNAVGPILXIKHMWPLLKVGGLLGTDRDVAVVANISARVSSIGDNRLGGWHI

SEQ ID NO: 81791 - protein, 223 aa, Gossypium hirsutum
  unsure (1)..(223): unsure at all Xaa locations
  Clone ID: GOSHI-09MAY01-C75378_1.pep
TRLGKYGGKPRLGGPRSTLCISSQVGCKMGCKFCATGTMGFKNNLTSGEIVEQLVHASLLTNIRNVVFMGMGEPLNNYTALVEAIRVMTGSPFQLSPKRITVSTVGIIHAINRLHGDLPGWNLAVSLHAPVQEIRCQIMPSARAFPLEKLMTALQTYQKNSQQKIFIEYIMLDGMNDEEQHAHRLGKLLETFQVVXNLIPFNPIGSSSQFRTQSDPKVSDFQK

SEQ ID NO: 81792 - protein, 198 aa, Gossypium hirsutum
  unsure (1)..(198): unsure at all Xaa locations
  Clone ID: GOSHI-09MAY01-C76948_1.pep
METENSKETGEIEPLLRDPRDEPKSEANPNPNPTTVKTRVPEVEIRLYRQGKGPIDVFKSSLGGWDQNQLEVRDILDKYGLKSIYAFSPQSGRGVPIRFHPRNGRSILGYKDGSVVHIDGEPQDSLIKPVTKVLVGVAAITLLITLVAKDTPEWMKKLKISGGDFPPWLLACVIIVFTXLKKKTKDFLKFLVGEWRNP

SEQ ID NO: 81793 - protein, 195 aa, Gossypium hirsutum
  Clone ID: LIB3829-018-Q6-K6-E4.pep
SVTNPNPNPSTVKTRVPEVEIRLYRQGKGPIDVFKSSLGGWDQNQLEVRDILDKYGLKSIYAFSPQSGRGVPIRFHPRNGRSILGYKDGSVVHIDGEPQDSLIKPVTKVLVGVAAITLLITLVAKDTPEWMKKLKISGGDFPPWLLACVVIVFTRMRKRTKNFFKKFGWCLGIPLESILSPHPFLFIFKSFGLPK

SEQ ID NO: 81794 - protein, 152 aa, Gossypium hirsutum
  Clone ID: GOSHI-09MAY01-C76968_1.pep
HGIEIRIARIFNTYGPRMNIDDGRVVSNFIAQALRGEPLTVQKPGTQTRSFCYVSDMVDGLIRLMEGEHTGPINIGNPGEFTMVELAETVKELIKPDVEINMVENTPDDPRQRKPDITKAKELLGWEPKVKLRDGLPLMEEDFRLRLGISKE

SEQ ID NO: 81795 - protein, 170 aa, Gossypium hirsutum
  Clone ID: GOSHI-09MAY01-C76588_2.pep
PRVRGRVRGRVGGRVGSPHQPPPAARYHFLHQRGLQLQQHQAEMLSRKSNSGINFNFDSSSCTPTMSSTRSFISSLSIDGSVANMDSGNAFHLIGAPRSSDQGSQHKKKCSGKGEDGSVKCGSSGKCHCSKKRKHRVKRSIKVPAISTKLADIPPEDYSWRKYGQKPIKG

SEQ ID NO: 81796 - protein, 151 aa, Gossypium hirsutum
  Clone ID: GOSHI-09MAY01-C76588_1.pep
FISSLSIDGSVAKLDGVGVSFHFTGGSRSLDQGPRHKKKCSGRGEDGSVKCGSSGKCHCSKKRKHRVKRSIKVPAISTKLADIPPDDYSWRKYGQKPIKGSPHPRGYYKCSSMRGCPARKHVERCLEEPSMLIVTYEGEHNHPKLPSQATT

SEQ ID NO: 81797 - protein, 202 aa, Gossypium hirsutum
  unsure (1)..(202): unsure at all Xaa locations
  Clone ID: GOSHI-09MAY01-C76548_1.pep
NLHNQNKCFNSSLQAESIYTHLFNLIEMEDTTIQPLLTPYKLGKFNLSHRIVLAPLTRQRSYNNVPQPHAILYYSQRASKGGLLLAEATGVSDTAQGYPDVPGIWTKEQVEAWKPIVDAVHAKGGIFFCQIWHVGRFQIQVFTKLDNLKSSVMNKAWTKLRAIGVDVAEXFTPKRLRTDEIPQIVNDFKFAQELLMKPVLME

SEQ ID NO: 81798 - protein, 94 aa, Gossypium hirsutum
  Clone ID: GOSHI-09MAY01-C76498_1.pep
LFSVPTAPKDPILINACFEQKTKTQNFRSLSICLFLLPLEILSIYTKTQPQKEIQRKKIKLSNHGGGDGHDGELAIYHIPITPPVDGFFCFYLC

SEQ ID NO: 81799 - protein, 214 aa, Gossypium hirsutum
  unsure (1)..(214): unsure at all Xaa locations
  Clone ID: GOSHI-09MAY01-C76698_1.pep
NTVNKAAMNKXLSDFVLVFYSNVLGIFMLAPCIIIFYRKRSPPVLTWSTICKIFLLGVLSYGGQICTYIGIGYGSPTLASAMADLTPAFTFIFSIISRMEKLDLGIKSSQAKSLGTLVSITGAFVVTLYKGLPLTTSPRKYSFLHQVLGIPHSNWIIGGFFLASHSVIFAIILNVQTWIIRRYPAEMLVTLICSIIVAILSSXVSLMVEKDPNA

SEQ ID NO: 81800 - protein, 132 aa, Gossypium hirsutum
  Clone ID: GOSHI-09MAY01-C76008_1.pep
PERPAAPTSSNRASSQVEEAPAEAEPKFSAFTGTGRRLDGKPLKQQSPPASSSGSKDKGPAISNGNNTRPYSGSSSQATAGQAQGKLIFGSHVNRSKDTKQESGKETRSEQPEKKEEPKFQPFTGKKYSLKG

SEQ ID NO: 81801 - protein, 148 aa, Gossypium hirsutum
  Clone ID: GOSHI-09MAY01-C76028_1.pep
FDLAGIMCGQFGIPFWEFFLSTLIGKAIIKTYIQMVFIISICNNQLLDWIENELIWVLGFVPGFDTFLPTLTAKLHAAKDKYLSTSQPLPSNIKGKWDLSFASIWNTVVWLMLMNFFVKIVNATAQRYYKKQMDEQVDDNVSASTHSD

SEQ ID NO: 81802 - protein, 162 aa, Gossypium hirsutum
  Clone ID: GOSHI-09MAY01-C76218_1.pep
KSMLVPLMQEDKRTGEGTRKGFYSYDNKRKPSPDPELYKYIEKSRSISGVAVDPKFVKLSDKDIVEMIFFPVVNETCRVLAEGIAVKAADLDIASVMGMGFPPYRGGIMFWADSLGSNYIYCRLEEWTKMYGEFFKPCAFLAEMAAKGAPLSAPVEQAKSRL

SEQ ID NO: 81803 - protein, 77 aa, Gossypium hirsutum
  Clone ID: GOSHI-09MAY01-C77948_2.pep
FHIHFFFSSLLSTILVMSRNLSTTRSIHSAKCYTNQHKYRAILCSWKYITLILFFFFIKNGGTLSLSFFGKACMPQC

SEQ ID NO: 81804 - protein, 239 aa, Gossypium hirsutum
  Clone ID: GOSHI-09MAY01-C77948_1.pep
PRVRPRVRFSRDRVAKVDPLGTYWTGSADSSDIETARRERKGWKVKIHDLSGSAVAAAFITTPFVPSTGCDWVAKSNPGAWLIVRPDICRPESWLPWGKLEAWRLRGRRDSICCRFHLLSEAQDGAEVLMSEILISAEKGGEFFIDTDRQMRQGPTPIPSPQSSGDFSALSPIAGGFVMSCRVQGEGKSSKPLVQLAMRHVTCVEDAAIFMALAAAVDLSIEACKPFRRKIRIGSRHSL

SEQ ID NO: 81805 - protein, 188 aa, Gossypium hirsutum
  Clone ID: GOSHI-09MAY01-C77808_1.pep
GRVGFWRERTASAINFSSSPPLSDGNSFMSSLTGDTDSMHPSLSSGFQFTSPFHIPCSGKPQFSSSLKRKCPPTRAAALKCGSSSSRCHCSKKRKSRVKRVVRVPAISSKMADIPPDDYSWRKYGQKPIKGSPHPRGYYKCSSVRGCPARKHVERAMDDPMMLIVTYEGDHNHSHISDSPAPLVLESS

SEQ ID NO: 81806 - protein, 182 aa, Gossypium hirsutum
  Clone ID: GOSHI-09MAY01-C77578_1.pep
MQCGIQQSEIGSCSDEMRSSVSVSVTDRKETMVCPKPRRLGLLNTPFNDHPVRSLRWQLSHQVELCDSKEESDALDFILTKGGCGVEQGCTQVALSPPFFCGSPPSRVSNPLIQDARFGEQKIMSPLSPVPPSSGLYSSSPSSSSRKGSYVRANFGSKPAVRVEGFDCLDRDRQNCSISALA

SEQ ID NO: 81807 - protein, 69 aa, Gossypium hirsutum
  unsure (1)..(69): unsure at all Xaa locations
  Clone ID: GOSHI-09MAY01-C77538_1.pep
NDLIAIAARGGMETLRPALQRVXMTRASAYRDALESFIEGYQEGIQQIRGKKEDSSNAQQGGNTDKNST

SEQ ID NO: 81808 - protein, 181 aa, Gossypium hirsutum
  unsure (1)..(181): unsure at all Xaa locations
  Clone ID: GOSHI-09MAY01-C77798_1.pep
MGSTSFGIPEHRFGSNGEKMPVLGFGTAVFPPVGAEATKMAILQSIKLGYRHFDTAAKYGSEQPLGEAIQEALSIGLIQSRDELFITTKLWCGDAHGDLVVPALKRSLQNLKLECLDLFLIHWPVSCKPGTYEFPNXRRENLLPRDFNSVWAXMEECQRLNLTKSIGVSNFSCKKLTDILA

SEQ ID NO: 81809 - protein, 130 aa, Gossypium hirsutum
  Clone ID: GOSHI-09MAY01-C77778_1.pep
METLFTRLGFSFFLLYFLVSCDLSLSFSPVDNYLVNCGALLDATVDNRRFVSDSSDSSHSHLSSPQLFSLCAGTLLPGLPPIYHTARVFKAPSKYVFDVKDPGTHMLRLHFHRFSSPQLNLADSKFHRLV

SEQ ID NO: 81810 - protein, 188 aa, Gossypium hirsutum
  unsure (1)..(188): unsure at all Xaa locations
  Clone ID: GOSHI-09MAY01-C77118_1.pep
MLRQLFAKSTAKHATFSFILFNPHREMHSRNKKAMELIAKGWSALKEVDRVIDYCELNDKRLIPLLRAAKENFELALEADNSNTHARYWLSKLHLKYHVPGACKAIGAALLVKAADMGDKDAQYELGCRLRIENDYVQSDQQAFYYLEKAVDQLHPGALYLLGAVYLTGDCVKXISSALWCFHRASEN

SEQ ID NO: 81811 - protein, 57 aa, Gossypium hirsutum
  Clone ID: GOSHI-09MAY01-C77348_1.pep
VDMQAQPDFEVSNIGHQALIMKGKRTKRQRSSSPFGVTVTSSSSSACGGGGGLAQEY

SEQ ID NO: 81812 - protein, 101 aa, Gossypium hirsutum
  Clone ID: GOSHI-09MAY01-C70518_1.pep
IREMKTQAVVIAAPFAFTLGLLGSIFALFLAIKEYIWTYAAFEFALVAVIVHVFYTVVHMKAVFSILLSGMISFGTAMALNSLYIRCFGWRVQVAGNSNPV

SEQ ID NO: 81813 - protein, 298 aa, Gossypium hirsutum
  unsure (1)..(298): unsure at all Xaa locations
  Clone ID: GOSHI-09MAY01-C70798_1.pep
ACKNWGFFQVINHGVPWKLLEKIKVAAKAFFDQPVEEKRKVKRDEVNAMGYHESEHTKNVRDWKEVFDFLIKDPSFLPASPETEDDEIRTLSNQWPETPPQFREVCQTYAREVEKLGYKLLELISLSLGLPSNRLNGYFEDHTTMMRLNHYPPCPCPELALGVGRHKDAGALTIVAQDDVGGLQVRRKSDDVWVPVKPTPNALVINVGDTIQVWSNEAYESVEHRVVVNSERERFPIPAFFFPXSHYVMVKPLEELVNEGSPPKYKPYNFGKFFVARNRSDYKKLEVQNIQISDFKII

SEQ ID NO: 81814 - protein, 147 aa, Gossypium hirsutum
  unsure (1)..(147): unsure at all Xaa locations
  Clone ID: GOSHI-09MAY01-C70758_1.pep
GAYRNQYRRLGAPRVLFQHLVVAVSFFLKDVVSSDSSVYSIMGIWSVVGVVAMVVTFSLGMGAIPWVIMSEILPINIKGLAGXSIATLSNWFFAWVVTMTANLLLDWSSGGTFXIYMVVSAFTIVFVTLWVPETKGRTLEEIQWSFR

SEQ ID NO: 81815 - protein, 171 aa, Gossypium hirsutum
  Clone ID: LIB3582-036-P1-K1-F10.pep
PRVRATFGVGAIQVIATAVTTWLVDKAGRRLLLIVSSFGMTLSLLVVAASFFLKDVVSSDSSVYSIMGILSVVGVVAMVVTFSLGMGAIPWIIMSEILPINIKGLAGSIATLSNWFFAWVVTMTANLLLDWSSGGTFTIYMMVSAFTIVFVTLWVPETKGRTLEEIQWSFR

SEQ ID NO: 81816 - protein, 79 aa, Gossypium hirsutum
  Clone ID: LIB3828-025-Q6-K6-D4.pep
NIKGLAGSIATLSNWFFAWVVTMTANLLLDWSSGGTFTIYMMVSAFTIVFVTLWVPETKGRTLEEIQCLSDKAASPVQF

SEQ ID NO: 81817 - protein, 255 aa, Gossypium hirsutum
  unsure (1)..(255): unsure at all Xaa locations
  Clone ID: GOSHI-09MAY01-C70688_1.pep
SYASAHASARLALGWRIRLTQHLLKNYLRNNAFYQVFHMSSKNIDADQRITHDLEKLTTDLSGLVTGMVKPFVDILWFTWRMKLLTGQRGVAILYAYMLLGLGFLRTVTPDFGDLTSREQQLEGTFRFMHERLRTHAESIAFFGGGAREKAMVESRFRELLDHSLLLLKKRWLFGILDDFVTKQLPHNVTWGLSLLYALEHKGDRALVSTQGELAHALRFLASVVSQSFLAFGDIXELHKKFLELSGSINRILSL

SEQ ID NO: 81818 - protein, 214 aa, Gossypium hirsutum
  Clone ID: GOSHI-09MAY01-C70048_1.pep
FLELLAKVNRRRRKRRVQEGAVEVEREGIERQEFSEVSEMFVSCEATEEQEIPEAEAEVETEAESVLVLRDDAEVNEESSGRSSNEETILECQEQEIERKQEDDQQESTIREETSPHVSFYLDKLYVEENEGGLEEELLQEAGDENETGSVKAEEEEYKAAVEEEAEEEESTTSTIEEKEIETTQGRSESECPEPESKSKESESQEICCQIVYY

SEQ ID NO: 81819 - protein, 288 aa, Gossypium hirsutum
  Clone ID: GOSHI-09MAY01-C70268_1.pep
YYLGNALKDVGRVDEAIQCYNKCLTLQPNHPQALTNLGNICMEWNMVAAAASYYKATLSVTTGLSAPFNNLAVIYKQQGNYVEAISCYNEVLRIDPLAADGLVNRGNTYKEIGRVTEAIQDYIRAINIRPNMAEAHANLASAYKDSGHVEAAIKSYKQALLLRPDFPEATCNLLHTLQCVCCWEDRDKMFTEVEGIIPRQINMSGLPSVQPFHAIAYPIDPMLALDISRKYAAHCSLIASRFALPPFNHPAPIPIKQDCGNQRLKIGYVSSDFGNHPLSHLMGSVFGM

SEQ ID NO: 81820 - protein, 203 aa, Gossypium hirsutum
  unsure (1)..(203): unsure at all Xaa locations
  Clone ID: GOSHI-09MAY01-C71928_1.pep
MAIVNSLSIPTYIPLKTQSFFSPRSKAFSVLNKPRKVPFSVQSMGSSASSQRPENNNAVQDINGASLAETAAVDYTSLSDEEWKKRLTPEQFYITPQKGTLRAFTGEYWNTKTPGTYHCICCDTPLFKSLTKFDSGTGWPSYYQPIGKNVQSKLDLSIIFMPREKILCATCGAHLGHVLLTXGPPPTGKRYCINIASLKLNLS

SEQ ID NO: 81821 - protein, 228 aa, Gossypium hirsutum
  unsure (1)..(228): unsure at all Xaa locations
  Clone ID: GOSHI-09MAY01-C71008_1.pep
KSEANNPRPETRTGCPAMVVIRLVDSKRWRIVEVELEHNHQVSPQIKRFYKSHKKMILAARKARPPAEPVTEIHTIKLYRTAAMDAVSNGFSNVSEREGIHQPDHSKHLELKEGDAYAVYNFFCRMKLTNPNFFYLMDFDDDGPLKNVFWADARSRAAYGYFSDTVAIDTTCLTSKYELPLISFVGVNHHGQSXLLGCGFLGHKSVEDFVWIFRAWLKCMLGHQPQVI

SEQ ID NO: 81822 - protein, 71 aa, Gossypium hirsutum
  Clone ID: GOSHI-09MAY01-C71218_1.pep
RANAHPFEQILHLLSNYFFWFNHFLNNNDCSHGALPNTHDFATDPTPGIQIDPCILVIGPKEELNLCLMIY

SEQ ID NO: 81823 - protein, 272 aa, Gossypium hirsutum
  unsure (1)..(272): unsure at all Xaa locations
  Clone ID: GOSHI-09MAY01-C71228_1.pep
MWGLPINPAQIMAVAWSENASSMEALSLSPPMSPPVILTQDELKKIAAYKAVEFVESGMVLGLGTGSTAKHAVDRIGELLRQGKLTNIIGIPTSKKTQEQAISLGIPLSDLDSHPTIDMAIDGADEVDPHLNLVKGRGGSLLREKMVEGACKKFVCIVDESKLVKYLGGSGLAMPVEVVPFCWKFTAKKLQNLFRDSGCVAKLRNDCKGEPFVTDNGNYIVDLYLKKDIGDLQVASDAISRIAGXVVEHGMFLAMATTVIVAGELGITIKNK

SEQ ID NO: 81824 - protein, 287 aa, Gossypium hirsutum
  unsure (1)..(287): unsure at all Xaa locations
  Clone ID: GOSHI-09MAY01-C72588_1.pep
MFISGEDDKNEIGTENTAFVHGKPPQDAAGPPKVESDMEIVDENEIVTENTAFVHGEPPQDCAGPPKVESDMEILHEKVKKQIIXKGHGQKPSKYSTCFLHYRGMXTETTKHKFDDTWHEQQPLELVLGKELREMTGLAMGVSSMKSGERALLHVGWELGYGKEGSFSFPNVPPMADILYEGELIGFDETKEGKARADMTVEERIGAADRRKMDGNSLFKEDKLEEAMQQYEMAIAYMGDDFMFQLFGKDRDMALAVKNPCHLNMAACLIKLKRYEEAIGHCSIVLS

SEQ ID NO: 81825 - protein, 114 aa, Gossypium hirsutum
  Clone ID: uC-gsronu33B109e09b1.pep
MEMERVTGFPHTHMDRRPRKRPRLGWDVTQLPPQAQVGMFCAQEVGRVTGFASSTAKAPADYASTITTSSSVVLKGGVAQNGSPPWRDDDKDGHYMFELGDNLTSRYKIQSKMG

SEQ ID NO: 81826 - protein, 73 aa, Gossypium hirsutum
  Clone ID: LIB3493-059-P1-M1-G4.pep
IVFSLFYAANKRFLFFDFLTLSAEIFFFFLDLESAIMEMERVTGFPHTHMDRRPRKRSRLGWDVTQMPPLAHV

SEQ ID NO: 81827 - protein, 239 aa, Gossypium hirsutum
  Clone ID: GOSHI-09MAY01-C72648_1.pep
DGSSDSEIESSESDSDSDSYLSSSSDISSSSDDGHKKRKRYFKRGKYRRGKKRERRRDKKRKRRDKRAKRRSRRASDSLTDDDSESSRESSSDNDDQGKPQKHEGPSQKSVGNQSPSATVRAIPPRKTEEAGLVKECEAPRENGERKSNGIEEDAKSDRSAERQPDVVDDRPSKSRSRSASPKRTMSKSISPWRSQRRCPSLSPRRSVSRSPVASRNPHVFQKEVGAGILLEASAEAQR

SEQ ID NO: 81828 - protein, 81 aa, Gossypium hirsutum
  Clone ID: GOSHI-09MAY01-C72678_1.pep
MRGKAVSGKAILVLCLASFLAGSLITSRTWTSQSHNNNHPIVNHVTASNKLGEFDHKLRKLGEGKAEDIMGEVSKTHKGIQ

SEQ ID NO: 81829 - protein, 118 aa, Gossypium hirsutum
  Clone ID: GOSHI-09MAY01-C72178_1.pep
KSSPIPINCSRAPRNDKPFNVEIPGEGFLYSELWAGPAYSNSPPPSSLPIPKFSLRVKRTVSLDLPAAYPIVDVHQTAKSAPASPTRELDPSVAEVFCSAASATKALRRILNLDNTDD

SEQ ID NO: 81830 - protein, 116 aa, Gossypium hirsutum
  Clone ID: GOSHI-09MAY01-C72018_1.pep
QLHDFVTRNSKLKQLGKPMVPNLDRGLWRYSRHPNYFGEQLWWWGLVVFAWNLGHGWTFVGALINSMCLAYVTVLVERRMLKQEYRAEAYRLYQKTTSGCVPWFKSSVIAVKDKDT

SEQ ID NO: 81831 - protein, 112 aa, Gossypium hirsutum
  unsure (1)..(112): unsure at all Xaa locations
  Clone ID: LIB3493-034-P1-M1-B1.pep
RTRGAALFFFGWVILFFITQPDCLFARVIKTKYFPXGEFLSTRIGFYPSFTWRSIWRAXQLLEEGIGWRIGNGHGVNIWNDAWIPGALINSMCLAYVTVLVERQMFETRVPS

SEQ ID NO: 81832 - protein, 67 aa, Gossypium hirsutum
  Clone ID: GOSHI-09MAY01-C73938_2.pep
LSFSRPKWPSSLFVSFDGLITAMAYHLPRVVCIIFKLLDPIDIYLVALKIVVFTDIINLSGHEGQVR

SEQ ID NO: 81833 - protein, 67 aa, Gossypium hirsutum
  Clone ID: GOSHI-09MAY01-C73938_1.pep
PFSKRRSKITFKLMSTLTAKTLFWPIHTIYIPRLTAKTLGVAIPDWQGPTQQIHTHIIPLTPRECTH

SEQ ID NO: 81834 - protein, 82 aa, Gossypium hirsutum
  Clone ID: LIB3826-001-Q1-N6-F2.pep
GCLVWSCGLLCCFLKQQFPMLDHAVPQSMIELSSQNSQPPLVSVVKQDPLKEEQHHAYVENAKQMVKESLNLEHLQLQKLVG

SEQ ID NO: 81835 - protein, 85 aa, Gossypium hirsutum
  Clone ID: LIB3582-020-P1-K1-A8.pep
RKRYVPFRSLKYLKQQFPMLDHAVPQSMIELSSQNSQPPLVSVVMQDPLKEEQHQAYVEDAAIKKKGKLNLPDKLFVKYYIEVEG

SEQ ID NO: 81836 - protein, 201 aa, Gossypium hirsutum
  Clone ID: GOSHI-09MAY01-C73178_1.pep
MSLSIFPTFSISQKSMLPTSISSMKSLISPPFSPLSLHFPKTKPFAFFSLPSKPPNVSYPKFLHAKPSMPSPRPPIFSIPIRQSHIETPQSSSPCGEVHVIVGPMFAGKTTTLLHRIQAESNNGRTVAVIKSNKDTRYGLDSIVTHDGMKLPCWALANLSSFRQKIGPDAYDQLDVIGIDEAQFFEDLYDFCCETAEHDCK

SEQ ID NO: 81837 - protein, 208 aa, Gossypium hirsutum
  Clone ID: GOSHI-09MAY01-C73358_1.pep
ALNSKKEDESSHSIKLVNFVSEQQLDEAKRTRGERIEDGTAQRDRPLYEILKENKDKKDAEFNERFKHRPPKALDEDETEFLDKLEMSRREYERQVADEEAEQLRSFQAAVAAQSNVVLELKETPPVLANQEQKTVGKKNPATRPLGMLIKVKPQAKRAKTEQEEKLIRGTKAPDVDNVESPKSDPDKSLNVAKTGLVSYSDESEDDD

SEQ ID NO: 81838 - protein, 179 aa, Gossypium hirsutum
  Clone ID: GOSHI-09MAY01-C73368_1.pep
MENSTQESHLRSDNSVTYESAYTVYAMALSSTPSSTNINHQRIALGSFLEDYTNRVDIISFDPETLSFKTHPKLAFDHPYPPTKLMFQPNRKSASSSSSCSDLLASTGDFLRLWEVRESSIEPVTVLNNSKTSEFCAPLTSFDWNDVEPKRIGTSSIDTTCTIWDIEKCGCETQLIAHD

SEQ ID NO: 81839 - protein, 154 aa, Gossypium hirsutum
  Clone ID: GOSHI-09MAY01-C73258_1.pep
MSPGETVSRSPLDKPLNQLTEDDISQVTREDCRRYLKEKGMRRPSWNKSQAIQQVISLKTLLETTSDSDAVEARKKLYPPCPEYPPRVRVVSDSNVLPREMTPNNGILVPVSESVPCPLSNPSKSDFSGDNSCRTVISGNDSVFSRLQVQQKSQ

SEQ ID NO: 81840 - protein, 260 aa, Gossypium hirsutum
  Clone ID: GOSHI-09MAY01-C68548_1.pep
MESPAQRRLNAIQSHLLPSAVSAAEDESLIGRNVTSSSSSPPFFVDQQYSVILPEKLQTGKWNVYRSARSPMKLLSRFDDHPEIGTLHENFVHAVETFRDYKYLGTRIRVDGTVGEYKWMTFGEAATAREAIGSGLRYYGLEQGACVGLYFINRPEWLVVDHACSAYSYISVPLYDTLGPDAVKFVVNHSGIKAIFCVPETLNTLLSFISSIPSVRLIVVVGGADEHLPSLPSTPGVKFVSYLKLLGQGRRNLQPFCPPK

SEQ ID NO: 81841 - protein, 247 aa, Gossypium hirsutum
  unsure (1)..(247): unsure at all Xaa locations
  Clone ID: GOSHI-09MAY01-C68658_1.pep
MASSRTVCVMDASGHLGSALVHLLLHRGYTVHAALQPHPNGFQSVEELFPCSNKNLKIFDADPFDYHSITAALKGCCGLFYCFEPPSDHSTYDEFMAEIEARAAHNVLEACAQTDTIEKVVFRSSVTAVIWNESRTGSDLDEKNWTDINFCKKFKLWHALSKTLAEKSAWALAMDRGINMVTINGRLLMTPDLTITNPYLKGAPEMYEDGVSVTVDLRFIXDAHICVFAPPPPLGRYLCFNHVINCS

SEQ ID NO: 81842 - protein, 194 aa, Gossypium hirsutum
  Clone ID: GOSHI-09MAY01-C68168_1.pep
VSTFFDQVVTLSTHPYGCRVIQRILEHCKDPKTQSKVMDEILGSVSLLAQDQYGNYVVQHVLGHGKPHERSIIIKELAGKIVQMSQQKFASNVVEKCLTFGGPDERQLLVNEMLGSTDENEPVQAMMKDQFANYVVQKVLETCDDQQRELILSRIKVHLNALKKYTYGKHIVARVEKLVAAGERRIAAQSPNPA

SEQ ID NO: 81843 - protein, 197 aa, Gossypium hirsutum
  Clone ID: GOSHI-09MAY01-C69968_1.pep
MQLSDSLDDLADICVRVDKRIFRCHQVVLASRSEYFKTRLSRMKEFHERTDAFSSDTLPYLEEHDLRAEAFEKMIEYMYTDGLTDIDPDQADEMFDAASRYLLFPLKRAVADVLLPHLEMVSPAELCHWLVLSDMYGVLKIREYCLDTIACNFETFADTSEFRAMLLTLPPPSGDSSLRTTVPSAPGAVINTDQSHL

SEQ ID NO: 81844 - protein, 273 aa, Gossypium hirsutum
  Clone ID: GOSHI-09MAY01-C69918_1.pep
EKELHELEYLWGYNREESCNDEEVLEGLEPHSNLKSLSIMYYNGRHYPSWLARFTNISGPSACFQPINLVKLKLSNCKNLEKLPTLGHYPNLKILEVEGLNNVRCIGKEFYVSDDDSSSDKNKPITLFPALEKLSLWNMEEVEEWLEVEPTVTVFPSLKELHIEGCCKLSSVPRMSRLSCLEALTITGNNALSCIGDEQFPFPSSLKKFTIQRCYKLTTVPSVEGGISFLQHLEVKLCDRLCKIGQGLLTSTCLRVVVICDCPNLISIPVYGI

SEQ ID NO: 81845 - protein, 137 aa, Gossypium hirsutum
  unsure (1)..(137): unsure at all Xaa locations
  Clone ID: LIB3583-043-Q6-K1-D7.pep
MSAHLQWMVVRNCSSFLIKRNKQTYSTEPNNLKARNSFRYNGLIHRKTVGVEPAVDGKGVVVXLKRRSGQRKPATSYVRTTINKNARATLSSIRHMIRKNKYRPDLRMAAISRASAILRSQNPVMEKRKRSRPTKSS

SEQ ID NO: 81846 - protein, 103 aa, Gossypium hirsutum
  unsure (1)..(103): unsure at all Xaa locations
  Clone ID: LIB3583-043-Q6-K1-D8.pep
CFYFRYNVLIYHRTVGIEPFAIGKGVVKVLKRKSGQRKPATSYVRTTINKNARATLISIRLMIRKNKFRSDLXMAAISRASAILRSQKPFMVKRKLTLPTKSF

SEQ ID NO: 81847 - protein, 312 aa, Gossypium hirsutum
  Clone ID: GOSHI-09MAY01-C69478_1.pep
ADYVSIWPTKFQNKTNGITPRRWLRFCSPKLSNIITKWLKTDQWVTNLDLLSGLRELADNADFQDEWASAKMANKQRLAQYILRVTGESIDPNSLFDIQVKRIHEYKRQLLNILGAIYRYKKLKEMSPELRKNTTSRTIMIGGKAFATYTNAKRIVKLVNDVGAVVNNDPEVNSYLKVVFVPNYNVSVAEMLIPGSELSQHISTAGMEASGTSNMKFALNGCLIIGTLDGANVEIREEIGEENFFLFGARADEVPQLRKDRENGLFKPYPRFEEAKHFIRRGAFGSYDYNPLLDSLEGNSGYGRSEYFLVGH

SEQ ID NO: 81848 - protein, 69 aa, Gossypium hirsutum
  Clone ID: LIB3825-009-Q1-K6-F12.pep
DNDALNPCEIIKTKDKGNVCKRTINKIPSSIFQPPNQREKFRYFLIQICQNNINESLFQKPKKSKIIKK

SEQ ID NO: 81849 - protein, 74 aa, Gossypium hirsutum
  Clone ID: LIB3584-056-P1-K2-C2.pep
FCFIWVSEIMIHLCCFDKSVFGSNEILPFVLVAGRLKGFYLLFFCKYCSSFVLIISQGVQRIIVLWLFWVFKLV

SEQ ID NO: 81850 - protein, 171 aa, Gossypium hirsutum
  Clone ID: GOSHI-09MAY01-C64808_1.pep
MGQALGCIQVEQSTVAITEAFGKFDDVLQPGCHCLPWCFGKQAAGTLSLRVQQLDVRCETKTKDNVFVNVVASIQYRALAEKAQDAFYKLSNTRAQIQSYVFDVIRASVPKLELDAVFEQKNDIARAVEEELEKAMSHYGYEIVQTLIGDIEPDEHVKRAMNEINAAARMR

SEQ ID NO: 81851 - protein, 160 aa, Gossypium hirsutum
  unsure (1)..(160): unsure at all Xaa locations
  Clone ID: GOSHI-09MAY01-C64478_1.pep
MDTDRERHSARETAFYLFTQQSLPACKPVLTPGWVIAIFLFMGVIFIPGGLVTLRASHCVVEIGDRYDIDCVPEPSRMDKVSYIQDDSIPKNCSHFMKVHKYMKAPIYIYYQLDNYYQNHRRYVKSRSDKQLLDGQKYHDTXSCQPVESNNNRPIVPCGL

SEQ ID NO: 81852 - protein, 154 aa, Gossypium hirsutum
  Clone ID: GOSHI-09MAY01-C64778_1.pep
MQHPLKHHLTRTLLALTSLSHFPPASPLTPCRTVCGTTAINYPFSIDDGCGAPQYRSMLNCTGTDLFFMTTSGRYKVQSIDYNKQTMVVYDPAMSTCSILQPHHDFVMTDVESVVIPPSSDTVFALLNCSIDSPVLNRYKNLCFNFSGHSCDEL

SEQ ID NO: 81853 - protein, 173 aa, Gossypium hirsutum
  Clone ID: GOSHI-09MAY01-C64118_1.pep
MAFAISNPTSIASSVSPSLLKSTQARARTNSWRLNTHHLNSQVVSRLKSEGGGRRVWRRRKLAKKDEMLQYKLERMPFLEEQVRKIREGGKLLTMDIERLLLSEDNRFDFVNDVAAEAKEYVENNRDEYGGSKKAILHVLSNRVNDSGFYRPDAYAESDPFKPGPTFLKEEFT

SEQ ID NO: 81854 - protein, 178 aa, Gossypium hirsutum
  unsure (1)..(178): unsure at all Xaa locations
  Clone ID: uC-gsflnu33B078h10b1.pep
MYSLKSYVLVVSLIFIPFLANNFLVFVNSITSSSSYSSSSGNQYTTFFNAISSSTNPKASLNSGKNQTTSSLISSSFCDVWDVTCSXEVLGLAREPDNVEWIKGLRRKIHENPELAFEEYETSKLVRSELDRMDIEYRYPLAKTGIRAWIGTGGPPFVAIRADMDALPIQEAVEWKHK

SEQ ID NO: 81855 - protein, 133 aa, Gossypium hirsutum
  Clone ID: LIB3272-001-P1-K1-C12.pep
DAWEYSTLFDAIASVNPKAPLNSGKNHTPPSGSRGSSTSCEVWDVACSEAVLSLARKPENVEWIKGLRRKIHENPELAFEEYETSKLVRTELDRMEIEYRYPLAKTGIRAWIGTGSPPFVAIRADMDALPIQE

SEQ ID NO: 81856 - protein, 254 aa, Gossypium hirsutum
  Clone ID: GOSHI-09MAY01-C64368_1.pep
QIAAVGSCCLVGVICGGTLYVANLGDSRAVLGRAVKATGEVLAIQLSAEHNVCIESVRQELQSLHPDDSQIVVLKHNVWRVKGLIQVSRSIGDVYLKKAEFNREPLYSKFRLREPLKRPILSADPSISVHQLQPHDQFVIFASDGLWEHLSNQEAVDIVQNHPRSGSARRLVKTALKEAANKREMRYSDLKKIDRGVRRHFHDDITVIVVFLDSNLVSRASSVKGPDLSVKGGGVNFRPNILAPCATPTEAGST

SEQ ID NO: 81857 - protein, 65 aa, Gossypium hirsutum
  Clone ID: GOSHI-09MAY01-C64318_1.pep
FPLFSLGDFCTLISTHCFDALASHRSTKMIDDQQLGFLANFLGVFIFGLVIAYHYVMADPKYEGN

SEQ ID NO: 81858 - protein, 104 aa, Gossypium hirsutum
  Clone ID: uC-gsronu33B076e07b1.pep
NHLADLLLLHHYHSRYHLHRLHRLRRLRMISTGTIINPMAILKLPVSFQQQLQQHDGGQLAQEPIQCLPLISKLTENKSLKGDDVGNSRSESNLEKVAFYSLNF

SEQ ID NO: 81859 - protein, 135 aa, Gossypium hirsutum
  unsure (1)..(135): unsure at all Xaa locations
  Clone ID: LIB3272-003-P1-K1-H7.pep
PVMKMGFRSYHVDEFQALNFIEWLKPSSSPTPSSSLSLSLSSSSSSSSSSSSNDQQVQIINPMAILKLPVSFQQQQQQQDGGQLGQEPIQCLPLLSRLTENKSLKGDDVGNIVKEENIEKVTVSLHIXLPNSSTG

SEQ ID NO: 81860 - protein, 216 aa, Gossypium hirsutum
  Clone ID: GOSHI-09MAY01-C64268_1.pep
MEERKVKGEVMCGTLDLTALPLDCVTLIISLTSPRDACRLSLVSTAFNSAAESDAVWESFLPSQYQELIPSSLSFSSKKQLYLSLCENPLLIEAGRKSFWLERVSGKKCYMLSPRDLSIIWSDTPDYWRWVSIPEARFDEVAELLHVCWFEIRGRISISMLSPMTHYKAYLVFQADNVYGFDYHPVNLSVGVVGTGGSKRSAYLQPKKDGDGYIRR

SEQ ID NO: 81861 - protein, 49 aa, Gossypium hirsutum
  Clone ID: uC-gsronu33B039c02b1.pep
GFDINVLTYYYVLFYFCLLYLFLNWIKLVLISLPVLVPVIKIINSVFFG

SEQ ID NO: 81862 - protein, 174 aa, Gossypium hirsutum
  Clone ID: GOSHI-09MAY01-C65868_1.pep
MADLENLLLEAAGRTGTGGRNRHSLPPSRRRREGSYSDGGSDSRDDDSDDDHGYASRKPSGSQVPLKKRLDPAERDDDQGSQEEGDYDDAGSGRERDSSDESDVGDDLYKNEEDRRQLAQLTELEREMILSERADKRGDKKFTEKIRSKRENDRPSRSQRETPPLPSSRGVRSS

SEQ ID NO: 81863 - protein, 63 aa, Gossypium hirsutum
  Clone ID: GOSHI-09MAY01-C65468_1.pep
YWSYLKTNSHKYFSILILIDPNDRVEARGNKLSSYANQSQESKNQVEVNLVIEYFKTQIDNYI

SEQ ID NO: 81864 - protein, 116 aa, Gossypium hirsutum
  unsure (1)..(116): unsure at all Xaa locations
  Clone ID: GOSHI-09MAY01-C65748_1.pep
MANLKAGTRPPWVGLGAAVWVQIASGNAYNFPLYSHSLKSVLGFNQHQLTMLGVANDIGENVGLLPGXLSNKFPPWVILLIGSFACILGYGALWLAVSKTVLYLPYWLLWLALCVA

SEQ ID NO: 81865 - protein, 117 aa, Gossypium hirsutum
  Clone ID: GOSHI-09MAY01-C65288_1.pep
MALRWFLHSACHVLGYLHESDDMQYCKNMASEQSGGVTQSSKVSSNAELTVVKAKMHPGSGFQMPLHYPRYAKADYEKMEEWKVDMLLREYGLSLEGNLSLDMRAYAMGTFLWPHQY

SEQ ID NO: 81866 - protein, 142 aa, Gossypium hirsutum
  Clone ID: GOSHI-09MAY01-C66598_1.pep
GKLSLDSQAVTAKVPDTVNKDLYGDNGSYVYQQTYGYMPYGVYSMPSSPLPAMGHDGQLHALQEYHYPSPYYQPLPQTSQANVSQVEVSTSGVGDQASLSIETNKGNTSTITNGGGLSGNSGSGSLKSTFKSSSLNPNASYK

SEQ ID NO: 81867 - protein, 66 aa, Gossypium hirsutum
  Clone ID: LIB3272-032-P1-K1-D10.pep
GAAGCCFLTYVNMEKKKAISQYRERLDNTLSSAELTDPETLKTLVKNQILRCAQHEKEESSVHLLD

SEQ ID NO: 81868 - protein, 57 aa, Gossypium hirsutum
  Clone ID: LIB3083-110-Q1-L1-C7.pep
RQPTVVYPVYPRRKAHVYFASRRFPFNLLLLCLPPSRYRDLLELLTLRSVPFFFRFL

SEQ ID NO: 81869 - protein, 122 aa, Gossypium hirsutum
  Clone ID: GOSHI-09MAY01-C66778_1.pep
MEKEKLDFILVPTGLLVLALYHVWLLFTILKHPTRTVIGLNAESRHQWVLSMMSDPLKNGVLAVQTIRNNIMASTLLATVAGTLSSLISVFVTSSSDSSNTTSEIFYGNKSRLLSSIKYFSI

SEQ ID NO: 81870 - protein, 148 aa, Gossypium hirsutum
  Clone ID: GOSHI-09MAY01-C66648_1.pep
NLPTSKPKASIPLPLSLNLSLPRLPCFSAAFDSFQVTEDDQSSGEEYPETESQDLEEQPQQEEAEEDKVSESGGEEGKLYVGNLPYSMTSSELTEIFSEAGSVAKVEIVYDRVTDRSRGFGFVTMGSVDEAKEAIRLFDGSQVGGRTV

SEQ ID NO: 81871 - protein, 156 aa, Gossypium hirsutum
  Clone ID: GOSHI-09MAY01-C66628_1.pep
MTDPYISSLSLFPLGFWASLSFSIPIVFKMASSTAQIHVLGGIGFASSRKPNHHAPRTVFFGQRLGKPSPLNAAFLRLAKTNGKRYNVGPVRVVNEKVVGIDLGTTNSAVAAMEGGKPTIVTNAEGQRTTPSVVAYTKTGDRLVGQIAKRQAVVNP

SEQ ID NO: 81872 - protein, 174 aa, Gossypium hirsutum
  unsure (1)..(174): unsure at all Xaa locations
  Clone ID: GOSHI-09MAY01-C66168_1.pep
NRRRQASWKAPLKFRMPTXAENLIPIRLDIEVDGQRYKDAFTWNPYDPDSEVVMFAKRTVKDLKLAPGFLPQIVQSIQSQLATFRSYEGQDMYVGDKIIPIKLDLQVNHTVIRDQFLWDLNNFDSDPEEFARTLCKDLGIEDPEVGPAVAFAIREQLYEIAIQNVTSARENRIS

SEQ ID NO: 81873 - protein, 131 aa, Gossypium hirsutum
  Clone ID: LIB3585-001-P2-M1-G3.pep
NSFILSGPREGFNSNPTICCISGYTSYFNFISYQILFLHDPDSEVVMFAKRTVKDLKLAPGFLPQIVQSIQSQLATFRSYEGQDMYVGDKIIPIKLDLQVNHTVIRDQFLWDLNNFDSDPEEFARNFLHRF

SEQ ID NO: 81874 - protein, 100 aa, Gossypium hirsutum
  Clone ID: GOSHI-09MAY01-C66128_1.pep
HLKSRSGYNRSAQPSSTRSPFNMAEILLSTLFTIWIQGMNLLSVEHPTSSGMNAGNSEPDTTLCASDKKFTACKHIFLHSLDLSGSYEGKRRGRVRKMDF

SEQ ID NO: 81875 - protein, 182 aa, Gossypium hirsutum
  Clone ID: GOSHI-09MAY01-C66048_1.pep
KEREVWVLFCLTSKMASLYCNNQVRDSCFTNARHGRSCSKAQACLEKILHLISSIPPPCEINPNPFKKRGFDIDLNLRLGSFVDDDDESEEKSDCFAENSFNEEKTGTGEATATDVSSDVTDIPKSEEFKSGTEGEVKASAAAFHDSLDLLIEAAEMISARDIYLNEKKKEVKKVEKWRRRR

SEQ ID NO: 81876 - protein, 116 aa, Gossypium hirsutum
  Clone ID: GOSHI-09MAY01-C66298_1.pep
TIATTFTNTAQSSFHNHYSRKNQQKRKGGRENIFERLYLGEGKLPLISRVDLTAEAVDRGKRKSKSIWCFNGFQVGSEKIWRGGLKERGKADRLVAFPIGGGAGVRRLGLRKRGEE

SEQ ID NO: 81877 - protein, 166 aa, Gossypium hirsutum
  Clone ID: GOSHI-09MAY01-C67928_1.pep
MVELRHSGSSLGSRASSSPMKRDEDASPLIFNDHVLRDDDDDHPRHSFRDRYRSFWSQIYSFFPFLNDDPRFSQHGSRISLLLLLFIAVAGLISFFSILQRLNSPYLCKKDGIVLHCPRVKENPSLWENPFSATTSWKPCAERRDGGMSDLPPENETSGYIFIHAD

SEQ ID NO: 81878 - protein, 343 aa, Gossypium hirsutum
  unsure (1)..(343): unsure at all Xaa locations
  Clone ID: GOSHI-09MAY01-C67808_1.pep
MKVKSWLVASAPFAAMVAVECLDVGLTTLSKAAMSKGMSHFVLVVYSNALASLILLPAAFLFSRKKRPPIAXSFLCKIFCLSIAGITLMQNCVITGVSYSSPTLASALANLIPAFTFLLAVIFRMEKLELKSPKSQIKVLGTLVSISGALIMTLYKGPPVLSPPIQPHLHPSPSTMLTTSNNWLIGGLFIATASLSLSANIVGQAAVLKGYPSEITLVSFYCLFGTIQSALVTLIFERDPNAWMLSPDIELISVVYSALFGNVVTFGVQAWCIRRKGPVFVAMFKPLSIAIAAFLGFIFLGETLYIGSIVGAAIIVTGFYGVIWAQSDKEEVARHNHPPLEDM

SEQ ID NO: 81879 - protein, 148 aa, Gossypium hirsutum
  unsure (1)..(148): unsure at all Xaa locations
  Clone ID: uC-gsflmaxxa096e06b1.pep
PRVRMKSPKRQSKVLCTLVSITGALIMTLYKGPPVLYPPIQPYLHTFSSTMITTSNNWLISGLFIATVSVSLSANIAGQAGDLKGNTSEITXGLFYSLYGTMQSALVTRILERDPNAWMMSPDIELISVVYSAVLANVVTFCVQAWCI

SEQ ID NO: 81880 - protein, 189 aa, Gossypium hirsutum
  unsure (1)..(189): unsure at all Xaa locations
  Clone ID: GOSHI-09MAY01-C67548_1.pep
LINLHQAAWLCTYGDESRGIMKRYQASSSHPANPEKFLTYMVPSLGELSKDMSDEHEDITYSWVREYHWDVRGDDAYDPTTYLGSFDEGEARYVPLPTKLNLRKKTPREGRSGDEIEHFPVPARITGRRRPTVAAIELHEPEVYSNSRGGICSSKMARLDAXDGHGRPHKLSRHQDIDQYSGAEDDVSD

SEQ ID NO: 81881 - protein, 148 aa, Gossypium hirsutum
  Clone ID: GOSHI-09MAY01-C67518_1.pep
RTHSENCVNKGSSRFCPESGISSPQGLEDSHRIPVENQLREVMTVHSSGSETTPHDSELATLHSLGEESIPSGLGFLVSNREQGHGDGGVLHVDVVSITSNIISNGGADTSNREARRNSRRLFWDAFSRHSSRTLNDSPSNDRNDVAS

SEQ ID NO: 81882 - protein, 137 aa, Gossypium hirsutum
  Clone ID: GOSHI-09MAY01-C67778_1.pep
MHVGGITLDLNWFLQFIFTLFIVALASLRLLKNTASNYFEVDANFGRDQPMPSIPMDADHFPCAVCSNPAFKKCSRCISGRYCSSACQQVDWKDGHKTKCIGFSTHTTTTKPFSGVALVPVSGTSKIIKKPRKVLFP

SEQ ID NO: 81883 - protein, 159 aa, Gossypium hirsutum
  unsure (1)..(159): unsure at all Xaa locations
  Clone ID: GOSHI-09MAY01-C67188_1.pep
MEALGGNCAFWGWKLPEIRNTKRPFPSKSKSSDSSAESTGSRGYRFPLKQAVTASSLALTGDTIAQLSSHWRKRKDSISGSSDTSKDIMPSVISDHDWLRALRMTSYGFLLYGPGSYAWYKYLDHCSPHQTPQNIMLRVLLNQIVLXGPWVIGVVFAWN

SEQ ID NO: 81884 - protein, 84 aa, Gossypium hirsutum
  Clone ID: GOSHI-09MAY01-C67068_1.pep
LLSCILLLIGSGNIKCHKQRTVPLSTLDRMKISTKLSEFTTVFTTPISKHQFDSLIPLEYLLCYSAFERLRSMLIKGLCSCNVS

SEQ ID NO: 81885 - protein, 235 aa, Gossypium hirsutum
  unsure (1)..(235): unsure at all Xaa locations
  Clone ID: GOSHI-09MAY01-C67038_1.pep
MPLKRVFFWQPNAGSTVNSQILNEVSQCVESINGVKEGRWKATLTFYKPMLRDQALSAEFPREFIGISLPEQPNKYYFVLRFNKIVLESDSSIQLIMEKLQSYKSRVALNFEGFQYQLGDFQLRVRAVVPSHSDNSTGILMEVEYLPISSLEKSVLIMDEFSDLWQDAISTRSLPRRFIPIXLSSSDYGLADHCTSPHTXAVQYSHVSTQLIALGSCHYLPQDSRISIPPPASRP

SEQ ID NO: 81886 - protein, 115 aa, Gossypium hirsutum
  Clone ID: GOSHI-09MAY01-C60938_1.pep
MIRCGLACERCRWILPLLLLSAIAFDIIALAGRGWLQSSDHTQTSSLWWKCSQEGGGSGSYEEGCQSLMEYAWGRAAAAMLFCGFIILVICCMLSFFALCGPQMLVFLRVIGGLL

SEQ ID NO: 81887 - protein, 74 aa, Gossypium hirsutum
  Clone ID: GOSHI-09MAY01-C60508_1.pep
MATRLQFENSCEAGVFSKLTNAYCLVAIGGSENFYSTLESELADAIPPAKTSIAGTRIIGRLCAGNKNGLLVPP

SEQ ID NO: 81888 - protein, 106 aa, Gossypium hirsutum
  Clone ID: GOSHI-09MAY01-C60648_1.pep
SLKSLSTKKMSGRGKGGKGLGKGGAKRHRKVLRDNIQGITKPAIRRLARRGGVKRISGLIYEETRGVLKIFLENVIRDAVSYTVHARRKTVTAMDVVYALKRQGRT

SEQ ID NO: 81889 - protein, 187 aa, Gossypium hirsutum
  Clone ID: GOSHI-09MAY01-C60158_1.pep
MWSKMAVELGVLVVRPWPGTGLGRVMRTLLLLLWLATRGSALYFHIGETEKKCFIEEIPDETMVIGNYRTQLYDKQREEYQPATPGLGMFVEVKDPEDKVILARQYGSEGRFTFTSHTPGEHQICLHSNSTKFSLFAGGMLRVHLDIQVGEHANDYAEIAAKDKLSELQLRVRQLVEQVEQIQKEQN

SEQ ID NO: 81890 - protein, 57 aa, Gossypium hirsutum
  Clone ID: LIB3196-010-P1-M1-F6.pep
IPLICEITKIPLICEITEIPSTYKIIEIPLTCKITKVPPIYRIIVLPSIYKIIKIPL

SEQ ID NO: 81891 - protein, 70 aa, Gossypium hirsutum
  Clone ID: LIB3196-058-P1-M1-F10.pep
ARITEIPLVYKITKIPLVCKITKIPLVCKITKIPLICEITKIPSTCKITKVPPIYRIIVLPSIYKIIEIP

SEQ ID NO: 81892 - protein, 110 aa, Gossypium hirsutum
  Clone ID: GOSHI-09MAY01-C60008_1.pep
RDDLGFPPSQSENFLSTIYLTFKLELPPPPLRGIWRLFNPASLAFLLECSKHNPTSGPWHLLLSMPRMLFPQICIWHIPHSKASLEPPCIKDPSHYHPPLPIHFALLYFS

SEQ ID NO: 81893 - protein, 88 aa, Gossypium hirsutum
  Clone ID: GOSHI-09MAY01-C60318_1.pep
CIAYDLLSYKLTRCFLVTYSRFLGLVSFCVVGPSSKSLHRIASFGTFFLVGLGEHFGMYRLLCWVGTLVCNLSAMRKWHKCSVGLGVL

SEQ ID NO: 81894 - protein, 122 aa, Gossypium hirsutum
  Clone ID: GOSHI-09MAY01-C61418_1.pep
MALMADHHSLAVAFGVLGNIISVLGYLAPLPTFYRIYIKKSTESFQSLPYQVALFSSMLWLYYALMKKGAFLLITINSFGCVVETIYIAMYIAYATKNSRVSAIKLFVAMNVALFSFIIILT

SEQ ID NO: 81895 - protein, 143 aa, Gossypium hirsutum
  Clone ID: GOSHI-09MAY01-C61408_1.pep
PTRPANPYQLYSNYLGSGPLHLEYKNGVDPEPGRCRRTDGKKWRCSKEAVPDHKYCERHMHRGRQRSRKLVEASQATSSGSRIISHGNAGTNLSISLQLDNSNTSSSGSSSNLSSGFIGFSPKSVLRGSNPKSESSMHISRAF

SEQ ID NO: 81896 - protein, 85 aa, Gossypium hirsutum
  Clone ID: LIB3825-006-Q1-N6-E11.pep
PKKKRCTLKHNYSHVSKLTNSIRNGAHHHHYSPPSNPRNLQTPLMFITYQILHTHKKTLSQRLLALPTSNVKNLSLLNLSFFLFF

SEQ ID NO: 81897 - protein, 108 aa, Gossypium hirsutum
  Clone ID: GOSHI-09MAY01-C61698_1.pep
HHDTNVSVHHTRSCWWLRDGSDGAQPQTSFLEPPDFNRHSSNHPYDNFSERNVQDEDQFLDWRDSWRLSRTTYLDDLEAGEDVNLHFDDIHSGPPETPTLNLRPTSFN

SEQ ID NO: 81898 - protein, 96 aa, Gossypium hirsutum
  Clone ID: GOSHI-09MAY01-C61638_1.pep
RRFKQAIKPQSTSGLACAPLSLARASVRTRASSPPGRTCKQTNKNSTAKRKRTIVFYFIFVSAIKEPTKSVKSFLFYDINTQTHRHIVYKKRFREK

SEQ ID NO: 81899 - protein, 82 aa, Gossypium hirsutum
  Clone ID: GOSHI-09MAY01-C61098_1.pep
NSYPGAYSHTILKVSYLLGSREVSRVGLVVLGWETTWEYQVLKALRIKNCDLTLRLSHVEFCAGQREHTVNALWGITGYLRE

SEQ ID NO: 81900 - protein, 54 aa, Gossypium hirsutum
  Clone ID: GOSHI-09MAY01-C61088_1.pep
SLYQSIRKSMNRNYQRILIALGVQKSDETPTDLCRTEEELCTLLNPPNTRNKKV

SEQ ID NO: 81901 - protein, 127 aa, Gossypium hirsutum
  Clone ID: GOSHI-09MAY01-C61298_1.pep
MDPARKAGAQAVIWNAGWLLLLLLLLCRGAHALECYSCVQKADDGCSPHKMKTVKCAPGVDVCTEAVGAVETIHGQFSMGVRGCGSGLPGKNDRGLDLHRLLAFIQLQQCAQDRCNAKLNLTSRALD

SEQ ID NO: 81902 - protein, 50 aa, Gossypium hirsutum
  Clone ID: GOSHI-09MAY01-C62918_1.pep
RVYISLRFFSFVFSEHLICRASQPLNGFCAFICRKQSRFSTTDSSFIFHA

SEQ ID NO: 81903 - protein, 92 aa, Gossypium hirsutum
  Clone ID: GOSHI-09MAY01-C62868_1.pep
FIIFIFGISIKYNSPFLPTLNLCIHLIIVCLSTHTTRFIQFNKKQKLYSSIATMAERSRHLNTEISNMGCLKNLVGSSNLSSISSNLTHPYS

SEQ ID NO: 81904 - protein, 123 aa, Gossypium hirsutum
  Clone ID: GOSHI-09MAY01-C62838_1.pep
YKCCKQTIRNSYCTGAAGIEAAEAATDLMKSNIARKASSEDAPAPAQERKHVTWGTDVPEDLVLDEKLLTEALKKEEERRREEKDERKRKYNVRWNDEVTAEEMEAYRMKRVHHDDPMKDFLN

SEQ ID NO: 81905 - protein, 47 aa, Gossypium hirsutum
  Clone ID: LIB3196-042-P1-M1-E2.pep
MVDLQTVCCMCGDVGFPDKLFRCNKCHHRFQHSYCSNYYSELAEPIG

SEQ ID NO: 81906 - protein, 56 aa, Gossypium hirsutum
  Clone ID: LIB3585-058-P1-K1-D2.pep
MVDLQTVCCMCGDVGFPDKLFRCNKCRHRFQHSYCSNYYSEFAEPIELCDWRQSEA

SEQ ID NO: 81907 - protein, 88 aa, Gossypium hirsutum
  Clone ID: GOSHI-09MAY01-C62588_1.pep
TPTAQKNNKTKTKTPISRHNPGQSPGTARLALPPRHALLHHATSVMHSRTYLGLSDLEPECRRNVKVRAGDFIHGYNSGLLSRRIWLV

SEQ ID NO: 81908 - protein, 177 aa, Gossypium hirsutum
  Clone ID: GOSHI-09MAY01-C62698_1.pep
STRGDPLGNAGKTLKEEIHKKIEKWQEPPPAKQPKPLPVPDSEPKKKRGGRRLRKMKERYAITDMRKLANRMQFGVPEESSLGDGLGEGYGMLGQAGSGKLRVSIGQSKLAAKVAKKFKEKNYGSSGATSGLTSSLAFTPVQGIELTNPQAHAHQLGSGTQSTYFSETGTFSKIKRT

SEQ ID NO: 81909 - protein, 165 aa, Gossypium hirsutum
  Clone ID: GOSHI-09MAY01-C62318_1.pep
IGEGESGPMGNIMIDPVLGTVGFGSGLHGWAFTLKQFAEMYVAKFAAKGEGQLGPAERAKKVEDMMKKLWGDRYFDPANGKFSKSATSPDGKKLPRTFCQLILDPIFKVFDAIMNFKKEETAKLIEKLDIKLDSEDKDKEGKPLLKAVMRRWLPAGDALLQMITI

SEQ ID NO: 81910 - protein, 115 aa, Gossypium hirsutum
  Clone ID: GOSHI-09MAY01-C62278_1.pep
MEGISATMYKNLKGYWQRRGYIKLNGTKGGGRRSKVELGSSRRRRFWKIRVKAKLRLPSPKKFFVWLRDAYVKMMLGLANSGMVSTGYGGAIGDHHGIAALRKRPVGVRCEKIVL

SEQ ID NO: 81911 - protein, 192 aa, Gossypium hirsutum
  Clone ID: GOSHI-09MAY01-C63848_1.pep
MGRGGVDEAVIPYNLNGESNWWHDINDSPLWQDRIFHILTALYGLVAVIALVQLVRIQFRVPEFGWTTQKVFHFLNFLVNGVRGLVFIFRRNVQDLHPEIVRHILLDMPSLVFFTTYALLVLFWAEIYYQARAESTDGLRPIFFTINVAVYSIQIAMWLVLWWKYIPVLVIISKMFFAGVSLFAALGFYYMV

SEQ ID NO: 81912 - protein, 209 aa, Gossypium hirsutum
  Clone ID: GOSHI-09MAY01-C63548_1.pep
GRVGFYNYVPSCILYRFSFSQVSVPRTSLFKTVTVRCGHCTNLLSVNMLGLLLPTTNQHHVGHSFFTPHNLLEEIRSSATTNMVINQPNPNNSLMPPIHGGAEDIPKPPVVNRPPEKRQRVPSAYNRFIKDEIQRIKAGNPDISHREAFSAAAKNWAHFPLIHFGLMPDQPVKKTNVHQQEGEEMVMKDGFFAPNNVGVTPYQTSPNYC

SEQ ID NO: 81913 - protein, 102 aa, Gossypium hirsutum
  Clone ID: GOSHI-09MAY01-C63208_1.pep
CVLYLLGLTDLHHLNSGVNRVWNTKGNPIDFQEPTTDHLSKAKESHSQGNNMGGNDGMTRDFLGLKAFPHRDFPNLAALNHRLNPSSRFGQQNQHSQTPWQG

SEQ ID NO: 81914 - protein, 446 aa, Gossypium hirsutum
  unsure (1)..(446): unsure at all Xaa locations
  Clone ID: GOSHI-09MAY01-C18998_1.pep
MGSKRTAEENKTKGILQLGNYELGRNLGERNFGKVKLAKNLHSGLTFAVKILEKSKLIQLSIADQIKREIATLKLLKHPNVVRLHEVLASKTKIYMVLEYATGGELFVRIASKGKLSEAEGRKFFQQLIDGVSYCHNKGVFHRDLKLXNVLIDDKGNIXISDFGLSALPQHIRGDGLLHTTCGSPNYVAPEILANRGYDGATSDIWSCGVILYVILTGYLPFDDRNLAVLYQKIFKGDPQIPKWLSPGARNMIRRILDPNPETRITMAGIKEDDWFKQDYTPAVPDDEEEDIYIDDEAFSMCEVGCDGGRTQESPTLINAFQLIGMSSCLDLSGFFEKEDVSERKIRFTSNRSGKDLLAKIQDTVTEMGFRVQMRNGKLKATQEHTVQKRLASLSVAAEVFEISPSLYVVELRKSYGDSTVYRQLCTKLFNDFGDPQGQGLVSTEA

SEQ ID NO: 81915 - protein, 50 aa, Gossypium hirsutum
  Clone ID: uC-gsflnu33B111c04b1.pep
RVNSEHVGSSPYSNIDLISHQSDSSIAFLICERGSKWVVKNITYTIKYIA

SEQ ID NO: 81916 - protein, 94 aa, Gossypium hirsutum
  unsure (1)..(94): unsure at all Xaa locations
  Clone ID: GOSHI-09MAY01-C118890_1.pep
MGFAISDELLGTVVPIVVYWIYSGIYVCLGSFENYKLHSKADEEENNLXSNQMVFKGFFWQHSVQAVVPILWFPCSGSDAGAFAQKSFSLYYLY

SEQ ID NO: 81917 - protein, 176 aa, Gossypium hirsutum
  unsure (1)..(176): unsure at all Xaa locations
  Clone ID: GOSHI-09MAY01-C18878_1.pep
KFSLSQIPNVSKEIKVDKVGVPRFNDQPESLFLSVNDKSNDKNSERMLAHLGMSKSSDPDNASQCSSIYHHERGFSSHSGEEGSSGTVRKQSSLSYGGLVTASPLVGLPEISHLGWGHWFTLRDLDLATSHFAAENVLGEGGYGVVYKGRLINGTXVAVKKILNNLGQAEKEFRVE

SEQ ID NO: 81918 - protein, 302 aa, Gossypium hirsutum
  Clone ID: GOSHI-09MAY01-C18808_1.pep
PRVRKGVIISVATGAAILVLGLVGVGIYAVRQKKRAEKAIGLSNPFASWAPSGKDSGGAPQLKGARWFSYDELKKCTNNFSDSNELGYGGYGKVYKGTLSGGRSVAIKRAQHGSMQGGLEFKTEIELLSRVHHKNLVGLVGFCFDQGEQMLVYEFMANGTLRESLSGRSGIYLDWKRRLRIALGSARGLAYLHELANPPIIHRDIKSTNILLDENLTAKVADSGLSKLVSDSSKGHVSTQVKGTLGYLDPEYYMTQQLTEKSDVYSFGVVMLELITAKQPIEKGKYVVREVRSVMDTKDDEH

SEQ ID NO: 81919 - protein, 176 aa, Gossypium hirsutum
  unsure (1)..(176): unsure at all Xaa locations
  Clone ID: LIB3543-040-Q1-K6-H7.pep
VVGRSGIYLDWKRRLRISLGXGGGLAYLHELANPPIIHRDIKSTNILLDENLTAKVADFGLSKLVSDSSKGHVSTQVKGTLGYLDPEYYMTQQLTEKSDVYSFGVVMLELITAKQPIEKGKYVVREVRSVMDTKDDEHYGLRELMDPCIRSSGNLLGFGKFLELAMQCVEDSATDR

SEQ ID NO: 81920 - protein, 105 aa, Gossypium hirsutum
  Clone ID: GOSHI-09MAY01-C18598_2.pep
MKQLHKQSSINHRRDEEILIPQTPPYSPKSLKHPRSLPRSINYLFKEQRLLFIFIGILIGSTFFILQPTLSRLGPTETHPSIPKSFSNNGVSHTQEFSVSNQNPI

SEQ ID NO: 81921 - protein, 249 aa, Gossypium hirsutum
  Clone ID: GOSHI-09MAY01-C18598_1.pep
MKQLHKQSSINHRRDEEILIPQTPPYSPKSLKHPRSLPRSINYLFKEQRLLFIFIGILIGSTFFILQPTLSRLGPTETHPSVPKSFSNNVVSHTQEFSVSNQNPIHGKMGRVPVGIGRRRMRIVVTGGAGFVGSHLVDKLIGRGDEVIVIDNFFTGRKENVVHLFGNPRFELIRHDVVEPILLEVDQIYHLACPASPVHYKYNPVKTIKTNVMGTLNMLGLAKRVGARFLLTSTSEVYGDPLQHPQKET

SEQ ID NO: 81922 - protein, 93 aa, Gossypium hirsutum
  unsure (1)..(93): unsure at all Xaa locations
  Clone ID: LIB3197-059-Q1-M1-H5.pep
MKQLHRQSSINHRRDEEILIPQTPAXSPKTMKHPTFVLRSMKNLSIQKRLTXIFIGILIGSTFFILQPTLSRLGPTETHPSIPKSFSNNVVSH

SEQ ID NO: 81923 - protein, 110 aa, Gossypium hirsutum
  Clone ID: GOSHI-09MAY01-C118400_1.pep
LGGPTRPPFRAETLTPFYQGHKNTSYLNPVFVGQQFVRLGADETSEFNEDRVNGVYDIDVKLYLRIRFKLGRVKTGRFKPRISCDLKVPLNTGNGSFGGTFKTTRCDLDF

SEQ ID NO: 81924 - protein, 132 aa, Gossypium hirsutum
  unsure (1)..(132): unsure at all Xaa locations
  Clone ID: GOSHI-09MAY01-C18798_6.pep
MDIATEAPKAPLTSERKGRADLEDKIPKPYLARALNTSSVENPHGTVPGHDNNVMSVLQQHAXFFDQDKDGIVYPRETYRGMRNLGFGRFESFLAAILINGALSYWTLPGWLPNLHFPLYIDRIHKCKHGND

SEQ ID NO: 81925 - protein, 231 aa, Gossypium hirsutum
  Clone ID: GOSHI-09MAY01-C18798_4.pep
QRPQQSTQAPLTSERKVRADLEEYIPKPYLARALAAPDVEHPHGTPGHDNHGMSVLQQHVSFFDQDKDGIVYPWETYTAMRNLGFNPFSSLFIAICITVGMSYQTLPGWLPNLYFPIYIDRIHKCKHGSDSSTFDNEGRFMPMNFENTFSKYARTEPDKLSFGEVWHMTEANRNSYDFIGWLMTKAEWMLLYLLATDENGYLSKEAVRGCFDGSLFEYVAKMNKAGKNKVC

SEQ ID NO: 81926 - protein, 254 aa, Gossypium hirsutum
  unsure (1)..(254): unsure at all Xaa locations
  Clone ID: GOSHI-09MAY01-C18798_3.pep
MDVATEAPKAPLTSERKVPTHLEEHIPKPYLARAFANPDVEHPHGTPGRDNYGMSALQQHASFFDQDKDGIVYPWETYRGMRNIGFNPISSLVIAITINVALSYWTLPGWLPNLYFPICIDRIHKCKHGSDSSTYDTEGRYMPMNFESIFSKYARTVPDKLTLGELWHMTEANRNSYDFIGWYFNHPFLXIPCTFYSFKKKWNLVCRIISKGEWXLLYIIAKDENGYLTKEAVRGCFDGSLFEYIAKMKGGKVH

SEQ ID NO: 81927 - protein, 188 aa, Gossypium hirsutum
  unsure (1)..(188): unsure at all Xaa locations
  Clone ID: GOSHI-09MAY01-C18798_2.pep
KEVRADLEEYIPKPYLARALAAPDVEHPHGTPGHDNHGMSVLQQHVYFFDQDKDGIVYPWETYXGWLPNLYFPIYIDRIHKCKHGSDSSTFDTEGRFMPMNFESTFSKYARTVPDKLSFGEVWHMTEANRNSYDFIGWLMTKAEWMLLYLLATDENGYLSKEAVRGCFDGSLFEYVAKMNKAGKNKVC

SEQ ID NO: 81928 - protein, 155 aa, Gossypium hirsutum
  Clone ID: GOSHI-09MAY01-C18798_1.pep
LKKGFGRFESFLAAILINGALSYWTLPGWLPNLHFPLYIDRIHKCNHGSDSSTYDTEGRFMPMNFGSIFSKYARTVPDKLTFGELWHMTEANRNAYDFIGWIISKGEWILLYRLAKDENGYLSKEAVRGCFDGSLFEHVAKMNNSGSKKSYRLKE

SEQ ID NO: 81929 - protein, 126 aa, Gossypium hirsutum
  Clone ID: LIB3135-054-Q1-K1-B2.pep
PRVRPRVRPNLYFPICIDRIHKCKHGSDSSTYDTEGRYMPMNFESIFSKYARTVPDKLTLGELWHMTEANRNSYDFIGWIISKGEWVLLYIIAKDENGYLTKEAVRGCFDGSLFEYIAKMKGGKVH

SEQ ID NO: 81930 - protein, 207 aa, Gossypium hirsutum
  Clone ID: GOSHI-09MAY01-C118780_1.pep
SVSIDISTSYFVAWTIRIVAAIMMLQSSMDPILAVEAFLSGIMLSSVGGKVTRWRFLRRVYKKLFKLAKVIGRNTQIPDLSPDLYSHDEYTYRKPEDSNFLNRRSKPLPLASCNTSLLGTTKTSPSQLSDTDSFPSTFHNTPERRNFSKGEWEKFTRDSTKRAVKELVSSPDFSKWAAANAERITVTPRSSLSSASTRSRRWWFLWS

SEQ ID NO: 81931 - protein, 52 aa, Gossypium hirsutum
  Clone ID: LIB3135-055-Q1-K1-H4.pep
VSGARCVGTLLYEMKRRGKDCRFGVISMCIGTGMGAAAVFERGDCVDELCNA

SEQ ID NO: 81932 - protein, 41 aa, Gossypium hirsutum
  Clone ID: LIB3197-060-Q1-M1-A4.pep
FFNMKALTTHKQLSNHGNMESHIFNTNCKVATSISMEHPLI

SEQ ID NO: 81933 - protein, 131 aa, Gossypium hirsutum
  Clone ID: GOSHI-09MAY01-C18058_1.pep
MAVKFLIALILVIAASLCWVSSADSSEAAFVKKTISAHKIVIFSKSYCPYCRKAKSVFKELKEVPFVVELDERDDGWNIQDALSEIVGRRTVPQVFINGKHIGGSDDTVEAYQSGKLAKLLGIEVENKDDL

SEQ ID NO: 81934 - protein, 148 aa, Gossypium hirsutum
  Clone ID: GOSHI-09MAY01-C18008_1.pep
DAWADAWAPPFVPPPPISSPSGNSVTGAIAGGVAAGAALLFAAPAIAFAWWRRRKPQEFFSDVPAEEDPEVHLGQLKRFSLRELQVATDSFSHKNILGRGGFGKVYKGRLADGSLVAVKRLKEERTPGGELQFQTEVEMISMAVHRNL

SEQ ID NO: 81935 - protein, 143 aa, Gossypium hirsutum
  Clone ID: GOSHI-09MAY01-C18258_4.pep
MEAARTVKDVSPHDFVKAYAAHLKRSGKIELPSWTDIVKTGKLKELPPYDPDWYYIRAASMARKIYLRGGLGVGAFRRIYGGAKRNGSRPRHFCKSSGSVARHILQQLQNVNIIDIDPKGGRRITSNGQRDLDQVAGRIAVAI

SEQ ID NO: 81936 - protein, 143 aa, Gossypium hirsutum
  Clone ID: GOSHI-09MAY01-C18258_3.pep
MEAARTVKDVSPHEFVKAYAAHLKRSGKIELPPWTDIVKTGKLKELPPYDPDWYYVRAASMARKIYLRGGLGVGAFRRIYGGAKRNGSRPRHFCKSSGSVARHILQQLQDVNIIDIDPKGGRRITSNGQRDLDQVAGRIAVAI

SEQ ID NO: 81937 - protein, 143 aa, Gossypium hirsutum
  Clone ID: GOSHI-09MAY01-C18258_2.pep
MEAARTVKDVSPHEFVKAYAAHLKRSGKIELPPWTDIVKGGKLKELPPYDPDWYYIRAASMARKIYLRGGLGVGAFRRIYGGAKRNGSRPRHFCKSSGSIARHILQQLQNVNIVDLDTKGGRKITSNGQRDLDQVAGRIAVAL

SEQ ID NO: 81938 - protein, 143 aa, Gossypium hirsutum; identical to SEQ ID NO: 81935
  Clone ID: GOSHI-09MAY01-C18258_1.pep

SEQ ID NO: 81939 - protein, 81 aa, Gossypium hirsutum
  Clone ID: uC-gsronu33B076h05b1.pep
MEAVRTVKDVSPHEFVKAYAAHLKRSGKIELPPWTDIVKTGKLKELPPYDPDWYYVRAAFMAWKIYLRGGLGVVPFCRTYL

SEQ ID NO: 81940 - protein, 55 aa, Gossypium hirsutum
  unsure (1)..(55): unsure at all Xaa locations
  Clone ID: LIB3083-016-Q1-L1-F9.pep
ASLTFXDVSPHDFVKAYTPHLKRSSMFFLPSWTNIVKTGKLNELPPYYPDWYYIK

SEQ ID NO: 81941 - protein, 75 aa, Gossypium hirsutum
  Clone ID: GOSHI-09MAY01-C18218_2.pep
MPPAAPRSGDAIFASVERVNAELFTLTYGAIVRQLLTDLEEVEEVNKQLDQMGYNIGIRLIDEFLAKSNVSRCVD

SEQ ID NO: 81942 - protein, 188 aa, Gossypium hirsutum
  unsure (1)..(188): unsure at all Xaa locations
  Clone ID: GOSHI-09MAY01-C18218_1.pep
MPPAAPRSGDAIFASVERVNAELFTLTYGAIVRQLLTDLEEVEEVNKQLDQMGYNIGIRLIDEFLAKSNVSRCVDFKETAEMIAKVGFKMFLGVTASVMNWDADGTCCSIVLEDNPLVDFVELPDTCQGLYYRNILSGVXIGGALEMVAMKTEVXTWIRDMLRGDDAYELQVKLLKQVPEEYPYKDDE

SEQ ID NO: 81943 - protein, 384 aa, Gossypium hirsutum
  Clone ID: GOSHI-09MAY01-C18208_1.pep
MKVSVKTLKGTHFDIEVKPEDAVADVKKNIETVQGADVYPAAQQMLIYKGKVLKDDTTLAENSVTENSFIVIMLTKNKGASGEGSTASTAPTKKAPEASSLPTAPAPASTAPVATSATAAPAAESAPVASSTPLSDSDVYGQAASNLVAGSNLEGTIQQILDMGGGTWDRDTVVRALRAAYNNPERAVEYLYSGIPEQAEAPPVARAPVVGQTTSPAAPPQQPAQMAAIPTSGPNANPLDLFPQGLPNMGASGAGAGSLDFLRNSPQFQALRAMVQANPQILQPMLQELGKQNPNLMRLIQEHQGDFLRLINEPAEGGEGNILGQLAEAMPQAVQVTPEEREAIERLEAMGFDRATVLQVFFACNKNEELAANYLLDHMHDFQD

SEQ ID NO: 81944 - protein, 69 aa, Gossypium hirsutum
  Clone ID: LIB3149-005-Q1-K2-H3.pep
LSGLTWWKKWLGEGQYHFLCRSLGPLAFLPPPLSPQISTESILNQQMSVFGVETTDANIVTPFSLLFTF

SEQ ID NO: 81945 - protein, 73 aa, Gossypium hirsutum
  Clone ID: GOSHI-09MAY01-C118210_1.pep
SLFPLPFPLPHPCHTNLLLVVSQQRFHKYKVPKQKRVKKETERPLFSGAISGSAITRAITPTPAHGCCAQHQG

SEQ ID NO: 81946 - protein, 120 aa, Gossypium hirsutum
  unsure (1)..(120): unsure at all Xaa locations
  Clone ID: GOSHI-09MAY01-C19958_3.pep
KTPREAIEGSYIDXKSPRTGTVSIKGRILAGPYHTAKMVRTIIVRRNYLHCIKKYRSNIQFFGLHSQQKVTSSYVVVIDRGGVASHAASMLPRSGVGMLLLLGCDQFTENTAYLRSIELK

SEQ ID NO: 81947 - protein, 110 aa, Gossypium hirsutum
  unsure (1)..(110): unsure at all Xaa locations
  Clone ID: GOSHI-09MAY01-C19958_2.pep
LIFLFIVYYTEKAFLKQPKVFLCCKKTGKGKRPGKGGNRFWKSIGLGFKTPREAIEGTYIDXKKSPFTGTVSIRGRILAGTYHSAKMVRTIIVRRNYLHCIKKYQRLSAA

SEQ ID NO: 81948 - protein, 159 aa, Gossypium hirsutum
  Clone ID: GOSHI-09MAY01-C19958_1.pep
MAEQTEKAFLKQPKVFLSSKKNGKGKRPGKGGNRFWKSIGLGFKTPREAIEGTYIDKKCPFTGTVSIRGRILAGTCHSAKMVRTIIVRRNYLHYIKKYQRYEKRHSNIPAHISPCFRVKEGDHVIIGQCRPLSKTVRFNVLKVIPAGSSRGGKKAFTAM

SEQ ID NO: 81949 - protein, 37 aa, Gossypium hirsutum
  Clone ID: LIB3148-007-Q1-K1-A5.pep
SPHFVQQALYWLSIKFKILRLSPEIIFQSKKNPTENY

SEQ ID NO: 81950 - protein, 149 aa, Gossypium hirsutum
  Clone ID: uC-gsflnu33B089c12b1.pep
CLSPDSKLNLDDILQVREESDIYVLGFQEIVPLNAGNVLVIEDNEPAVKWLTLINRSLNKANYVPLRGPRSVGSPEGSLVFPKIKLRKASKALRTENKWKLKSCNCPIGLERKNSKEFCFRCPQSQTNENDISSEDDEDRPYGPSRANS

SEQ ID NO: 81951 - protein, 100 aa, Gossypium hirsutum
  Clone ID: uC-gsflnu33B089d12b1.pep
MKWRIKCCWSEEPAAKWVTLINRSLNKANYVTLRGPRSVGSPEGSLVFPKIKLRKASKALRTENKWKLKSCNCSIGLERKNSKEFCFRCPQSQTYENDIL

SEQ ID NO: 81952 - protein, 243 aa, Gossypium hirsutum
  Clone ID: GOSHI-09MAY01-C19938_1.pep
FRGQPSRWFVLGHERIFQVLTPIWHTGGRRKVAGRKILERGSDRLAFITGQLQNLPTPPHSHEQLHANPPPPQDPPTDFSTQPAVSPDVDDEASGPLSLKHHPVSDADQGQTSAYNGGIDEGSASSGRDRSIEPSNGSAFDTSGEPNSFLVSSNDRSSPISTSGTVQGSETSARKHNFFTPKQISSAIDGSEKARLLCSVIVGVLVVLLHLGFPLPGNKFVGSILNFRPLYLVLLTNVTLVMG

SEQ ID NO: 81953 - protein, 263 aa, Gossypium hirsutum
  Clone ID: GOSHI-09MAY01-C19818_1.pep
DLAASNDDGKFLLAARKCRRPTCTDYIISLNCNDVSKGSSTYIGKLRSNFLGTKFTVYDAQPPNAGAKVTKSCSTRLINMKQVSPRVPAGNYPVAHISYELNVLGSRGPRRMHCVMDGIPASSIEPGGVAPTQTEFLHSNLDTFPSLLFFRSKSTRSESFQSGPLSDQKDGMLVLRNKSPRWHEQLQCWCLNFNGRVTVASVKNFQLVASPENAAAGQEHENVILQFGKVGKDVFTMDYQYPISAFQAFAICLSSFDTKIACE

SEQ ID NO: 81954 - protein, 164 aa, Gossypium hirsutum
  Clone ID: GOSHI-09MAY01-C19808_1.pep
FVLASNSEPLFNLFGFLVCVGSTAGRALKSVVQGIWGTSEAEKLHSMNLLLYMAPMAAMILLPLTLYIEGNVARITLDKAKTDSFIVFLLVGNATVAYLVNLTNSLVTKHTSALTLQVLGNAKAALAAIVSVMIFKNPVTVMGMAGFAVTIMGVVLYCEAKKRS

SEQ ID NO: 81955 - protein, 112 aa, Gossypium hirsutum
  Clone ID: GOSHI-09MAY01-C19598_1.pep
MSLPHHAPPPPPEKAVQVLESPPPMMTMTPSQLPALYKQRSLSPDIFRDEAWLRRKGNSKNRGSKSVTDEDLDELKACIELGFGFEFDSPEVDQRLSDTLPALGLYYAVNKN

SEQ ID NO: 81956 - protein, 76 aa, Gossypium hirsutum
  Clone ID: GOSHI-09MAY01-C119560_1.pep
MFAICRSIESLVEQFRKEPICFYILTNSRALSSEKATVLIKDICNNLCSAAKSVQHIDYTVVLRGDSTLRGHRTRE

SEQ ID NO: 81957 - protein, 327 aa, Gossypium hirsutum
  unsure (1)..(327): unsure at all Xaa locations
  Clone ID: GOSHI-09MAY01-C19578_1.pep
RQAADNEDAGGHYNLGVMYLKGIGVKRDVKIACKCFIVAANAGRPKAFYQLAKMFRTGVGLKKNLPMATALYKLVAERGPWSSLSRWALESYLKGDMGKAFLLYSRMAELGYEIAQSNAAWILDKYGERSMCMGESGVCTDAERHQRAHSLWWQASEQGNEHAALLIGDAYYYGRGTVRDYERAAEAYIHAKSQSNAQAMFNLGYMHEHGQGLPFDLHLAKRYYDQALEXDPAAKLPVTLALASLXWVRKNYADCFLVHVIDSLPEVYPRVEGWVENGXSWREGNATILTLFVCLLTVLYLRERQRRHAIAAAGAHEPNEHVVPAAR

SEQ ID NO: 81958 - protein, 156 aa, Gossypium hirsutum
  unsure (1)..(156): unsure at all Xaa locations
  Clone ID: GOSHI-09MAY01-C119500_1.pep
QHYTSTPEEAAADAIKAGLDLDCGPFLAQYTENAVTRGLLKEADVNSALANTLTVQMRLGMFDGEXSAQPFGYLGXKDVCSPAHQELALEAARQGIVLLNNRGPSLPLSHLRHRTVAVIGPNYNATVTMIGNYACVACAYTSXLQGIGNYAKTIHK

SEQ ID NO: 81959 - protein, 56 aa, Gossypium hirsutum
  Clone ID: GOSHI-09MAY01-C19478_1.pep
TYRTNFSLIYFFFIGIQSKSRCHFLVPEWVSSIFYSIFLGLCSTPSKDPPDFDLRI

SEQ ID NO: 81960 - protein, 49 aa, Gossypium hirsutum
  Clone ID: LIB3147-056-Q1-K1-B5.pep
PRVRPRVRPLVRPRVRPRVRARVRRLIFSIRMIYGWLGWTEKMKHPGSV

SEQ ID NO: 81961 - protein, 116 aa, Gossypium hirsutum
  Clone ID: GOSHI-09MAY01-C119450_1.pep
KITTTFHQKPALSLLLLPRFNSIKLSPKRGRSIQKRVVSVPIKDVEGSRFKGESAPPSDSWAWRKYGQQPIKGSPYPRGYYRCSSSKGCPARKHVERSHVDPKMLVITYSCEHNHP

SEQ ID NO: 81962 - protein, 109 aa, Gossypium hirsutum
  Clone ID: GOSHI-09MAY01-C19768_1.pep
PCNHLYHSDCIIPWLVQHNSCPVCRQELPPQGSGSSQSYNPRGQSRSSNFGSSSSGRESQSSRRNPFSYFWPFRSSNSSSSHNGAAGSSSPRHVHENNQSMGYNGWPFD

SEQ ID NO: 81963 - protein, 172 aa, Gossypium hirsutum
  unsure (1)..(172): unsure at all Xaa locations
  Clone ID: GOSHI-09MAY01-C19688_2.pep
MYGKAAICLSFVIRFLISCSIYVGTVDLRSYFFPLLQSPQVPRSLCASGPPLRVYMYDLPRKFHVGMMDRRSFEGPAPVTADNLPPWPSNSGIKKQHSVEYWLMASLLFGGNGNEDREAVRVSDPESAEXFFVPFFSSLSFNTHGHNMTDPETEVDRRLQVELLEFLQSPST

SEQ ID NO: 81964 - protein, 155 aa, Gossypium hirsutum
  unsure (1)..(155): unsure at all Xaa locations
  Clone ID: LIB3543-048-Q6-K6-D1.pep
NISEQRTKGNLILPKLLSFRKKNSPQVPRSLCASGPPLRVYMYDLPRKFHVGMMDRRSFEGPAPVTADNFPPWPSNSGIKKQHSVEYWLMASLLFGGNGNEDREAVRVSDPESAEAFFVPFFSSLXFNTHXHNMTDPETEXDRRLQVELLEFLRK

SEQ ID NO: 81965 - protein, 131 aa, Gossypium hirsutum
  Clone ID: GOSHI-09MAY01-C119640_1.pep
LWLEAEAALCSTNYMARFNKIKIEIEESKLDKGKEDASDEDKKSSSKFSAQVNTNKKLTQSAESESPTAVSNQNSSIKSSCYHADDVTARFQELKQRLNNSSSVHTRELDELSSSKLCPDLGWVLTYWHLK

SEQ ID NO: 81966 - protein, 252 aa, Gossypium hirsutum
  Clone ID: GOSHI-09MAY01-C19178_1.pep
MPDLKGGIRRSKRINDNQETPAVLATTAQRGGANRGRGRGRGRRAMNQDDNAVLVGPGACGRGCSGLNLPVKHPVEKTAERLVAVEEEGSTSPLPERVQFGNSPVYMLDRKLGKGGFGQVYVGRRITSAIGCTGADAFEVALKFEHRNGKGCSSGPPYEWQVYSSLNGCYGLPSVHYKGQLGDYYILVMDMLGPSLWDVWNSNNQMLTQDMVACIAVEAISILEQLHYKGFVHGDVKPGNFLLGQPGTSNEK

SEQ ID NO: 81967 - protein, 110 aa, Gossypium hirsutum
  Clone ID: uC-gsflnu33B109b08b1.pep
HTCGHLILNLNAKLSKSAEESSLQSTSFSSQIWRHEGFVSRKASGVIHQLVAFQYGPVCDATHFQKLCLTTKPMNTEVYYGVLETCMLIHMKRQQGWSLVLQKKTVESEG

SEQ ID NO: 81968 - protein, 50 aa, Gossypium hirsutum
  Clone ID: LIB3083-012-Q1-L1-A3.pep
HSGLKLQRDLCTRLFIPTFNQFDNASIIITFHFGQFFCCQTSDNPCCHVM

SEQ ID NO: 81969 - protein, 178 aa, Gossypium hirsutum
  unsure (1)..(178): unsure at all Xaa locations
  Clone ID: GOSHI-09MAY01-C19088_1.pep
MVLVLALGDLHIPHRAADLPPKFKSMLVPGKIQHIICTGNLCIKEVQDYLKTLCPDLHITRGEYDEDTRYPETKTLTIGQFKLGLCHGHQVIPWGDLDSLAMLQRQLDVDILVTGHTHXQFTAYKHEAGVVINPGSATGAXYSNITYDVNPXFVLMDIDGLRVVVYVYELIDGEVKVD

SEQ ID NO: 81970 - protein, 61 aa, Gossypium hirsutum
  Clone ID: LIB3145-055-Q1-K1-C7.pep
CIQDEHEGNIFVECRSCRLPFSPLGIMHLVDYICACMVLEHNMIPTNFRRYLPHESQVTNA

SEQ ID NO: 81971 - protein, 201 aa, Gossypium hirsutum
  Clone ID: GOSHI-09MAY01-C19028_1.pep
TPHIKQWLKDQNMTAKDAYQYFVLKAQEIAISKNWTPVNWEETFNSFPSKLNPRTIVHNWLGSGVCPRAVAKGYRCIFSNQGAWYLDHLDVPWNEVYSAEPLEGINNVSEQNLVLGGEVCMWGETADTSDVQQTIWPRAAAAAERLWSKREAVSARNITLAILPRLHYFRCLLNRRGVQAAPVTNKYARQPPFVAGSCYEQ

SEQ ID NO: 81972 - protein, 96 aa, Gossypium hirsutum
  Clone ID: GOSHI-09MAY01-C19358_1.pep
MVTVNIGMLHYILDHVYGAFVHRTKISPPFFSRGWGGTKLELLERLISQLFPEVEGQNWPPSLIQPIWRTVWETQNACLREGVFRTPCDEQLLSAF

SEQ ID NO: 81973 - protein, 167 aa, Gossypium hirsutum
  Clone ID: LIB3585-032-P1-K1-D5.pep
WGRASAHASAHASAHASFFFSRGWGGAKLELLERLISQLFPEVEGQNWPPSLIQPIWRTVWETQNACLREGVFRTPCDEQLLSALPPESHNARVAFLVPKDVPPQKMACVVHLAGTGDHTFERRLRLGGPLLKQNIATMVLESPFYGQRRPMLQRGAKLLCVSDLLL

SEQ ID NO: 81974 - protein, 84 aa, Gossypium hirsutum
  Clone ID: GOSHI-09MAY01-C19318_1.pep
MASIRRTLSPAYHHRSYQNGAGFSSPSHMFLPNGNSKHSSSRHLPLLFTALNLVYRTGWRRSLCWCLFFFLIGFVFGITLFGNM

SEQ ID NO: 81975 - protein, 167 aa, Gossypium hirsutum
  Clone ID: GOSHI-09MAY01-C19278_1.pep
MEPSQTIEDESQPSIASVTRRIQRLSLHLIPLPFLQRSPQLDMLTCAKANKQEVDVASLSSYMRGRHREIQEKIFDFFNSRPDLQTPTEISMKEHRELCLRQLLGLVREAKIKPFRYVVEDPAKYFAISEAVGSIDISLGIKFGVQYSLWGGSVLNLCTKKAPDKYF

SEQ ID NO: 81976 - protein, 332 aa, Gossypium hirsutum
  Clone ID: GOSHI-09MAY01-C19208_1.pep
SGRIVQAPLGLFPRPWPPNADASEASQFFKVIEYFRLLGRVMAKALQDGRLLDLPLSTPFYKLVLGQELDLYDILSFDGEFGKILQELHFLVCRKQYLESTGGESSAAVDELCFRGTPIEDLCLDFTLPRVPEYILKPGDGTVDINSVEEYISFVVDATVKAGIIRQMEAFRAGFNQVFDVASLQIFTPQELDYLLCGRRELWEAETLADHIKFDHGYTAKSPAVVNLLEIMGEFTPEQQRAFCQFVTGAPRLPPGGLAVLNPKLTIVRKHSSSAIAATSNGSGPSESADDDLPSVMTCANYLKLPPYSSKEIMYKKLLYAIYEGQGSFDLS

SEQ ID NO: 81977 - protein, 91 aa, Gossypium hirsutum
  Clone ID: uC-gsronu33B007e02b1.pep
AFCQFVTGAPRLAPGGLAVLNPKLTIVRKHSSSAIAATSNGSGPSESADDDLPSVMTCANYLKLPPYSSKEIMYKKLLYAINEGQGSFDLS

SEQ ID NO: 81978 - protein, 93 aa, Gossypium hirsutum
  Clone ID: GOSHI-09MAY01-C14998_1.pep
MLFFSWVGDLVGREVTVELKNDLAIRGTLHSVDQYLNIKLENTRVVDQDKYPHMLSVRNCFIRGSVVRYVQLPPDGVDIELLHDATRREARGG

SEQ ID NO: 81979 - protein, 94 aa, Gossypium hirsutum
  Clone ID: LIB3543-013-Q1-K6-E4.pep
MLFFSYFKDLVGREVTVELKNDLAIRGTLHSVDQYLNIKLENTRVVDQDKYPHMLSVRNCFIRGSVVRYVQLPPEEVDIELLHDATRREARVVF

SEQ ID NO: 81980 - protein, 91 aa, Gossypium hirsutum
  Clone ID: LIB3189-050-P1-K1-A11.pep
MLFFSYFKDLVGREVTVELKNDLAIRGTLHSVDQYLNIKLENTRVVDQDKYPHMLSVRNCFIRGSVVRYVQLPPEEVDIELLHDATRREAR

SEQ ID NO: 81981 - protein, 106 aa, Gossypium hirsutum
  Clone ID: GOSHI-09MAY01-C14908_2.pep
MGWKKGVPEFEETGPDDFDPANPYKDPVAMLEMREHIVREKWIDIEKAKILRDKVRWCYRIEGVNHLQKCRHLVRLYLDATRGIGWGKDGRHPSLHGPKVEEVESE

SEQ ID NO: 81982 - protein, 106 aa, Gossypium hirsutum
  Clone ID: GOSHI-09MAY01-C14908_1.pep
MGRKKGVAEFEETAPDDFDPANPYKDPVAMLEMREHIVREKWIDIEKAKILRDKVRWCYRIEGVNHLQKCRHLVRQYLDATRGIGWGKDGRHPSLHGPKVEEIDSE

SEQ ID NO: 81983 - protein, 86 aa, Gossypium hirsutum
  Clone ID: GOSHI-09MAY01-C14878_1.pep
PRVRSNEVCNREDKRTIAPEHVLKALEVLGFGKYMGELYAAYEQHKIETLQDSLKGGKWSNGAEMTEEEAVAEQQRMFAEARAKMN

SEQ ID NO: 81984 - protein, 203 aa, Gossypium hirsutum
  Clone ID: GOSHI-09MAY01-C14808_1.pep
PTRSRVSTEIEKKKKKKKKKSNENEDAIEAIAVVDGAIDVESDEIEKKTKKKKKKKKKKENEEAIEAIAVVDGAIDARAEDVEKKKKKSNENEDAIEAIAVVDGAIDVGSDEIEKKKKKKSNENEDAIEAIAVVDGAIGVGSDEIEKKKKNKENDEAIEAIAVAVVDSAIDAGVMKLKRRKRRRRRRTKRMRRLLPLLMVQLM

SEQ ID NO: 81985 - protein, 231 aa, Gossypium hirsutum
  unsure (1)..(231): unsure at all Xaa locations
  Clone ID: GOSHI-09MAY01-C14468_1.pep
PKPSPPIPIHIPQHLLRHLNDIRATINHLTASTSDPKRTSPVPHDLILHSQVAPIASSCHRHPYLLRRYMNYTPFSTCPYDLDLQETLILNGCHPLPRRRCFSKTPPKPTSSLPLNPFPTALPDSSVIWTKYSCKSFACLLQNNPIDFDLNARRSSLLKYASELDLPVYRFMQLAXSAYFVIRLGIDIGGGTGTFAALRKIFYNVTMLTTTLNVYAPFNEAAAARGLMPLH

SEQ ID NO: 81986 - protein, 124 aa, Gossypium hirsutum
  Clone ID: GOSHI-09MAY01-C14418_1.pep
GFDLALGRRCHPAAPPPWTMVGAAQNGLFSPVTCLKAKPSQPTDREKNVSLFPLLGPILGTVRRTRTTQPRRILGKLCASSSWYGGPLFLLSRFIIKNKKKLENEKKTSKENQNQYFQTSVLLF

SEQ ID NO: 81987 - protein, 128 aa, Gossypium hirsutum
  Clone ID: LIB3189-035-P1-K1-H2.pep
KQKNQTKSIKVQNLQSMFYKYLGPIYNMHSPNQNYPNPIKTQLQSPKQINPSPLLTFSESKRTLATFAFSRHSVPCAPHVSKAFSSRYHRPLRVFKILRGCVVRVLLTGPKIVPKRGKRETFFSRSGG

SEQ ID NO: 81988 - protein, 325 aa, Gossypium hirsutum
  Clone ID: GOSHI-09MAY01-C14428_1.pep
FWNTLLVFLTLWLFPTPCSAVLHAYTNSLPSTLLTSTVQTAREPDLPYSPFPVTQSMPTRYSNATSSISGPTISMPEALRATGISAAQPTQQSLPGASVATGPALPQHLAMHPFSQPTLPLGHFANMISYPFLPQSYTYMPSAFQQTFTGNSNYPQSLAAVLPQYKNSVSVSSLPQSAAIASGYGFGSSTNIPGGLPLNPPTAPAGTTIGYDDILSSQYKDSNHLMSLQQTENSAMWVHGPGSRTMSAVPGSNYYSFQGQNQQGGGFRQGQQPSQHFGALGYPNFYHSQTGVLGDHQQQNPMDGSLSGSQGQPSKQTQQLWQNNY

SEQ ID NO: 81989 - protein, 71 aa, Gossypium hirsutum
  Clone ID: GOSHI-09MAY01-C14738_1.pep
VLGHSRFSWARALLGLYKFYLARFGFLAKDCFMICHQFEGPKVLKMIFTLLWTRVAFNRPSFGFVRGHQFD

SEQ ID NO: 81990 - protein, 142 aa, Gossypium hirsutum
  Clone ID: GOSHI-09MAY01-C14728_1.pep
MADSTPLLSHCDKPAEPKRPPRSLDETIEGCIGDFGWWQFLQAILVSLAWVFDAQQTFISVFTDAEPSWHCTQGGDESVCNSLSNICELPKNSWSWDWPSHTSIIAEWGLECAPSFFTGLSPSPFLLGLLLLGTWHFLRLVD

SEQ ID NO: 81991 - protein, 177 aa, Gossypium hirsutum
  Clone ID: GOSHI-09MAY01-C14698_1.pep
MFNQWAAPHTPKPTKAPRPPVYEMNERHRSSPAVLKLSQKPVNSLGDLVPFTNKLYSGDLQKRVGITAGLCVLIQHVPEKKGDRYEAIYSFYFGDYGHLSVQGPYLTYEDSYLAVTGGSGIFEGAYGQVKLHQIVFPMKLYYTFYLKGIGDLPTELLGKPVPPSPAVEPSAAAKATE

SEQ ID NO: 81992 - protein, 144 aa, Gossypium hirsutum
  Clone ID: LIB3135-024-Q1-K1-G11.pep
GARVRPLVRPLVRASTTCLKPSPCIILPSQSHRALASNFSYSKPFPFHGLNLSSVTETSSFTSSRSSNPFTTTAFFFNKFKQEAAPHTPKPTKVQELHVYEMNERDRSSPAVLKLSQKPVNSLGDLVPFTNKLYSGDLQKRVGI

SEQ ID NO: 81993 - protein, 91 aa, Gossypium hirsutum
  Clone ID: LIB3189-043-P1-K1-H11.pep
LPISLIQSLFPSMASTSHRSLKPVPSPHQDPPTPSLPLPSSSTSSSRRPLHILPSPVSTLPDCSFSYSISNLYLIDFNVWGFSKSSRATRL

SEQ ID NO: 81994 - protein, 110 aa, Gossypium hirsutum
  Clone ID: LIB3145-044-Q1-K1-G7.pep
HKHHHLPSLRFGSVSMASTTSLKPIPSINLPSQSHRALASNFSYSKPFPFHGLNLSSVTETSSFTSSRSSNPFTTTAFFFNKFKQEAAPHTPKPTKVQELHVYEMNERDR

SEQ ID NO: 81995 - protein, 148 aa, Gossypium hirsutum
  unsure (1)..(148): unsure at all Xaa locations
  Clone ID: GOSHI-09MAY01-C14618_1.pep
MEIIETQTAVSNFEPFYNMSSSSENNGGGFEMSSLIDGRDYSGENHAHGGGHGGVFRHSNAAAVKVQKVYRSYRTRRRLADSAVVAEELWWQALDYARLNHSTIAFFDNLKPETAASRRHRVLLNASKIRQGLAGDAKAQKLAFXHWI

SEQ ID NO: 81996 - protein, 142 aa, Gossypium hirsutum
  Clone ID: GOSHI-09MAY01-C14628_1.pep
MGRVRTKTVKKSSRHVIERYYSRMTLDFHTNKKIIEEVAIIPSKRLRNKIAGFSTHLMKRIQKGPVRGISLKLQEEERERRMDFVPDESAIKVDQIEVDKETLDMLSVLGMADIPGLVKVDPVAVAVPQIGFGRGGGPGRRF

SEQ ID NO: 81997 - protein, 139 aa, Gossypium hirsutum
  Clone ID: LIB3829-016-Q1-K6-A11.pep
PATSPPPLRTMGRVRTKTVKKSSRHVIERYYSRMTLDFHTDKKIIEEVAIIPSKRLRIKIAGFSTHLMKRIQKGPVRGISLKLQEEERERRMDFVSAESAIKVDQIEVDKETLHMLFGCTAMACILPEPLLQVRYRCVC

SEQ ID NO: 81998 - protein, 60 aa, Gossypium hirsutum
  Clone ID: LIB3493-039-P1-M1-H7.pep
YYTHLMKRVQGGPVRGISLKLQEEERERLMDFVPYESVIKVDQIEDYDETLVMLSVLGMD

SEQ ID NO: 81999 - protein, 114 aa, Gossypium hirsutum
  Clone ID: LIB3189-043-P1-K1-A4.pep
RYYFFMTLDSHTRVNIIEEAAVNPTKRIRNKIAICYTHVMKRIQKGHRRGIYFKLQQEDRERRMDFVLNVSTIKLDQIEVDKETLDMISVLGMADIAGLVNHDPLAIAVPQTMI

SEQ ID NO: 82000 - protein, 357 aa, Gossypium hirsutum
  Clone ID: GOSHI-09MAY01-C14198_1.pep
FVLMLGTRRLPFPAFAFDLIHCSRCLIPFTAYNATYFVEVDRLLRPGGYLVISGPPVQWPKQDKEWTDLQAVARALCYELIAVDGNTAIWKKPDGVSCLPNQNEFGLELCDGSNDPSNAWYFKLKKCVTSTSSVSGEYAIGTIPKWPDRLTTAPSRALVMKNGIDLFEADTRRWARRVAYYKNTLNLKLGTPAVRNVMDMNAFFGGFAAALVSDPVWVMNVVPARKPLTLGVIYDRGLIGVYHDWCEPFSTYPRTYDFIHVAGIESLIKLPGSSKSRCNLVDLMVEMDRMLRPEGTVVIRDSPEVIDKVARIAHAVRWSATINDREPESHGREKLLVATKTFWQLTSSSSLRQTCSL

SEQ ID NO: 82001 - protein, 172 aa, Gossypium hirsutum
  unsure (1)..(172): unsure at all Xaa locations
  Clone ID: AI055434.1.pep
IPFTAYNATYFIEVDRLLRPGGYLVISGPPVQWPKQDKEWADLQAVARALCYELIAVDGNTVIWKKPDGDSCLPNQNEFGLESCDESNDPSNAWYFKLRRCVTSTSSGNGEYPGGIIPKWPKRLTRTSXQALGLKNGMDLFXGRPGRWTWRVAYYXDTLNLKLGVSSRNVWT

SEQ ID NO: 82002 - protein, 199 aa, Gossypium hirsutum
  Clone ID: GOSHI-09MAY01-C14158_1.pep
MAVTIKRAALIVASLGVLSFIFGVIAENKKPAAGTPISGKDVVICKYPSDPSVVLGYLSVAFLILSTLTGYWSLFYPYKGKSVPQSVLFRNTSFFVFFNIALFTGGLAATLLLWPTITEHLHLIRNVHHNLSTECPTAKTGLLGGGAFVSLDSALFWLVALMLADNAREDHFDELEKDRKVEHAQVLASAEYHVKGGAV

SEQ ID NO: 82003 - protein, 87 aa, Gossypium hirsutum
  Clone ID: GOSHI-09MAY01-C14138_1.pep
MVRLSKWLLKEAGTGVNNTLSEILVCPLSKQALRVCEEPPSLISDSIGVSFPIKDGIPCLVPTDGKILDTDDTMKHDNAADDSANNK

SEQ ID NO: 82004 - protein, 53 aa, Gossypium hirsutum
  Clone ID: GOSHI-09MAY01-C14048_1.pep
MSEAECPLLNQMRMPEIQLGAHTVRSHGVKVARTHMHDWIILLLLNVIEVILN

SEQ ID NO: 82005 - protein, 81 aa, Gossypium hirsutum
  Clone ID: uC-gsronu33B087a08b1.pep
KRKILFPDAINIQRDSDFKASRKQRNNNNKREYNALFSSLLTEKLRSFLRSDRYSQTKVKFSDVRMPEIQLGAHTVRSYGG

SEQ ID NO: 82006 - protein, 83 aa, Gossypium hirsutum
  Clone ID: GOSHI-09MAY01-C14018_2.pep
QNTYQQYLAAKELKKQSWRYHRKYNTWFQRHEEPKIATDEFEQGTYVYFDFHIANDDHQHGWCQRIKTEFTFEYNYLEDELIC

SEQ ID NO: 82007 - protein, 166 aa, Gossypium hirsutum
  Clone ID: GOSHI-09MAY01-C14018_1.pep
TNSGGMHDQLYNMQMLEAAYYKIPQPKDSERGGGYTPKHPAATPASYPQVQAPIVNNPAFWERISMDGYGTGTDTLFVAFYYQQNTYQQYLAAKELKKQSWRYHRKYNTWFQRHEEPKIATDEFEQGTYVYFDFHVANDDHQHGWCQRIKTEFIFEYNYLEDELIV

SEQ ID NO: 82008 - protein, 52 aa, Gossypium hirsutum
  Clone ID: LIB3829-018-Q6_N6-B6.pep
ELKGPLIGCHRFGQGTYIVLIFAWQIMATNMDGVRESRLSSSLSITIWKMNL

SEQ ID NO: 82009 - protein, 270 aa, Gossypium hirsutum
  Clone ID: GOSHI-09MAY01-C14008_1.pep
PRVRPASAQRPGKIKFNEDLVHPTRTRHGHPAFLCYRDLYVIIESEDIIHKVAIPPKSFLLVQNDQYVESEQVIAEIRAGTYTLNLKERVRKHIYSDSEGEMHWSTDVYHSPEFTYSNVHLLPKTSHLWILSGGSYKFSVVPFSLHKDQDQISIHYLSAERRYISRFSVNNDQVRHNLFSSDFSDKKEERIYDYSELNRIIGTGHCDFIYSAILHENADLLAKRRRNRFIIPFQLIQDQEKELMLHSHSGISMEIPINGIFRRKSILCFF

SEQ ID NO: 82010 - protein, 184 aa, Gossypium hirsutum
  unsure (1)..(184): unsure at all Xaa locations
  Clone ID: GOSHI-09MAY01-C14028_1.pep
MEATNPNPSSMSGVAAASAAELLCCANARALLDSVDAFLFDCDGVIWKGDKLIDGVPQTLDMLRSKGKKLVFVTNNSTKSRIQYANKFQSLGLSVNQDEIFSSSFAAAMYLKVNQFPPHKKVYVICGEGIXQELQLAGFTALGGPKXKKRAQWKSNGSLSMDKSLDKWWWINQILLFQTQYCDL

SEQ ID NO: 82011 - protein, 327 aa, Gossypium hirsutum
  Clone ID: GOSHI-09MAY01-C14388_1.pep
TSTSEQWDLSNPFIQMPGNLMEGGGSKKYHVALTATDAPYSQWQCRIMYYWYKKVKEMPGSDMGKFTRILHSGKPDNLMEEIPTFVVDPLPQGLDRGYIVLNRPWAFVQWLEKAMIDEEYILMAEPDHVFVNPLPNLARGKHPAGFPFFYIKPSDHEHVIRKYYPEEKGPVKNIDPIGNSPVIIRTSVLEKIAPTWMNISLRMKDDPVTDKAFGWVLEMYAYAVASALHDVHHILHKDFMLQPPWDTEVGKKFIIHYTYGCDYNLKGELTYGKIGEWRFDKRSYLSGPPPRNLSLPPPGVPESVVRLVKMVNEATEDIPNWDTLNRG

SEQ ID NO: 82012 - protein, 190 aa, Gossypium hirsutum
  unsure (1)..(190): unsure at all Xaa locations
  Clone ID: GOSHI-09MAY01-C14348_1.pep
DAWASTKKNWPKLPLGIRLLIAAHSMSVDAFSRYDGNAVNRRLMNLFDPKASPSRKPDNGVVSSDVVVDTTRKLWFRLYSNTTTAGKMSIPIIVYFHGGGFAYMAANSMNYDDLCKRLAREIPAVVVSVNYRLSPEHRYPSQYEDGFDVLKFIDNPDFEGFSAFGNTDTSSKKAFFXAGDSAGGNLAHHV

SEQ ID NO: 82013 - protein, 194 aa, Gossypium hirsutum
  Clone ID: GOSHI-09MAY01-C14368_1.pep
PAVSNDLTAAKVDVKVTPGMEAAKRYISSLSTSASTAQLANHGLVVIPFLSAFVSLKVLNLSGNAIARITAGALPRGLHMLNLSRNNISTIEGLRELTRLRVLNLSYNRIFRIGHGLASCSSLKELYLAGNKISEGEGLHPLFKLTVLHLRFNKISTAKCLGQLAANYNSLQAIGLEGNPAQKNVGDENLKKHL

SEQ ID NO: 82014 - protein, 144 aa, Gossypium hirsutum
  unsure (1)..(144): unsure at all Xaa locations
  Clone ID: GOSHI-09MAY01-C14328_3.pep
PNAASDVPSMKCIADRVDGGDLLNGNKMWCTNGPVAQTLAAYAKTDVTAGSXGITAFIVEKGIPGYTTAHKLDKLAMRGSDTCELVFENCFIPQENVLGKEGKGVYVLTSGLDLERLVLSAGPIGIMQACLDVVLPYIRERSQF

SEQ ID NO: 82015 - protein, 183 aa, Gossypium hirsutum
  unsure (1)..(183): unsure at all Xaa locations
  Clone ID: GOSHI-09MAY01-C14328_2.pep
MRRIIAASSFCSKILRKERQRAFFSSTSLLFDETQLQFKESVRQFAEENIAPHASKIDQSNSFPKEVNLWKLMGDFNLHGITAPEEYGGLGLGYLYHCIAMEEISRASGSVGLSYGAHSNLCINQLVTNXTPAHYERCLPQLIRAEHVXALAMSEPDAGSDVVTMYRKADRIEAGSLIDCYSM

SEQ ID NO: 82016 - protein, 271 aa, Gossypium hirsutum
  Clone ID: GOSHI-09MAY01-C14328_1.pep
MMAERSFCSKILRKERQRAFFSSTSLLFDETQLQFKESVRQFAQENIAPHASKIDQSNSFPKEVNLWKLMGDFNLHGITAPEEYGGLGLGYLYHCIAMEEISRASGSVGLSYGAHSNLCINQLVRNGNPAQKEKYLPKLISGEHVGALAMSEPNAGSDVVSMKCKADRVDGGYLLNGNKMWCTNGPVAQTLVVYAKTDVSAGSKGITAFIVEKGIPGYTTAQKLDNTWHARIVFMCACSLRIVFISLCYLDFSYIAYVCSLLLFLLFLLFM

SEQ ID NO: 82017 - protein, 201 aa, Gossypium hirsutum
  unsure (1)..(201): unsure at all Xaa locations
  Clone ID: GOSHI-09MAY01-C114270_1.pep
YIPTRFFRMLFNKLVRDFHNYPAVWGLVQTILSYGFGGDSSNWVGVLGLPHYNMNDMPGLSFRVIHHLAQIKRTKKFRMYDFGSKAVNMEVYGSPEPIDLGEYYSLIDIPVDLXAGKKDQIITSSMVKKHYRLMKDSGVDVSYNEFEYGHLDFTFAHHEELLAFVMSRLLLVEPDLKRQSSPKEALKLKKTGQARSGVSSD

SEQ ID NO: 82018 - protein, 194 aa, Gossypium hirsutum
  Clone ID: GOSHI-09MAY01-C14278_1.pep
MATPQFLSSFRYSDSLTVVAISFCTAIVCEAISWLLIYRTNSYKSLKSSIDKAAKKLEIMKTDQNPSKLSTKKSKTKKIDRVETSLKESSRDLSLFKFKSGAVVALVLIVVFGFLNSLFEGKVVAKLPFKPIGIVMKMSHRGLKGDDSTDCSMVFLYFLCSISIRTNLQKFLGFSPPRGAAGAGLFPMPDPKTN

SEQ ID NO: 82019 - protein, 261 aa, Gossypium hirsutum
  unsure (1)..(261): unsure at all Xaa locations
  Clone ID: GOSHI-09MAY01-C15988_1.pep
DVSDIVLLDVSPLSLGLETXLGGVMTKIIPRNTTLPTSKSEVFSTAADGQTSVEINVLQGEREFVRDNKSLGSFRLDGIPPAPRGVPQIEVKFDIDANGILSVTAVDKGTGKKQDITITGASTLPNDEVDRMVKEAEKFSKEDKERRDAIDTKNQADSVVYQTEKQLKELGDKVPGPVKEKVEAKLQELKDAIAGDSTQGMKDAMAALNQEVMQLGQSLYNQPGAGGSSAGPAPGGETGPSDSSNKGPEGDVIDADFTDSK

SEQ ID NO: 82020 - protein, 54 aa, Gossypium hirsutum
  Clone ID: GOSHI-09MAY01-C15918_12.pep
KRLKNHKGLLASIFNPRLGFRVPAFPIVPTWSLESKQLIINPPPLSMLIIISLF

SEQ ID NO: 82021 - protein, 160 aa, Gossypium hirsutum
  unsure (1)..(160): unsure at all Xaa locations
  Clone ID: GOSHI-09MAY01-C15918_9.pep
AASIFQNCMPLLREPXPDQTGLVPAQGRIDLGPNSPFVLQNCTISAAPDYIQVKDTNKAYLGRPWKQFARSIIIQSRIDDIIQPEGYAPMTGTIEXRHFFHCRVWKQGPGADTSRRVAWKGIKKIDINEPNKWTPRVFLESETGMPSSGIPYSPDMVPGV

SEQ ID NO: 82022 - protein, 169 aa, Gossypium hirsutum
  Clone ID: GOSHI-09MAY01-C15918_7.pep
GRVGGRVGGRVGGPVRKRKLLRENSMDLTPNVAVAKDGSGKYDCITEALAEAPLNSCDRFVIHIKAGTYKEKILVTKEMTNVMSLGDGPTETIITNCVNCCKDNVKTFNTATVGVDGAGFMAKGIGLDNPAGPEGHQAVAFRASCDMVDMFNCHFTGYQDTLYAHKEKQ

SEQ ID NO: 82023 - protein, 294 aa, Gossypium hirsutum
  unsure (1)..(294): unsure at all Xaa locations
  Clone ID: GOSHI-09MAY01-C15918_6.pep
MANNVAVIGICSVFLVAVVVAVVVGVTQTQTKEESDSKSNSISSSNKAVQAVCQPTHFKDACEKSLASSNSTDTKELIRPSSQAAIXEVRKVLANPTTIQDLIKDDYNGEALKVCQEVLDLSIDDLQLSFDKMGEYDVSKIDDYLLNLTVWLTGALTTQQTCVDTFAGKRCNISARETLHGMLTRSIALYHESLKLSTVLKDLNIPCLAGINTTGFERKLLSNDGPEWMGHAERKLLQAPIIKPDVVVAKDGSGKYDTITKALEEVPKISPNRFVIHINAGIYKEYINVTKQMT

SEQ ID NO: 82024 - protein, 251 aa, Gossypium hirsutum
  Clone ID: GOSHI-09MAY01-C15918_5.pep
MANNAIIGICAVFLVALVVAVVVGPPLRKTKSDGEEISSSNKAVQALCQPTNYKETCQKSLASSNSSDVKELIRTGFQAGLVEIKNVLARSVTVQELIKDENNKAALGVCQEVLDLAIDDFQKSFDMLGEYDMSKIGKYLLELKTWLSGAFTSQQTCIDSFAQSSNESSQKMQSILKTSMEITSNALAMLNGLSTIVKELNIPNVGNIDTTGVNRKLLSAEDMPEWISQADRKLLQAKPMDLKPNVVVSKD

SEQ ID NO: 82025 - protein, 231 aa, Gossypium hirsutum
  Clone ID: GOSHI-09MAY01-C15918_4.pep
PNRRFDPRVRPRVRTAGPEGHQAVAFRATSNKVIMFNCHFNGYQDTLYPHKGQQFYRDCVISGTVDFIFGDSASVFQNCLIIVRKPGENQHNMITAPGRQYIDTDSALVLQNCTITGAPDYLPVKDKSKTYLGRPWKPLARAIIMQSTIEDIITPEGYAPMDGTKGLDTAYFAEFENKGPGAKTEGRVTWPAIKKIDTNEAKKWTPGVFLGSDQWVPQAGIPYYTDMVPVV

SEQ ID NO: 82026 - protein, 162 aa, Gossypium hirsutum
  Clone ID: GOSHI-09MAY01-C15918_3.pep
MRRSVFPKLSDRREGKPGENQHNMVTAHGKKEEETNTAIVLQNCTISGAPDYLPVKDKNKTYLGRPWKQFATTIIMQCQIDDIITPEGYSPMEGTVGLDTGYFAEFQNRGPGANTEGRVTWKAIKKIDMDEAMKWTPRVFLQSDEWLAQTGVPFDPDMTPGV

SEQ ID NO: 82027 - protein, 564 aa, Gossypium hirsutum
  Clone ID: GOSHI-09MAY01-C15918_2.pep
MANNVAVIGICSVFLVAAVVAAVVGVTHLKNNGDSKSGEISSSTKAVQTVCQPTQFKEACEKSLESSNSTDPKELIRTSFQAAIEEIRKVLANSATIQDLNKDDNNKAALKVCKEVLDLSIADLQLSFDKLGGYEMSKIGDYLLNLRVWLSGALTTLQTCVDSYAEVNNEQAEKMNSILKTSMELTQNSLTMVTKLSTILNDLNIPGLNIDTTGFERKLLSNDGPEWMGHAERRLLQAKPTDLKPNVVVAKDGSGKYDTITKALAEVPLKSPNRFVIHIKAGTYKEKILVTKEMTNVMFIGDGPTKTIITNDLNCIKDHPLKTFDTATVGVDGAGFMAKGIGFENSAGPDGHQAVAFRASCDKVVMFNCHFTGYQDTLYAHKEKQFYRDCLISGTVDFIFGDAASVFQNCQIIARKPGENQNNMITAHGRKFPYTHSAIVLQNCTISGAPDYLPVKDKSKTYLGRPWKALARTIIMQSNIDDIITPEGYSPMEGTVGLDTGYFVEFQNRGPGAKTEGRVKWPAIKTIDINEAKKWTPGVFLETETDKWISQTGTPCYPDMVPGV

SEQ ID NO: 82028 - protein, 478 aa, Gossypium hirsutum
  Clone ID: GOSHI-09MAY01-C15918_1.pep
ILYITFCPSEILLVLRDEFCDAALGVCQEVLDLAIDDFQKSFDMLGEYDMSKIGKYLLELKTWLSGAFTSQQTCIDSFAQSSNESSQKMQSILKTSMEITSNALAMLNGLSTIVKELNIPNVGNIDTTGVNRKLLSAEDMPEWISQADRKLLQAKPMDLKPNVVVAKDGSGKYDTINKALAEVPVKSPDRFVIHIKAGTYKEKINVTKQMTNVVFIGDGPTKTIITNDISVAKNPPVRTYRTATVGVDGAGFMAKDIGFDNSAGPEGHQAVAFRATADRVIMFNCHFTGYQDTLYAHRERQLYTNCLITGTVDFIFGDAASIFQNCMLIVRKPGPGQNCMVTAQGRNDLGTNSAIVLQNCTISGAPDYIPVKDTNKAYLGRPWKQFARSIIMQSQIDDIIQPEGYAPMTGTIGIDTSFIAEFGNRGPGADTSRRVAWKGIKKIDINEANKWTPRVYLESETWIPSSGVPYSPDMVPGV

SEQ ID NO: 82029 - protein, 125 aa, Gossypium hirsutum
  Clone ID: LIB3828-012-Q1-N6-C7.pep
RLYIDAESALVLQNCTITGALDYLPVKDKSKTYLGRPWKPLARAIIRRSTIEDIITPEGYAPMDGTKGLVTAYFAEFEGKGPGAKSEGRVTWPAIKIIESNEAKRWTPGVFLGFDQWVPRAGIPY

SEQ ID NO: 82030 - protein, 112 aa, Gossypium hirsutum
  Clone ID: LIB3828-007-Q1-N6-A11.pep
DYLPVKDKNKTYLGRPWKQFATTVIMQCQIDDIITPEGYSPMEGTVGLDTGYFAEFQNRGPGANTEGRVTWKAIKKIDMDEAMKWTPRVFLNSDEWLAQIGVPFDPDMTPGV

SEQ ID NO: 82031 - protein, 114 aa, Gossypium hirsutum
  Clone ID: LIB3145-030-Q1-K1-H1.pep
RYLETHSYQLLVVCTAFVELDISPLFESPLFFKCVTPTTAATTAVTNNTEKIPITATLFAIVFYLLLTSPQKIIKFSFFFPLKQISNRDRKRKKEKLFEVVGMLIAGRVGGRVG

SEQ ID NO: 82032 - protein, 233 aa, Gossypium hirsutum
  Clone ID: GOSHI-09MAY01-C15908_1.pep
MADPVVASHLSLVLKAPPTISSPSQFLLQQHSKPMASSLNSAASLRLFASSSSSSSSAAARLSLRSTSLSFSSSLKSLAFSTLSRHKRGSAVSVSSTGGFSSVASPKCAASDPDQLKSAREDIKELLKSKFCHPILVRLGWHDAGTYNKNIEEWPRRGGANGSLRFEVELKHAANAGLVNALNLLQHIKDKYSGVTYADLFQLAIATAIEEAGGPKIPMKYGRVDVSGPNECP

SEQ ID NO: 82033 - protein, 327 aa, Gossypium hirsutum
  unsure (1)..(327): unsure at all Xaa locations
  Clone ID: GOSHI-09MAY01-C15928_1.pep
MMMMTMEGMMDQGVLDDIIRRLLEGKGSKQVQLSEGEIRQLCVNARQIFLSQPNLLQIHAPIRICGDIHGQYQDLLRLFEFGGYPPATNYLFLGDYVHRGKQSLETICLLLAYKIRYPDKVFLLRGNHEDAKINPIYGFYDECKTRFNVRLWKIFTDCFNSLPVAALVDEKILCMHGGLSPELENLDQIKEIQRPTEVPDNGLLCDLLWSDPDPKIEGWADSDRGISSTFGADVVAESLDKSDLDLICRGHQVVEDGYKFFAXRRLVTIFSAPNYGGEFDNAGALLSVNEDLVCSFEILKPADNKSLPSGSKPLKKHHQRWGRFDVP

SEQ ID NO: 82034 - protein, 140 aa, Gossypium hirsutum
  unsure (1)..(140): unsure at all Xaa locations
  Clone ID: GOSHI-09MAY01-C15808_1.pep
MGENERTMNNIEGMGVAERSRANHNYSGEDEDDDNITSFSFPSVKSSPRNASSKYDFVKVRVWLGDNADHYYPLSRFLLSRMLTVTKIPNHVAIKIXLSLKKLLIDNSPFGCLTRLDLEVNLFKLMERRGYWEEFINGSR

SEQ ID NO: 82035 - protein, 170 aa, Gossypium hirsutum
  Clone ID: GOSHI-09MAY01-C15588_1.pep
MEELKSAVEEHMELMADLVQKLSSELRSGLRPAYDNFMGFFHAIDWKEPWLMCLLAFHVFLLIVTIFSRKNTNFQMCLFLLALLGVYFAELLNGFLGDNWKKFANQNYFDPSGLFLSVLWSGPLLIIAIIILINTLFSMCYLIVRWKKAELQHRAWLARNSRMNMPSSAL

SEQ ID NO: 82036 - protein, 91 aa, Gossypium hirsutum
  Clone ID: GOSHI-09MAY01-C15558_1.pep
LISESSSKPISQICVPKVFILVCGRSSLYIEGLGGNVVMVCQAASQTRFRALKYENGIAGSATIVVRVIACFQPLQDCQAEYFRHLLKPVT

SEQ ID NO: 82037 - protein, 293 aa, Gossypium hirsutum
  Clone ID: GOSHI-09MAY01-C15548_1.pep
FSSNGNPHGTGCPLVLSDNAPAGIQGARHAQFGLSVSDLHLNNKLQSGLFLPGFQRFDPHSRISDGIMMARRPNGTDNLSCLLTIGNSNVNDKSGNTKRHQFLLFGQPILTEQQLSRSCSSEVVSQVINGNSSLDGSAEKTKDTSDGSRSSLEKSSTAGFLWHQDYRSTETGLDIGHCKVFLDSEDVGRTLDLSVVGSYEELYRRLANMFGIERSKMLGHVLYRDATGAVKQTGEEPFRYQFEKPVHLFRSFNLPLGLYLHNLPMLYCSAFMKTAKRLTIRMDSSNETVARSW

SEQ ID NO: 82038 - protein, 117 aa, Gossypium hirsutum
  unsure (1)..(117): unsure at all Xaa locations
  Clone ID: GOSHI-09MAY01-C15458_1.pep
MAELKSDNLLEMMKFHLGTDAGKELTKKIGLVYQLNIAPKKLGVDEVTYVVDLKKGDVIKGEYEGGKPDVIFSFKDDDFLKIATGKMNPQVAFMRGLMKIKGSLSLAQIFTXPDFFP

SEQ ID NO: 82039 - protein, 528 aa, Gossypium hirsutum
  Clone ID: GOSHI-09MAY01-C15788_1.pep
MDPEFGKSLDTSKKDSWRTSLLLAYQSLGVVYGDLSTSPLYVYKSTFAEDIQHSETNEEIFGVLSFVFWTLTLVPLFKYVFVVLRADDNGEGGTFALYSLICRHARVSLLPNRQVADEALSTYKLEHHPEKRSSSRVKLYLEKHKVLHTALLILVLLGTCMVIGDGVLTPAISVFSAVSGLELSMSKEHHQYAVIPITCFILVCLFALQHYGTHRVGFFFAPIVLTWLLCISSLGIYNIIYWNPHVYQARSPYYMFKFLKKTRKGGWMSGGGILLCITGSEAMFADLGHFSYPAIQTAFTFLVYPALILAYMGQAAYLSQHHHTSYQISFYVSVPESVRWPVLIIAILASVVGSQAIISGTFSIINQSQSLSCFPRVKVIHTSDKIHGQIYIPEINWVLMILCIAVTIGFRDTKHMGNASGLAVMTVMLVTTCLTSLVIILCWHKPPIGALFFLLFFGSIELLYFSASLTKFTEGAWLPILLALFLMTIMFVWHYATIKKYEFDLHNKVSLEWLLALGPSLGIARVPG

SEQ ID NO: 82040 - protein, 152 aa, Gossypium hirsutum
  Clone ID: LIB3145-008-Q1-K1-F10.pep
GLENPGRARRPRGSDKIHPHIYIPEINWVLMILFIAVTIAFRDTKHMGNASRLAVMTVMLVTTCLTSLVIILCWHKPPIVALFFLLFFGSIELLYFSASLTKFTEGAWLPILLALFLMTIMFVWHYATIKKYEFDLHNKVSLEWLLALGPSL

SEQ ID NO: 82041 - protein, 177 aa, Gossypium hirsutum
  Clone ID: GOSHI-09MAY01-C15698_1.pep
MAEASKVIHVRNVGHEISENDLLQLFQPFGVITKLVMLRAKNQALLQMQDIPSAINAMQFYTNVQPTIRGRNVYVQFSSHQELTTMDQNAQGRGDEPNRILLVTIHHMLYPITVEVLHQVFSPHGFVEKIVTFQKSAGFQALIQYQGRQNAISARTSLQGRNIYDGCCQLDIQFSNL

SEQ ID NO: 82042 - protein, 134 aa, Gossypium hirsutum
  unsure (1)..(134): unsure at all Xaa locations
  Clone ID: GOSHI-09MAY01-C15678_1.pep
MGASLPPKEANLFKLIVKSCETKQYKKGLKAADAILKKFPDHGETLSMKGXLTLNCMDRKTEAYELVRLGLKNDLKSHVCWDVYGLLYRSDREYREAIKCYRNALRIDPDNIEILRDLSLLQVCRPFLFCNSYF

SEQ ID NO: 82043 - protein, 55 aa, Gossypium hirsutum
  Clone ID: GOSHI-09MAY01-C15638_1.pep
EWVLYTLSRMIEVKEIGEGCDPSYDDIFKEARDKIYVDLKFTLPGKERQDSVHSG

SEQ ID NO: 82044 - protein, 111 aa, Gossypium hirsutum
  Clone ID: GOSHI-09MAY01-C15198_1.pep
MAMVSMKFFVPSLNSPNLRPTKRYSGMAVAASNQDAVALGVTVTQGEGNLPKLLLTSDHGSEAEIYLFGGCITSWKVPSGRDLLFVRPDAVFDKKKPISGGIPHCFPQFGP

SEQ ID NO: 82045 - protein, 157 aa, Gossypium hirsutum
  Clone ID: GOSHI-09MAY01-C15108_1.pep
MAPKRSNPIEGPPAASSSEEDEEVTSSEEEEEGSSTEEEDEEDPKTESTPLIQKSPPPRKPETATPGVVNDESDESGSDSESESDTATPNVKPLATKPMEESLNAKKPRSNKPLTSPIRASSSKRPGELELDAKEAKRPKKKGGGRKGWLPHPRWRM

SEQ ID NO: 82046 - protein, 181 aa, Gossypium hirsutum
  unsure (1)..(181): unsure at all Xaa locations
  Clone ID: AI727005.1.pep
MAPRGGGGGEFPPASSSEEDEEVTSSEEEEEGSSTEEEDEEDPKTESTPLIQKSPPPRKPETATPGVVNDESDESGSDSESESDTATPNVKPLATKPMEESLNAKKPRSNKPLTSPIRASSSKRPGELELDAKXTKRPKNKVGEXRLATTPAVEEVKKTGEDAKKQLFHRLFSEDDEIALL

SEQ ID NO: 82047 - protein, 134 aa, Gossypium hirsutum
  Clone ID: LIB3585-033-P1-K1-H6.pep
TRQGKTLRRQSPHPVCLFFDGTKSVDPIEDRPAASSYEEDEEVPLSEEEEEGSTPVAEDEDDLKAELATLIQKSPPPRKPETATPGVVNDESDESGSDSESESDTATPNVKPLATKPMEESLNAKKLRSNKPLT

SEQ ID NO: 82048 - protein, 157 aa, Gossypium hirsutum
  Clone ID: GOSHI-09MAY01-C15058_1.pep
MASSRGGGSQQVIRTGDMEKMSLDQLKAVKEQADIEVNLLQDSLNNIRAATGRLENASAALHDLSLRPQGKKMLVPLTASLYVPGTLDDADKVLVDIGTGYFVEKTMAEGKDYCERKINLLKSNFDQLIEVASKKKTLADEAGLILQAKLKQSSPSS

SEQ ID NO: 82049 - protein, 102 aa, Gossypium hirsutum
  Clone ID: GOSHI-09MAY01-C15068_1.pep
MSLLPKSDSIHIREVWDDNVEEEFALIREIVDDYPYVAMDTEFPGIVLRPVGYFKSSYDYHYQTLKDNVGMLILGQLGLTFSDGMGAFPTCGTDKYCIWQFN

SEQ ID NO: 82050 - protein, 70 aa, Gossypium hirsutum
  Clone ID: uC-gsflmaxxa040c08b1.pep
SRVRFQTGSPRERERVKGKNFQEFSLSRTRLSVFVSLEKKTPKFPPIQDLCFLLQIESESFIKFLFWVLK

SEQ ID NO: 82051 - protein, 105 aa, Gossypium hirsutum
  Clone ID: GOSHI-09MAY01-C15398_1.pep
MGKQSKSGGCLGWLLAIVILALVVGAIVYAVKQKIDHANDNKPSPVPGPPGAIDKKYADALKIAMQFFDIQKSGKLVNNKISWRGDSGLKDGNEANLDLSKGMYD

SEQ ID NO: 82052 - protein, 164 aa, Gossypium hirsutum
  unsure (1)..(164): unsure at all Xaa locations
  Clone ID: GOSHI-09MAY01-C15248_1.pep
SKKILGLPTMVWRRKKGAFIELKERIIQKSKNWSXNLSFSGKDFLLXSILQALPIYVMQCFKLPILLCKELENLMSKFWWRNLKTNKDIHWCSWFAICSPKAFEGMRFRDLVTFNMALLAKXGWRLITQPVCLFACIMKLKYYLCGKFLNARLGAYPSFTWRSI

SEQ ID NO: 82053 - protein, 53 aa, Gossypium hirsutum
  Clone ID: LIB3147-031-Q1-K1-F2.pep
QRLIFMKLRGNLELTRKGSSQGSPVYSIGEQDSTGCYNMVKGQIKRVHSLEWL

SEQ ID NO: 82054 - protein, 140 aa, Gossypium hirsutum
  Clone ID: GOSHI-09MAY01-C15238_1.pep
MSPTLREIARESLEDHSRLTGGILGPTAASRKDKKGPKGHKASEIAKTKGVTSESEIGFGLPSVITQSEHGKAGETSKNNNLREGSHVEVLRDGDGLKVAWFPADILDLKDGKAYVCYNELRSEGELCACFMLNQLNGDC

SEQ ID NO: 82055 - protein, 271 aa, Gossypium hirsutum
  Clone ID: GOSHI-09MAY01-C16998_2.pep
IFLTSALGWCIEWLQAYFLVLDDIMDSSHTRRGQPCWFRLPKVGMIAVNDGVILRNHITRILKNHFRGKPYYVDLLDLFNEVEFQTAAGPVAERITTLEGEKDLSKYSLQQHRRIVQYKTAYYSFYLPVACALVMCGENLDNHIDVKNILVDMGIYFQVQDDYLDCFGNPETIGKIGTDIEDFKCSWLVVKALEICNEEQKKVLYENYGKPDPANVAKVKALYNELNLKGVFEDYESKSYERLVTSIEAHPSKPVQAVLKSFLGKIYKRQK

SEQ ID NO: 82056 - protein, 205 aa, Gossypium hirsutum
  Clone ID: GOSHI-09MAY01-C16998_1.pep
MADLRSAFLNVYSQLKSELLQDPSFEFTDDSRQWVERMLDYNVPGGKLNRGLSVIDSYRLLKDGKELTQDEIFLTSALGWCIEWLQAYFLVLDDIMDSSHTRRGQPCWFRLPKVGMIAVNDGVILRNHITRILKNHFRGKPYYVDLLDLFNEVEFQTASGQMIDLITTLEGDRIYQYYCTHRSMVIQDANIILIPGGALYGVKLA

SEQ ID NO: 82057 - protein, 136 aa, Gossypium hirsutum
  Clone ID: GOSHI-09MAY01-C16948_1.pep
MLLSVPLLLGLLGLAAAEPAVYFKEQFLDGDGWTSRWIESKHKSDFGKFVLSSGKFYGDEEKDKGLQTSQDARFYALSASFEPFSNKGQTLVVQFTVKHEQNIDCGGGYVKLFPNSLDQTDMHGDSEYNIMFGPDI

SEQ ID NO: 82058 - protein, 221 aa, Gossypium hirsutum
  Clone ID: GOSHI-09MAY01-C16978_4.pep
MMHRFISVRRLFSETKCSLPCQLRRRCFSQVARNEIDNRDDLVRKMPPFDYSPPPYTGPSADEILSKRKEYLSPSMFYFYTKPLNIVDGRMQYLFDDKGRRYLDAFGGIATVCCGHCHPDVVDAIVNQTKRLQHSTILYLNNAIADFAEALANKLPGNLKVVFFTNSGTEANELAMMIARLYTGCHDIISLRNAYHGNAAGTMGATAQSNWKFNVIQSGVH

SEQ ID NO: 82059 - protein, 155 aa, Gossypium hirsutum
  Clone ID: GOSHI-09MAY01-C16978_3.pep
PTRPVVPDIVTMAKGIGNGIPLGAVITTPEIAEVLTRRNYFNTFGGNPVCTAAGLAVLNVIEKEKLQDNAFVVGSYLKERLIALKDKHDLIGDVRGRGLMLGVELVPRLRPRSPALLETLHLGDQVKVEIGVLVGKGGFYGNVFRITPPKKKKKK

SEQ ID NO: 82060 - protein, 242 aa, Gossypium hirsutum
  Clone ID: GOSHI-09MAY01-C16978_2.pep
YAKDVQDLIQFGTSGNVAGFISEAIQGVGGIIELAPGYLPAVYSTIKKAGGLCIADEVQAGFARTGSHFWGFENHGVVPDIVTMAKGIGNGIPLGAVVTTPEIAEVLTRRSYFNTFGGNPVCTAAGLAVLNVIEKEKLQDNAFVVGSYLKERLIALKDKHDLIGDVRGRGLMLGVELVTDHELKTPAKLETLHVLDQMKEIGVLVGKGGFYGNVFRITPPLCFTTEDADFFVDAMDYTMSKM

SEQ ID NO: 82061 - protein, 375 aa, Gossypium hirsutum
  Clone ID: GOSHI-09MAY01-C16978_1.pep
MVHGSISPWRRVLSETTYSLRRGQFGRRRCFSLVAHTAELDKNNIDSVPKLPPFDYSPPPYTRPSAVDILSKRKEYLSPSMFYFYQKPLNVVDGRMQYLFDENRRRYLDAFGGDATVSSGHCHPDVVDAIVNQTKRLQHSTILYLNNAIADFAEALANKFPAIPRGGGGADSGTEANELAMMMARLYTGCHDIISLRNAYHGNAAGTMGATAQSNWKFNVIQSGVHHAINPDPYRGVFGSEGEKYAKDVQDLIQFGTSGNIAGFISEAIQGVGGIIELAPGYLPAVYSTIKKAGGLCIADEVQAGFARTGSHFWGFENHGVVPDIVTMAKGIGNGFPLGAVLTSPGFAAVLAPPLLLVSFVWAFLFVLFGGLGCL

SEQ ID NO: 82062 - protein, 88 aa, Gossypium hirsutum
  Clone ID: GOSHI-09MAY01-C16928_1.pep
MATLKEKLIAPVAEEEATVPNNKITVVGVGQVGMACAVSILGKSLADELALVDVLEDKLKGEMMDLQHGSLFLQTPKIVADKDYSGTC

SEQ ID NO: 82063 - protein, 113 aa, Gossypium hirsutum
  Clone ID: GOSHI-09MAY01-C16598_1.pep
STNFPKFLIKIKNFQSSSLSIFLISKQPLDSEYLPEDNLLFTASFSISVLISLFVISRKFLFGVIRVRFHQLIGSISINILASVCKDLIFFRFQDLKFQFVLSSRLICQLWYC

SEQ ID NO: 82064 - protein, 187 aa, Gossypium hirsutum
  unsure (1)..(187): unsure at all Xaa locations
  Clone ID: GOSHI-09MAY01-C16448_1.pep
MQIPTERKTGVYTYIGQWPIYSVAWSVRNDKRSRLAIGSFLEDYSNKVELVQFNLYTSDFTTDNRLVFDHPYAPTNLMFFPSEDTSNPDMIATSGDYLRLWEIHDDHIELKSLLNGNKSSEFSSAITSFDWADFDTRRVATSSVDTTCTIWDLESEAVDTQLIAHEQKLFDISWGGFXVFASVSGEG

SEQ ID NO: 82065 - protein, 312 aa, Gossypium hirsutum
  Clone ID: GOSHI-09MAY01-C16408_1.pep
MVESNFDKETVGCIRTTDTHSGNQGSGLRREPSFSRWADEDGIIHFEHPSESTAPSVEGSDFELPMLNQSGLDNGFVDGIRYGKFPEQRMHLNGGSAMEDLHGKDRNGKYTPFDVENEYVGDGRSSNISVDGANSTGSPKASSNSISTADVLKTLFFILVWYTFSTFLTLYNKTLLGDELGKFPAPLLMNTIHFAFQALLSNAITWYWSHRFQPSVAMSYRDYFYRVVPTALSTALDVNLSNVSLVFISVTFATMCKSAAPIFLLLFAFAFRLESPSFKLLGIIVVISIGILLTVARDTEFEFWGFIFVMLA

SEQ ID NO: 82066 - protein, 91 aa, Gossypium hirsutum
  Clone ID: LIB3825-019-Q1-N6-F8.pep
ICFLIFLFLLVLLTKIFFLCTLQCKSAAPIFLLLFAFAFRLESPSFKLLGIIVVISIGILLTVARDTEFEFWGFIFVMLAAVMSGFRWCMT

SEQ ID NO: 82067 - protein, 124 aa, Gossypium hirsutum
  Clone ID: LIB3083-009-Q1-L1-B8.pep
CYCYSSVDNIQGVFISGGYVPFDIENESALNIGSSDICDDGDIATGSPKALPLNSDSSISLVDVLKTLFFILVWYTFSTFLTLYNKTLFGDDLGKFPAPLLMNTVHFTMQAVLSKLITWYWSHK

SEQ ID NO: 82068 - protein, 182 aa, Gossypium hirsutum
  Clone ID: GOSHI-09MAY01-C16798_1.pep
MLSLQLFSANPKPTLLDSPLNPLLYPKCLKPPKPYPKSKPAPISSVLQWNRKPELAGETPRVVVITSGKGGVGKTTTTANVGLSLARLGFSVVAIDADVGLRNLDLLLGLENRVNYTVVEVLNGDCRLDQALVRDKRWSNFELLCISKPRSKLPIGFGGKALVLLVDALKAREEGSPIHTNR

SEQ ID NO: 82069 - protein, 368 aa, Gossypium hirsutum
  unsure (1)..(368): unsure at all Xaa locations
  Clone ID: GOSHI-09MAY01-C16698_1.pep
MSGFWLIDSMADWQQLLQSIFLGLIFSYLLAKLISLVVSFKDDNLSITRARSSNVQGYEKIDDSGSGSDPIGSTEHLGLHKSDSVVAELGSIRAESDGDGDGVDDDDDDWEGVECTELDDAFSAATAFXVAAAAADRLSQKVPNEVQLQLYGLYKVATEGPCTAPQPSALKMTARAKWQAWHKLGAMPPEDAMQKYIDVVTELYPSWAAGSAMGKGGADNASSKDVKGPMGPVFSSFVYEEESENDLKMDAIHTFAREGELDNLLKCIESGVSVHLQDSEGRTPMHWAVDRGHLKIAEALLSRNADVNAKDNEGQTPLHYAVMCEREDIAKLLVKQNADKDTKDNDGNSPVNLCDSDWPWLQRAGKAE

SEQ ID NO: 82070 - protein, 90 aa, Gossypium hirsutum
  Clone ID: GOSHI-09MAY01-C16608_1.pep
LLYTSNSCFPLTEYDLSSSTPICVKSTLIGRCVCNETKAVTFFVLFSSPFHLYFAVEKKNLSKPFFFFVPRSISQLPSTCISASIENFHQ

SEQ ID NO: 82071 - protein, 104 aa, Gossypium hirsutum
  unsure (1)..(104): unsure at all Xaa locations
  Clone ID: GOSHI-09MAY01-C16628_1.pep
MGASEENSALFPIFGFTIMALPLVPDTIGKILNTFSNKAMTIHCQCSGCSPSGKYTKSIFKRISNFSTCSNLTPVLPWIVMAVLIYDIKXTSHEVKVFEPISIL

SEQ ID NO: 82072 - protein, 122 aa, Gossypium hirsutum
  Clone ID: GOSHI-09MAY01-C116080_1.pep
MENSSRLVQDNKNLNFPSSSSSSSPLNSPHSNGTNPINTNGGVQIPTPPLTPIPISRSETNPYPTTFVQADTTTFKQVVQMLSGSSQTAKQAFSKPSTQHHHHHHHQQDPALPSKSSFPIPP

SEQ ID NO: 82073 - protein, 147 aa, Gossypium hirsutum
  Clone ID: GOSHI-09MAY01-C16398_1.pep
KVTLLVVLSCVVAASGGLIFGYDLGVSGGVTSMDPFLKKFFPNVYRRMKEGTKISNYCKFDSQLLTLFTSSLYLSGLVSSLFASTVTRVFGRKASMLVAGVAVLIGSALGGAASNLYMLVFGRLFLGIGLGFGNQALPPTLSYIYIY

SEQ ID NO: 82074 - protein, 134 aa, Gossypium hirsutum
  unsure (1)..(134): unsure at all Xaa locations
  Clone ID: GOSHI-09MAY01-C16348_1.pep
MSNMKENSDGFVRADQIDLKSLDEQLEKHLNRVWSSENKTNKDDGGGDGDGDGDGDGDGDHPRGDPDDHADGKLNLADYTTNIATTFTYRERLEWETHPSXSSSPPSVARGTFGTAHRGIFDDLHLAVNLLDWG

SEQ ID NO: 82075 - protein, 177 aa, Gossypium hirsutum
  Clone ID: GOSHI-09MAY01-C16378_1.pep
MGLAAALLFLLLAAPAAFAEQYTVGDSSGWTSTGDYQSWVQGKTFTVGDTLLFTYGGSHSVEEVSKSDYDNCNTGNAIKSYSDGNTVITLSNPGAMYFICPTIGHCAGGMKLAINVVAASGNSPSTPSTPSGSTTPSGTPPSGGTTTSPPSTPSGAPSTVNYGFMVALLGAVVGIMC

SEQ ID NO: 82076 - protein, 68 aa, Gossypium hirsutum
  unsure (1)..(68): unsure at all Xaa locations
  Clone ID: LIB3197-023-Q1-M1-H8.pep
KTSFLLTKASFNSLQVDLTEGRYLLSGASDASAAVFDIQRTTNYXGDGLIAKHKCLFSVDKQHQKGHK

SEQ ID NO: 82077 - protein, 85 aa, Gossypium hirsutum
  unsure (1)..(85): unsure at all Xaa locations
  Clone ID: LIB3493-012-P1-M1-B5.pep
MWKDIGDREMGKIRPNSFSSRIKSNRISNLQLSNNKDIVSSHRGSINSLHVDLTEGRYLXSGASDASAAVFDIQRATNYEGDGLI

SEQ ID NO: 82078 - protein, 73 aa, Gossypium hirsutum
  Clone ID: GOSHI-09MAY01-C16328_1.pep
LVLLLCLEQRCLSTKHLYNLRCSPVCLHQSNSLGMYWQELHKKKEYLLSESLIAAQPKFVKGFSCDQAQPLIL

SEQ ID NO: 82079 - protein, 199 aa, Gossypium hirsutum
  unsure (1)..(199): unsure at all Xaa locations
  Clone ID: GOSHI-09MAY01-C16278_1.pep
MASFTPNLEPAPDTSLQFKPKKPRITLQTPSSCPPNQRIQRIKRWRTQRDQHIYSSKLFQALRRSRRTSASREVHETADRVLAVLAKGTTRWGRAILTARKVTKHKKAKLPTNNRLRKPDIYRERRKTPAVERKLKVLGRLXPGCRKLSFSNLIEETSDYIAALEMQVRAMTAITEFLCGGTGGGPQPPADRLPSNVNS

SEQ ID NO: 82080 - protein, 161 aa, Gossypium hirsutum
  unsure (1)..(161): unsure at all Xaa locations
  Clone ID: GOSHI-09MAY01-C16268_1.pep
MEKVILEEKDAVHWIYRGEGAANLILAYTGSSPAFIGKVLRIQKSQRNGNSGVKEGRALTTHERLLWRENKELTASSNREILEQLYVKHVMIPLLGPKHVXDVGIRVLVTKEFLKSVDKNVTCHRPAWRVHSSQVDVKXDSGAILSDHSYFPMVILKGKPC

SEQ ID NO: 82081 - protein, 87 aa, Gossypium hirsutum
  unsure (1)..(87): unsure at all Xaa locations
  Clone ID: GOSHI-09MAY01-C116220_1.pep
MLIKVGAEREIKQSDPLLLNYGCLXNDFFLLDYXGFVIPPNPYDHIELKYDGALMDAASMAAGVSSPNFSSPAPWQQEILFQLNLDG

SEQ ID NO: 82082 - protein, 139 aa, Gossypium hirsutum
  Clone ID: GOSHI-09MAY01-C17958_1.pep
MWKLRSSGLRCGVCANFRIPFPRCFMNSITTSSIDVKPKVPLYLRPPSFSASLSELTKWHKWAKNLASSVGSSFINLDNGPDSTLLRRELNWLLQDLIELQYPSIILSRLESGNNENPDVSVALRAPLEGMYWGWRQRI

SEQ ID NO: 82083 - protein, 194 aa, Gossypium hirsutum
  unsure (1)..(194): unsure at all Xaa locations
  Clone ID: GOSHI-09MAY01-C17908_1.pep
EVQLKDGRVLEADIVVVGVGGRPRTALFKGQVEEETGGIKTDAFFXTSVPTVYAVGDVATFPLKLYNELRRVEHVDHARKSAEQAVKAIKGLEKGQSVDEYDYLPYFYSRSFDLAWQFYGDNVGDTVLFGDNNPQSPKPKFGSYWIKDGKVVGAFLEGGSAEENQAIAKVAKLQPKAENLDALAKEGLAFACKI

SEQ ID NO: 82084 - protein, 143 aa, Gossypium hirsutum
  unsure (1)..(143): unsure at all Xaa locations
  Clone ID: GOSHI-09MAY01-C17848_2.pep
MKSCACFYRPVIVAKSIDQKDMSFVSTNRVAFGAGILSQATTTARSKGSKVLAVRASAVDSYGSSSDFVERMEKAWLISQQPRPVVCSSCNSKGHVECQWCRGTGFFILGDNMLCXVPSRNTTCVICAGKGSTCFSDCKELDF

SEQ ID NO: 82085 - protein, 152 aa, Gossypium hirsutum
  Clone ID: GOSHI-09MAY01-C17848_1.pep
CVFLPPSDCGQIHRPERLSFVSTNRVAFGAGVLSQATTTARSKGSKVLAVRASAVDSYGSSSDFVERMEKAWLISQDGIEPVVCSSCNSKGHVECQWCRGTGFFILGDNMLCQVPSRNTTCVICAGKGSTCCSDCKGTGFRAKWLGEPPLSK

SEQ ID NO: 82086 - protein, 358 aa, Gossypium hirsutum
  unsure (1)..(358): unsure at all Xaa locations
  Clone ID: GOSHI-09MAY01-C17588_2.pep
LNTLKKSKSTEYKRANVAPGNAGGHFGDFPAFHTYGGQFIQYSIFGNLFEITSKYRPSITPIGRGAYGIGCSVLNSETNEMVAXVKKIANAFDNHMDAKRTLREIKLLRHLDHENVIAIRDVIPPPLRREFTDVYIASELMDTDLHQIIRSNQSLSEEHCQYFLYQILRGLKYIHSANVIHRDLKPSNLLLNANCDLKICDFGLARPTAENEFMTEYVVTRWYRAPEILLNSSDYTAAIDVWSVGCIFMELMNRKPLFPGKDHVHQMRLLTELLGTPTESDLGFLRNEDARRYIRQLPAHPRQSLAEVFPHVHPLAIDLIDRMLTFDPTRRITVEEALAHPYLXKIHDISDERSAPTI

SEQ ID NO: 82087 - protein, 256 aa, Gossypium hirsutum
  Clone ID: GOSHI-09MAY01-C17588_1.pep
MKKGVSSKAVYRKSTEMANVAPGNAGGHFGDFPAFHTYGGQFIQYSIFGNLFEITSKYRPPITPIGRGAYGIVCSVLNSETNEMVAVKKIANAFDNHMDAKRTLREIKLLRHLDHENVIAIRDVIPPPLRRDFNDVYIALELMDTDLHQIIRSNQSLSEEHCQYFLYQLLRGLKYIHSANVIHRDLKPSNLLLNANCDLKICDFGLARPASENEFMTEYVVTRCLSTEIFVTLRLLCGLSGRTVCSIDPGWILCRG

SEQ ID NO: 82088 - protein, 169 aa, Gossypium hirsutum
  Clone ID: GOSHI-09MAY01-C17548_2.pep
MAGKGEGPAIGIDLGTTYSCVGVWQHDRVEIIANDQGNRTTPSYVGFTDTERLIGDAAKNQVAMNPTNTVFDAKRLIGRRFSDSSVQSDMKLWPFKVIPGPGDKPMIVVTYKGEEKQFAAEEISSMVLMKMKEIAEAYLGSTIKNAVVTVPAYFNDSQRQATKDAGVIA

SEQ ID NO: 82089 - protein, 496 aa, Gossypium hirsutum
  Clone ID: GOSHI-09MAY01-C17548_1.pep
GDHASKRLIGRRFINSSFLKSNKKLSTKESSGPGDKPMIVVTYKGEEKQFAAEEISSMVLMKMKEIAEAYLGSTIKNAVVTVPAYFNDSQRQATKDAGVIAGLNVMRIINEPTAAAIAYGLDKKAGSSGEKNVLIFDLGGGTFDVSLLTIEEGIFEVKATAGDTHLGGEDFDNRMVNHFVQEFKRKNKKDISGNPRALRRLRTAGRGAKRTLSSTAQTTIEIDSLYEGIDFYTTITRARFEELNMDLFRKCMEPVEKCLRDAKMDKSNVHDVVLVGGSTRIPKVQQLLQDFFNGKELCKSINPDEAVAYGAAVQAAILSGEGNEKVQDLLLLDVTPLSLGLETAGGVMTVLIPRNTTIPTKKEQVFSTYSDNQPGVLIQVYEGERTRTKDNNLLGKFELSGIPPAPRGVPQINVCFDIDANGILNVSAEDKTTGQKNKITITNDKGRLSKEEIEKMVQEAEKYKSEDEEHKKKVEAKNALENYAYNMRDTIKDEKI

SEQ ID NO: 82090 - protein, 121 aa, Gossypium hirsutum
  unsure (1)..(121): unsure at all Xaa locations
  Clone ID: LIB3165-045-Q1-K1-H6.pep
EWTGRTDPRDRTTLLSPTFHLICFLLSSRNWLAKGKGPAIGIDLGTTYSCVGVXQHDRXEIIANGSXNKTTPSYVXFTDTERLIGDAAKNQVAMNPTNTVFDAKRLIGRRFSDSSVQSDMK

SEQ ID NO: 82091 - protein, 267 aa, Gossypium hirsutum
  Clone ID: GOSHI-09MAY01-C17458_3.pep
VLQGHRIEHPHGNWLMPPPTSSNYENPIQSRDLMPKASLGQDHENGKSREGSCKLFGIPLISNSVASEPTVSPINATNKAASHVEPAPNQGRTFTFDQKSEQPKFSPLAENLSIFNEQEKSFQLGQPHAREVQSKPPTASTRSCTKVLMQGTALGRSVDLTKFNNYDELIAELDQLFEFGGELMAPQKNWLVVYTDDEGDMMLVGDDPWQEFCAMVRKIGIYTREEVQKMKPGSLGSKFEDIPVPTEGTVAKEVNCPSASSAKNCSG

SEQ ID NO: 82092 - protein, 250 aa, Gossypium hirsutum
  Clone ID: GOSHI-09MAY01-C17458_2.pep
MPPPTTSCYDNSIQSRDLMPKHHWLKSIRMENLVEGNCKLFGIPVRGASSASEPAVSHISAFAKPVGHMQAALHQVHALESDKRSENSNASPLAEDLSAFNEQEKSVQLGQPHAREVQSKPPTASTRSCTKVLMQGTALGRSVDLTKFNNYDELIAELDQLFEFGGELMAPQKNWLVVYTDDEGDMMLVGDDPWQEFCTMVRKIGIYTREEVQKMKPGSLNSKGEDNLVSAEGLDAKDVKCTSASSTENC

SEQ ID NO: 82093 - protein, 554 aa, Gossypium hirsutum
  unsure (1)..(554): unsure at all Xaa locations
  Clone ID: GOSHI-09MAY01-C17458_1.pep
PTRPGELRVGVRRAMRQQGNVPSSVISSHSMHLGVLATAWHAFTTKTIFTVYYKPRTSPAEFIVPFDQYMESVKNNYSIGMRFKMRFEGEEAPEQRFTGTIVGIEDADPKRWQDSKWRCLKVRWDETSTIPRPERVSPWKIEPALAPPALNPLPMPRPKRPRSNAVPSSPDSSVLTREGSSKVTVDPSPASSFSRVLQGQEFSTLRGTFAESNESDTADRSVMWPPSVDDEKIDVAHAARKFGSENWMPSRRHEPTYTDLLSGFGSNADTSRGYYPSFVDQTSVAGNSGKKQLLGQEGKLGSWSLLPSGLSLKLSDSSTNPPLQGSDVPCQARGNGRFSGFGDYPILEGRRIECSRGNWLMPPPTTSCYENPIQSRDLMXKASLAQEHENGKXREGNCKLFGIPLISASSASEPAVSHISAFAKPVGHMQAALHQVHALESDKRSENSNASQMAEDVSAFNEQEKIVKLGQPHAREFQSKLSTASTRSCTKVLMQGTALGRSVDLTKFNNYDELIAELDQLFEFGGELMAPQKNWPVVYTDDEGDMMLDVEDPL

SEQ ID NO: 82094 - protein, 136 aa, Gossypium hirsutum
  unsure (1)..(136): unsure at all Xaa locations
  Clone ID: LIB3583-042-Q6-K7-E3.pep
SAQVALTVMAKPSVQGSEVPYQARGNGRFSGFGEYPVLQGHRIEHPLFFWLMPXPRGGGGGILFFXVDFCLWGGGGCFLXNGVFCVGGWWLVVFWCFFGFFVVFFVCLLCFFLFLGCFCCWVFFFLGGGVVWVFFF

SEQ ID NO: 82095 - protein, 53 aa, Gossypium hirsutum
  Clone ID: uC-gsronu33B038a09b1.pep
MAYLLTFQSQERGWGKSKTSLYKRGEVANEKAMLENLNAKMSFKSQKSVCQIQ

SEQ ID NO: 82096 - protein, 102 aa, Gossypium hirsutum
  Clone ID: GOSHI-09MAY01-C17608_1.pep
IHTLQLQQFWLEITKVRLWGPVLTLMMESKMLLWQKLGLARESYSLQLKWVSLRFHFISREVNKAAHMLAKKGHRYRAPCFWVEKALDPVEKMTIVDWNNWI

SEQ ID NO: 82097 - protein, 137 aa, Gossypium hirsutum
  unsure (1)..(137): unsure at all Xaa locations
  Clone ID: GOSHI-09MAY01-C17638_2.pep
MESTESSYVSSPEAARNRSPPPPKSPTSGNVEKPMYIRVLVSNAAAGSVIGXGGSTITEFQSKSGARIQLSRNHETFPGTSDRIIMVSGAIDDILKAMELILAKLFDEPNVEDNGNGGPRAKVRLIVPNSSWGSIIG

SEQ ID NO: 82098 - protein, 156 aa, Gossypium hirsutum
  Clone ID: GOSHI-09MAY01-C17638_1.pep
MESTESSYVSSPEAARKRSPPPPKSPTSENAEMPTYVRFLVSNAAAGSVIGKGGSTITEFQSKSGARIQLSRSHVFFPGTSDRIIMVSGAIDDILKAVELILAKLLDELNIRDNDDAEPTTQLRLFVSNSSCGSLLGTGGATLPSSVGRAPTGIKI

SEQ ID NO: 82099 - protein, 142 aa, Gossypium hirsutum
  Clone ID: LIB3197-039-Q1-M1-D11.pep
VKGCHDVYASFDKYVEVERLEGDNKYHAEQYGLQDAKKGVLFIDFPPVLQLQLKRFEYDFMRDTMVKINDRYEFPLQLDLDRDGGKYLSPDADRRVPKSLYASQFGYSVLVHSGGVHGGHYYAFIRPTLSDQWYKFDDERVT

SEQ ID NO: 82100 - protein, 83 aa, Gossypium hirsutum
  Clone ID: LIB3149-020-Q1-K1-F10.pep
MVGLLCIYQSRLLSDQWYKFDDERVTKEDMKRALEEQYGGEEELPQTNPGFNNTPFKFTKYSNAYMLVYIRESDKDKIICNVD

SEQ ID NO: 82101 - protein, 104 aa, Gossypium hirsutum
  Clone ID: GOSHI-09MAY01-C117140_1.pep
MAMRKAPKLPRAAVLKQILKRCSSLGKKHGYGEDGLPLDVPKGHFAVYVGENRSRYIVPITFLTHPEFQCLLQRAEEEFGFNHDMGLTIPCEEVVFRSLTSMLR

SEQ ID NO: 82102 - protein, 134 aa, Gossypium hirsutum
  Clone ID: GOSHI-09MAY01-C17098_1.pep
MESDNRDGKSKMDYEVIEQIGRGAFGAAYLVLHKLEKKKYVLKKIRLAKQTEKFKRTAHQEMELIAKLNNPYIVEYKDAWVDKGNSICIVTSYCEGGDMAELIKKARGMHFPEEKICKWMTQLLLAVDYLHSNR

SEQ ID NO: 82103 - protein, 82 aa, Gossypium hirsutum
  Clone ID: LIB3083-060-Q1-L1-H5.pep
MASTMRSNRCNRRDLADLIKNARGMHYPEEKICKWMTQLLLPVDYLHSNRVLHRDLKCSNIFLTKDNDIRLGDFGLAKILNT

SEQ ID NO: 82104 - protein, 153 aa, Gossypium hirsutum
  Clone ID: uC-gsflmaxxa094h06b1.pep
STQEEQQLHFVVFSFMSQGHMAPMIDIARLLAQRGVIVTIITTPQKAARFKATLDRAMESGLFIRLLEVQFPCAEFGLPEGCESFDMLPSFSLAWNFYQATDALETPVKKLLPELTPSPNCILSDVLFAFTLDIANQFQIPRIVFHGVCCFRL

SEQ ID NO: 82105 - protein, 67 aa, Gossypium hirsutum
  Clone ID: uC-gsflmaxxa095h06b1.pep
QDRPRELTHPGETVPIMTTPQKACRHKATLYRPIATEARTPDYGRHNTMRHTPHCQNGARATTSCLP

SEQ ID NO: 82106 - protein, 113 aa, Gossypium hirsutum
  Clone ID: GOSHI-09MAY01-C17348_1.pep
MGKDEEEMRGEIEERLINEEYKIWKKNTPFLYDLVITHALEWPSLTVEWLPDRDEPAGKDYSVQKMILGTHTSENEPNYLMLAQVQLPLQDSENDARQYDHDRSHLGGFGCAS

SEQ ID NO: 82107 - protein, 91 aa, Gossypium hirsutum
  Clone ID: GOSHI-09MAY01-C17368_1.pep
MMNRNLRESLVSGGGRNNSNNIPPASLHHRRGKIFNAGLFPRDSDENLDLFSKSRRSLSVASSDVSVKQGRTSHGSDDLLSSTDGGKHDYD

SEQ ID NO: 82108 - protein, 215 aa, Gossypium hirsutum
  Clone ID: GOSHI-09MAY01-C17328_1.pep
MESTDSSTGSQQPNLPPGFRFHPTDEELVVHYLKKKASSAPLPVAIIAEVDLYKFDPWELPAKATFGEQEWYFFSPRDRKYPNGARPNRAATSGYWKATGTDKPVLTSGGTQKVGVKKALVFYGGKPPKGIKTNWIMHEYRLADNKTNNKPPGCDLGNKKNSLRLDDWVLCRIYKKNNANRPLEHDKDDSMDDMLGTVPPSISIGSQHNPEFHFL

SEQ ID NO: 82109 - protein, 152 aa, Gossypium hirsutum
  Clone ID: GOSHI-09MAY01-C17238_1.pep
IGLSWPEPPLNLLSQHVLDRPASFKSVKSFRATKSFRTYSSFRSINDMASGIALLAELDLESLMKRKRRSSYVRIVSKQMVGIFLTIWVRRSLRKHIQNLKVSTVGVGVMGYIGNKGSISVSMSIYQTLFCFICTHLTSGEKDGDELKRNLM

SEQ ID NO: 82110 - protein, 185 aa, Gossypium hirsutum
  Clone ID: GOSHI-09MAY01-C10908_1.pep
MRNSKNNRKEPEKSRRVRLSERASSFHGRIQTMEPVELRRPKTLPDLLPERSTSLSSDARPPKLTKLLLNVTIQGSLGAVQVVMSPEKTVGDVITVSVRQYSKEGRRPMLPPTDAALFDLHYSQFSLESLGREEKLIALGSRNFFLCTKTAASKDGQNKTASCSNEAESVTKSSKPWFKFMDFLF

SEQ ID NO: 82111 - protein, 95 aa, Gossypium hirsutum
  Clone ID: LIB3166-032-P1-K1-E2.pep
PRVRPRVRPRVRPRVRDGNTKINYMNMFDAQVDAVRAALDAMGFKNVEIVVAETGWPYKGDSDEVGASIENAKAYNGNLIAHLRAMVGTPLMPEN

SEQ ID NO: 82112 - protein, 55 aa, Gossypium hirsutum
  Clone ID: LIB3493-041-P1-M1-B8.pep
FAYRSDPRPETLACCLVQPNSGRLDGNTKINYMNMFDAQVDAVRSALDAMGFKIV

SEQ ID NO: 82113 - protein, 237 aa, Gossypium hirsutum
  Clone ID: GOSHI-09MAY01-C10898_1.pep
MPSGSKKRKAAKKKREQATNNTNSSTNNNPHGNGDQRSQDERESDGGDVGSPASQGDPNHQHPFNEKEEEGKRGASPVQSHVTEDKSVEEANRDAESSEISRSDDVFSVKVENESGPKEDLESTLVAIRHIKHEKSSSSSSSRSSSDDESQASQKNSKEEAYNFVSEATAYGNEDKLATVKSEEVLKLVENEAVGNVDSNSAVETANVDNLVKSGLYVPEELDHAAEVSANKSVSVV

SEQ ID NO: 82114 - protein, 58 aa, Gossypium hirsutum
  Clone ID: LIB3584-011-P1-K1-E11.pep
EISRAYPTPIVKHAFYDLCDRLDLYNGGGGVFFFLSIVILVFNCSLFFSFMFCFGLTC

SEQ ID NO: 82115 - protein, 50 aa, Gossypium hirsutum
  Clone ID: LIB3166-031-P1-K1-B1.pep
KIAYFHMVTRYIYKIINLSIRNINEKKLTTIEDQYVNGESYIYIYYYMIL

SEQ ID NO: 82116 - protein, 275 aa, Gossypium hirsutum
  Clone ID: GOSHI-09MAY01-C10868_1.pep
MREVPKQTVMAIKSYQNQAQLLVKNYLFADPFIPYTSILGGILACKVAYDLTQLISNFYSKTYPGLTKIQRVEWNNRGISTVHAIFISALSLYLVFWSNLFSDELAGLLVFRSSPLSTFGLGVSVGYFVSDLAMILWLYPSLGGIEYVIHHSLSGIAVAYSMFTGEAQLYTYMVLISEVTTPEINIRWYLDTAGMKRSTAYLINGIVIFLAWLVARVLLFGYMFYHVYLHYTQVIKMHIFGYILVFGVPAALATMNLMWFGKIIKGVLKTLAKRQ

SEQ ID NO: 82117 - protein, 61 aa, Gossypium hirsutum
  Clone ID: LIB3048-026-Q1-L1-G7.pep
TPQTSLISQSHYMTHHHSPPTPIFSNPHSTLHTTASFLLLLLLLLLDFFNTFQLFWLLLSW

SEQ ID NO: 82118 - protein, 83 aa, Gossypium hirsutum
  Clone ID: GOSHI-09MAY01-C110830_1.pep
MGDKNQSFVVKFLQSNDSQLRTATVWTIVNLTCPSSPGAPCRLEKLRNAGIVSQIKNMVNDPCVDVKLRVRTVLGQSMAFGDN

SEQ ID NO: 82119 - protein, 64 aa, Gossypium hirsutum
  Clone ID: uC-gsronu33B036d09b1.pep
LRTATVWTIVNLTCPSSPGAPCRLEKLRNAGIVSQIKNMVNDPCVDVKLRVRTVLGQSMAFGDN

SEQ ID NO: 82120 - protein, 131 aa, Gossypium hirsutum
  Clone ID: GOSHI-09MAY01-C110800_1.pep
RTTFATGILVLCLIACHLFVLSEYYFQIHYRHTKFYVIFVHEHGFFARGGKMAAKYIIASVAGSFAIAYVSDLLVSDTKIFGGTTPSTVSNKGWWEETDKKFQAWPRTAGPPVVMNPISRQNFIVKSGSES

SEQ ID NO: 82121 - protein, 182 aa, Gossypium hirsutum
  Clone ID: GOSHI-09MAY01-C110810_1.pep
VVGDFGLAKLMDYKDTHVTTAVRGTIGHIAPEYLSTGKSSEKTDVFGYGIMLLELITGQRAFDLARLANDDDVMLLDWVKGLLKEKKLELLVDPDLQTNYVETEVEQLIQVALLCTQGSPMDRPKMSEVVRMLEGDGLAERWDEWQKVEVLRQEVELAPHPNSDWIVDSTDNLHAVELSGPR

SEQ ID NO: 82122 - protein, 165 aa, Gossypium hirsutum
  unsure (1)..(165): unsure at all Xaa locations
  Clone ID: uC-gsronu33B017f01b1.pep
GLFQGNPEIESACTKDPLNSIQCFKAHSPPEFAFQSLGGLNVSATFSMPEALLATECQEPFGGMLVEGAGSSKDLRNLCPSAAEAAVDETPPPYSDLALKQATTTYTRSTPNLTARQEKTSVTVXATYREDIIRFRISLTSXMVELKEESAKKLEADVGTFETSF

SEQ ID NO: 82123 - protein, 133 aa, Gossypium hirsutum
  Clone ID: uC-gsronu33B018a02b1.pep
AFLASSPLPVTGGSVSWPSSLKGSNQQNSPKSKPLEPQGEKDDSTQGSNGQALVEDWLLGGRTSSQELFPQLNGLSPNMDEREEVMRCQREESADMPTFRGLCQGGLNVSATFSMPEALLATECQEPFGGMLV

SEQ ID NO: 82124 - protein, 145 aa, Gossypium hirsutum
  Clone ID: GOSHI-09MAY01-C10488_1.pep
HASAHASGKLSSLSLNTSSLLSSSSSSPKTRVTMAMIPVRFKLPYKDQNCDCKCIGWQSRQAEIGNKNGGFNGHQWRLWTFTSVHPRPFSMKALPKENSHLISLDSYFRKLQEDSNKGSSMVLVDRSGESSIKEGLAGISGSLSW

SEQ ID NO: 82125 - protein, 75 aa, Gossypium hirsutum
  Clone ID: GOSHI-09MAY01-C10438_1.pep
ATLMVIITMLNVQLRHTNGSYKRELSLYQSAWHLKMRALAYPAQSSAINVIELQQCIHKQNQYGGLQLHQYTKYA

SEQ ID NO: 82126 - protein, 80 aa, Gossypium hirsutum
  Clone ID: LIB3166-026-P1-K1-A12.pep
NAQVFSLLILDVSLLLESLRILKLMLHFLEVHIVNDKFSSSHFDSSDGKEVMVDIQYFKTNNPLLLISFYEQHLKYNPPS

SEQ ID NO: 82127 - protein, 182 aa, Gossypium hirsutum
  Clone ID: GOSHI-09MAY01-C10428_2.pep
MRRQGQYADSGGNAYVPAQMQHMPAQRMEIKSGQFQGQLEAFTPERDQPYRTPKSDGQWRWERDGSKVSNQMTPKMFNEGPGADGALLEPVAGQVMLPFRVSGQGTDGSRTYFQGQRPDPNLSLEKQNADLRSRPHDENMEVGYEHNLLPPTLEGLEKKFHDDIMKLAKEQNDAEDAKIVDI

SEQ ID NO: 82128 - protein, 295 aa, Gossypium hirsutum
  unsure (1)..(295): unsure at all Xaa locations
  Clone ID: GOSHI-09MAY01-C10428_1.pep
MQTLVAMHMYLLRCSICLHKGWGVKSGQFQGQLEAFTPERDQPYRTPKSDGQWRWERDGSKVSNQMTPKMFNEEPDVKFVLLEPVAGQVMLPFRVSGQGTDGSRTYFQGQRPDPNLSLEKQNADLRSRPHDENMEVGYEHNLLPPTLEGLERRGRDDIMKLAKEQNDAEDAKNSRHREKINAINGQYQEQLTALRARHANRRDEFLRKESLVRQQQYQQAMMDYYPHSNMAPADSLPTGNNPHGYGSGAGSGVVGDGHRRYNFDNFDFYRERSRYXGAARDQGFEPKGSYPGGAV

SEQ ID NO: 82129 - protein, 99 aa, Gossypium hirsutum
  Clone ID: LIB3166-025-P1-K1-H12.pep
MRRQGQYADSGGNAYVPAQMQHMPAQRMEIKSGQFQGQLEAFTPERDQPYRTPKSDGQWRWERDGSKVSNQITPKMFNEGKIVFRTLFLSLHAKGLMDQ

SEQ ID NO: 82130 - protein, 133 aa, Gossypium hirsutum
  Clone ID: GOSHI-09MAY01-C10778_5.pep
MELFYFVVFGALAAVVAALELSKTSKDRTNTSPAFNSFKNNYLLVYSLMMAGDWLQGPYVYYLYSTYGFGKGDIGQLFIAGFGSSMLFGTIVGSLADKQGRRRACVTYCITYILSCITKHSPEYKVLMIGRVL

SEQ ID NO: 82131 - protein, 188 aa, Gossypium hirsutum
  Clone ID: GOSHI-09MAY01-C10778_2.pep
MELFYFMVFGALGAVVAALELSKNSKDRINTSPAFNSFKNNYLVVYSLMMAGDWLQGPYVYYLYSTYGFGKGEIGQLFIAGFGSSMLFGTIVGSLADKQGRRRACVTYCITYILSCITKHSPQYKILMIGRVLGGIATSLLFSAFESWLVAEHNKKGFEQQWLSLTFSKAIFLGNGLVAILSGVFGNL

SEQ ID NO: 82132 - protein, 460 aa, Gossypium hirsutum
  Clone ID: GOSHI-09MAY01-C10778_1.pep
MELFYFVVFGALGAVVAALELSKNSKDRINTSSAFNSFKNNYLVVYSLMMAGDWLQGPYVYYLYSTYGFGKGEIGQLFIAGFGSSMLFGTIVGSLADKQGRRRACVTYCITYILSCITKHSPQYKILMVGRVLGGIATSLLFSAFESWLVAEPDKRGFEQQWLSLTFSKAIFLGNGLVAILAGLFGNVLVDSLSLGPVAPFDAAAIFLAIGMAIILSSWTENFGDPSENKDLLTQFRGAAVAIASDEKIALLGAIQSLFEGSMYTFVFLWTPALSPNDEEIPHGFIFATFMLASMLGTSLASRLMARSSPRVESYMQIVFVISSASLTLPIITNFLVAPSKVKGESISFAGCLQLLGFCTFEACVGIFWPSIMKMRSQYIPEEARSTIMNFFRIPLNIFVCIVLYNVDAFPITVMFGMCSIFLLVASILQRRLMAISDKPKMENWTAMKERDPEAEALND

SEQ ID NO: 82133 - protein, 185 aa, Gossypium hirsutum
  Clone ID: LIB3825-020-Q1-K6-G8.pep
MELFYFVVFGALGAVVAALELSKNSKDRINTSSAFNSFKNNYLVVYSLMMAGDWLQGPYVYYLYSTYGFGKGEIGQLFIAGFGSSMLFGTIVGSLADKQGRRRACVTYCITYILSCITKHSPQYKILMVGRVLGGIATSLLFSAFESWLVAEHNKVSRHFLALYSSMHIKLDLRFMLFLTSLFLL

SEQ ID NO: 82134 - protein, 72 aa, Gossypium hirsutum
  Clone ID: LIB3582-032-P1-K1-A3.pep
FFFYSLQRGFEQQWLSLTFSKAIFLGNGLIAILSGLFGNLLDDSLSLGPEAPFDADACFLAIEMAIIYSSWT

SEQ ID NO: 82135 - protein, 117 aa, Gossypium hirsutum
  Clone ID: LIB3166-030-P1-K1-B9.pep
FGNVLVDSLSLGPVAPGDAAVAIASDEKIALLGAIQSLFEGSMYTFVFLWTPALSPNEEEIPHGFIFATFMLASMMGSSLASRLMARSSPKVESYMQIAFEISSASLTLSNITNFLV

SEQ ID NO: 82136 - protein, 113 aa, Gossypium hirsutum
  Clone ID: GOSHI-09MAY01-C10718_1.pep
MENDKELEQIDVQESEKSMPSSEEEDAAIRKKYGGIKPKKPPLISKDHERAYLDSADWALGKQGVEKPKGPLEALRPKLQPTQQQTRYRKSPCAPSDGEVGGSAQPEDETTNE

SEQ ID NO: 82137 - protein, 157 aa, Gossypium hirsutum
  Clone ID: GOSHI-09MAY01-C10728_1.pep
MALRAAATRAMFAGAAPQGFRRMCSTATANSFMPPPITAMGNGEGTPGREQAPPSTNLFVSGLNKRTNSEKLREAFSQFGRVIDARVVTDRVSGYSKGFGFVRYATIEEAEKGRVGMDGKFLEGWVIFAEYARPRPERTPPPSNMANSNGYNSYGRE

SEQ ID NO: 82138 - protein, 77 aa, Gossypium hirsutum
  Clone ID: LIB3166-051-P1-K1-H5.pep
YLLDGFNDDVHVSNLALPQLPRDSCACVQQLRLIPLCRRQLLRWSTAREPLVESKRLQVPTSLATGLTSALSHVTLQ

SEQ ID NO: 82139 - protein, 234 aa, Gossypium hirsutum
  Clone ID: GOSHI-09MAY01-C10698_1.pep
MAESNGLVLGTWASPFVLRVKIALHLKSVNYENHEENLPESKSDLLLKSNPVYKKVPVLIHGHNPICESLIIVEYIDEVWTTSASSILPSDAYERAQSRFWAAYVEDKFSTALRRVLFGATEEDKRAAMAEVSEGMVLLEEVFVKLSKGKAFFGGENIGFVDIVFGSLLAWIEVIEKLSEMKLISEAKTPGLVQWADCPSPPGAVKDVSPDVDKLVEYALKLGARVLKATAAPN

SEQ ID NO: 82140 - protein, 96 aa, Gossypium hirsutum
  unsure (1)..(96): unsure at all Xaa locations
  Clone ID: LIB3147-007-Q1-K1-F3.pep
ARIPVDHASPRAHAXVCGENMGSGIVFGSLLAWIEVIEKLSEMKLISEAKTPGLVQWADCFSAHEAVKDVSPDVDKLVEYALKLGARVLKATAATN

SEQ ID NO: 82141 - protein, 125 aa, Gossypium hirsutum
  Clone ID: LIB3166-029-P1-K1-B12.pep
PRVRPRVRPRVRFWYWGRGASPFVLRVKIALHLKSVNYENHEENLPESKSDLLLKSNPVYKKVPVLIHGHNPICESLIIVEYIDEVWTTSASSMLPSDAYERAQSRFWAAYVEDKFSTALRRVLF

SEQ ID NO: 82142 - protein, 187 aa, Gossypium hirsutum
  Clone ID: GOSHI-09MAY01-C10688_1.pep
SLMATAEPEVPVTEQQPAAAEEPKPAEKPVKEKRPRAPKEKKPKQPKSAAHPPYFQMIKEALLALKEKSGSSPYAIAKYMEEKHKAVLPANFRKILGLQLKNSAARGKLIKIKASYKLSEAGKKERAPVTKAKMEKKAKPASKPKKAEATKKPTKRVGAKKKSTPAKPKQPKSIKSPAAKKAKKAAA

SEQ ID NO: 82143 - protein, 113 aa, Gossypium hirsutum
  unsure (1)..(113): unsure at all Xaa locations
  Clone ID: uC-gsflmaxxa091c12b1.pep
TLTAKQNAWFKKTLTVTAPPEPDTEQQPAAAEEPKPAGKPEKEKRPKAPKEKKPKQPKSTARPPYYQMIKEATQAMKEKSGSRHDAQAKYMEEKHTDGXPANARKTLGHQLKN

SEQ ID NO: 82144 - protein, 228 aa, Gossypium hirsutum
  Clone ID: GOSHI-09MAY01-C10638_1.pep
MEEEAESREEVKPNVVVKETNGDIVGDNDAGKLGTIETPDFLSQKIFHNCSLPILASGVITTSPAQSQLTIFYGGKVSVFDAISAEKIQEIMLIAATVAAADVGSVDMKNAATDYATISPALTRCPSLQSTATASASPQAQLYPLPRTSFSKLQAELPIARRHSLQRFLEKRRDRLVNKNPYPGPSTPKMADGAKADVSATTSPESGCFKASPIRQEDIQPKAPAHVA

SEQ ID NO: 82145 - protein, 122 aa, Gossypium hirsutum
  Clone ID: uC-gsronu33B109c03b1.pep
GPQKKNICFQYRGRKIWTPKKGAPFFFFLFFFFFCFFFFFFFFFFFFFFFFFFFFFFFFFFFFFFFFYTQISNLCIPIEQRESYMHSKCYLSGRSERGGPGLGNIKTAAQEGNRETSGRILP

SEQ ID NO: 82146 - protein, 79 aa, Gossypium hirsutum
  Clone ID: LIB3166-037-P1-K1-H10.pep
NWVPIETPDFLSQKISHNCSLPILASGVNTTSLAQSQLTIFYGGKVSVFDAISAEKIQEIMLIAAAVAAADVGSVDMKN

SEQ ID NO: 82147 - protein, 209 aa, Gossypium hirsutum
  unsure (1)..(209): unsure at all Xaa locations
  Clone ID: GOSHI-09MAY01-C10628_1.pep
SAYSDQALAAAVYSPTHKSAVLNQFQQQQSMLSPINTNFSPKNIEHPLLQGFXSGRMSPRNVEPISPMSSRVSMLVQREKQQQFRSLSSRELGSGSSATVGSPVNSWWGSSNGKPDWAVDADGSGKLRRSSSFELGNGDEPDLSWVQSLVKESPTEVKEKTGVPVSGVTLNASTGLGSSMNSRIDPVDTAVLGAWIEQMKLDELVAQQN

SEQ ID NO: 82148 - protein, 44 aa, Gossypium hirsutum
  Clone ID: GOSHI-09MAY01-C110180_1.pep
LIFFFFFFFLCCCFFFFFFFGFFFLKNERPLCIRFLFIVREEKH

SEQ ID NO: 82149 - protein, 102 aa, Gossypium hirsutum
  Clone ID: GOSHI-09MAY01-C110190_1.pep
SLVRFHFLYLGRKTAMARMKLMALALVILMTGNCCLATNRKVIKVEVDGLKHEQISVHGRQLLDDSGSDRASYPSSSTNNHHFRPRQDFPGGGTGDGSGSNN

SEQ ID NO: 82150 - protein, 247 aa, Gossypium hirsutum
  Clone ID: GOSHI-09MAY01-C10168_1.pep
EILSRLPIKTFSVRVSKISRVRNEILFYNLNNPKLSSLQSIFQKTHFKFEAKEAKKRVLKRRQENEWQKRAAVKASTSIVHVPNQEALVLPCRILQLPRRTIYEILSRLPIKTLFQCRSVCKRFLCFISDPEFAKLQLSKSQVCILIKTLPLQNASKRLQLAHVEANGSTFEVSKLNFTPKSNLPTIDISHMNACNGLLCLVGSEKRFNIYVCNPILGEFITIQPPYKDRQRGSFWGLGYSAMMNQY

SEQ ID NO: 82151 - protein, 193 aa, Gossypium hirsutum
  Clone ID: GOSHI-09MAY01-C10128_1.pep
MRRITSSTTAKGVAAIVGVGPQLGLSIARKFAHEGYTVAILARDLGRLSRFADEIAREEKAQVFAIRIDCSDYRSVREAFEGVLSLGFVEVLVYNAYYQPVSSHPTTFSDIKIDSFEKSLAVSSLGAFLCAQQVLPGMVERGKGTVLFTGRSASLNGIPGFSELCCGKFALRALSQCLSREFQSVGVHVAHII

SEQ ID NO: 82152 - protein, 60 aa, Gossypium hirsutum
  Clone ID: LIB3120-001-Q1-K1-G3.pep
AIPFCFQLTFLHSTAYLSSLGFFGPHKMRSMVSSTSAKGIAAIVGVGPKLVRSIARKFAH

SEQ ID NO: 82153 - protein, 156 aa, Gossypium hirsutum
  Clone ID: GOSHI-09MAY01-C10098_1.pep
MGRGRVELKRIENKINRQVTFSKRRNGLLKKAYELSVLCDAEVALIIFSSRGKLYEFGSSGMSKTLERYQRCCFTPQDNSLERETQNWYQEVTKLKAKYEALQRTQRHLLGEDLGPLNVKELQNLEKQLEGALALARQRKTQIMIEQMEDLAKRSV

SEQ ID NO: 82154 - protein, 68 aa, Gossypium hirsutum
  Clone ID: LIB3166-022-P1-K1-A5.pep
MGRGRVELKRIENKINRQVTFSKRRNGLLKKAYELSVLCDAEIALIIFSNRGKLYEFSSSGYINTKLR

SEQ ID NO: 82155 - protein, 82 aa, Gossypium hirsutum
  Clone ID: GOSHI-09MAY01-C10058_1.pep
LTNLTKNSQTKYFVIMQKTWEDAKTGKKCFMLYARSLYVTWGGREYWIWNSFKDTRLDFIFFSLLLFMDFFFGVWVPWSLDT

SEQ ID NO: 82156 - protein, 146 aa, Gossypium hirsutum
  Clone ID: AI725583.1.pep
MATSDECCSVQLSDGDGSFNDTGIESFIKEVKLHECGLSYAVVSIMGPQSSVATPKQIRELMQVDGLTNDEVKSHLQKYQLHTRRIPATTTTTTPANQSGLVLGGGCYRPFCPRPNSTQNKNPINPNPFLPAQNKKIKKERIPNRS

SEQ ID NO: 82157 - protein, 108 aa, Gossypium hirsutum
  Clone ID: uC-gsronu33B002h03b1.pep
MIAEVLYPSYLCFMRISLIIFRAFNFTYDSMATSDECWSAQLLDGDGSFNATAIERFIKEVKLHECRLPYAAVSIMGPQRSEIPGSHTKTSGYHNNNNPCKSIKLCFG

SEQ ID NO: 82158 - protein, 206 aa, Gossypium hirsutum
  unsure (1)..(206): unsure at all Xaa locations
  Clone ID: GOSHI-09MAY01-C10078_1.pep
MGGISGLLMKFPSLIHFLLSLLEKIPARLPMPIEKLVSRVSYPRTGRHLQRYNNRGFRLVVGCIPYRYRESEDAKSIEEAIEVLVINAQNGKGILFPKGGWEEXEAREEAVIRETVVEAGVVGVIECKLGKWCYKSKRXSIYHEGHMFGLLVKQELDGWPEKNIRKREWVXLSKAREECPHLWMIEALEELVWRQTQAGAAQGGSK

SEQ ID NO: 82159 - protein, 122 aa, Gossypium hirsutum
  Clone ID: LIB3585-037-P1-K1-B9.pep
LSIFGLSRCIPYRYRESEHGTSIEEAIEVLVINAQNGKGILFPKGGWEKDESMEEAAIRETVEEAGVVGCKLGKWCYKSKRQSIYHEGHMFGLLVKQELDGWPEKNIRKRKWVCIWLPYICM

SEQ ID NO: 82160 - protein, 98 aa, Gossypium hirsutum
  Clone ID: GOSHI-09MAY01-C10068_1.pep
RCFISRFVTSLPSFSSFKGASCSIKTNVPKYVVNYRRLSTPNGDSFTWFEVLQLQKETKNGATLDHGRGNCSFAQRRRTKNSQHKQEPAGITLRNKNS

SEQ ID NO: 82161 - protein, 359 aa, Gossypium hirsutum
  Clone ID: GOSHI-09MAY01-C10348_1.pep
MKVGERPNAMERIELDEAMLQGQAEIWRYMYSFADSMALKSAVELRIADIIHSNGGPLTLSQIASCINGGLTSPDITTLARIMRLLVRRKIFTVHHPSDGGDLLYDLTHSSRWLLHDSEQTLAPMVLMENHPWQMAPWHYFSQCVKEGGIAFKKAHGREIWDLASRDPDLNKLFNNGLACSSKVITSVILSSYKQGLSSIGSLVDVGGGIGGLISEIVKAYPHIKGVNFDLPHVVSTAPTYNAVSHIGGDMFHDAIPNADAVIMKWILHDWTDEECIKILRNCKKAIPRENGKVILGEIILKEDGSGVFDDMGFIFDLLMIAHSSCGKERTAVECMKMFEDGGFCRCRIIDITALPSII

SEQ ID NO: 82162 - protein, 91 aa, Gossypium hirsutum
  unsure (1)..(91): unsure at all Xaa locations
  Clone ID: LIB3083-059-Q1-L1-G10.pep
PNVGWAGLSYNGIFHVGGDMFHAIPNANAVIMKWVLHDWXDEDCIKILRNCRKAIPRENGKVIIVEVVVKAKGSGVFDDMGFIFDLLMIAH

SEQ ID NO: 82163 - protein, 60 aa, Gossypium hirsutum
  unsure (1)..(60): unsure at all Xaa locations
  Clone ID: GOSHI-09MAY01-C10378_2.pep
NLLCSTAIETTLWSIEWGIAELVNHPGIQKKLRLELDTVLXPGNQITEPDTHKLPYLQAV

SEQ ID NO: 82164 - protein, 505 aa, Gossypium hirsutum
  Clone ID: GOSHI-09MAY01-C10378_1.pep
MDLLFLEKALLGLFVAVVLAITISKLRGKRFKLPPGPLPVPVFGNWLQVGDDLNHRNLTDLAKKYGDIFLLRMGQRNLVVVSSPELAKEVLHSQGVEFGSRTRNVVFDIFTGKGQDMVFTVYGEHWRKMRRIMTVPFFTNKVVQQYRFGWEDEAARVVEDVRKNPEAATNGIVLRRRLQLMMYNNMYRIMFDTRFESEDDPLFVRLKALNGERSRLAQSFEYNYGDFIPILRPFLRGYLKICKEVKDRRLQLFKDHFVEERKKLGSTKSMNNDGLKCAIDHILDAQQKGEINEDNVLYIVENINVAAIETTLWSIEWGIAELVNHPEIQKKLRHELDTVLGPGNQITEPDTHKLPYLQAVIKETLRLRMAIPLLVPHMNLHDAKLGGYDIPAESKILVNAWWLANNPANWKNPEEFRPERFFEEEAKVEANGNDFRYLPFGVGRRSCPGIILALPILGITLGRLVQNFELLPPPGQSQIDTTEKGGQFSLHILKHSTIVAKPRQF

SEQ ID NO: 82165 - protein, 111 aa, Gossypium hirsutum
  Clone ID: LIB3120-016-Q1-K1-F9.pep
NLLYSTAIETTLWSIEWGIAELVNHPEIQKKLRHELDTVLGPGNQITEPDTHKLPYLQAVIKETLRLRMAIPLLVPHMNLHDAKLGGYDIPAESKILGNAWGLANNPAYWK

SEQ ID NO: 82166 - protein, 119 aa, Gossypium hirsutum
  Clone ID: GOSHI-09MAY01-C10338_1.pep
MMATSRLFGRCGGLLEAAKAFSASFAYSSSSSSSGNGRGLMRVIPVSPQLAKFLGASEASRTDAIKRIWDYIKLHNLQNPANKKEIICDEKLKTIFAGKESVGMLEISKYLSPHFLKSK

SEQ ID NO: 82167 - protein, 220 aa, Gossypium hirsutum
  Clone ID: GOSHI-09MAY01-C10328_1.pep
VNIAVKQAFHILHEQGIAMAPLWDSFKGQFVGVLSALDFILILRELGNHGSNLTEEELETHTISAWKEGKVHLSRQIDGNASSYPRCLVHAGPYDSLKDVVLKILRSTVATVPIIHSASQDGSFPQLLNLATLSEVLKCILRHFKHSSRSLPILQQPICSIPLGTWVPEIGELNGQPLAMLRPNASLGAASSLLVQADVSSIPIVDENDSWLDVYSRSDI

SEQ ID NO: 82168 - protein, 85 aa, Gossypium hirsutum
  Clone ID: GOSHI-09MAY01-C110240_1.pep
NKGGGVHELGPQQLKNMTVLNDSSACFNLSFVAAAAFTVPESTVLEKRLACLDEEEEEEEESLRDLRLVSNLDAWSFTNCTTLIK

SEQ ID NO: 82169 - protein, 154 aa, Gossypium hirsutum
  Clone ID: GOSHI-09MAY01-C10238_2.pep
MPVLTSSQWLTTQSIRTQIPSASLNLLTGSRRRISISSNAAINPKACSSLLHCSFISSSSPARSWHASFSGLALGMDFSSNNGVRNEKRRGLVGWAGKAALCQTKRNRSRKSLARTHGFRRRMRTTSGRAVLKRRRAKGRKVLCTKSNPNSGKR

SEQ ID NO: 82170 - protein, 142 aa, Gossypium hirsutum
  unsure (1)..(142): unsure at all Xaa locations
  Clone ID: GOSHI-09MAY01-C10238_1.pep
MPSYKTHKNPLPSASLTLLTGSRRRXPSLPMAANKSSLLHCSFLPSSSSSLSFPSSFSGLSLGTDFGSNNGVKNERREXLVVRAGKAALCQTKRNRSRKSLARTHGFRRRMRTTSGRAVLKRRRAKGRKVLCTKSNPNSGKR

SEQ ID NO: 82171 - protein, 146 aa, Gossypium hirsutum
  Clone ID: GOSHI-09MAY01-C11998_1.pep
MTTRFKKNRKKRGHVSAGHGRIGKHRKHPGGRGNAGGMHHHRILFDKYHPGYFGKVGMRYFHKLRNKFYCPIVNIDKLWSLVPQDVKAKANKDAAPMIDVTQFGYFKVLGKGVLPEDQPIVVKAKLVSKTAEKKIKEAGGAVVLTA

SEQ ID NO: 82172 - protein, 143 aa, Gossypium hirsutum
  Clone ID: uC-gsronu33B007b07b1.pep
CFKKNSKKRGHVSAGHGRMGKHRKHPGGRGNAGGIHYHRILFEKYHPGYFRKVGMRYFHKLRNKFYCPIVNIDKLWSLVPQDVKAKANKDSAPMIDVAQFGYFKVLGKGVLPQNQPMVVKAKLVSKTAEKKIKEADGTVVLTA

SEQ ID NO: 82173 - protein, 105 aa, Gossypium hirsutum
  Clone ID: LIB3148-018-Q1-K1-C10.pep
DAWADAWADSLSDAWADAWADAVFGKHRRHPGGRGNAGGMHHHRILFDKYHPGYFGKVFMRYFHKLRNKFYCPIVNIDKLWSLVPQDVKAKANKDASPMIDVTYF

SEQ ID NO: 82174 - protein, 114 aa, Gossypium hirsutum
  Clone ID: GOSHI-09MAY01-C11988_1.pep
MKVVAAYLLAVLGGNTSPSADDLKAILGSVGAEAEDERIQLLLSAVKGKDITELIASGREKLASVPSGGGGVAVAAAAPGAGAAAAPAAAEAKKEEKVEEKEESDDDMGFSLFD

SEQ ID NO: 82175 - protein, 111 aa, Gossypium hirsutum
  Clone ID: uC-gsronu33B027g06b1.pep
PFVSEDERIQLLLSEVKGKDITELIASGREKLASVPSGGGFFRFFISLFYPLFSCISLFFIFFSTFPLFFSFSLSFSFFIHSLISTFSVFIFLFSIFLFLFSFIPLFIPFF

SEQ ID NO: 82176 - protein, 103 aa, Gossypium hirsutum
  Clone ID: GOSHI-09MAY01-C11958_1.pep
MAMYIRVKRSKTTYFIQCDPTETTLDIKQKLHTLIDQPVNDQRLILMSNGDILEDSKTLADQKVENDAVVALTLRKDDNEFEDVNIVKPNDFYQSRDTDSGNW

SEQ ID NO: 82177 - protein, 88 aa, Gossypium hirsutum
  Clone ID: GOSHI-09MAY01-C11948_1.pep
HASAHASDFPIFPAFCLVYTLVLPLLSTLIWFRSPVRSPFSLSFSLDLVSGSFSPLISSSFYKLIWGFSACFCLRSCLGFLLVWLVLG

SEQ ID NO: 82178 - protein, 195 aa, Gossypium hirsutum
  unsure (1)..(195): unsure at all Xaa locations
  Clone ID: GOSHI-09MAY01-C11908_1.pep
SRSTTHSRATIARXLNGRTYYAIKNHWSSALKRKCLSMTECFNDDSPQPLKRSASVGTGNPSSPSGSDLSDSSLPAPSPVFKTGSVVPSSQHVETASSATDPPTLLSLSLPGSDFSEPVSPPGFNPTQVTTQAPAPVPAPVEKQFFSAEFFAVMKEMIRKEVRSYMAGIEQNELCLQTEAIRNAVVKRIGISKIE

SEQ ID NO: 82179 - protein, 143 aa, Gossypium hirsutum
  Clone ID: uC-gsronu33B019c08b1.pep
FKQRKRKHRPKVITEGKPRRPRKPATPKPDGSQETPTGKRKYVRKSTVKNDTSILPGVANAEKSTGKRKYVRRKGLNKDSTIPTQEGGKGATHPETLEHNKKPCRRALDFDTVGQEREAWCALGSYCSYQILIHRQGVLKQSG

SEQ ID NO: 82180 - protein, 124 aa, Gossypium hirsutum
  Clone ID: LIB3166-045-P1-K1-A10.pep
RKGLNKDSTIPTQEEGGKGATHPETLEHNKKPCRRALDFDTEGQEREESSACKPACNLNSSPGTENLGKEGSQSKSMVQLCGIIEVDAEKTQTGIAFELKQSVKEKLKDDLSLPEDQAPGTPVP

SEQ ID NO: 82181 - protein, 172 aa, Gossypium hirsutum
  unsure (1)..(172): unsure at all Xaa locations
  Clone ID: LIB3585-041-P1-K1-A1.pep
GGSVPAQKATPETWIEMVNTIQKASLSTXRLGIPMIYGIDAVHGHNNVYKATIFPHNIGLGVTRDPNLVKRIGEATALEVRATGIPYAFAPCIAVCRDPRWGRCYESYSEDHKIVQMMXEIIXTGLQGGLPVHSKKGVPFVAGKNKVAACAKHYVAYGGSTKGINENNTVIS

SEQ ID NO: 82182 - protein, 127 aa, Gossypium hirsutum
  Clone ID: LIB3166-044-P1-K1-C10.pep
VEGVCQLNKLLLKLGIPMIYGIDAVHGHNNVYKATIFPHNIGLGVTRDPNLVKRIGEATALEVRATGIPYVFAPCIAVCRDPRWGRCYESYSEDHKIVQMMTEIITGLQGGLPVHSKKGVPFVAGKN

SEQ ID NO: 82183 - protein, 84 aa, Gossypium hirsutum
  Clone ID: GOSHI-09MAY01-C11838_1.pep
KSLEMADIAMLVAEEYERRVRVSRSKLVGSQLQKRHEIDLVSFVANLGHKATTKLGHPRVETVKLAVEPKSQIGVAAFNGAFSA

SEQ ID NO: 82184 - protein, 114 aa, Gossypium hirsutum
  unsure (1)..(114): unsure at all Xaa locations
  Clone ID: GOSHI-09MAY01-C11558_1.pep
MANTLLGAFNVRVVGSGDRILVLAHGFGTDQSVWQRILPFFTPNYRIILYDLVCAGSVNPDYFDSTRYDTLDAFVDDLLNILKALGVSXCAYVGHSVSAMIGILAFIRCPQLFF

SEQ ID NO: 82185 - protein, 97 aa, Gossypium hirsutum
  Clone ID: LIB3585-065-P1-K2-C4.pep
KMLGGNNSNSVLPIFLDENHLQYQNQTNGSNQLQLFGSCKFFLFFIYFAINLFFLFLSMPYFDRQTHKCIPFFLKFSVVTNPYCLTLHCQLGAMLIL

SEQ ID NO: 82186 - protein, 115 aa, Gossypium hirsutum
  Clone ID: LIB3166-040-P1-K1-F2.pep
MLGGNNSNAVLPIFLDENHLQYQNQTNGSNQLQLFGSLPAGCNVDPVNYFGNEHLAPMIRPNKRGRETEDIQRQQKLQISLNYNICKEEADCSAGIPNPNAVSTGLRLSYDDDER

SEQ ID NO: 82187 - protein, 132 aa, Gossypium hirsutum
  unsure (1)..(132): unsure at all Xaa locations
  Clone ID: GOSHI-09MAY01-C11568_1.pep
RKPNNPYPFLTGAATTVQDGAKDGKSETPISSSRCKQVLDLEKEPLPERPNGDEKATDLXENQDESCSGVFTLLHEANCSSASSMNKNFIPASAALKSSCTFREFVPSPNEKIHDNGTSSASNLEYSCTSYD

SEQ ID NO: 82188 - protein, 89 aa, Gossypium hirsutum
  Clone ID: GOSHI-09MAY01-C111460_1.pep
SPHGKRDHQSLWCSSSIVLRGPMFAQLPERILGTNLTTDDSIAASPMVSAQAATESKRETWVEIDITSTTWWRNMISASAPIFELAIIS

SEQ ID NO: 82189 - protein, 158 aa, Gossypium hirsutum
  Clone ID: GOSHI-09MAY01-C11458_1.pep
MNAMPLSFEEFQGKGALDFASSTSSYSNSSLLLQHQQQKKWQNNKESCCYVGFDPTSTRSPSPPTSSSTLSSSFDGGSGGASTDSSGVAETATVSKGKSQSFDTGTGKCGLSMEDWENDQSILRLIMGDVDDPSLGLNKILQPPIGTAVVVGRQKYGV

SEQ ID NO: 82190 - protein, 104 aa, Gossypium hirsutum
  Clone ID: LIB3166-039-P1-K1-C10.pep
IVELPTNLTLEFVLRFISISCKAENNPSHFSYHFASSTSSYSNSSLLLQHQQQKKWQNNKESCCYVGFDPTSTRSPSPPTYLSTLAILIYLIQPIFVPAPFATF

SEQ ID NO: 82191 - protein, 140 aa, Gossypium hirsutum
  unsure (1)..(140): unsure at all Xaa locations
  Clone ID: GOSHI-09MAY01-C11448_1.pep
KTVRKLPRIQHLYAXLTGNLGKEDDEFEILSSLHPTPAVCGLPKEAARLFISETEMFDRGMYAGPVGWFGGGESEFAVGIRSALVEKDSGALIYAGAGIVERSNPSSEWDELELKTSQCTKLLQLEVPRHSNVENLEIIY

SEQ ID NO: 82192 - protein, 213 aa, Gossypium hirsutum
  unsure (1)..(213): unsure at all Xaa locations
  Clone ID: GOSHI-09MAY01-C11468_1.pep
MAVAKEMMGCSSFVSSSKVFLNSTYGFQQKQNRFLFVKPVWVPMEQKRRVHLRKAAKVPVVAAISEDLIKAKAKAVPAQKEKAVEFKVTATITIRNKNKEDFKETLVKHFDAFTDMIGRNVVLELISTEEDPKTMAPKRSKEAVLKDWSKKANVKAEKVYYTAEFTVDSNFGVPGAITVTNKHQKEFXLESIPLKICLWPLHFXCNSWVQSNK

SEQ ID NO: 82193 - protein, 76 aa, Gossypium hirsutum
  unsure (1)..(76): unsure at all Xaa locations
  Clone ID: GOSHI-09MAY01-C11748_1.pep
GSISRPRTLGAGTRGRTHFARPKWMNVLSKLSSXHCNARIGVFYCGAPVLAKELSKLCYELFQKGSAKFEFHKEHF

SEQ ID NO: 82194 - protein, 64 aa, Gossypium hirsutum
  Clone ID: LIB3148-030-Q1-K1-B7.pep
KIWKYREKRERQKNPSSLCFSKLVLNGLGLPYLSTLISLARRTIDFNFPKTMMASSVTFVGIQR

SEQ ID NO: 82195 - protein, 130 aa, Gossypium hirsutum
  unsure (1)..(130): unsure at all Xaa locations
  Clone ID: GOSHI-09MAY01-C11158_1.pep
ALKPGKIASLAKSVRVLAGMEEPIGQVLKRTELADGLILEKTSCPLGVLLIVFESRPDALVQIASLAIRSANGLLLKGGKEAKRSNAILHKVITSAIPKCIGNTLIGLGASREDIPDLLKAXDGIDLWIP

SEQ ID NO: 82196 - protein, 242 aa, Gossypium hirsutum
  unsure (1)..(242): unsure at all Xaa locations
  Clone ID: GOSHI-09MAY01-C11168_1.pep
MNNAISDTCLAMEEWVENPHAETXALSNILPCVDPRTTNHTLTQSKQVITSIVDVVNTYIYSIANIDLSPDDNRYYHQSGPTMPALCYPFDSQLQDRQCGSYEVSMANASLVWQNYTCMVSESGLCNTTGRITPDRFTQLVAAINESYALEHYTPPLLCLQNCDFVRDTFQNITSNYCHPLERYLKMVNAGLGLISVGVLLCLFLWIFYANRPXREEVFVKILLPMKLMSCKNIFNTNNKTT

SEQ ID NO: 82197 - protein, 100 aa, Gossypium hirsutum
  Clone ID: GOSHI-09MAY01-C11138_1.pep
MIKNEQYERVLSYFDRDGDGKVSASELSHRLRLMGGELKLNEAQVAIEALDSNGDGLLDLEDFIGLLEEGGEAEKTKDFEEAFQMYDTGGNGFITPKDLK

SEQ ID NO: 82198 - protein, 98 aa, Gossypium hirsutum
  Clone ID: uC-gsronu33B080b05b1.pep
HIIVLMQTSQNRSARTFMDYSSVTQAMDGICGLYERKLKELNPATRNITYDIADLYNFIDGLADMSALVYDHSIQAYLPYDRQWIKQKVFQHLKKLAH

SEQ ID NO: 82199 - protein, 75 aa, Gossypium hirsutum
  Clone ID: LIB3166-034-P1-K1-A12.pep
PTTRHGICGLYERKLKELNPATGNITYDIADLYNFIDGLADMSALVYDHRIQAFLPNDRQWIKQKLFQHLKKLAH

SEQ ID NO: 82200 - protein, 190 aa, Gossypium hirsutum
  Clone ID: AI728670.1.pep
GTIFGVVGMLKLVAGSYLIVITERECVGSYLGHPIFKVMSLRILPCDHSLKTSSPEQKKVESEFAGLLKVAEKTCGLFFSYDTNLTLSAQRLNDLGDESKLLPLWRQAEPKFLWNNYMLEVLIDNKLDPYLLPVVQGSFHNFQPAIGKEIVDITLIARRCTRRNGTRMWRRRTDPDGYVAHFVETEQIVP

SEQ ID NO: 82201 - protein, 129 aa, Gossypium hirsutum
  Clone ID: uC-gsronu33B040f08b1.pep
SPDKVESEFAGLLKVAEKTCGLFFSYDTNLTLSAQRLNDLGDESKLLPLWRQAEPRFLWNNYMLEVLIDNKLDPYLLPVVQGSFHYFQAAIGKEIVYITLIARRCPLGYVSLIVYFMFFFFRLFFSFFF

SEQ ID NO: 82202 - protein, 55 aa, Gossypium hirsutum
  Clone ID: GOSHI-09MAY01-C11398_1.pep
MRLVPSNSSVKKRQSNGGSNGALLYLNVYDLTPMNNYLFWFGLGIFHSGIEVYGL

SEQ ID NO: 82203 - protein, 136 aa, Gossypium hirsutum
  Clone ID: GOSHI-09MAY01-C111370_1.pep
FLPRVRRNGGKQNEHDFDCLHHTCCERSDGFEGGPRSGCTLTNGKWRSGSGCSGRTCCCLSFYACIWLLLLILIPLVNTVFQFPFPFICQLVSFSVNFIGIFKKLNKILIYFKVLTQQLTDKGNDLLVLTPNITKR

SEQ ID NO: 82204 - protein, 144 aa, Gossypium hirsutum
  Clone ID: GOSHI-09MAY01-C11308_1.pep
MAFEQYYAHEWKTIPSDSTSENFNGSFDCNICLDFAHEPIVTLCGHLYCWPCIYKWLHVQSASLAPDEHPQCPVCKADISHTTMVPLYGRGQSESELQGKQTLYRGMVIPPRPPACGNKALLSTASPNSQQLPYRNPYQNESYN

SEQ ID NO: 82205 - protein, 103 aa, Gossypium hirsutum
  Clone ID: LIB3048-021-Q1-L1-A8.pep
MAFEQYYAHEWNTIPSDSTSENFNGSFDCNICLDFAHEPIVTLCRHLYCWPCIYKWLHVQSASLAPDEHPQCPFCKADISHTTMVPLYCRSQSESIFKASRHF

SEQ ID NO: 82206 - protein, 207 aa, Gossypium hirsutum
  Clone ID: GOSHI-09MAY01-C11268_1.pep
PTRPPTRPPTRPVKSYSMVIDGYCKSGNLTEAFQLLDKMPSKGVPPDSFTYCALIDGCCKGGELDKALSLFSEMLQKGFDPTSSFNALINGLCKTGKPNEAMRLLEDMASNCITPNHRTYTILIDYHSKAGRMEEAEILFLEMQRRNLVPNVVTYCSLLHGYYRLGRKAEMFDLFESMAAKGVEPDEIIYRLIANAYLEENSLIGML

SEQ ID NO: 82207 - protein, 228 aa, Gossypium hirsutum
  Clone ID: GOSHI-09MAY01-C111220_1.pep
FVREAVMKILKPDPKLADFIEAECSKDSWQGIITRLWPIRKYVDVIVTGTMSQYIPTLDYYSNGLPLVCTMYASSECYFGVNLNPLCKPSEVSYTLVPTMAYFEFLRVQRNNGVTSSISVPKTLNEKEQQELVDLVDVKLGQEYELVVTTYSGLYRYRVGDVLRVAGFKNNAPQFNFICRKNVVLCIDSDKTDEVELQNAVKNAVNHMLPFGATLAEYTSYADTTTIP

SEQ ID NO: 82208 - protein, 103 aa, Gossypium hirsutum
  Clone ID: GOSHI-09MAY01-C12958_1.pep
MQASMSVTSTNSTLPMPVQSSLGFSHRFLPSSHRFSQLPITRFSPAPTSLKCRGSLSSFPLVNDEKKFVEAAKKANLVPLYRCIFSDQLTPVLAYRCLVKEDD

SEQ ID NO: 82209 - protein, 233 aa, Gossypium hirsutum
  Clone ID: GOSHI-09MAY01-C12928_1.pep
GPNILLDDTLPTEVDKGLLGSVRGAIVQGFQWGAREGPLCDEPIRNVKFKIVDARIASEPLHRGSGQIIPTARRVAYSAFLMATPRLMEPVYYVEIQTPIDCVSAIYTVLSRRRGHVTADVPQPGTPAYLVKAFLPVIESFGFETDLRYHTQGQAFCLSVFDHWAIVPGDPLDKTIVLRPLEPAPIQHLAREFMVKTRRRKGMSEDVSINKFFDEAMVVELAQQAADLHQQMI

SEQ ID NO: 82210 - protein, 153 aa, Gossypium hirsutum
  unsure (1)..(153): unsure at all Xaa locations
  Clone ID: GOSHI-09MAY01-C12858_1.pep
SRVRPRVRITKERFNLVSGAAPFAKDPGLLVGLREGXASLLEVVKKVKPDVLLGLSGVGGVFSEEVLKALRESGSTRPAIFAMSNPTMNAECTAADAFKHAGENIVFASGSPFENINLGNGKVGYVNQAYNMYLFPGIGXGKFVSSARFITDG

SEQ ID NO: 82211 - protein, 100 aa, Gossypium hirsutum
  Clone ID: GOSHI-09MAY01-C12848_1.pep
VDLDFFFLSEKEIEGTSSSLAFISSTFTLNSSSNSSSAAAANLFPPFFPPLDFLLFAFQSFSDHILIILIIHFHPIIIISKSIKSRPSSHSNTRPMISLL

SEQ ID NO: 82212 - protein, 186 aa, Gossypium hirsutum
  unsure (1)..(186): unsure at all Xaa locations
  Clone ID: GOSHI-09MAY01-C12878_2.pep
SIICMHGGIGRGAXGCAVEQIEKLERPITMDAGSIILMDLLWSDPTENDSIEGLRPNARGPGVGTFGPDRVTDFCKKNKLQLIIRAHECVMDGFERFAQGQLITLFSATNYCGTANNAGAILVVGRGLVIVPKLIHPLPPPIQSPETSPERVGDDTWMQELNIQRPPTPTRGRPQPDHDRSSLAYI

SEQ ID NO: 82213 - protein, 329 aa, Gossypium hirsutum
  unsure (1)..(329): unsure at all Xaa locations
  Clone ID: GOSHI-09MAY01-C12878_1.pep
PRVRFARHMSPQGRPRTVISTLLRPRNWKAPVNRRFFLDSYEVGELCYAAEQLFMQEPTVLQLKAPVKVFGDLHGQFGDLMRLFDEYGFPSTAGDITYIDYLFLGDYVDRGQHSLETITLLLALKIEYPENVHLIRGNHEAADINALFGFRIECIERMGENDGIWAWTRFNQLFNYLPLAALIEKKIICMHGGIGRSIHSVEQIEKLERPITMDAGSIILMDLLWSDPTENDSIEGLRPNARGPGLVTFGPDRVTDFCKNNKLQLIIRAHECVMAVRTIRSGSLITXFSCTYYCVLKLCLSSIVVVEDWYSSEVYIRTHSISSEHVRRR

SEQ ID NO: 82214 - protein, 184 aa, Gossypium hirsutum
  Clone ID: GOSHI-09MAY01-C12828_1.pep
PRVRPRVRLVEAITHASRPSSGVSCYQRLEFVGDAVLDHLITRHLFFTYTNLPPGRLTDLRAAAVNNENFARVAVKHQLHVHLRHGSSALEKQIRDFVKEVQDELLKPGFNSFGLGDCKAPKVLGDIVESIAGAIFLDSGRDTAVVWRVFQPLLHPMVTPETLPMHPVRELQERCQQQAEGLEY

SEQ ID NO: 82215 - protein, 44 aa, Gossypium hirsutum
  Clone ID: uC-gsronu33B062e12b1.pep
SRVRAEVESSRGQLKKSMSYSSSRRIEVEELLPYAHGYTELNFF

SEQ ID NO: 82216 - protein, 72 aa, Gossypium hirsutum
  Clone ID: LIB3166-054-P1-K1-B9.pep
RILWYGEGIHQLSYVRGEAKFSDHRPVYGIFWAEVESSRGQLKKSMSYSSSRRIEVEELLPYAHGYTELNFF

SEQ ID NO: 82217 - protein, 254 aa, Gossypium hirsutum
  Clone ID: GOSHI-09MAY01-C12518_1.pep
PPFRPPVLKVVGQGAFAKGYQVRRNGTSDIYAMKVMRKDKIMEQNHAEYMKSERAILGKVDHPFIVQLRYSFQTKYRLYLVLDFVNGGHLFFQLYRQGLFREDLARIYTAEIVSAVSHLHSNGIMHRDLKPENILLDAEGHVMLTDFGLAKEFNENTRSNSMCGTLEYMSPEIVLGKGHDKAADWWSVGILLYEMLTGKPPFSGGNRQKIQDKIIKEKIKLPAFLSSEAHSILKGLLQKDASKRLRKGQGGSEE

SEQ ID NO: 82218 - protein, 151 aa, Gossypium hirsutum
  Clone ID: GOSHI-09MAY01-C12798_1.pep
KIWNSKKLDYKLEKEFLAEVEILGSIRHSNIVKLLCCISSEDSKLLVYEYMENQSLDKWLHGNKRSPMSRMGSVLDWPTRLQIAVGAAQGLCYMHHECPTPIIHRDVKSSNILLDSEFKAKIADFGLAKMLTRHARSHTMSVVEGSFGYLT

SEQ ID NO: 82219 - protein, 69 aa, Gossypium hirsutum
  Clone ID: GOSHI-09MAY01-C12788_1.pep
LLRNLHRRWSFCTALDTSPYLFNEICAFVEKVFFAGYGIRTQFFHDPPRINQKPTYQIRAGTYLTELSQ

SEQ ID NO: 82220 - protein, 123 aa, Gossypium hirsutum
  Clone ID: GOSHI-09MAY01-C12758_4.pep
MATSAVSATSLLLFVFGFCLRGAFGDYGGGWQGGHATFYGGGDASATMGGARGYGNLYSQGYGTNTAALSTALFNNGLCCGSCYEMRCDTDPQWCLPGSITATAPTSCPPTLALSNDNGGWCN

SEQ ID NO: 82221 - protein, 105 aa, Gossypium hirsutum
  unsure (1)..(105): unsure at all Xaa locations
  Clone ID: GOSHI-09MAY01-C12758_3.pep
MATSAVSATSLLLFIFGFCLRGAFGDYGGGWQGGHATFYGGGDASGTMGGACGYGNLYSXQAYGTNTAALITALFNYGXLTVVTCYDMRCVSDLLWCPPGSFYLI

SEQ ID NO: 82222 - protein, 172 aa, Gossypium hirsutum
  Clone ID: GOSHI-09MAY01-C12758_2.pep
MVIAPLTATSLLLFVFSFFLQGTFGDYGGGWQGGHATFYGGGDASGTMGGACGYGNLYSQGYGTNTAALSIALFNNGLSCGSCYEMRCDNDPKWCLPGSITITATNFCPPNLALSNDNGGWCNPPLQHFDLAEPAFLQIAQYRAGIVPISFRRVPCMKKGGIRFTINGHSYF

SEQ ID NO: 82223 - protein, 254 aa, Gossypium hirsutum
  unsure (1)..(254): unsure at all Xaa locations
  Clone ID: GOSHI-09MAY01-C12758_1.pep
MAPKSPFSTTSLILFILNFYLRTTIGDYGGGWQGGHATFYGGGDASGTMGGACAHASVYSHGFGTNTAALSTALFNNGLSCGSCYEMRCDGDPKWCLPATIMVTATNFCPPNFALSNDNXGWCNPPLQHFDLAEPAFLQIAQYRAGIVPVSFRRVPCIKKGGVRFTINGHSYFNSVLITNVGGAGDVHSVSIKGSKTGWQAMSRNWGQNWQSNTYLNGQTLSFQVTTSDGKTRTSYNVVPANWQFGQTYEGGQF

SEQ ID NO: 82224 - protein, 170 aa, Gossypium hirsutum
  Clone ID: GOSHI-09MAY01-C12768_1.pep
MEEAKVLEAKEGTISVASAFPGHQEAVQDRDHKFLTQAIGEAYKGVECKDGGPFGAVVVRNDEVVVSCHNMVLRNTDPTAHAEVTAIREACKKLNQIELSDCEIYASCEPCPMCFGAIHLSRIKRLVYGAKAEAAIAIGFDDFIADAVSATGFYQKANLEIKQADGTGAV

SEQ ID NO: 82225 - protein, 78 aa, Gossypium hirsutum
  unsure (1)..(78): unsure at all Xaa locations
  Clone ID: LIB3146-052-Q1-K1-E7.pep
TVPRMSEGSFSTMLYTTRLSFDAMPNASSLHHPLYVSNXCVRIVISILYSFLMTRKSRGNGNGSFFSFQHLCLFPDAW

SEQ ID NO: 82226 - protein, 370 aa, Gossypium hirsutum
  Clone ID: GOSHI-09MAY01-C12688_1.pep
EGLEKAAPFLKALIEIPFIKSVIQGFLPGIVLKLFLIFLPTILMIMSKFEGFTSISSLERRSATRYYLFNLVNVFLGSVIAGSALDQLNTFLKQSANEIPKTIGVAVPMRATFFITYIMVDGWAGIAAEILMLKPLIIYHLKNTFLVKTEKDREEAMNPGSLSFNVGEPRIQLYFLLGMVYATVTPVLLPFIVVFFGLAYVVFRHQIINVYNQEYESAAAFWPDVHGRIIIALLVSHVALIGLLSTKHLAQAAPLLITLAVLTIWFYRFCKARYEPAFVRYPLQEAVMKDTLERARDSNFNLKPYLQNAYIHPVFKEEDDDEEEEVVKLENESVLVPTKRQSRRNTPVPSKMSGASSQSLPGAVPEHSVP

SEQ ID NO: 82227 - protein, 85 aa, Gossypium hirsutum
  unsure (1)..(85): unsure at all Xaa locations
  Clone ID: LIB3584-010-P1-K1-D7.pep
SFNVYNQXYESAAAFWPDVHGRIIIALLVSHVALIGLLSTKHLAQAAPLLITLAVLTIWFYRFCKARYEPAFVRYPLQVCWCLHI

SEQ ID NO: 82228 - protein, 120 aa, Gossypium hirsutum
  unsure (1)..(120): unsure at all Xaa locations
  Clone ID: GOSHI-09MAY01-C12108_1.pep
MASNGASTEQGVRDVTENSLEKIKRQLASGSGRNLLQGPLLKRSETLRKWNERWVILDPTTGKMEYKTRRNEPTVKGIMXFNEYSTIAISSGNFHGLPKFEGCCFYIGTPQIXDYFLCAE

SEQ ID NO: 82229 - protein, 242 aa, Gossypium hirsutum
  Clone ID: GOSHI-09MAY01-C112060_1.pep
MDEISSLSSPSCWSKEYSRLGDMQPTNLADAFGSLDPSLLSPLHGLSVKSATPTQMQSPTALQIRQNQLRATYPPNHSSSLVRNPSAYGFDSSAAVAAALMNSRSSAFATRAPALAAPGAGASRAGLTAPANSATMMSSNISDWSSPDGKLDWGIQGDELNKLRKSASFGFRNTPTPTPTPTPSIIDEPDVSWVHSLVKDVTPASSGSMQQQQQQYNIGKGVRERLPPWVEQMYIEQEQMVA

SEQ ID NO: 82230 - protein, 118 aa, Gossypium hirsutum
  unsure (1)..(118): unsure at all Xaa locations
  Clone ID: GOSHI-09MAY01-C12038_4.pep
PGSQNLPKSCWALSNARPLSSLRNPTVEPCALITRTTANRASLNLLSXTACASLFTHTVPSLSSSATPTTYARPSPPSTSGTPSSLSKPAEYVISKVDDLLNWARRGSLRPTPSLPLP

SEQ ID NO: 82231 - protein, 212 aa, Gossypium hirsutum
  Clone ID: GOSHI-09MAY01-C12038_1.pep
MALITRTTANRLPHLLSLQRALAIHTTVPSLSSSATPTTYARPSPPSTSGTPSSLSKPAEYVISKVDDLLNWARRGSIWPMTFGLACCAVEMMHAGASRYDFDRFGVIFRPSPRQSDCMIVAGTLTNKMAPALRKVYDQMPEPRWVISMGSCANGGGYYHYSYSVVRGCDRIVPVDIYVPGCPPTAEALLYGVLQLQKKINRRKDFLHWWSK

SEQ ID NO: 82232 - protein, 54 aa, Gossypium hirsutum
  Clone ID: LIB3146-059-Q1-K1-B2.pep
QSPSTWHFTRKFDFIYLLLNTAKCSANSPEITCKFSYLDHQWRKSLSLLIFFCN

SEQ ID NO: 82233 - protein, 121 aa, Gossypium hirsutum
  unsure (1)..(121): unsure at all Xaa locations
  Clone ID: LIB3135-041-Q1-K1-F12.pep
APGPPPIASLTSSLSSSATPTTYARPSPPSTSGTPSSLSKPAEYVISKVDDLLNWARRGSIWPMTFGLACCAVEMMHAGASRYDFHRFGVIFRPSPRQSDCMIVAGTLTNXMAPALRKVYD

SEQ ID NO: 82234 - protein, 98 aa, Gossypium hirsutum
  unsure (1)..(98): unsure at all Xaa locations
  Clone ID: uC-gsronu33B089c07b1.pep
KPPPSPASNHPNHCPIAHPYLLSLQRALAFHTTAPSLSYSATPTTYARPSPPSTSGTPSSLSKPAEYLISKVDDLLHWAPRVSIXPMTFGLACCAVKM

SEQ ID NO: 82235 - protein, 60 aa, Gossypium hirsutum
  Clone ID: GOSHI-09MAY01-C12388_1.pep
KLCIQHHIISNLLTIFFIYQSPDTTINGLDRHFHSFFNYQTPPRTKKKPTRPPTRPPTRP

SEQ ID NO: 82236 - protein, 80 aa, Gossypium hirsutum
  Clone ID: uC-gsflnu33B037b07b1.pep
SRGVIAQTDGARMSIASFYNPGSDAVIYPAPALVEKEEEEEKKGLYPKFVFEEYMKLYGVLKFQAKEPRFEAMKAREATA

SEQ ID NO: 82237 - protein, 42 aa, Gossypium hirsutum
  Clone ID: uC-gsronu33B104f09b1.pep
HASAKFVFEDYMKLYAVLKFQAKEPRFEAMKAREATAPIVTA

SEQ ID NO: 82238 - protein, 63 aa, Gossypium hirsutum
  Clone ID: LIB3166-051-P1-K1-E3.pep
STNKIQVQDTAVYTDEGMAATIKAIKAILVQKLKESQLIENQIKGLEEALKDLGGSAVDLPSP

SEQ ID NO: 82239 - protein, 49 aa, Gossypium hirsutum
  Clone ID: LIB3272-045-P1-K1-B3.pep
TQKQRPHVNLKDHHLHQQVIDEQNPGSGFLNYNSRGTVIKASLSGGNLK

SEQ ID NO: 82240 - protein, 82 aa, Gossypium hirsutum
  Clone ID: GOSHI-09MAY01-C112350_1.pep
VRVPKKTEDYFIIYSHSSIFSYRRRKKEKMNQNMSSLLIGIVGAAVTLSAYSQTFISPTQCVTVGLLVLMFGLLVREGLISL

SEQ ID NO: 82241 - protein, 237 aa, Gossypium hirsutum
  Clone ID: GOSHI-09MAY01-C12368_1.pep
PPCFPDLSSLENANTLGSLRLGKYTEWFNDVHSTDISDVCEDVLKLLSKSHGCETIEIVIPELHEMRTAHVVSIGSETQCSLNPDCEDGKGVKLTYDTRISMALFRSFTASDYVAAQCLRRRIMHHHMEIFKKVDVIVTPTTGMTAPKIPSSALKDGETDMQVTAYLMRFIIAGNLLGLPAITVPVGYDKQGLPIGLQLIGRPWGEATILRLASAVEELCAKSRKKPASFHDLLKTK

SEQ ID NO: 82242 - protein, 149 aa, Gossypium hirsutum
  Clone ID: LIB3829-029-Q6-N6-E9.pep
GKGVKLNYDTRTCMALFRTFTASDYVAAQCLRRRIMHHHLEIFKKVDVIVTPTTGMTAPKIPPSALENGESNMQVSGYLMRFILAANLLGLPAITVPVGHDKQGLPIGLQLIGRPWGEATILRLASAIEELCAESRRKPASFHDILKTK

SEQ ID NO: 82243 - protein, 96 aa, Gossypium hirsutum
  Clone ID: LIB3829-022-Q6-K6-F1.pep
GKEKGKGEGKGRERKEKKKREKRETRKGRERRGKGRERRRERKEKRKKKTRKAKREGNGKGKKKERREAERNRATSRKEKETPQRATGREITTTRQ

SEQ ID NO: 82244 - protein, 60 aa, Gossypium hirsutum
  Clone ID: LIB3189-027-P1-K1-G11.pep
HAPAITVPVGYDKQGLPIGLQLIGRPWGEATILHLASAVEELCAKSRKKPASFYDILNIK

SEQ ID NO: 82245 - protein, 64 aa, Gossypium hirsutum
  Clone ID: GOSHI-09MAY01-C112330_1.pep
HAFGRTVENILELAGFKNVKSKVIGSRNPHNTVKAVFKALNAVETPKDIQEKFGRTVVEKHLLQ

SEQ ID NO: 82246 - protein, 140 aa, Gossypium hirsutum
  Clone ID: GOSHI-09MAY01-C12298_1.pep
MDFRVMGFDSPLFHTLHHMMDLNEDGDNKNNPNAASRTYVRDAKAMAVTPADIKEDSKSYMFVVDMPGLKPGDIKVQVEEENVLLISGERKREEEKEGAKYIRMERRVGKLMRKFVLTDNANRDCVTAECKDGVMTVTVE

SEQ ID NO: 82247 - protein, 149 aa, Gossypium hirsutum
  Clone ID: GOSHI-09MAY01-C12288_1.pep
PRVRLFPFDLVHDLQNLENLIVRGFGQIEEIIGPKDEEDNHKGNGTQAPTKFSLPKLKELELTCLPELKSICSSNREMVCNSLRKIKVRNCTKLKRMPLYLPLFQDTHQSAPSAHPFERIRICPKEWWESVEWDYPNAKEVLRPWLNLY

SEQ ID NO: 82248 - protein, 193 aa, Gossypium hirsutum
  Clone ID: GOSHI-09MAY01-C12258_1.pep
GRVGSDCRKQISEALAADKFEQRGMKKEYEYSMNVLSFQIQTSDIIPAFPYVAPFSSTVPDCCRIVRSFIEDSVSFMSYGEQLDFYNVKKYLDRLLSEVLDGALLKLISSSVHGVSQAMQVAANMAVFERACDFFFRHAAQLSGIPLRMVEKGKRQFPLNKSRDAAEEMLSGMLKTKVDGFMTLIENVNWMTD

SEQ ID NO: 82249 - protein, 177 aa, Gossypium hirsutum
  Clone ID: GOSHI-09MAY01-C12218_1.pep
MLNPMAIPTQLVLSFLLLSFSPVVFSDREDCVYSVYIRTGSIIKGGTDSIIGLRLYDANAYSVEISNIEAWGGLMGPGYNYFERGNLDIFSSRGRCLDAPLCAMNLTSDGSGEHHGWYCNYVEVTMTGVHKPCSQQQFTVEQWLALDAPPYDLTAIRNYCPSEVPDDRRHRKSSSSI

SEQ ID NO: 82250 - protein, 99 aa, Gossypium hirsutum
  Clone ID: GOSHI-09MAY01-C112230_1.pep
LGCVYLAIKTSYNLPQLIDHLLLLSQGRRDIEMQSPPEKAFVMLKREATDLAGSSFTSHVDSTFQDAVNAAASSASSSSSDDDSQVTQNEDDPLYGEYF

SEQ ID NO: 82251 - protein, 127 aa, Gossypium hirsutum
  Clone ID: LIB3189-023-P1-K1-E1.pep
AHRLSSPLYRRRLSSSFSTATKDKVPLLYKSPEINEDNGNEAVTLQVLSWGRGASGQLGGGIEEIRIYPSPVANLLLPRAFFSLSPTPGKTQNQNQKDQTLHSVGISCGLFHSGLGVGGKLWMWGKG

SEQ ID NO: 82252 - protein, 92 aa, Gossypium hirsutum
  Clone ID: LIB3272-011-P1-K1-C10.pep
AHRLSSPLYRRRLSSSFSTATKDKVPLLYKSPEINEDNGNEAVTLQVLSWGRGASGQLGGGFEEISNYPSFVAILSLPRAFFFLFLTLVLNP

SEQ ID NO: 82253 - protein, 199 aa, Gossypium hirsutum
  Clone ID: GOSHI-09MAY01-C13978_1.pep
MEIDSESEKPSVKIPEEGGSMQMNSSEKKGGDDEKEQLAGIMDKLNIESSSSGFKKKPVIIIVVGMAGSGKTTLLHRLVCHTQASNIRGYVMNLDPAVMTLPFGANIDIRDTVKYKEVMKQFNLGPNGGILTSLNLFATKFDEVISVIERRADQLDYVLVDTPGQIEIFTWSASGAIITEAFASTFPTVVTYVVDTPRS

SEQ ID NO: 82254 - protein, 173 aa, Gossypium hirsutum
  Clone ID: GOSHI-09MAY01-C13968_1.pep
DPRVRPRVRPRVRKNKRNPIKLSVLHTTLQSPKTKSKRSSKMRYGISRRKRALLRCLFILFAAFTFITRLMLTLRSLDAPPTTTTTTSNGAVLDLPAQLELLDLKRVAFLSSAETPIQAGPKTKNCATVDEMGKVFRGRILKDSLRVRKLIQTHFSINGNRISLLSPFSKNYW

SEQ ID NO: 82255 - protein, 230 aa, Gossypium hirsutum
  Clone ID: GOSHI-09MAY01-C113870_1.pep
HAFVQETKAALEKIVNVRLSAAQPKNVPKQSSDSKYIKYKPSQQSAAFNSGAKERIIRMVEMPVDPLEPPKFKHKRVPKASGSPPVPVMHSPPRPVTVKDQQDWKIPPCISNWKNPKGYTIPLDKRLAADGRGLQEVQINDNFAKLSEALYVAEQKAREAVAMRSKVQKEMMMKEMDRKEQELRALAAKARSERTGTVAPSTAVPMSSDRSAMDTDTRVDYEPARDRERD

SEQ ID NO: 82256 - protein, 209 aa, Gossypium hirsutum
  Clone ID: GOSHI-09MAY01-C13868_1.pep
HSQPPAVGGSSSAIRNRPRTLAELTVPLPQRTVSLPVPLPLPPASNAARSTCSNGNANSKQVNLSEIDRVNRIGSGAGGTVYKVIHRPSSRLYALKVIYGNHEETVRRQIRREIEIPRDVNHPNVVKCHEMYDQNGEIQVLLEFMDVGSLEGTHISHESNLSVLARQILNGLNYLHRRHIVHRDIKPSNLLINSKKKVKIADFGVSRIL

SEQ ID NO: 82257 - protein, 258 aa, Gossypium hirsutum
  Clone ID: GOSHI-09MAY01-C13588_1.pep
MASDQTLFHCCLLTLYIIALPTWISLYFLQAPYGKHNRPGWGPTISPPLAWFLMESPTLWLTFFLFPSGQHFYNPKSFLLISPFLFHYFNRTVLYPLRLSRNTTQTRAFPVSVAFMAFGFNLLNGYLQARWVSHYKDDYENEELFWWRFLGGLLIFVFGMWVNVWADKVLVGLKKQGDGGYKIPRGGLFELVSCPNYFGEIMEWFGWALMTWSWVGFGFFLYPCANLMPRARATRLWYLEKFKDDYPKDRKAVIPFIY

SEQ ID NO: 82258 - protein, 232 aa, Gossypium hirsutum
  Clone ID: GOSHI-09MAY01-C113570_1.pep
LSGSLPRHLNPDLTHVDVSDNKLKGKVPTSLTLLENLKFLNLSSNGLDGEIPTELGNMISLKNLSLASNSFSGSIPSSFSAIPGLVHVDLSNNQLNGSVPKFLSELKGLKVLNLENNQLNGVLPFNASFIKRLAVFKGGGNSILCYNRPVLSSKLKLGVARCDKNGFPIVAPPPKESSADSESDYGDDDAVDSGNKKEKHHGPCKVVLGFAIGISSIVFLIIFLVLIAKCCR

SEQ ID NO: 82259 - protein, 88 aa, Gossypium hirsutum
  unsure (1)..(88): unsure at all Xaa locations
  Clone ID: GOSHI-09MAY01-C13568_2.pep
ETLRAGYAIFASGIIVGFANLVCGLCVGIIGSSCALSDAQNSSLFVKILVIEIFGSALGLFGVIVGIIMSAQATWPAKSVXFHDLSRK

SEQ ID NO: 82260 - protein, 180 aa, Gossypium hirsutum
  Clone ID: GOSHI-09MAY01-C13568_1.pep
MAATLGDSSSWSTALVKISPYTFSAVGIAIAIGVSVLGAAWGIYITGSSLIGAAIKAPRITSKNLISVIFCEAVAIYGVIVAIILQTKLESVPSSQIYAPESLRAGYAIFASGIIVGFANLVCGLCVGIIGSSCALSDAQNSSLFVKILVIEIFGSALGLFGVIVGIIMSAQATWPAKSV

SEQ ID NO: 82261 - protein, 29 aa, Gossypium hirsutum
  unsure (1)..(29): unsure at all Xaa locations
  Clone ID: LIB3825-026-Q6-K6-B10.pep
XIFGSALGLFGVIVGIIMSAQATWPAKSV

SEQ ID NO: 82262 - protein, 511 aa, Gossypium hirsutum
  Clone ID: GOSHI-09MAY01-C13538_1.pep
MVFLFVSMENLYHYLVIILFILLTIKLLIHKTKNLPPSPFSLPIIGHLHLIKNPLYQSLTTLLSKYGPVLYLKFGCRHVLVLSSPSAVEECLNKNDIIFANRPRTMAGDLMTYNYTTFVWAPYGSLWRNHRRLSAVEIFCSNSVEKFSSIREEEVADFVRRLFEVSSGNGTQKVDLKYLFCLLTANVMWRTVAGKRGVEDPKDVEAEKMFFTEFKSLFFPSLGTNICDFFPVLRWIGFLGIEKKLKEIHRRRDEYLQNLVDGIRLNISKKNFSLIERLLSLQQDDPGFCPDQVIKTMVLMMFIAGTESTAITMEWTMALLLSHPEALQKARDEIIRHVGHERLLNESDLPKLPYLRCVVNETLRLYPAAPLLLPHCPSEDCVVDGYEIPKGTILLVHAWAIQRDPSIWEEPTKFKPERFYEGTLEDKEGFKYLPKYLPFGLGRRACPGRNMGLRSVLLAIGVFIQCFEWENVGSDKVDMTPNTIGLSILKARPLEALCRPRPDVIKLLSQL

SEQ ID NO: 82263 - protein, 170 aa, Gossypium hirsutum
  unsure (1)..(170): unsure at all Xaa locations
  Clone ID: GOSHI-09MAY01-C113470_1.pep
PTRPPTRPPTRPVAKRLSAFGCTIAYTARNKKQSVPIPFYANVRDLAANSDVLVLCCALTKETYHLVNKDVMVALGKEGVIINVGRGSLINEKELVQCLVGGEIGGAGLDVYENEPNVPKELFGLDNVVLSPHSAPATPESFEAVLQLTGGNLKAFFXSNKPLVSVVSNE

SEQ ID NO: 82264 - protein, 423 aa, Gossypium hirsutum
  unsure (1)..(423): unsure at all Xaa locations
  Clone ID: GOSHI-09MAY01-C13448_1.pep
MKSLSPSNNLYFFLLHFFIITVYFASLSFGLKIGETCSSSGSSSSCDSGLTCQTCAANGNTRPRCTRIQPLSPTSKVKGLPFNKYSWLTTHNSFALKGVKSETGSSIIAPTNQEDTITNQLKNGVRGLMLDMYDFNGDIWLCHSFGGQCFNATAFQPAINVLKEIQAFLEANPSEIITIFIEDYVVSPQGLTKVSNASGLRQYWFPVSKMPKNGEDWPTVDEMVKQNQRLVVFTSKSAKEASEGIAYEWRYVVENQYGDDGMKAGSCPNRAESFSXNTKSRSLILQNYFPTNPNETAACAENSAPLVKMLDTCHKAAGDRWPNFIAVDFYQRSDGGGASEALDVANGHLTCGCDNMAYCKANATSGTCEVPPMSPPPPAAATQTTTENPAASNSNIANTDARPLQLRWLLATILTKLLLLQLW

SEQ ID NO: 82265 - protein, 129 aa, Gossypium hirsutum
  Clone ID: GOSHI-09MAY01-C13408_2.pep
GDKSKTSLSPSSKPSIPDSKLAFDHFCVHAAGKTVLDELQKNWELSENNMEASRMTLHRFGNTSSSSIWYELAYLEAKERVKRGDRIWQIAFGSGFKCNSVVWRSMRRVRKPSRDNPWLDCIDRYPVRA

SEQ ID NO: 82266 - protein, 305 aa, Gossypium hirsutum
  unsure (1)..(305): unsure at all Xaa locations
  Clone ID: GOSHI-09MAY01-C13408_1.pep
VRSLSAMIIRGGGGGGNILSYNLGGMGCSAGIIAVDLARXMLQANPNNYAVVVSTEMVGYRGYPGRDRSMLVPNCFFRMGCSAVLLSNRRRDYRRAKYRLEHLVRTHKGADDRSFRSIYQEEDEQGFKGLKVSKDLMEIGGDALKTNITTLGPLVLPFSEQLFFFATLIWRHFFGGDKSKTSLSPSSKPYIPDYKLAFEHFCVHAASKTVLDELQKNLELSENNMEASRMTLHRFGNTSSSSIWYELAYLEAKERVKRGDRIWQIAFGSGFKCNXSVVWRSMRRVRKPSRDNPWVDCIDRYPVRA

SEQ ID NO: 82267 - protein, 131 aa, Gossypium hirsutum
  unsure (1)..(131): unsure at all Xaa locations
  Clone ID: LIB3493-004-P1-M1-H4.pep
SPSSKPYIPDYKLAFEHFCVHAASKTVLDELQKNLELSENNMEASRMTLHRFGNTSSSSIWYELAYLEAKERVKRGDRIWQIAFGSGFKCNSVVWRSMRRVRKPSRXDNPWVDCIDRYPVRSLNYFNGRWL

SEQ ID NO: 82268 - protein, 427 aa, Gossypium hirsutum
  unsure (1)..(427): unsure at all Xaa locations
  Clone ID: GOSHI-09MAY01-C13428_1.pep
MEEAIVIYPASMLTHLAPMVEFAKLLLTQHPSLSIHILIATLPSQPSSTVPSPVPPSITFHYLPTFDLLPTSTDLDPLFFDVIRLRNPDVRRTLLTISNNYTLNAIIVDFFCTSAAFEVASDLNLPAYSFLPTALGAAACLLYLPTLCNKFTQSFQHLNVLLDIPGAPPIPSADMPPTTFKGNKLYDVFLDIATNLRRSTGIIVDTFEYLEPKSFKEINDGLCLPDYPTPPLYCIGPLIVNTTVDGDGVPQCIKWLDSQPSKSVVFLCFGSLGSFSVQQLKEIAVGLERSGQRFLWIVRNPPLENQSLNIDTKVDPDLKSLLPPGFLERTKEKGLVVKSWAPQLAVLNHXRVGGFVTHCRWKLIAKIRXCAGVPMLAXWPLYAEXQRFNRVLXVQQNDQWRCRWGSRKTGFLSSTXEVENRVQELKG

SEQ ID NO: 82269 - protein, 191 aa, Gossypium hirsutum
  unsure (1)..(191): unsure at all Xaa locations
  Clone ID: GOSHI-09MAY01-C13788_1.pep
MLEQLLIFTRGGLILWTCKELGNALKGSPIDTLIRSCLLEERSGAASYNYDAPGASYTLKWTFHNELGLVFVAVYQRILHLLYVDDLLALVRREFSEIYDPKMTVYNDFDETFRQLRMEAEARAEELKKSKQMVKPVNNRXKPGQAQKAGFDKGNKKREGSSAAGGGDDNDKRKGCKVDHLDGNRNTHEID

SEQ ID NO: 82270 - protein, 130 aa, Gossypium hirsutum
  Clone ID: uC-gsflmaxxa076d03b1.pep
MLEQLLIFTRGGLILWTCKELGNALKGSPIDTLIRSCLLEERSGAASYSYDAPGASYTLKWTFHNELGLVFVAVYQRILHLLYVDELLAMVRREFSEIYDPKRMVYNDFNETFRQLRREAEAGAEEVKES

SEQ ID NO: 82271 - protein, 113 aa, Gossypium hirsutum
  unsure (1)..(113): unsure at all Xaa locations
  Clone ID: LIB3197-060-Q1-M1-E8.pep
MLQQLLIFTRGGLILWTCKELGNALKGSPIDTLIRSCLLEERSGAASYNYDAPGASYTLKWTFHNELGLVFVAVYQRILHLLYVDDLLALVRREFSEIYDPKGLXYNDFDETF

SEQ ID NO: 82272 - protein, 114 aa, Gossypium hirsutum
  Clone ID: LIB3585-014-P1-K1-B11.pep
MKVIAAFLLAVLGGNTNPSADDLKAILGSVGAEADDDKIEMLLSEVKGKDITELIASGREKLASVPSGGGGGVAVAAPTTGGGAGDAPAAETKKEEKVDEKEESDDDIGFSLFD

SEQ ID NO: 82273 - protein, 92 aa, Gossypium hirsutum
  Clone ID: LIB3189-013-P1-K1-C2.pep
MKVIAAVLLAVLGGNTNPSAGDLKAILGSVAAEADNDKIEMLLSEVKGKDITELIASGREKLASVPSGGGGVFTASFFFWGGGWGFIFFIFF

SEQ ID NO: 82274 - protein, 284 aa, Gossypium hirsutum
  Clone ID: GOSHI-09MAY01-C13118_1.pep
MNKGEISLAMEDILPKGIVKKTLWARRVDMLSYSVNSLRFTNLRFKDAKSPRSTQVVRLLINPDDTQKILTGCKARGIKLCGALGAAGLISAHSSKSRSDHQKKKYGVVTLTDCRSILEPPLSNHHFGFYHSAILNTHAIKGGEKLWELAEKVYTVFTHYKSCNKHLSDMADLNFLMCRAMENPGLTPSASLRTCLISVFEDTVIDESSNQQNQVGVEDYMGCASAHGIAPSIAIFDTIRDGRLDCICVYPSPLHSREQMQELVDNMKCILVDAGKNVADETES

SEQ ID NO: 82275 - protein, 197 aa, Gossypium hirsutum
  Clone ID: GOSHI-09MAY01-C13138_1.pep
MIPFVPAIFLHVIFIFFALVNGEQETIYDILKAHGLPTGLLPKGITRFEFDETGRFEVQLDQACNAMFECQFRYDRNVSGTLKYGQIGALSGISSQELFLWFQVKGIWVDVPSSGLIYFDVGVVSKQFSLSWFETPRDCMAIQDDSESGDSIGDGKLLAEAVAKSPRARHRFELDHGGLGRNDIYIVRRPETREVVQ

SEQ ID NO: 82276 - protein, 160 aa, Gossypium hirsutum
  Clone ID: GOSHI-09MAY01-C13058_3.pep
RSNNRELQLVSDLIDNTNRKWRSDLINSTFQAEIAQKILQIPLAETDHEDTQVWKGELSGEYSIRSYNMLFWILLIIYYRPKLKSFTGNYGASNYPKKLQSLFGQFPGIISLILLISSTGKSLQMIDVSVVAPGQRKVFMSGFSREVTALNADSSVMLYG

SEQ ID NO: 82277 - protein, 133 aa, Gossypium hirsutum
  Clone ID: GOSHI-09MAY01-C13058_1.pep
IRLAVTEHEDTQIWKGELSGEYSVRRACKLLQYAIPNPSNYLLQTETKEFYRKLWSLQLPSKIAITIWRISWDFIPNLANLRYRKVISNDRCPRCCSWAEDSLHIFRECPRRTIHFDAAFDSRNFKSAAGLVG

SEQ ID NO: 82278 - protein, 79 aa, Gossypium hirsutum
  Clone ID: LIB3189-003-P1-K1-E12.pep
KCQMTLTNKLVIGAIIRDIQNKKPCFRDIIFQHIHTSGNLQAHRLAKDALDRGETFYLMGEELNRHIFASKRRWPINPD

SEQ ID NO: 82279 - protein, 96 aa, Gossypium hirsutum
  unsure (1)..(96): unsure at all Xaa locations
  Clone ID: LIB3825-011-Q1-K6-D11.pep
QNFXLFFFFFFFFFFFFFNLNPINYLLQTKIKEFYKKLWSLQLPSKIAITIWQIFWDYIPNLANLRYRKVTSNDRCPRCCFWAEESLHVFRECLGF

SEQ ID NO: 82280 - protein, 57 aa, Gossypium hirsutum
  Clone ID: uC-gsronu33B148g01b1.pep
NTNKKWRSDLINSTFQAEIAQKILQIPLAETKHEDTQVWKVVLSGAFSMRSAYKLLQ

SEQ ID NO: 82281 - protein, 90 aa, Gossypium hirsutum
  Clone ID: GOSHI-09MAY01-C13018_2.pep
YTIRPSFQLFSEFQRRHMKDSEGNFTAQPPPYEPIVAEDGSVHNLNEYMEIRAADVLTDLPPELTSAVFGQKHGVVIGEAHLEELFSQIP

SEQ ID NO: 82282 - protein, 193 aa, Gossypium hirsutum
  unsure (1)..(193): unsure at all Xaa locations
  Clone ID: GOSHI-09MAY01-C13018_1.pep
TTSELRLQPNNLDASLFSHTPFYCEENVYFLCKKLCSSEIADAQGSDLFVVFISNDNKQIPLWHQKASHRADGVILWDYHVICVQRKKDGGTHLVWDLDSSLPFPCPLATYVSETIRPSFQLFSEFQRFFRVVHAPLFLRHFASDRRHMKDSEGNFTAQPPPYEPIVAEDGIXHNLNEYMENRAGDVLTDLPP

SEQ ID NO: 82283 - protein, 250 aa, Gossypium hirsutum
  Clone ID: GOSHI-09MAY01-C13008_1.pep
MSRRYDSRTTIFSPEGRLYQVEYAMEAIGNAGSAIGILSKDGVVLVGEKKVTSKLLQTSTSTEKMYKIDDHVACAVAGIMSDANILINTARVQAQRYTYAYQEPMPVEQLVQSLCDTKQGYTQFGGLRPFGVSFLFAGWDKNYGFQLYMSDPSGNYSGWKAAAIGANNQAAQSMLKQDYKDDITREEAVQLALKVLSKTMDSTSLTSEKLELAEVFLTPSGNVKYQVCSPDSLSKLLVKFGVTQPATEAS

SEQ ID NO: 82284 - protein, 82 aa, Gossypium hirsutum
  unsure (1)..(82): unsure at all Xaa locations
  Clone ID: LIB3828-034-Q6-K6-H10.pep
AFAHQVETGWGGGGARKKAVQLALKXLSKTMDSTSLTSXXKLELAEVFLTPSGNVKYQVCXGGGLSKLLVKFGVTQPATEAS

SEQ ID NO: 82285 - protein, 129 aa, Gossypium hirsutum
  unsure (1)..(129): unsure at all Xaa locations
  Clone ID: GOSHI-09MAY01-C13028_1.pep
NAFHIISLSQXFDLSPLFEEKKREEEELRFATTRPASSVISRLEEVAKSVKFNVKKSESKVRLQGQECGRKGKLAIAADIFAVTPLFLVVEVKKDNGDTFEYNQFCSKQLRPALHDIVWTSPAEKPTVA

SEQ ID NO: 82286 - protein, 72 aa, Gossypium hirsutum
  Clone ID: LIB3493-054-P1-M1-D2.pep
NEAKSVKFNVKKSESKVRLQGQECGRKGKLAIAADIFAVTPSFLVVEVKKDNGDTFEYNHVCSKQLPPALQD

SEQ ID NO: 82287 - protein, 71 aa, Gossypium hirsutum
  Clone ID: GOSHI-09MAY01-C13358_1.pep
RWKELPGFWKQRPKLERKVKFLKLIHRWNSLPHLASLHDAYAWGGSNVDRHKHREEVVKSYSICFRSNQAG

SEQ ID NO: 82288 - protein, 60 aa, Gossypium hirsutum
  Clone ID: GOSHI-09MAY01-C113350_1.pep
MASSMNFLMLLSLVVFALMASAMAAEAPAPSPTSGSGSFSPSFVSVFAVVALLFGSALRF

SEQ ID NO: 82289 - protein, 171 aa, Gossypium hirsutum
  Clone ID: GOSHI-09MAY01-C13308_1.pep
MAPHREGSDASVEAMVAQVEKHPISSILIIIAMQTEALPVVNKFQLIENPHSSFPKGVPWIHYHGAYKDIIINLVWPGKDLTFGVDSVGTISASLVTYASIRALQPDLIINAGTAGGFKEKGAAIGDVFLVSHVAFHDRRIPIPVFDLYGVGLRQTYSTPILLRALSVKTG

SEQ ID NO: 82290 - protein, 47 aa, Gossypium hirsutum
  Clone ID: LIB3197-044-Q1-M1-G3.pep
MAPHTEGSDASVEAMVAQVEKHPISSNLIIIAMQTEPLPVVNKFQLI

SEQ ID NO: 82291 - protein, 142 aa, Gossypium hirsutum
  Clone ID: GOSHI-09MAY01-C13338_1.pep
HALIQQVAVGRLPELNVFGHDYPTKDGSAVRDYIHVMDLADGHIAAVRKLFSSENIGCIAYNLGTGSGTSVLEMVAAFEKASGKKIPIKLCPRRPGDATAVYASTEKAQKELGWKAKYGIAEMCKDQWKWASNNPWGYQSKP

SEQ ID NO: 82292 - protein, 103 aa, Gossypium hirsutum
  unsure (1)..(103): unsure at all Xaa locations
  Clone ID: LIB3149-047-Q1-K1-F7.pep
MPDGVPLAPFVNFLLVLSCIAYNLGTSSGTSVLEIVVAFEKASGKKIPIKLCPRRLGDATAVYASTEKAEKELGCKAKYGIAEMCRDQWKWASNNXWGYQSKT

SEQ ID NO: 82293 - protein, 59 aa, Gossypium hirsutum
  Clone ID: LIB3148-043-Q1-K1-D10.pep
LKIPIKLCPRRPGDATAVYVSTEKAQKELGWKAKYGIAEMCRDQWKWASNNPWGYQSKP

SEQ ID NO: 82294 - protein, 120 aa, Gossypium hirsutum
  Clone ID: GOSHI-09MAY01-C13288_1.pep
MGRGVSSGGGQSSLGYLFGSGEAPPPKPTNVTSTGTTSNEVPQKQIEVVKETVQKPTTASPSSGDAKEIPAGVPGSKTNNYFRADGQNCGNFLTERRTTKVHAAPGGGSSLDYLFGGSEK

SEQ ID NO: 82295 - protein, 122 aa, Gossypium hirsutum
  unsure (1)..(122): unsure at all Xaa locations
  Clone ID: GOSHI-09MAY01-C13208_1.pep
MVSKHNPSGNKKRSPLSIFAVIGLCCFFYILGAWQRSGFGKGDSIALEVTKQADCSILTNLNFETHHNDVEIVEPSKPKAHVFKPCDVKYTDYTPCQEQDRAMXFPGITWFNRERHCPPEEE

SEQ ID NO: 82296 - protein, 53 aa, Gossypium hirsutum
  Clone ID: LIB3272-026-P1-K1-C6.pep
NMVIPLPNGDVDVSMLKEMVCIINGKFETEASGNVTLKTVHKIGQTGVTYISR

SEQ ID NO: 82297 - protein, 52 aa, Gossypium hirsutum
  Clone ID: LIB3149-001-P1-K1-H9.pep
GNVTLKTVHKIGQTGVTYISRGALTHSVTALDISLKIDTGLALEVGRRTKRA

SEQ ID NO: 82298 - protein, 122 aa, Gossypium hirsutum
  Clone ID: GOSHI-09MAY01-C109580_1.pep
NHNLIPGWPNKPNPQTKNQSRNPSGSCLRRNRNLSPNASYVCTLQNSPHTRASTAQYASRQGPAHVMCSVRVNKTNTTAAKQGNIVLFYFSFGYKAKKAPIVFFLPQPYPHTDIYAYRSNRK

SEQ ID NO: 82299 - protein, 172 aa, Gossypium hirsutum
  Clone ID: GOSHI-09MAY01-C109750_1.pep
MEKVKELLHLDKEAEETVSRLTIHPHRVGYERSFYNDFGLRGIRVDKVEPGFVSCTFKVPPRLTDKNGNLATGAIANIVDEVGGSAVFVIGVPMKVSVDMSISFLGAAKLGDELEITSKALGERGGYAGTLVHIRNKATGELIAEGRHSLDGNESSKLLFGNQSSNSSPLLD

SEQ ID NO: 82300 - protein, 112 aa, Gossypium hirsutum
  Clone ID: GOSHI-09MAY01-C109690_1.pep
NRNKALVFLVGKDYVSAVREYEECMERDPADVVAVNNKALCLMYLRDLSDSIKVLENSLERVPTVALNETLVVNLCSMYELAYVNHSEIKRTLSNWMARVSPDDFDASCTTV

SEQ ID NO: 82301 - protein, 227 aa, Gossypium hirsutum
  Clone ID: GOSHI-09MAY01-C109080_1.pep
MISGGLNLVMTVIGFTVSIMFIVFICTRLICARVQLHASRRPFAISSRSDLNMLERGLHGIEPVVVANFPTKTFCDECFSANKDAQCTVCLSEYRCEDVLRILPYCGHSFHVTCIDLWLQQHSTCPVCRISLRELPEKKRLMQPLFSPAGRSHFGTESFNMHTYNCLLRGHGFPSRTRENPVMDPNQENSFATGNLGSGENMSRTIEDDEDNIKEPRKKLVESPSNP

SEQ ID NO: 82302 - protein, 132 aa, Gossypium hirsutum
  Clone ID: GOSHI-09MAY01-C104500_1.pep
THLQKDSISRSLCLDFETLSLEFDPGRKGARSHLVDIVNAKADGTLNRILTLLKSVKAPSLRKAALIHINPFSRVIEAIEKGNPKFAVEGNLKFAIKSAIDAGSKDGSKGVGAVTPLKFLNFLNLYINYYVF

SEQ ID NO: 82303 - protein, 122 aa, Gossypium hirsutum
  Clone ID: GOSHI-09MAY01-C104120_1.pep
LIGCDLRSASNRTLRILGNKEVIEVNQDSLGVQGRKLRSKDGLEVWAGPLSDNRVVVVLWNRSELRALITAAWRDFGLSPNTPAIVRDLWKHKYVSMNKRDRLTASVAPHACKMYVLTPLQS

SEQ ID NO: 82304 - protein, 102 aa, Gossypium hirsutum
  Clone ID: GOSHI-09MAY01-C105650_1.pep
EFTKFDQLMVETREVLSSAEFSNVVELSLKAVAKALVEEKGFQSGGGNLTNGMPLARLLPRIAQICPTLVEEPSKNQFIQIIQSVPEGGFFFTLLYSNMSAS

SEQ ID NO: 82305 - protein, 186 aa, Gossypium hirsutum
  Clone ID: GOSHI-09MAY01-C105340_1.pep
MGEQKGAKPEAEKKPAADSGAKQDDGKVTAIYKIDMHCEGCAKKIKRSIKHYEGVEDVKTDCGANKLTVTGKVDPAKVRDRLAEKTKKKVDLISPQPKKDAAPAAAAAAAGGSDKKPDAGKKPEEKKEEKKEEKKPPKESTVVLKIRTHCDGCIQKMRKIIKKTDGKLLIMIYLSNTILPVGESSV

SEQ ID NO: 82306 - protein, 186 aa, Gossypium hirsutum
  unsure (1)..(186): unsure at all Xaa locations
  Clone ID: LIB3543-056-Q1-K6-F5.pep
PRPPTRPRSRGRTRGPSQDVETDLXQTRLDVNSALAFLQXRLQQYKLAEMKLLAQQRDAEAKIPDIEKCLDVVATLEAKKGTGEALIADFEPSEGIYSRARIEDNDPVWLWLGANVMLEYSCEEAASLLKKNLEHAEASLEVLIPDLQFLRDQVTVTHVTTARVYNWDAHQRRMRAIAVSLSSIGS

SEQ ID NO: 82307 - protein, 140 aa, Gossypium hirsutum
  unsure (1)..(140): unsure at all Xaa locations
  Clone ID: AI730233.1.pep
MAAASSSSTESPKTTTERRGIPGAQFVEDVETYLTQTGFDVNSALAFLQERLQQYKLVEMKLLAQQRDLQAKIPDIEKCLDVVATLEAXKGTGEALIADFEVSEGIYSRACIEDNDSVCLWLGANVMLEYSCEEATLLLK

SEQ ID NO: 82308 - protein, 203 aa, Gossypium hirsutum
  Clone ID: LIB3543-029-Q1-K6-E6.pep
RVRPTLFRRGPQSSGGACSLLNPRLSFSLKPLFLFSQSSFAPRKFQIPRQFVSAKRKTFSALASGQASATDNGGRSGGGGRSGALSPSPVVEEVQRIDVNPPKGTRDFPPEDMRLRTWLFNHFREVSRLFGFEEVDYPVLESEVLFIRKAGEEIRDQLYCFEDRGNRRVALRPELTPSLARLVIQKGKSLSLPLKWFAIGQCW

SEQ ID NO: 82309 - protein, 154 aa, Gossypium hirsutum
  unsure (1)..(154): unsure at all Xaa locations
  Clone ID: LIB3543-029-Q1-K6-F5.pep
VIISHLVESQIPRHFVSAKRKTFSALASEQGWATDNGGTSGGRGRASALSSSTVAEEDQRIDVNPPKGTGDFPPEDMRLRTWIFNHFKEVXRLIGFEEVDYPVLESEVLFIRKAREEIKDQLYWCEDRGNRRVALRAELTPSLARLVIHKGKSL

SEQ ID NO: 82310 - protein, 78 aa, Gossypium hirsutum
  Clone ID: AI055375.1.pep
NIYSYYESKKSVIATATLDDDNGKLGTKTDYTNDDFGFIDDLSHLEFSDSDTLSEQILRKIDLLQSQAHKLKTRVDRR

SEQ ID NO: 82311 - protein, 181 aa, Gossypium hirsutum
  unsure (1)..(181): unsure at all Xaa locations
  Clone ID: LIB3543-030-Q1-K6-H8.pep
KNIKRSNEEEEKKRIENTTDLVSYMSCHNIYSYYESKKSIIATARGGDFLFXLGTKTDYTNDDYGFIDDLSHLEFSDTDTLSEQILRKIDLLQSQARKLKTRVDKTVTESPRKFSSINMLSSPALTGSRNQPSPTRSGDRALVRSQHTSSQHRSECHFRVLFRPGSAVSSHGEVTPFPDMI

SEQ ID NO: 82312 - protein, 79 aa, Gossypium hirsutum
  Clone ID: GOSHI-09MAY01-C100920_1.pep
RTAKNEFIRRKNLREIYLTSSPPRFHNAGATKKAMQLGATARFLPQHAAKVSFAYGKPREKVSAFVPILSDESFSMEPK

SEQ ID NO: 82313 - protein, 70 aa, Gossypium hirsutum
  Clone ID: GOSHI-09MAY01-C100580_1.pep
GRVGWKLIRMNQLLNDGHILVEGIKLTMEEQSVQLEAKHTTKLAGELLFPSCQAVADSNLIKEAKSALKS

SEQ ID NO: 82314 - protein, 66 aa, Gossypium hirsutum
  Clone ID: GOSHI-09MAY01-C100570_1.pep
SLPWASQVEFRVFIFLVFAHLGIHKFSILAWFLSTYWSYIEFSIVDFPIKLIGLRLGYLNFFFSDC

SEQ ID NO: 82315 - protein, 144 aa, Gossypium hirsutum
  unsure (1)..(144): unsure at all Xaa locations
  Clone ID: GOSHI-09MAY01-C100140_1.pep
NADTDPLPIPPPLDEDDESMDSNNSNDGEPVPHPTSEISRTXYPVVYPAYFPPFYPFSFPYWMGYNTEPTKTDTHEVVKPTAVHSKSPINVDELVGMSKLSLGESIGDNGPSSLSLKLDGSSRQSAFHANPSSRNSSGSPIHAV

SEQ ID NO: 82316 - protein, 139 aa, Gossypium hirsutum
  Clone ID: GOSHI-09MAY01-C100110_1.pep
KVACIGAWHPARVSFTVARAGHNGYHHRTEMNKKMRPRGRAGNESHAAMTDYDRTEKDITPIGGFPHYGVVKEDYLMIKGGCVGPKKRVVTLRQSLLNQTSRVALEEIKLKFIDTSSKFGHGRFQTTQEKAKFYGKLKA

SEQ ID NO: 82317 - protein, 206 aa, Gossypium hirsutum
  Clone ID: GOSHI-09MAY01-C100290_1.pep
LDVNSAYYVPKTRSMREDPLPDADPNEKFYEGDNQYRMSGQALEFKQLNIHAWEAFDKGQDIHMQAAPSQAELLFRNYKVIKEKLKSKTKDTIMEKYGNAATEEEIPMELLLGQSERQVEYDRAGRVIKGMETSLPKSKYEEDVFINNHTSVWGSWWKDRQWGYKCCKQTIRNSYCTGAAGIEAAEAATDLMKANIARKASSEDAP

SEQ ID NO: 82318 - protein, 123 aa, Gossypium hirsutum
  unsure (1)..(123): unsure at all Xaa locations
  Clone ID: uC-gsronu33B148g05b1.pep
AGLTKTVAGPNDKFYEGDNQYTMSGQALEFKQLNIHAWEAFDKGQDIHMQAAPSQAELLFRNYKVIKEKLKSKTKDTIMEKYGNATTEEEIPTELLLGHSERQVXYERACRAIKGMETSFSKS

SEQ ID NO: 82319 - protein, 250 aa, Gossypium hirsutum
  Clone ID: GOSHI-09MAY01-C100220_1.pep
QHGSRNLVRNDERERSASYGRYMGEERHRNMETRGRERSREREMDWELRGEKDRDRSREREMGVEWSRDREIYGERRRERERARSRDRDMSGERRREKERERSREREMERERRREKERGKSRDRDLDGERRREKVHDRIWDTEADRDRKREKERDWSRDHSSAYDRDRDRRREKTEEWNQERERERRRDRSRDRDRNIEIENDGYGDRDRYKKHSHSKRDETEIYRDGTRKNETVKVHGSNIDSLERHGD

SEQ ID NO: 82320 - protein, 203 aa, Gossypium hirsutum
  unsure (1)..(203): unsure at all Xaa locations
  Clone ID: GOSHI-09MAY01-C101980_1.pep
LSLQVVRVYVKGNVAYLFITRSIKKSSQLLYMLKASDSSTPNDKXSFKKAELFEKQICGGLKLSIFQYSMVLFWQGGHEEEPWFSRSLFVIGGHVLVCVEDIFQFSSLLNNACSSPYSSLDSSCNIAGISEMVIEQGETCCITLAIKSSTSKAGSSTKTQKRAGLSSKKWKLKWFSQESLSQFVALVKAIQSRDDIISIACKI

SEQ ID NO: 82321 - protein, 179 aa, Gossypium hirsutum
  unsure (1)..(179): unsure at all Xaa locations
  Clone ID: GOSHI-09MAY01-C101970_1.pep
QNTTSAENXIRHLVYLLENAVINLSEGQEQMSWLIDFTGFSLNTSVPIRTARDIIYILQSHYPERLAIAFLYNPPRFFEAFYKAVRYFLDPKTAQKVKFVYPKNKDSVEMMQLYFDIENLPNEFGGNATLKYDHEEFSRLMAQDDVKTAKFWGIDEKPYQIGNGHSVAPEPAPISQQAG

SEQ ID NO: 82322 - protein, 138 aa, Gossypium hirsutum
  unsure (1)..(138): unsure at all Xaa locations
  Clone ID: GOSHI-09MAY01-C101860_1.pep
EKVYIVYLGLHNNGEKALHEXIEKTHISYLLSVKESEEDAKSSLLYSYKHSINGFAAKLTPDEASKLSGMDGLLSVFPSHGKHSVQTTRSWEFVGLDEGDSYSWEKLKMGGEDLLSKAKHGKNVIIGVMDSGKKVLQL

SEQ ID NO: 82323 - protein, 230 aa, Gossypium hirsutum
  Clone ID: GOSHI-09MAY01-C101430_1.pep
AFGSHYKLWRRSTTSGKKPRGRPAGSKNKPKSPIIVARDSPNSLRSHVLEISSGSDIVDSVWGYARRRGRGVCVLSGTGAVTNVTLRQPAAPPGSVVTLHGRFEILSLTGTSLPPPAPPGAGGLTVYLAGVQGQVVGGSVVGPLMASGPVVLMAASFANAVYDRLPLEEEDPPTVHEQQPAASQSSGLTGSGGGNNNNCGTTGTGVGGGGGGVPFYNLGPNMGTYPFPGL

SEQ ID NO: 82324 - protein, 91 aa, Gossypium hirsutum
  Clone ID: GOSHI-09MAY01-C101760_1.pep
RVDPAFAFLKEKLPYTSARVSALGSCIGGSSAPQRLHLRPRTTRYIRCVVGVDSDVEVEWHTTRRRRATCKEALCWLRRKGSLLRVWLKIV

SEQ ID NO: 82325 - protein, 170 aa, Gossypium hirsutum
  Clone ID: GOSHI-09MAY01-C101770_1.pep
GTLTRNFCGIDHYNGFLIRYIKASKAYLGQSEDSIVVDFNYYRADEASTPRLNQDVMEEVEQMAFFKYGARPHWAKNRNLAFLKVQSKYLNFNMFIAVKKQLDPENMLSSEWSDEILFGKGVRSDGCALEGLCICSEDRHCSPSKGYFCKPGLVYSEARVCRYSPSSSNL

SEQ ID NO: 82326 - protein, 221 aa, Gossypium hirsutum
  unsure (1)..(221): unsure at all Xaa locations
  Clone ID: GOSHI-09MAY01-C101690_1.pep
GNRSIIYPNPGIRNRRGHRMQTCQTPIRTISPSRLLNSIGWTISRTSFQRAISFITAXTCESLRDVNDHQSIFSDAHGDGQDLRAXFTISTPSLTERERNELIFKNHFLTILFPVDRFSEMGPSSRTYFSNNGFTCLQILDYIYSFYQENMSSHEIEAAIHTDSRHADRLRALYSSKETVECGGNMIFKRIDFLGSRRSFEMLKRVSGDNYMXVFELLIRA

SEQ ID NO: 82327 - protein, 56 aa, Gossypium hirsutum
  Clone ID: GOSHI-09MAY01-C101660_1.pep
GIKGGSFEGLCFKNVTLLGLAPTAAWHCEFVSGCTNAVFPLPCPQLQNNGSSACCI

SEQ ID NO: 82328 - protein, 203 aa, Gossypium hirsutum
  Clone ID: GOSHI-09MAY01-C101240_2.pep
EKSAENQLVFDQLTDDAIKLMENGDYNVYHEKQEVFQREAEGYEKLALARDKSLSANAGLDNSYPILGNDVLTDANNHGATSSVLTDLAVGTSNSDLTSAEASNNAAESYDMFADDEDDEKPSSEPNSTAPAPASSEAVNTSSETGDVQNDYVYDESSGYYYSSTLGYYYDPSTGLFCSAATGQWYSFNETTGTYDEVKEVAS

SEQ ID NO: 82329 - protein, 72 aa, Gossypium hirsutum
  Clone ID: GOSHI-09MAY01-C101240_1.pep
PRVRPRVRGGVGGRVGADVAATGQWYSFNESPGTYDEVKELHLSINLILSCSCGGRCCTGNRVSPLCETLIF

SEQ ID NO: 82330 - protein, 114 aa, Gossypium hirsutum
  Clone ID: GOSHI-09MAY01-C102940_1.pep
DATKKQNKEKLITFPKNPPSILCFLFLFNRFLDIKKCHLFTKKQLALYSRKNRKKPFSKNCPPFLHFHCIFLLLFVAEVCCLLQEERAGARDNVCDVQGRRAGAAAAICCLGFL

SEQ ID NO: 82331 - protein, 65 aa, Gossypium hirsutum
  Clone ID: GOSHI-09MAY01-C102190_1.pep
INPFVNIVPFVSIFSSLIFSKSVWLYCCFRNPSKQSNDFNYVINIIFCHTWFLPNSASKYLCYGR

SEQ ID NO: 82332 - protein, 142 aa, Gossypium hirsutum
  unsure (1)..(142): unsure at all Xaa locations
  Clone ID: AI055614.1.pep
GGAACYAFGTKFSEPMKINLFPLLSLDDHDSSRKLGENEVNKEEEGMMENGNVLLQAPHVGTGSPQHPEMQSLNVENQTGQIDASSWVVKLEKKNAKLGKDILEKFGWLDLERKVYAQKEXLFISFPVPXSFCAIFSEDNEV

SEQ ID NO: 82333 - protein, 200 aa, Gossypium hirsutum
  Clone ID: LIB3829-017-Q6-K6-A12.pep
KAKLGKDILKKFGWLDLERKVYAQEDGLFISFPVTEKFCAIFSEDRFEVLSDHHPSKLFRAEGSLLNDMSSSVALDILKEYGATKLPDELVQKRKACKSPLKIMTEAVASLIRQKGLSDKLLEQLPNRWERIGDIVVLPISSFGDPIWNSIGEELWPIIAKSLNTCRLARQGRVTANGTRDSTLEILVGDNGWVDHRENG

SEQ ID NO: 82334 - protein, 69 aa, Gossypium hirsutum
  Clone ID: GOSHI-09MAY01-C102020_1.pep
LKYSRIWMRRCEPILHPPTPNASKTYDPSSKGSKFPIVFNQLNIPPSPNVGPFLNVPHMGPLYVPPPVN

SEQ ID NO: 82335 - protein, 68 aa, Gossypium hirsutum
  unsure (1)..(68): unsure at all Xaa locations
  Clone ID: AI054500.1.pep
IFTKIHSTTKKTPKTLEFGGAKGGQGPQNLLRTXLSLVNKFTFHKTFPESYFTGNECILMLITKYHSV

SEQ ID NO: 82336 - protein, 59 aa, Gossypium hirsutum
  Clone ID: LIB3828-030-Q6-K6-H2.pep
FFVKYLLQIFYLLENFALIQKRSIPTPIFCFDLAYIFRDMLLGLNCECRIRVCSQHEYG

SEQ ID NO: 82337 - protein, 84 aa, Gossypium hirsutum
  Clone ID: GOSHI-09MAY01-C103860_1.pep
SPVFKRSPAQVLIEMDKQDEPRGRAEEIYKLLRTAYCQFPLLSLDLSTSQELSMAGNSGQNKDEGSSKDQESHNPDLNEIKLSS

SEQ ID NO: 82338 - protein, 118 aa, Gossypium hirsutum
  Clone ID: GOSHI-09MAY01-C103580_2.pep
RETEVTSARIEYQGALSATRVLHHHLKGGRTRGRTRGEGPKRGVVLPQRTAGMRMVRIIVQVLGEGAEAPMLRMGLIGALGRKMATAAALVHPLGMTGALFTDDDDDNHASARRSESN

SEQ ID NO: 82339 - protein, 180 aa, Gossypium hirsutum
  unsure (1)..(180): unsure at all Xaa locations
  Clone ID: uC-gsronu33B134d03b1.pep
SFGSVFSSYCIAHRFSEATMSFDVMDRYGVEQDVVAVNSLLSAICHEDNQMSVAIEFFDKIKMKIPPDGDTFAILLEGWEKEGNLAKAKNTFGEMVVRVGWSPKHISAYDAFLTTLVRGSQVDEALKFLQVMKKNDCLPGLKFFSNTLDILVKQNDSAQIIXLWDTMVXGGLGANLIMYN

SEQ ID NO: 82340 - protein, 102 aa, Gossypium hirsutum
  unsure (1)..(102): unsure at all Xaa locations
  Clone ID: GOSHI-09MAY01-C103120_1.pep
LSARQMXLAKFLRSLQXLADEFGVPVVITNQVVAQVDGSAIFAGPQIKPIGGNIMAHASTTRLAVRKGRGEERICKIISSPCLAEAEARFQISPGGVADVKD

SEQ ID NO: 82341 - protein, 127 aa, Gossypium hirsutum
  Clone ID: GOSHI-09MAY01-C103050_1.pep
MMDLESVHMSYLTDSLHICFLSDETKPIASTIENILQCALDFRSCLTGDIWNVGLAEGDLQDKLSKINISQVLGIKETFDKNLKELHLLYLKSPKHGESGLSCFWGYLNYNDYYFNENEMSYYAFSI

SEQ ID NO: 82342 - protein, 354 aa, Gossypium hirsutum
  unsure (1)..(354): unsure at all Xaa locations
  Clone ID: GOSHI-09MAY01-C103010_1.pep
VDAYSAASLKAXTYAYPGMRPTSFTGSQIIMPLGQTAEHEELLEVIRLEGQSLTQEDAFLSRDIHLLQICSGIDDNAVGACSELVFAPIDEMFPDDAALLPSGFRIIPLESKPDSSATNRTLDLTSSLEVGPATSQAAGDSPCQNARSVLTIAFQFPFDTNLQDNVLTMARQYVRSVISSVQRIAMAISPCGSSPTIGPKPSPGSPEALTLAHWICQSYSFHLGEELLKSESLGGDSVLKNLWQHQDAILCCSLKSVPVFIFANQAGLDMLETTLVDLPDITLDKIFDESGRKALCSDFTKLMQQGFTHLLAGVCMSTMGRHVSYEQAVAWKVLAADANTVHCLAFSFINWSFV

SEQ ID NO: 82343 - protein, 129 aa, Gossypium hirsutum
  Clone ID: GOSHI-09MAY01-C38988_1.pep
SRVRINNLKNINNLINPNNVPFLTGLTGAQTSAIVQNSHNSDSVINSDSNPFVTAGQLPPGSLQRLMFGTITVIDDQLTEAHELDSAILGKAQGFYLASSLDGSSQTISLTVLLHGGEHGHEIEDTISF

SEQ ID NO: 82344 - protein, 151 aa, Gossypium hirsutum
  unsure (1)..(151): unsure at all Xaa locations
  Clone ID: GOSHI-09MAY01-C38588_1.pep
SQTLGAGVNSVSLVSADLVINRATFEWWSFHIINSSDMVHCGGFFFPXAVVVSEGGGGQGILGDTLSKFSIWGLYITFVLAVGRFIRLQCSDLRMRIQYENLPSCDRLIAICEDIYAARAEGELGVEEVLYWTLVKIYRSPHMLLEYTKPD

SEQ ID NO: 82345 - protein, 88 aa, Gossypium hirsutum
  Clone ID: LIB3145-054-Q1-K1-F3.pep
MNLSGGNQSKVEIYFDLQVYSFQMAFTYGSWRKLEWSNFYRNSKQCQSKSGYMAKKQNTKMFQLCILPISVATILFFFLGLQKRITTC

SEQ ID NO: 82346 - protein, 62 aa, Gossypium hirsutum
  unsure (1)..(62): unsure at all Xaa locations
  Clone ID: LIB3149-064-Q1-K1-G4.pep
NYDLILVGAVTENNLYFLNLFTKRRFTNQVVSSFAGPXXXKGKKQKKKKKKKGPKAWVGPGF

SEQ ID NO: 82347 - protein, 112 aa, Gossypium hirsutum
  Clone ID: GOSHI-09MAY01-C38658_1.pep
VFRLVTNEQIRHFCCGLWSIFQVDRTIRQICRRSKVAVHFDTAFDSQSSRSATGLLVRNEEGEILALKAVIHSEIAPPFTAKAHARLQAIKLGIFVGFNKMDVVGDSNPRAA

SEQ ID NO: 82348 - protein, 236 aa, Gossypium hirsutum
  unsure (1)..(236): unsure at all Xaa locations
  Clone ID: GOSHI-09MAY01-C38678_1.pep
AFHLQHALLMGTASGIAFILGAWRPLQLLLSSKMGFLPLMLLLTVGAAFVHVSSSSMLLLVCNKRSSSNNLPTVTRFPVSGLTLQSFLACGAVAFHALAEGLALGVAAPKAYGLGRHMVLPVSLHGLPRGAAVASCIFGATGSWYGSLAAAALIGVXGPISAIGAILAGIDYSGLDHVMVLACGGLIPCLVRIVQRAVRLDIRKSSCGLAVGVGFATLCLACTKLVCLHTPYCNSA

SEQ ID NO: 82349 - protein, 80 aa, Gossypium hirsutum
  Clone ID: GOSHI-09MAY01-C38608_2.pep
IQKKSSVETKNHPYFIHRLLAVRGKRCAVLLVEETEAHIIIGFLFLLNFLFLLSLSCSNNLHFLSFLITGNREAMDPQLL

SEQ ID NO: 82350 - protein, 138 aa, Gossypium hirsutum
  Clone ID: GOSHI-09MAY01-C38608_1.pep
MMEPSYPQQLRIHCFPVSCKQKREKMKVVAAYLLAVLGGNASPSADDLKNILASVGADAEEERLQLLLSEVKGKDITELIASGREKLASVPSGGGVAVAASAPGAAAAAAPAAAETKKEEKVEEKEESDDDMGFSLFD

SEQ ID NO: 82351 - protein, 42 aa, Gossypium hirsutum
  Clone ID: LIB3196-043-P1-M1-E11.pep
LQNLRPALNSKEILCRNQNPPVFPFHPPGFLPFSLNFSLSFL

SEQ ID NO: 82352 - protein, 91 aa, Gossypium hirsutum
  Clone ID: GOSHI-09MAY01-C38118_1.pep
WCPPLGSDVKVNFDAACNQNLVRSRSGVVVRNSPSEILASKQTLHKEIASPFIAEGYAYFQALLLGNHLGLIGNVPMVINDRLWGRRREPD

SEQ ID NO: 82353 - protein, 104 aa, Gossypium hirsutum
  Clone ID: uC-gsflmaxxa047a12b1.pep
VPMTSTNYFIVPYEESGQIEILSRSIVNEEWCPPLGSDVKVNFDAACNQNLVRSRSGVVVRNSPSEILASKQTLHKEIASPFIAEGYAYFQALLLGNHPDLLIS

SEQ ID NO: 82354 - protein, 87 aa, Gossypium hirsutum
  Clone ID: LIB3145-050-Q1-K1-H8.pep
KKMAKTIIKKSQSDIRDKSVIGAIIWDIQQLKRSFHSIQLKDIPRSANILAHSLAADCLKNGRESYLIGNVQMVINDRLWGRRREPD

SEQ ID NO: 82355 - protein, 163 aa, Gossypium hirsutum
  unsure (1)..(163): unsure at all Xaa locations
  Clone ID: AI725813.1.pep
DERWVAAKQQEILALESNFTWDVGPLPLGKTPIGCKWVLKVKYNSDGMVERXKAHLIGQGFTQQEGVAYHETFSPVAKLVTVRTVIALAAQQGXPQFQMDVYNVFLQGDVFEEVYMMLPIGFCTQGETWVCPLRKSLYGLKQASRTWNMKAHGSYSTPWIFIK

SEQ ID NO: 82356 - protein, 118 aa, Gossypium hirsutum
  unsure (1)..(118): unsure at all Xaa locations
  Clone ID: AI725864.1.pep
DERWVAAKQQEILALESNFTWDVGPLPLGKTPIGCKWVLKVKYNSDGMVERXKAHLIGQGFTQQEGVAYHETFSPVAKLFTGETWVCLRKSLYGLKQTSRQWNMKAHGSYSTQWIFIK

SEQ ID NO: 82357 - protein, 85 aa, Gossypium hirsutum
  Clone ID: GOSHI-09MAY01-C38098_2.pep
LIPKVTLAQTVRNILGTETLRFCSPFTPQPQSPATSVRQRIASVRAPRSPPYLNQSGRQSCILPLRNQAQLIASHLLQRWCGDRG

SEQ ID NO: 82358 - protein, 85 aa, Gossypium hirsutum
  Clone ID: GOSHI-09MAY01-C38098_1.pep
KYNKFSFFLFFFLTVVFAVLFLSFVCLLLQVRRRTWSTYGGYALAYGGSWWRKGNLRVPEDCLTFGPIGLIFGSRLMGHCIWFWV

SEQ ID NO: 82359 - protein, 88 aa, Gossypium hirsutum
  Clone ID: LIB3145-050-Q1-K1-F12.pep
AQNQIQWPINLDPKIQPDWPKGQAILRNPKVRLAPQQLSHQQPPIASYLRTPAHSLCTCSTFSSVPAKEDKQRTRTAQQRPDAWADAW

SEQ ID NO: 82360 - protein, 124 aa, Gossypium hirsutum
  Clone ID: GOSHI-09MAY01-C38068_1.pep
MAILKLIFITLTLPLLFLHSYVAVSILELQNALKTSEIDATVRRACSKKLEDCLESEDMESETQRRLLLMQRRYISYETLRRDMVPCQKPGSSYYDCGAAQANPYSRGCEIITRCARGIKGTKT

SEQ ID NO: 82361 - protein, 121 aa, Gossypium hirsutum
  Clone ID: GOSHI-09MAY01-C38018_1.pep
FFFCISICVEKKILETIQKWGFITPKIHPFFLLFFSYFLFCCYFVIFLFSFCLLLVCCVCCRYSWSGRTCRDIVDACREPLVSATMQTVPETASNIGLGLAGLNFSGLFWVLSLFGFFSAV

SEQ ID NO: 82362 - protein, 290 aa, Gossypium hirsutum
  Clone ID: GOSHI-09MAY01-C38028_1.pep
MAIDKNEPSKLRWGELEEDDDLDFLLPPKEVIGPDENGIKKVIEYRFNDEGNKVKITTTTRVRKLAKARLSKRALERRNWDKFGDAVREDVGSRLTMVSTEEILLERPRAPGTKPEEAKASGDGLAQLSKGGAVLMVCRTCGKKGDHWTSKCPYKDLAAPVESFVDKPAAAETSAAAPGAGKGAYVPPSMRAGAERTTGSDMRRRNDENSVRVTNLSEDTREADLHELFRPFGAVTRVYVAMDQKTGTSRGFGFVNFVNREDAQRAINKLNGYGYDNLILRVEWATPRTN

SEQ ID NO: 82363 - protein, 171 aa, Gossypium hirsutum
  Clone ID: GOSHI-09MAY01-C38318_1.pep
MKVFEINGNTLSLALFADVTNSKELLDSMQAGTLDPEVAFLNASLIPDVFPVLAAVHKTLISKSRESLTTRTLHSELVYNYSGSKHITESLKRCGISESSRYVLAARFNASPDEMKAVEKLINGKEIDLDEFEGRADQAQIQKHYKISGPELGISTLADAITCRIAARDAL

SEQ ID NO: 82364 - protein, 213 aa, Gossypium hirsutum
  Clone ID: GOSHI-09MAY01-C38298_1.pep
MTWPSSENMDDGDMLPLKCSNDTEDIYRSGRNYSGESNVANGNHSVKPPTFQRGVLRTNCIDCLDRTNVAQYAYGLAALGSQLHALGIKDSPKIDLDDPLADELMSLYERMGDTLAHQYGGSAAHNKIFSQRRGQWRAATQSQEFFRTLQRYYSNAYIDAEKQNAINIFLGHFQPQPGKPALWELGSYQHYRGRNGETIMDEDGRSLFKRSFS

SEQ ID NO: 82365 - protein, 69 aa, Gossypium hirsutum
  Clone ID: GOSHI-09MAY01-C38288_1.pep
IYLLFPCSYSCLHQICHRDLKLENTLLDGSPAPRLKICDFGYSKSSLLHSRPKSTVGTPAYIAPEVLAR

SEQ ID NO: 82366 - protein, 80 aa, Gossypium hirsutum
  unsure (1)..(80): unsure at all Xaa locations
  Clone ID: uC-gsflmaxxa097b07b1.pep
IYLLFPCSYSCLQQICHRDLKLENTFLDGSPAPRLKICDFGYCLGIIIYXSSLLHSRPKSTVGTPAYIALEVSARLEYDG

SEQ ID NO: 82367 - protein, 135 aa, Gossypium hirsutum
  Clone ID: LIB3145-053-Q1-K1-B4.pep
RLKICDFGYSKSSLLHSRPKSTVGTPAYIAPEVLARREYDGKLADVWSCGVTLYVMLVGAYPFEDQADPRNFRKTIQRIMAVQYKIPDYVHISQDCKNLLSRIFVANPSRRITLKEIKNHPWFLKNLPRELTDTA

SEQ ID NO: 82368 - protein, 83 aa, Gossypium hirsutum
  unsure (1)..(83): unsure at all Xaa locations
  Clone ID: GOSHI-09MAY01-C38208_1.pep
WVNIASYYLVGIPIGXVLGYVFKMEVKGVWFGMLLGTLLQTVTLIIITWKTDWDKQVLLAHSRVNKWFVPESRETNSNQENGA

SEQ ID NO: 82369 - protein, 178 aa, Gossypium hirsutum
  Clone ID: GOSHI-09MAY01-C39968_1.pep
MATVNGYQGNTPVATSTGSKHPASTAKTADAQSVLKRLQSELMALMMGGDSGISAFPEEDNIFCWEGTITGSTDTVFEGTEYKLSLSFSNDYPFKPPKVKFETACFHPNVDVCGNICLDILQDKWSSAYDVRTILLSIQSLLGEPNISSPLNTHAAQLWSNQEEYRKMVEKLYKPPNA

SEQ ID NO: 82370 - protein, 383 aa, Gossypium hirsutum
  unsure (1)..(383): unsure at all Xaa locations
  Clone ID: GOSHI-09MAY01-C39918_1.pep
MATPKALKLKPRIRSPIPVMILGCITAIALLFLFSSLNSTNRFWFSSAKTYLKKKAREHSLHDKYLYWGDRIDCPGKHCDSCEGLGHQKSXLRCALEETIFGRGAFVMPSRMCINPIHNNKGILHKVDNVTAEERWAASSCTMDSLYDIDLISETVPVILDNSDAWHLILSTSMKLGEXRGVAHVEGLTRVDLKEDSCYSNLLLINRTASPLSWFAECKDRKNRSAILLPYSFLPSMAAEKLRTAADQIKRVLGDYDAIHVRRGDKIKTRKDRYGVKRSLHPHLDRDTRAEFILHRIQKWVPSGRTLFIASNERTPGFFSPLSVRYKLAYSSNYSHILDPLIHNNYQLFMIERLILMGAKTFIKTFKEDDTDLSLTDDPKKNT

SEQ ID NO: 82371 - protein, 76 aa, Gossypium hirsutum
  Clone ID: GOSHI-09MAY01-C39888_1.pep
LQAAVREQTEITQFSQQEFERLQNEKILCRVCFEEQINIVLLPCRHHVLCSTCCEKCKRCPICRVSIEERLPVYDV

SEQ ID NO: 82372 - protein, 114 aa, Gossypium hirsutum
  Clone ID: GOSHI-09MAY01-C39818_1.pep
PRVRGISAKEESSPWSFNDGDKHEGAPCADMDETMFEVIDLEWDEWPFSASQSGDEACSAIESDTSIEDSSETVRNDMTEVGVTDNNECTNDIDTCSQVFETLCYYQVLVTIMD

SEQ ID NO: 82373 - protein, 47 aa, Gossypium hirsutum
  Clone ID: GOSHI-09MAY01-C39568_1.pep
YEFNYFKVQRYLFQCFQFRGLGTGKVQRYKREFIDSRTIEYNLKYNL

SEQ ID NO: 82374 - protein, 74 aa, Gossypium hirsutum
  Clone ID: LIB3829-029-Q6-N6-D3.pep
FSRIDNPIKKKTRIFVLCTVFRSIPLRNYETLPGVERQSEIVPCTMPKPTPEIDLQVNTMLISVANSATERVPC

SEQ ID NO: 82375 - protein, 34 aa, Gossypium hirsutum
  Clone ID: LIB3147-009-Q1-K1-G4.pep
LSAVGHTHQIYVQNCLDTTSGLCTCNVLNVWINK

SEQ ID NO: 82376 - protein, 167 aa, Gossypium hirsutum
  Clone ID: GOSHI-09MAY01-C39438_1.pep
PTRPLTFSRVKLGDEDKHGKKKRKLSKLKELENAMKLEAAKKDPEKGEVIAKKHSWKAAMDRAAGIKVHDDPKLLKQSIQKEKKRHKMNAEKWNERVETTQKLKVEKQQKRSENIADKIHQKKMRRIAKREKKLLRPGFEGRKEGFINEGSSQGSWFSFNLLHSLWL

SEQ ID NO: 82377 - protein, 76 aa, Gossypium hirsutum
  Clone ID: GOSHI-09MAY01-C39768_1.pep
RRKPSHYIPAIIILILLILVFFGRSVAILGTCIGWYVAPTINGEGSNLRTSMKKKDYGRRQSGGGLVGGKLSFQKS

SEQ ID NO: 82378 - protein, 139 aa, Gossypium hirsutum
  unsure (1)..(139): unsure at all Xaa locations
  Clone ID: GOSHI-09MAY01-C39708_1.pep
AARAMALQGCVDISYYPLRLCXGSEPQDEGLDSREHWQRVMQGHAGANVVPLVASNRIGKEIIETEHGKSQITFYGNSFIAGPTGEIVAAANDKDEAVLIAQFDLDKIKSKRSCWGVFRDRRPDLYKVLLTSDGSKTSS

SEQ ID NO: 82379 - protein, 232 aa, Gossypium hirsutum
  Clone ID: GOSHI-09MAY01-C39618_1.pep
MEITEKREGESNSSSKDLSNNDNINNDLTDSDGNNTSKEAEERRARDLKAGLHPLKLKFVFWYTRRTPGVRTQTAYEDNIKKIVDFSTVEGFWVCYCHLARPSTLPSPTDLHLFKEGIRPLWEDSANCNGGKWIIRFKKVVSGRFWEDLVLALVGDQLDYGDNVCGVVLSIRFNEDILSVWNRNASDHQAVMALRDSIKRHLKLPHSYVMEYKPHDASLRDNSSYRNTWLRG

SEQ ID NO: 82380 - protein, 104 aa, Gossypium hirsutum
  Clone ID: GOSHI-09MAY01-C39008_1.pep
EAPIFEPDLIRAIFKHIWIRRAQERERNGFPNTEAGDSEVGAGTSKKNRPTSANTNALKLSCELLRIFITEAIQRAGTIAEAEGSTMIEPTHLERILPQLLLDF

SEQ ID NO: 82381 - protein, 161 aa, Gossypium hirsutum
  Clone ID: GOSHI-09MAY01-C39338_1.pep
SESEASILLGIENTKLLKNLIEFQKVEYDFQYYKVEMATDVQLLIFSEGKSNIVPADVIVPFQPSCLESTEIPVAEALEAWRWYLATVRSLPHSIGSEIQKVVEDDLVAARQTDRSLGSRDFSRWLTMARLISSSFGETSLSKEHWEMVKEMERLRRERLK

SEQ ID NO: 82382 - protein, 99 aa, Gossypium hirsutum
  Clone ID: LIB3147-008-Q1-K1-A7.pep
FIHHNPHVCYSGFCFFHHPLGQQSFTKYQSFKILWTFGFYFSLSLLSLSISLAISQCSFDKLVSPKLDDMSRAIVNHLHIINILNIFNSFLSSMQHQNV

SEQ ID NO: 82383 - protein, 269 aa, Gossypium hirsutum
  Clone ID: GOSHI-09MAY01-C39328_2.pep
WEKQERTRLGHDTLVDGMLKDGLWDVYGDCGMGSCAELCAEKHVITREEQDNFAVQSFVGGVAAQQGGAFAWEIVPVEVPGGRGKPSIIVDKDEGLGKFDAAKLRKLRPSFKDNGGTVTAGNASSISDGAAALILVSGEKALELGLQVIAKIAGYADAAQAPEFFTTAPALAIPKAISNAGLDASQVDYYEINEAFAVVALANQKLLGLNPEKVNVNGGAVSLGHPLGCSGARILVTLLGGLKQKNGKYGVGGVCNGGGGASALVVELL

SEQ ID NO: 82384 - protein, 76 aa, Gossypium hirsutum
  Clone ID: AI055208.1.pep
MDYWDVYSDCGMGSCAELCAEKHAITREEQDNFSVQSFERGIAAQQGGAFAWEIAPVEVPGGRIKLSIITVMDEWL

SEQ ID NO: 82385 - protein, 142 aa, Gossypium hirsutum
  unsure (1)..(142): unsure at all Xaa locations
  Clone ID: LIB3584-010-P1-K1-H11.pep
GNCTLGGGGGGYANAAQAPEFFTTAPALAIPKAISNAGLDASQVDYYXINEAFAVGGVRGFFFDLNPXKVNVNGGAVSLGHPLGCSGARILVTLLGVLKQKNGKYGVGGVCNGGGGASALVXELLAVLKVRFCTMLRPFLFR

SEQ ID NO: 82386 - protein, 92 aa, Gossypium hirsutum
  Clone ID: GOSHI-09MAY01-C39298_2.pep
DYLQTQTDNFFRKLWNLDMPTKIKITVWKIAWNYIPTFSSLKLRRVITEDRCLRCGQETEDSNHVFQQCPGFSAREQLNSVEDSAMGYGYSQ

SEQ ID NO: 82387 - protein, 229 aa, Gossypium hirsutum
  Clone ID: GOSHI-09MAY01-C39298_1.pep
EATGVFIVRSAYKLLQGSTTELNDYLQTHTNNFFRKLWNLDMPTKIKITVWKIAWNYIPTFSSLKLRRVITEDRCLRCGQETEDSNHVFQQCPGFSAREQLNSVEDSAMGYGYSGQAEINSSVTNTKSSQRQQRENMAIFFDAAFDSQHNRSASGLVVKEQEGKIVAAKLILHENVASPFAAGLYVSYGRSRNQLVWTIRSKGRGDEICSEVGVGCPKDEEPFSKSKQK

SEQ ID NO: 82388 - protein, 62 aa, Gossypium hirsutum
  Clone ID: GOSHI-09MAY01-C39228_1.pep
CAPSDRFSPEFCSFISACLKKDPNERKSAQELLDLPFLNMYNDSDADLSSYFNDAGSPLATL

SEQ ID NO: 82389 - protein, 166 aa, Gossypium hirsutum
  Clone ID: GOSHI-09MAY01-C34988_1.pep
MSSPMILKNPNSLQRRQPLLHSRSNSVDSCITSRGNTNLRFGEVCGGTTADVAAVCCCCPCGLANLMVLAIYKVPAGLYRRALRQKRLRKLHKKGLLQPKNHGAHFRCNDPELLSLEDYFQDAGVSEETEKAAVELENEMWQRFYGTGFWRSPSQKEGETPRFHPL

SEQ ID NO: 82390 - protein, 92 aa, Gossypium hirsutum
  Clone ID: LIB3145-008-Q1-K1-H11.pep
TRSLNNEWGIIEYFTTLFVVQDRLEQLPIYNSKKKKSTKRRGSFPIFIIREGQSSLHCRGNTEGKEKGQPNFTTATIKARQHPNNPNHLSVL

SEQ ID NO: 82391 - protein, 54 aa, Gossypium hirsutum
  Clone ID: LIB3145-043-Q1-K1-B6.pep
VLYYSLRCSGSFRRTPYLQQQKKKKYKETRFIFHIHYSRLKRKKLLLFRCFSVI

SEQ ID NO: 82392 - protein, 148 aa, Gossypium hirsutum
  Clone ID: GOSHI-09MAY01-C34978_1.pep
ENPGRRGVRCEDKLSCRYSSLHSIPLDQSWMIVKDCLIAATAKDCSLMISFRPKEDGRLPSHNTVYLGSTNQAFEYKVYFIDLDLKPLKKMEAYYELDKKIVSCYSQMVKTEHETDKAVTINSNGSVRDQRYALEDGLFTEGCTGKCK

SEQ ID NO: 82393 - protein, 236 aa, Gossypium hirsutum
  unsure (1)..(236): unsure at all Xaa locations
  Clone ID: GOSHI-09MAY01-C34968_1.pep
MGVDYYNILKVSRNATDDDLRKSYKRLARKWHPDKNLVNNKEAEAKCKQIFEAYNVLSDPLKRQIYDLHGEQGLNSAESSSPNGFGAGGVGGMADKFDQRNGQGYKKASPVETQLLCSLEELYKGGRRRMRISRSIPGEFGKLKTVEEILKIDIKPGWKKGTKITFPEKGNQXPGFTPSDLIFVVNEKPHAIFKRDGNDLIATLKISLLEALTGTILSLTTLDGRTPPISVPDIVK

SEQ ID NO: 82394 - protein, 156 aa, Gossypium hirsutum
  Clone ID: GOSHI-09MAY01-C34928_1.pep
ALAFKVGLFCINLLSIPRTKFSFLSGHPLSCVVIRIGMELVRVCLEEKNDDISSVPPGFEPRALFTLKSEAQDTKRHERDNLICCSASTRAILVEKGTGLANDESSKITRSMSMRRRPWINYGQYDNSSQDEPDHGKLNQVTARWRQKRHVGQILR

SEQ ID NO: 82395 - protein, 214 aa, Gossypium hirsutum
  Clone ID: GOSHI-09MAY01-C34888_1.pep
GRHFFAKNIAFDILGRVHLKAQAVALRLQSDFGVFYNCSIDGYQDTLYVFSKRQFFRECTISGTIDFVFGDSAAVFQKCKFLVRKPQSGQQNVVTAQKRLDHNQPTAFVIMDSEIIPDAELAPAKNEFPAFLGRPWGKLSRAIIMQTYIDDMVHPEGWTSWDPKEPTNLCQYAEFNNTGPGASTSLRVKWAGVRLLNEAEAINYTPPKFFDVGD

SEQ ID NO: 82396 - protein, 122 aa, Gossypium hirsutum
  Clone ID: GOSHI-09MAY01-C34588_1.pep
YPINPSGLKLKKNQAKNPSSLGSRSNNNQTVLMSNASASAPPRLVPPGRQPRTPPLTPSASTRPVPSTEPSETVSSSSKPKVEIGPSRLKSGFRYGVYIPDVGRFLYGPSEPDFNGGMTVAG

SEQ ID NO: 82397 - protein, 68 aa, Gossypium hirsutum
  Clone ID: GOSHI-09MAY01-C34578_1.pep
PASILSLASILHDTDTSRDQNEHMPCRKLFPIDAPTGCTMLILVNDPVPVDSRCPSPSEPRRVSRHTA

SEQ ID NO: 82398 - protein, 58 aa, Gossypium hirsutum
  Clone ID: GOSHI-09MAY01-C34488_1.pep
LGRLIRNDNVSNSKFPPHPKCIENFISMYQKPVSLCSRAFEDTYLLAKKPRTRGRTRG

SEQ ID NO: 82399 - protein, 92 aa, Gossypium hirsutum
  Clone ID: GOSHI-09MAY01-C34418_1.pep
TQPTKPSPHKNKIAETLGAYLLQRCRLSPLHAAANHAPRPSPSCAVPYASITCSNKRKTEQQRKGNRTTICQRKNRIDFFGFGFVFSSFSAI

SEQ ID NO: 82400 - protein, 142 aa, Gossypium hirsutum
  Clone ID: GOSHI-09MAY01-C34408_1.pep
MNKSKLQLQLCAGIFTLSILSNGAYGSDKIFDITHKITSQLPTFGSQKGLGQFIWLLSSIKNGSTVNVSEFKLGTHTGTHVDAPSHFFQKYYEQGFDVSTLSLQTLNGPVLVVDVQRNKNITAEVMKSLKIPRGVHRVLFKT

SEQ ID NO: 82401 - protein, 127 aa, Gossypium hirsutum
  unsure (1)..(127): unsure at all Xaa locations
  Clone ID: GOSHI-09MAY01-C34748_6.pep
YRGYFSGQDQCLWSRAEIPPFFFEWNVTYGTIAPLGVPPKGXILINGQFPGPNINSTTNNNIVANAFNNLDEPFLVTWNGVQPRMNSWHDGVLGTNCPIPPGKNYTYKFQVQDQIGSYIYYPVTDIH

SEQ ID NO: 82402 - protein, 179 aa, Gossypium hirsutum
  Clone ID: GOSHI-09MAY01-C34748_3.pep
MAPLTIIVVFFLWVGSLLMVQGGDPTISFEWKVTYGTISPLGVPVKGILINGQFPGPNMNSTTNNNVIVNVFNNLDEPFLLTWSGVQHRKNPWQDGVLGTNCPIPPGTNYTYKFQVKDQIGSFIYYPVTAMHKAVGGFGGLRINSRLLIPVPYADPADDYTIIAGDFFNKGHTTLKKIL

SEQ ID NO: 82403 - protein, 186 aa, Gossypium hirsutum
  Clone ID: GOSHI-09MAY01-C34748_2.pep
RQAPIALNGVSYVEPPLHKTCRNYGVAEKVFKYDTIPDEPPSDNTKVTLAPIVLNMTHRNFVEIIFENHETAIQSYHLSGYSFFAVGMDVGKWSPEKRMNYNLLDAVSRHTIQVFPNSWSAILLTFDNCGMWNLRSETWDRHYLGQQLYASVISPNRSLKDEYNLPEGGLTCGIVQGMPRPPPFSS

SEQ ID NO: 82404 - protein, 551 aa, Gossypium hirsutum
  Clone ID: GOSHI-09MAY01-C34748_1.pep
MARLMLISMLFLLAGSMLMVQGGDPTLFFEWNVTYGTIAPLGVPVKGILINGQFPGPNLNSTTNNNIVVNVFNNLDEPFLVTWDGVQHRKNSWQDGVLGTNCPIPPGKNYTYKFQVKDQIGSYMYYPVTAMHKAVGGFGGLRVNSRLLIPVPYADPADDYTLLVGDFFNKGHTSLKKILDSGRNLGRCDGVHLNGKVAKGDGKDEPLFTMEAGKTYKYRICNTGIKTSLNVRFQGHTMKLVEMEGSHTMQNDYDSLDVHVGQCFSVLVTANQEPRDYYVVASTRFTRREVTATGIIRYKNGKGAASSELPPPPVGWAWSLNQFRTFRWNLTSNAARPNPQGSYKYGSINITRTIKLANTAQRVDGKLRYALNGVSYVEPTTPLKLAEYYGVADKVFKYDTIPDEPPSDNTKVTLAPIVLNMTHRNFVEIIFENHETAIQSYHLSGYSFFAVGMDIGKWSPEKRMNYNLLDAVSRHTIQVFPNSWSAILLTFDNCGMWNLRSEIWDRHYLGQQLYASVISPNRSLKDEYNLPEGVLTCGIVQGMPRPPPFSS

SEQ ID NO: 82405 - protein, 114 aa, Gossypium hirsutum
  unsure (1)..(114): unsure at all Xaa locations
  Clone ID: LIB3828-019-Q1-N6-E9.pep
IQSYHLSGYSFFAVGMDIGKWSPEKRMNYXLLDAVSRHTIQVFPNSWSAILLTFDNCGMWNLRSEIWDRHYLGQQLYASVISPNRSLKDEYNLPEGVLTCGIVQGMPRPPPFSS

SEQ ID NO: 82406 - protein, 160 aa, Gossypium hirsutum
  unsure (1)..(160): unsure at all Xaa locations
  Clone ID: LIB3828-023-Q6-K6-B9.pep
NVSIGILLEADRPAFLFMSTRQNGPKNICISSKRHLELKLFTHPSLLPESTRIWXTDLVSIILNYTAERWRPXXHALHXXRKSXTPSGHSCTSSLEGSVRGNTTLPLTAXAQGXMPCTQIXRPSGSTHXRQLXECXXKXCCTQAVGXXTCMVGXLLTGVE

SEQ ID NO: 82407 - protein, 111 aa, Gossypium hirsutum
  unsure (1)..(111): unsure at all Xaa locations
  Clone ID: LIB3493-021-P1-M1-A2.pep
MARLMLISMLFLLAGSMLMVQGGDPTLFFEWNVTYGTIAPLGVPVKGILINGQFPGPNLNSTTNNNIVVNVFNNLDEPFLVTWXXVQHRKNSWQRCVLGTNCPIPPWKNYT

SEQ ID NO: 82408 - protein, 104 aa, Gossypium hirsutum
  unsure (1)..(104): unsure at all Xaa locations
  Clone ID: LIB3493-028-P1-M1-B3.pep
ASSELPPPPLRWAWXLNQFXTFRWNLTSNAARPNPQGSYKYGSINITRTIKLANTAQRVDGKLRYALNGAFYVESTTPLKLAXYYGVADKVFKYYSISPINSPS

SEQ ID NO: 82409 - protein, 142 aa, Gossypium hirsutum
  Clone ID: GOSHI-09MAY01-C34768_1.pep
SSTRALKWYNLWTCYSQMTTFTVEHATIMHRKIGSVVIPAGSVSAFLIISILLFTSLNEKLFVPLARKITHNPQGITSLQRIGIGLVFSVAAMVGAAIIEKERREIAVEKEVKISAFWLLVQFFLVGAGEAFAYVGQLEFFI

SEQ ID NO: 82410 - protein, 59 aa, Gossypium hirsutum
  Clone ID: GOSHI-09MAY01-C34648_1.pep
VSSSSFERNVRASQRNDAKKAERNKVRSLKVALHIIGPKSSMESSNVHASPTDLDIALK

SEQ ID NO: 82411 - protein, 34 aa, Gossypium hirsutum
  Clone ID: LIB3145-002-P1-K1-D11.pep
MRQWLHGNYLNILKNLETACLGGHSVNKVVFEAT

SEQ ID NO: 82412 - protein, 185 aa, Gossypium hirsutum
  unsure (1)..(185): unsure at all Xaa locations
  Clone ID: GOSHI-09MAY01-C34618_3.pep
CLYASVTVVESLMMAIASIVPNSLMGIIIGSRVFRAIFMLVSGYFRLPNDIPKPVWRYPMSYISFHFWALQGQYQNDLKGLLFKNQSPQTXQIPGEYILENVFQINVRRSKWIDLSVIFSMIIIYRIIFFLMIKISEDVTPWIRGLIARRRMQQKNGIQNTTVAPDGLTQSPSLRTYVATTRDKR

SEQ ID NO: 82413 - protein, 167 aa, Gossypium hirsutum
  Clone ID: GOSHI-09MAY01-C34618_2.pep
DPLEKITTAEAIRKLTDFYRTSQQCYAAKERVDEISKVKGTVLDSGGSQASFLMQSYTLTKRSFIFLSRDFGYYWLRLLIYVVVTVCIGTIYLNIGTSYNAGLARGSCASFVFGFVTFVSVGGFPSFVEDMKVSTRMIDGKSTVKELRIELQFVPSTQNMSKLVHVQ

SEQ ID NO: 82414 - protein, 326 aa, Gossypium hirsutum
  Clone ID: GOSHI-09MAY01-C34618_1.pep
ASFLMQAYTLTKRSFINMSRDFGYYWLRLLIYVVVTVCIGTIYLNIGTSYNSILARGACASFVFGFVTFMSIGGFPSFVEDMKVFQRERLNGHYGVTAFVIGNTLSAMPFLIMITFISGTICYFMVRLHPGFEHYMFFVLCLYASVTVVESLMMAIASIVPNFLMGIITGAGIQGIFMLVSGYFRLPNDIPKPVWRYPMSYISFHFWALQGQYQNDLKGLLFDNQPPELPKIPGEYILENVFQIDVRRSKWIDLSVIFSMIIIYRIIFFLMIKISEDVTPWIRGLVARRRMQQKNGTQNTMVAPSLSQSPSLRNYVANRANGRGKR

SEQ ID NO: 82415 - protein, 274 aa, Gossypium hirsutum
  unsure (1)..(274): unsure at all Xaa locations
  Clone ID: GOSHI-09MAY01-C34608_1.pep
HASDLRLTSLSSSPSSSSFSQPSPRPQFLAFSASPMDNSPKKFMDFPFITAPSGNLMIDLISTMDHRLQTQLKPCTLPSNXQHYYNPGKTSHGSLYMRSGHTSSHVDYMLXSWLHCQLPSGGALDITSLSAYLNACTVAPNFLLELIQNSPTSLALILDVPPRKDPVLYPEYLQTFYENTRLESLRQALEKLPEVQPYYSSALYIRCLTSPTSIMIRINTEGTEGDGPGRMEEIIKDHIDPVVKEALXIWLDQCACGNRNVDEAEKAYLEKRDG

SEQ ID NO: 82416 - protein, 79 aa, Gossypium hirsutum
  Clone ID: LIB3145-001-P1-K1-B6.pep
QQLRVEAQDKVFFINAFSERRGGGLLVFLLEAFEELGLDVFQARVFCSEGFLFEAVGVNYDQRSLECLNEPYYSSALYI

SEQ ID NO: 82417 - protein, 78 aa, Gossypium hirsutum
  Clone ID: GOSHI-09MAY01-C34148_2.pep
ENDPEFKGYHDGNSEPIGFGHIGFTVDDMYKACERFESLGVEFVKKPSDGFAFIKDPDGYWIEIFDLKGIRQIVNSLA

SEQ ID NO: 82418 - protein, 182 aa, Gossypium hirsutum
  Clone ID: GOSHI-09MAY01-C34148_1.pep
MASLDSKESPANNPGLHFPPDEATKGYIMQQTMFRIKDPKRTLEFYSRVLGMTLLNKVDVPYMKMTLYMMGYEDVSSAPSDPVEKTIWTFGRPATMELTHFWGTENDPEFKGYHDGNSEPIGFGHIGITVDDMYKACERFESLGVEFVKKPSDGFAFIKDPDGYWIEIFDLKGIRQIVNSLA

SEQ ID NO: 82419 - protein, 90 aa, Gossypium hirsutum
  Clone ID: uC-gsflnu33B108e08b1.pep
PATMELTHFWGTENDPEFKGYHDGNSEPTGFGHIGITVDDMYKACERFESLGVEFVKKPGDGYAFIKDPDGYWIEIFDLNGIRAIVNNLA

SEQ ID NO: 82420 - protein, 65 aa, Gossypium hirsutum
  Clone ID: uC-gsflnu33B074a02b1.pep
LKLMLYQVQEIDLTNSSEILIEAHFILVMFMFSLCLMCITSKVKIKSFCRENSTLKFTKMYLSYI

SEQ ID NO: 82421 - protein, 46 aa, Gossypium hirsutum
  Clone ID: uC-gsflnu33B056h05b1.pep
LFIAYHLCTSLQINLIHINVNVNAGNNDMAYVADSRVYFRTLNHVF

SEQ ID NO: 82422 - protein, 68 aa, Gossypium hirsutum
  unsure (1)..(68): unsure at all Xaa locations
  Clone ID: LIB3148-056-Q1-K1-B3.pep
YGAHKRKEPWFHSVRQFFFFIFFFFFFFFFFFFFFFFFFFFFFXRLNFLLQNSLFSPYLLYTSNIKKT

SEQ ID NO: 82423 - protein, 153 aa, Gossypium hirsutum
  Clone ID: GOSHI-09MAY01-C34108_1.pep
CVEKVAKSGWDVFVHNIETVEELQRVVRDHRANFKQSLDVLMMAKEYVPAGTLTKTSIMLGCGETPDQVVKTMEKVRAAGVDVMTFGQYMRPSKRHMPVSEYITPEAFGKYRALGMEMGFRYVASGPMVRSSYKAGEFYIKSMIESDRSAAAS

SEQ ID NO: 82424 - protein, 106 aa, Gossypium hirsutum
  unsure (1)..(106): unsure at all Xaa locations
  Clone ID: GOSHI-09MAY01-C34018_1.pep
QEVMTLLAYDGSENGWAVCFTGSDEMVRANGEKVLSSMTCFADXEKLAKQMGFIPALPKHLVGITAAHHCTRPFPPGNGGGIPERVQCAECGRPMEMYFMYRCCVE

SEQ ID NO: 82425 - protein, 197 aa, Gossypium hirsutum
  Clone ID: GOSHI-09MAY01-C34398_1.pep
MVLWEIALGTAYFLGLKRSYKLALKIQRRIISRNQPRLQQFVQRRTRVVFDIALKVHRNIQHRDLEVGRNLGDCILRWPHKIKPSAQIRGPPPHQEPNHGTGKANMNMPKQVTNTSSPKTPRSNQSPRNHDAGRHLFSSLTSTWPKSFPTTIAMMMQPPTATGNMTRCRHLSINGPDASRLNYTRDQGVVRKDIMQW

SEQ ID NO: 82426 - protein, 69 aa, Gossypium hirsutum
  Clone ID: GOSHI-09MAY01-C34388_1.pep
MPRGSDVGGAPTHTCALATVWVVADTWVVGVVLGHTTDIIETVRLLYGVEHLKLWFWYPWYWIEACQVL

SEQ ID NO: 82427 - protein, 202 aa, Gossypium hirsutum
  Clone ID: GOSHI-09MAY01-C34288_1.pep
SLLSPYLHFGELSVRKFSRCRMKQIYGERTEFSREESVTLFLKAVGLREYSRYLTFNFPFTHERPLLSNLKYFPWNADVNRFKAWRQGRTGYPLVDAGMRELWATGWIHNRIRVIVSSFAVKFLLLPWRWGMKYFCDTLLDADGECDILGWQYISGSLPDGHELERLDSPQIQGSKFDPEGEYVRQWLPELAKMPTERIHHA

SEQ ID NO: 82428 - protein, 173 aa, Gossypium hirsutum
  Clone ID: GOSHI-09MAY01-C134240_1.pep
FEPNPDYYSALLWHRLMGRNVLSTSFTGTDKIRSYTHCAKQSKGITLLLINLNNSTTVRAKLAFNSTMSLQHKHRSRISHHKHKIHKTTIIKLPQGIDGKIRREEYHLTAKGGNLQSQSILLNGNILSVNSSGIIPHLEPLHVKSAKPIMVAPLSIVFTHMPDVTVPACKVQP

SEQ ID NO: 82429 - protein, 60 aa, Gossypium hirsutum
  Clone ID: GOSHI-09MAY01-C34268_1.pep
LKKKFDFVISLPACAPINYKIWDTIYFNSDISFSLFSFNPLCFHLWVEFSVIRCPFVKND

SEQ ID NO: 82430 - protein, 71 aa, Gossypium hirsutum
  Clone ID: LIB3135-018-Q1-K1-G8.pep
CTVGAAHKQRKKKKRLLKLNFVISLPACAPINYKICDTIYFNSDISFSLFSFNPFCFHLCVKFCVIRCPFV

SEQ ID NO: 82431 - protein, 199 aa, Gossypium hirsutum
  unsure (1)..(199): unsure at all Xaa locations
  Clone ID: LIB3829-023-Q6-K6-H5.pep
XXLQXXQYVXLXXIXXIIXTXXLXXSXXXXLVWYXXSFXXSSIXXSEEXGNXXXXEDFXARXXQRXXLCVHXKQKXQVSXGVXXPKXKXXGDXGXCKRAXRXXASHRXTKNXXTXXRFSAXQKXXPSXXVQSXSIXTSXEXVYXXHXPPTPHTSXXLXXPXXHXXQSDKLXXSVXHTXCPPFSXLIYXXPFXPSFPLIL

SEQ ID NO: 82432 - protein, 123 aa, Gossypium hirsutum
  Clone ID: LIB3135-018-Q1-K1-A2.pep
EAVQTDSDRIATSVNYNDAQDILSLKDSITAVCNATQAADRIHQMFRMQSFQWKQLIESSDAVSDEHVISLLTTKTRRPFQSDGVAHAAATQIQKKFRGWKKRKEFLLIRQRIVKIQAHCKRT

SEQ ID NO: 82433 - protein, 197 aa, Gossypium hirsutum
  unsure (1)..(197): unsure at all Xaa locations
  Clone ID: GOSHI-09MAY01-C34228_1.pep
LPSFPAVNTILLAGVAPHINPAFFGRGMAPNGLGMMGVAGMDGPHSGMWTDTNMGGWGGDEHDRRTRESSYGGEDGASEYGYGDANHEKGRSGXPLGKKDRASEREWSGNSERRHHDEKERESDRPEREHREHRYTGEKDSYREHRHRGRDVDYDDDWDRGQSSSRSRNXSHATREEEHRSRSRDVDYGKKRRLPSE

SEQ ID NO: 82434 - protein, 53 aa, Gossypium hirsutum
  Clone ID: LIB3493-043-P1-M1-B5.pep
HSTHALIETCALLLVLHGTCSEILKKTVPYISYHHNLGHVIDDDALYSCLSHP

SEQ ID NO: 82435 - protein, 231 aa, Gossypium hirsutum
  Clone ID: GOSHI-09MAY01-C35988_1.pep
VEDIFYKYGRILDIELKIPLRPPCFCFVEFEDPRDAEDAIRGRDGGNFDGCRLRVELAHGGRGQSSSDRRGGYGGGAAKFGVSRHSEYRVIVRGLPSSASWQDLKDHMRKAGDVCFAEISRDSDGTFGIVDYTNYDDMKYAIRKLDDTEFRNPWARAYIRVKRYESSPSRSRSRSRSVRRDRSRSRERSASKSPVKSRSASPVKSPRARSRSKSRSRSRSGSPEKAQPVSD

SEQ ID NO: 82436 - protein, 196 aa, Gossypium hirsutum
  unsure (1)..(196): unsure at all Xaa locations
  Clone ID: LIB3829-013-Q6-K6-B10.pep
VRPRPSMLLFCXEFDQFKXXAEDAIRGRDGYNFDGCRLRVELAHGGRGQSSSDRRGGYGGGAAKFGVSRHSEYRVIVRGLPSSASWQDLKDHMRKAGDVCFAEISRDSDECCNVIFLSPYEGTLIWMFFDVQSGXMLRVKRSIVPATSPFYAXTFGIVDYTNYDDMKYAIRKLDDTEFRNPWARAYIRVKRYESSP

SEQ ID NO: 82437 - protein, 462 aa, Gossypium hirsutum
  unsure (1)..(462): unsure at all Xaa locations
  Clone ID: GOSHI-09MAY01-C35958_1.pep
GQWSLFCPNEAPGLADCWGEEFEKLYIHYEKEGKAKKVVQAQNLWFEILKSPTRPGTPYMLFKDTCNRKSNQQNLGTIKSSNLCTEIIEYTSPMETAVCNLASIALPRYVREKGVPLESHTSKLVGSRGSQNRFFDFDKLAEVTEIVTRNLNKIIDVNYYPVETAKRSNXRHRPIGIGVQGLADTFILLGMAFDSPEXQQLNRDIFESLYYHALKASSSLAEKDGPYETYAGCPVSKGILQPDMWGFTPSGRWDWTALRDMIAKNGVRNSLLLAPMPTASTSQILGNNECFEPYTSNIYSRRVLSGEFVVVNKHLLHDLTEMGLWSPVIKNNIIHPARPVQNIPEVPHELKAIYRTGWEIKQKTLVDMAVDRGCFIDQSQSLNIHMDQPNFGKLTSLHFYAWSKGLKTGMYYLRSRAAADAIKFTVDTSMLKEKPKVADDDTKMAQMVCSLTNREECMACGS

SEQ ID NO: 82438 - protein, 136 aa, Gossypium hirsutum
  unsure (1)..(136): unsure at all Xaa locations
  Clone ID: LIB3543-065-Q6-K6-D2.pep
MCLENPELEMQGGGTFSQWDWTAVTDMSAKNGVRNXLFVGPIPTAXPSQILGNNXECFEPYTCNVYSRQYWSGEFVVVNKHLVHDLTEMGLWSPVIXNNIXXEDGSVQXIPEVPHELXTIYRTFWEIKQKTLVDMG

SEQ ID NO: 82439 - protein, 68 aa, Gossypium hirsutum
  Clone ID: GOSHI-09MAY01-C135890_1.pep
GAPIVLFKKGTSSSIDDQKRAINVELADAELNERRKKWSPPPYKANRGVLHKYIKNVQPASVGCVTDE

SEQ ID NO: 82440 - protein, 244 aa, Gossypium hirsutum
  unsure (1)..(244): unsure at all Xaa locations
  Clone ID: GOSHI-09MAY01-C35878_1.pep
SKNLQISLSESTHEDFQVWRGEPIGEYSVHSAYKLLQIANLNPSNYLLQAEAKEFFSKLWKLQLPPKITIIIXRISWNYIPILSNLQQRRLVTNARCPRYGDENEDCHHIFRQYSTSIEVWQLLNLSWITTFAHQDFWEWLTLIFNQGTNEQCRHFCYGLWILWHSRNQLLHERVNTTSRDLARKIQDHLAVYKGIKVKMTSSHTRLNQRNREDVPIMKIQFDAVFNNREFRSVSGLVDKGPMN

SEQ ID NO: 82441 - protein, 60 aa, Gossypium hirsutum
  Clone ID: GOSHI-09MAY01-C35838_1.pep
MEDQCFAFVLSWRTSVLSWRTKLLRDPSDRLFGTFGSRGAKQNSKKKSLDALIKRLRDVS

SEQ ID NO: 82442 - protein, 159 aa, Gossypium hirsutum
  Clone ID: GOSHI-09MAY01-C35548_1.pep
FSSNEYEPSHRDILYAEGITQGNGLAFIEFSLDDRSPTSETYTDNLEAPSLPLTKYQLIRVNAKGMNEGCKWVEMFEDVRSVVFCVALSDYDQISISPESSGSGTLLQNKMLQTKELFETMIRHPCFKDTPFVLILNKYDLFEDKVNRVPLSTCEWFMD

SEQ ID NO: 82443 - protein, 160 aa, Gossypium hirsutum
  unsure (1)..(160): unsure at all Xaa locations
  Clone ID: GOSHI-09MAY01-C135540_1.pep
MLCKMVLMPRKKKVGSVPVYLNVYDLTPINGYAYWFGLGIYHSGVQVHGVEYGFGAHEHSTTGIFEVEPKQCPGFTFRKSILIGRTDLCPKDVRAFMEKLAKEYSGNSYHLITKNCNHFCNDVCIQLVGKPIPRWVNRLARLGFLCNCVLPQXLNETKFA

SEQ ID NO: 82444 - protein, 187 aa, Gossypium hirsutum
  Clone ID: GOSHI-09MAY01-C35538_1.pep
ISFIIFNIIRFNSFSQDMYEFMALDRPSTALIDRGIALHTMIRLVTMGLGGEGYLNFMGNEFGHPEWIDFPRGDQCLPNGVVITGNGYSYDKCRRRFDLGDADYLRYRGMQEFDQAMQHVEEKYGFMTSEHTYISRKDEKDRVIVFEKGNLVFVFNFHWNNSYFDYRVGCAKPGKYKIVLDSDDPLF

SEQ ID NO: 82445 - protein, 155 aa, Gossypium hirsutum
  unsure (1)..(155): unsure at all Xaa locations
  Clone ID: GOSHI-09MAY01-C35528_1.pep
VRIKTARGRAGFVKDIFVRRMSLHTMKWVFWMTGNYKQHADNHYDXNALPVIQGINYRDIVANNVSMAARLEGIEGDPFTQICIANVTIGMAAKAKKVPWTCPDVEGITSGVSPRPCDLLPDQGQKKIAACDFPAKPLSIDRVVLKTCTYRVNHM

SEQ ID NO: 82446 - protein, 224 aa, Gossypium hirsutum
  Clone ID: GOSHI-09MAY01-C35478_1.pep
MASIAGIWLTKNLIFSSPQTLTKPLQIPQFLSLNQRIRFPSGRTHQKTAVKASSSSFSPSAPSGSSSTGLYSSKKFELTAQNVDLVLDDVRPYLIADGGNVDVLSVEDGIISLKLQGACESCPSSTTTMKMGIERVLKEKFGDAVKDIRQVYDDEQKETTVEAVNRHLDILRPAIKNYGGSVEVLSIEEGECVVSYTGPETIGSGIKAAIKEKFPDITNVVLTG

SEQ ID NO: 82447 - protein, 74 aa, Gossypium hirsutum
  Clone ID: GOSHI-09MAY01-C35658_1.pep
KLRDLHIPSKIKVTIWKISWNYIPTLANLKLKRVANEAWCPRCRQLEEATHPCFQKYVSTSDSSLEVFKLLLGA

SEQ ID NO: 82448 - protein, 173 aa, Gossypium hirsutum
  Clone ID: GOSHI-09MAY01-C135640_1.pep
MNIKHPLSPLFLTFLFFYLHPIPTLCSADYDANTTTPSNATDFIRISCSVTLYPDLCFASLYGYANAIQQDPARLARTAIGVSLSRARHMAAFVSNLSREADYGADPRASSALHDCFSNMDDAVDEIRGSLNEMRRLVNPGSESFRFQMGNIHTWMSAALTDEETFRWVRRCG

SEQ ID NO: 82449 - protein, 189 aa, Gossypium hirsutum
  unsure (1)..(189): unsure at all Xaa locations
  Clone ID: GOSHI-09MAY01-C35678_3.pep
RFGQIFYNRLVWWTVCVNSSLNYSYGAAEETGPYLRVGPAFCDTCRVEFEAKRGEPISGAVXGLECRNRTNEAITFQSPEIVADSHGDYHIIVEGDYEESDCDIALVRSPRADCSDPTEAWRKSRVVLTTFDGLSNKLRFANNLGFKKDIALPQCTRILKEMGYYELSQEDGDFELSQEDGDFTHSSEL

SEQ ID NO: 82450 - protein, 188 aa, Gossypium hirsutum
  Clone ID: GOSHI-09MAY01-C35678_2.pep
RKANIPISAVVGGTIFVSSSLNFVYGAENMTYIVVGHVYCDTCRVEFETKLSEPIGGAVVKLECRNRTDNQLTFQSQEIVTDEHGDYHIAVEGDYEESDCDVALVRSPNPDCNDPSEIWRISRVVLTTLDGVSGELRFANNLGFKKKVALPQCTQVLQEIGYYELNQEAGGYNELSQEAEDISPSSEL

SEQ ID NO: 82451 - protein, 177 aa, Gossypium hirsutum
  Clone ID: GOSHI-09MAY01-C35678_1.pep
MANIPIIALFCFTIFVSSSLNFVYGAENMSYVVVGHVYCDTCRVEFETKLSEPIAGAVVKLECRNRTDNHLTFQSQEIVTDERGDYHIVVEGDYEESDCDVALVRSPNPDCNDPSEMWRISRVVLTTLDGVSGELRFANNLGFKKKVALPQCTQVLQEIGYYELSQEAGDIAPWSEL

SEQ ID NO: 82452 - protein, 183 aa, Gossypium hirsutum
  unsure (1)..(183): unsure at all Xaa locations
  Clone ID: LIB3828-031-Q6-K6-E12.pep
VRKETKEGGGPGGALFCFTIFVSSSLNFVYGAENMSYVVVGHVYCDTCRVEFETKLSEPVGGAVVKLECRNRTDNHLTFQSPKXVTDERGDYHIVVEGDYEESDCDVALVRSPNPDCNDPSEMWRISRVVLTTLDGVSGELRFANNLGFKRKVALPQCTQVLQEIGYYELSQEAGDIAPWSEL

SEQ ID NO: 82453 - protein, 105 aa, Gossypium hirsutum
  Clone ID: uC-gsflmaxxa119a09b1.pep
MQHMVVGHVYCDTCRVEFETKLSEPISGAVVKLECRNRTDEAITFQSQEIVADNFGDYHIIVEGDYEESDCDVALVRSPRADCSDPTEAWRKSRVCFTTFDGLSG

SEQ ID NO: 82454 - protein, 67 aa, Gossypium hirsutum
  Clone ID: LIB3145-055-Q1-K1-G7.pep
KKKNDKRRDYHIVMEGDYEESDCDVALVRSPNPDCNDPSELWRISKVVLTTLDGVSDELGFANNLGF

SEQ ID NO: 82455 - protein, 317 aa, Gossypium hirsutum
  Clone ID: GOSHI-09MAY01-C35628_1.pep
NGPPFFFFFFFFFFFFFFFFFFFFFFFCAMEEENKALKEALNKKMNELHFSRVMYARTASKLSEVESHTEESSKSEVNNEATRNSALPHEVSLASMSDVGSDDKASCAESWASALISELEQCRNRQLRESPLRKTVGSSEINLMDDFVEMEKLALVSADQFSGNSHVSSDDANGTLGPMQTGTSGSSFEVICKEIVPVPDSQPDSSMLNNEMKSESPLLSKECGWLRDILKVILEQNRATQRNPHEILEDIRKSLACMSYPNTSEMFDEREGSDHPNGFNPSCISGYIAWKPSNGSSKMDSSSNGDADVNICSDKKS

SEQ ID NO: 82456 - protein, 120 aa, Gossypium hirsutum
  Clone ID: GOSHI-09MAY01-C35158_1.pep
KLCILDNLYRLARSAEQRRSGTKTKSGIMVHSVEETNRCTGFMDMETDTNPIDRSIAHLLFHRPSDPSQRPVTDTALLKSHGKIHGSITNPPLMMPEKLIGHEETDAGSDKKVPTNTNSR

SEQ ID NO: 82457 - protein, 121 aa, Gossypium hirsutum
  Clone ID: uC-gsronu33B113a03b1.pep
RLRLAYLGEVLLLPLCASVFSLSPSLSGSLLTSSTIFFTSLPIPSLKFLSFAHQAAILRHSLKIIAQFPHRTVPQYPLLFSLRHRYFIIIAFVFILGVVVIVKIQEPPPLNRRPRVRPRVR

SEQ ID NO: 82458 - protein, 102 aa, Gossypium hirsutum
  Clone ID: LIB3145-011-Q1-K1-A5.pep
RRWWRRLTMNRKVKEIRRKQRRRVGVVGLHQDRQGVAAIKVNFKCMQRILSPPQELDDLYKSTCGGDSRNISQHSTKSILRCGSVASKSRQHCRRRPKRVPI

SEQ ID NO: 82459 - protein, 101 aa, Gossypium hirsutum
  Clone ID: GOSHI-09MAY01-C35138_1.pep
CHISPQLTPYPCTCEEMVKRQQQKAKRLYFDFSFSILVSAIKPGIDRLYLVTHIYERNINTEIRTKKQTNIKQSNRESKDFKVVHSSFFFFIYLLFIFLYL

SEQ ID NO: 82460 - protein, 98 aa, Gossypium hirsutum
  Clone ID: LIB3165-058-P1-K1-H5.pep
PDYKPDRPNVFRKETLGFPPHICAATAGEPQPSRRTTAFNASVHPTSSATYPHSWPRTPVPVDRRRLNRQLPLRPRPNGSLGIRSELRRMMKARVVPW

SEQ ID NO: 82461 - protein, 199 aa, Gossypium hirsutum
  Clone ID: GOSHI-09MAY01-C135110_1.pep
CSECESKRCLRCVIALTPGARTSLRHEHPLFFYKDYHGRCDACGNLTLGAFCCKDCNFVLHFGCFSLPITAHHKCDEHLLSLTAHNDNKYLESHYCDICEESRDTNRWFYHCAICDTSVHVNCVLGKYPFLKLGSIFEETDHPHPLTIVKKKYYYLDCNKCGKPCEDLSLECSKLECKYIVHLDCVVHYTLRCFLWWRM

SEQ ID NO: 82462 - protein, 137 aa, Gossypium hirsutum
  Clone ID: GOSHI-09MAY01-C35098_1.pep
MNGEVPNIKKWVVFYPVYINSKKTVAEGRRISLAKACENPTCVEIADCCNHLKVPNAIEIDKAYPRDFMQRGRVRVQLKKEDGTLWNPAISSRKQLMLQVAELAPRHPGRTMKQEASSTSKAADRSYKHTKGGRKKR

SEQ ID NO: 82463 - protein, 88 aa, Gossypium hirsutum
  Clone ID: LIB3582-019-P1-K1-D2.pep
MMIAFSTLVLLPILAKLVMLLGDGRHLLGLLRSFDQFASIVLEGACERVIVGDLYCDIPLGLNVIRGENVVLIGEMDMEKEELSSHMT

SEQ ID NO: 82464 - protein, 104 aa, Gossypium hirsutum
  unsure (1)..(104): unsure at all Xaa locations
  Clone ID: LIB3145-009-Q1-K1-B12.pep
MSWAGPDDIFLSTSLATYLDKKLLVLLRDGRKLLGLLRSFDQFANVVLEGACERVIVGNLYCDIPLGLYVIRGENVVLIGELDLXKEKLSSHMTAVLAAEIKRA

SEQ ID NO: 82465 - protein, 106 aa, Gossypium hirsutum
  unsure (1)..(106): unsure at all Xaa locations
  Clone ID: GOSHI-09MAY01-C35398_1.pep
ASQALLLTRGRAWAISLAPRSTITEEILKLCFSADIVGTDQNLLYRSSTHGKGLNRFWSNVEGPHGPLLALISANSEDAYQDNNTAWKWIIGALTQQGFXNKDSFY

SEQ ID NO: 82466 - protein, 103 aa, Gossypium hirsutum
  Clone ID: GOSHI-09MAY01-C35348_1.pep
GLNPSILASPPQRAFASSLSPPPDLRFERGKRGLHRRSLEGKPLTLFVLFLKKNKIKRMKHIKNRFTLKKTLNSQFYFSISLSLSLFIPFYRFKRAFYRPKRK

SEQ ID NO: 82467 - protein, 136 aa, Gossypium hirsutum
  Clone ID: LIB3145-013-Q1-K1-E11.pep
RFLCLFLCLSPFTDLKGPFIGPKEFKSREKKTILLAVFFSLDSLSPFFRCSRRVWRAWRLQDVRMYAETCSGWGLLERHTCKAAYGSRFSLIAGLRTIIFGLYLRLLFFLGHCIGLSIGPYYIYIIKLTHIWKIYF

SEQ ID NO: 82468 - protein, 113 aa, Gossypium hirsutum
  unsure (1)..(113): unsure at all Xaa locations
  Clone ID: GOSHI-09MAY01-C35288_1.pep
ALASGCPIWLSEVKXCRGVTSEGADWLRATRGSLVVNLDINLDMGEHLDASASDGGAQDNGIEFPPMVGSQIGASSIASSSTGRSTSFKLLGLMSGRSFVACTLRRLASSSRS

SEQ ID NO: 82469 - protein, 80 aa, Gossypium hirsutum
  Clone ID: GOSHI-09MAY01-C35238_1.pep
SIVKGVGFPREIHAYCKENIRPIQSQFLKGDFRFIFSRFYAFISILFPSILFHYNFKTFENKRKTLPNAVDSFCFVEIEA

SEQ ID NO: 82470 - protein, 235 aa, Gossypium hirsutum
  unsure (1)..(235): unsure at all Xaa locations
  Clone ID: GOSHI-09MAY01-C36948_1.pep
MQDSSRPVTGYPVHNVNGCGPPPPATSTTAYPYVNPSPYPYYPAPPPQNPRPTFFRRLFVAFALLLIIFGTILLIFWLVLRPHLPDFSIQSISLSNFNASNQRVNGTWNAQFQVSNPNKKLSIYYGDIVSSVFHKDDFLTETRIGQFVQGTREVNSVEASYSVVDSFVEGKVVXAMNGERSRGELKFNIKVVADVAFRYGGWRGRRRILRVWCDDVALTGSSGKMTGGSKKCSVD

SEQ ID NO: 82471 - protein, 310 aa, Gossypium hirsutum
  Clone ID: GOSHI-09MAY01-C36868_1.pep
MEAIRKQATRLREQVARQQQAVFKQFGAGGYGGSDNVITDEVELQQHQKLEKLYVSTRAGKHFQRDIVRGVEGYIVTGSKQVEIGTKLSEDSRKYGAENTCTSGNTLSKAALGYGRARAQMEKERGNLLKALGTQVAEPLRAMVMGAPLEDARHLAQRYDRMRQEAEAQAIEVSKRPAGVRETSGNPEIVMKLESAETKLQDLKSNMAILGKEAVAAMTAVEAQQQRLTLERLISMVEAERTYHQRVLQILDQLDAEMRSERQRIEAPARQIPTAIPSITFFSPPLSHSTPLKYPLLFYLRHTGSGLIRF

SEQ ID NO: 82472 - protein, 95 aa, Gossypium hirsutum
  unsure (1)..(95): unsure at all Xaa locations
  Clone ID: GOSHI-09MAY01-C36818_1.pep
MAAGKFFVLIVMVVLMVEGSRAMTLCRMNDQGLEACKPSVTQPNPVDPSPECCKALKGADLTCLCSYKNSVWLGTXGIDPKLCLGFASKVQAPNA

SEQ ID NO: 82473 - protein, 94 aa, Gossypium hirsutum
  Clone ID: LIB3145-033-Q1-K1-A1.pep
STDSMASGKLVVLMGMVALMVEDSMPMTSCDMNDEGLEACKPSVRHLNPFDPSPECSKALKGADLPCLCSYKNSTWLRSLGIDPKLAFDLPPMC

SEQ ID NO: 82474 - protein, 62 aa, Gossypium hirsutum
  Clone ID: uC-gsronu33B156g08b1.pep
MMRGLEACKPSVRQLNPVDPSPECCKALKGADLPCLCSYKNSVWLGCLWIDKNIVLVLPLKG

SEQ ID NO: 82475 - protein, 108 aa, Gossypium hirsutum
  Clone ID: GOSHI-09MAY01-C36808_1.pep
FHFSFFKNINRGEKGEVCLLGLPTLAFMAPLTAMEPPRTVLGSGSQNQVRCARHGARGGAAHVEAQIARREASGPESCGGWGCLATTLGVVLKVLGFFSVGLVCLLFG

SEQ ID NO: 82476 - protein, 337 aa, Gossypium hirsutum
  unsure (1)..(337): unsure at all Xaa locations
  Clone ID: GOSHI-09MAY01-C36578_1.pep
SVSAALRSWLWXSVRERVVARLRRDLFSHLIHQEIAFFDVTRTGELLSRLSEDTQIIKNAATTNLSEALRNLATASIGVAFMFSSSWKLTLPVISVAIRRLGRYLKELSHKTQAAAAVASSIAEESFGAIRTVRSFAQEGFAISNYTEKVDETLQLGLKQAKLVGLFFGGVNAAFTFSVMAVVFYGAYLTITGSMTVGSLTSFILYSLTVGSAVSSLSGLYSTAMKAAGASRGVFQLLNRVSSMPKSGDKCPEGNPDGDVELKDVWFAYPSRPSDMILKGITLKLKPGSKVALLGPSGGGKTTIANLIERFYDPLKGEVLLNGVPLVEISHEYLHKS

SEQ ID NO: 82477 - protein, 77 aa, Gossypium hirsutum
  unsure (1)..(77): unsure at all Xaa locations
  Clone ID: GOSHI-09MAY01-C36468_2.pep
PTRPPTRPGRTGRAGKTXVATTFLTLSXADVFFDLKQMLVQSGSPVPHELAKHEASKFKPGTIPDRPPRRNDTVFAH

SEQ ID NO: 82478 - protein, 243 aa, Gossypium hirsutum
  unsure (1)..(243): unsure at all Xaa locations
  Clone ID: GOSHI-09MAY01-C36468_1.pep
MPSSNLKPGEGREELDEKXIYRTTYMFSATMPPAVERLARKYLRNPAVVTIGTAGKATDLISQHVMMVKESEKFPRLQKLLDELGDKTAIVFVNTKKNADAISKNLDKAGYKVTTLHGGRSQEQREISLDGFRAKRFNVLVATDVAGRGIDIPDVANVINYDMANSIEMYTHHIGRTERAGKTGVATTFLTLHDTDVFFDLKRMLVQSGSPVPPELAKHEASKFKPGTIPDRPPRRNDTVFAH

SEQ ID NO: 82479 - protein, 142 aa, Gossypium hirsutum
  unsure (1)..(142): unsure at all Xaa locations
  Clone ID: GOSHI-09MAY01-C36438_1.pep
PRDLTLAVLDIASLFPNYDSRTHPIRAVGQLSXEIYTNPVLENFDGSFRGSAQGIEGSIRSPHLMDILNSITIYTDAHRGEYYWSGHQIMASPVGFSGPEFTFPLFGTMGNAAPQQRIVAQLGQGVFRTLSATLYRRPFNIG

SEQ ID NO: 82480 - protein, 142 aa, Gossypium hirsutum
  unsure (1)..(142): unsure at all Xaa locations
  Clone ID: LIB3145-027-Q1-K1-F5.pep
SSPGEHTLKVLDIVSLFSLYTRITYWRGGVSQLKREIYTNPLLENIDGSLLGXLRAYNXSINITHLMDILNSITIYTDAYRGXYYXSWHQILASPVGFSAPEFTSSLYGTMXNASSQQRIVAKLGQSVYRTLSSSLYRRPFN

SEQ ID NO: 82481 - protein, 203 aa, Gossypium hirsutum
  unsure (1)..(203): unsure at all Xaa locations
  Clone ID: GOSHI-09MAY01-C36788_1.pep
DIHGGGMDLVFPHHENEIAQSCAACKQSNVSYWIHNGFVTVDSEKMSKSLGNFFTIREVMDLYHPLALRLFLTGTXHYRSPINYSDVLLESASERIFYIYQTLHDCENVLSQHDKGLQESIPPETLNVINKFHNDFSTSMSDDLHTPVVLAALSDPLKTINDLLHTRKGKKQAMRIESVAALEKIIRNVLSVLGLMPTSYSEA

SEQ ID NO: 82482 - protein, 131 aa, Gossypium hirsutum
  Clone ID: GOSHI-09MAY01-C36718_1.pep
VLCFVGISFENILVNQNYNLLRTLASFLFPATESNINAIPISTYNLHLYTLIESLLVCNYCNSISAVCVAGSFFATMLKQILIKLPRKLQKSDLLDSSGSDSGNHTSNSGNRVECTNIGNSISSRLSGVKP

SEQ ID NO: 82483 - protein, 331 aa, Gossypium hirsutum
  Clone ID: GOSHI-09MAY01-C36138_1.pep
LSLDGDNIIAVCSSPIDVPQIKYGCLVDKVTNTTAWHWLNVSSPIFKCSEKVMSLLSHLQFGITQIPVKDVSDCLTKGAAKSFEAIFVSSKVNNAPDPLIVVLHGGPHSVSLSSFSKSLAFLSSLGFSLLIVNYRGSLGFGEEALQSLPGKIGSQDVNDVLTAIDHVIEKGLVNPSKITVLGGSHGGFLTTHLIGQVPNKFVAAAARNPVCNLSSMVATTDIPDWCYVESYGSKGKTIFTEAPSAEHLTHFYSKSPILHISKVKAPTIFLLGAQDLRVPVSGGLQYARALKERGVETKIILFPNDIHAIERPQSDFESFLNIGVWFKKYCK

SEQ ID NO: 82484 - protein, 179 aa, Gossypium hirsutum
  unsure (1)..(179): unsure at all Xaa locations
  Clone ID: GOSHI-09MAY01-C36088_1.pep
FRIPDHKSGXLDVQYLHPHAAIDSTIGLNPTPLLELSATIGSKELALGGEIGFDTASASFTEYTAGINLNKPDFSVALLLTDKGQALKASYIHSVNPFTCVAAEMAHRFSTYENTFTIGSSHAVDPFTVVKTRFSDNGKVGMLCQREWRPKSLVTFSAEYDSKAINASPKMGLALALEP

SEQ ID NO: 82485 - protein, 96 aa, Gossypium hirsutum
  unsure (1)..(96): unsure at all Xaa locations
  Clone ID: GOSHI-09MAY01-C36018_1.pep
MNECEYHSPLLLAWNSICVLQTVYDKDTLGADDPMGTAEIDLKPYLQAARLRKELQELPNGCALKKVQPSGTNDLADEKXILWENGRITQDMRLIL

SEQ ID NO: 82486 - protein, 195 aa, Gossypium hirsutum
  Clone ID: GOSHI-09MAY01-C36348_1.pep
MCFEIGEVDDAVYIENGTARLSQEFDKLDNSESENGDSLMSLSQVDLTSVAELPAAVPSTFHPAVSLQGSPGESPASWNSCMHHPFSYPHETSDIDASMDSPIGSPTSWNSHSLAQTEVDEARMRKKWGSAQKPFHVAHVTQNQSRKDVTKGIKRLLKFGRKSRGTDSLVDWISATTSEGDDDIEDGRDPANRSS

SEQ ID NO: 82487 - protein, 190 aa, Gossypium hirsutum
  unsure (1)..(190): unsure at all Xaa locations
  Clone ID: GOSHI-09MAY01-C37968_1.pep
PRPPRVRPRVRPNSFRTLSKTLTRSFSTKSSHQNXHQKTHKYLDPNSLLGSWKTPNNPKEAEKKLALLRRDYAKQVKNVRKEYIHEMELLRLEKLRKEEARKEAIRVANEERKRLKAEAARVRAQERIVAEEEFRQTLLKERAEKLENWRMKQTLHENKKKEAKDLVRRRSSMWIEEQELESKIFSAIVF

SEQ ID NO: 82488 - protein, 175 aa, Gossypium hirsutum
  Clone ID: GOSHI-09MAY01-C37498_1.pep
MSKVALTESLPINGTVFDSSLVFALQTMVVETAIVATKSFAWSLMMMGTLPNGIDVFIKEPEAYAGFPLAQLIAMTKPGPENKDASDTDDDDDDEDEAVDDEDGGEEEDGSGEEDEEEGDPEDEPEANGDGGTGDEDDDDDDDDDDDEGEEEEEEEEEEEDEEEEELQPPAKKRK

SEQ ID NO: 82489 - protein, 130 aa, Gossypium hirsutum
  Clone ID: GOSHI-09MAY01-C37458_1.pep
PRVREEISFLTQGEDPYDDGVVRKLFHSNLKLLLVTEGPDGCRYYTQEFSGKVKGLKVEAVDTTGAGDAFVAGTLSQLASDLSLIQDEDRLRNALKFSNVCGALTVTERGAIPALPTREAVVNALLKTVA

SEQ ID NO: 82490 - protein, 277 aa, Gossypium hirsutum
  unsure (1)..(277): unsure at all Xaa locations
  Clone ID: GOSHI-09MAY01-C37428_1.pep
GLWTSMCFKMYAKKDXDIAAWQKSIDSMCYNKLAEPDVLPAKCDDSLEPDSAWYTPLRPCVVVPKPELKKSALESRXKWPERLQVAPERISNVPGGSSTALKHDDGKWKVRATHYKKLLPALGTNEIRNVMDMNTVYGGFAAAVIDDPLWTMNVVSSYAANTLPVVYDRGLIGTFHDWCEAFSTYPRTYDLLHLDGLFTAESHRCDMKYVLLEMDRILRPKGYALIRESSYFIDAIASIAKGLRWSCRREDTEYGVAKEKLLVCQKKLWYSASGSSR

SEQ ID NO: 82491 - protein, 66 aa, Gossypium hirsutum
  Clone ID: LIB3147-039-Q1-K1-C4.pep
HASAHASAHLFAHASAHASGFIDAVASIAKGLRWSCHREDTEYGVAKEKLLVCQKKLWYSASSSSR

SEQ ID NO: 82492 - protein, 123 aa, Gossypium hirsutum
  unsure (1)..(123): unsure at all Xaa locations
  Clone ID: uC-gsronu33B098a11b1.pep
AIYYKKLLPALGRNXLRNVVDINTVYGGFAAAVIDDPLWTMNVVSSYAANTLPLVYDRGLIGTYHDWCEAFSTYPRTYDLLHLDGLFTAESHRCDMKYVLLEMDRILRPMGYALLRETRLFID

SEQ ID NO: 82493 - protein, 111 aa, Gossypium hirsutum
  Clone ID: LIB3145-042-Q1-K1-A7.pep
INPFQRIYFYKTTYYWGRATLPMDEYDFKGSLISRDRLVPESSSIFQVPRLRLGRTIILYYIVLFNLTRQNIYCHLELPLAEYQSFFWQTNNFSLATPYSVSSLRQLGRVG

SEQ ID NO: 82494 - protein, 90 aa, Gossypium hirsutum
  Clone ID: GOSHI-09MAY01-C37788_1.pep
MATFELYRRSTIGMCLTETLDEMVSSSTLSPELAIQVLVQFDKSMTEALESQVKSKVSIKGHLHTYRFCDNVWTFILQDALFKNEDTQEN

SEQ ID NO: 82495 - protein, 234 aa, Gossypium hirsutum
  Clone ID: GOSHI-09MAY01-C37738_1.pep
PTRPLLLMDSHLEGHFSSEEATVVFDLASQCLQYEPRERPNTKDLVTTLAPLQNKPDVPSYVMLGIPKHEEGPPTPQQPLSPMGDACSRMDLTAIHQILVMTHYKDDEGTNELSFQEWTQQMRDMLEARKRGDVAFRDKEFKTAVDCYSQFIDVGTMVSPTVYARRSLCYLLCDQPDAALRDAMQAQCVYPDWSTAFYMQAVALAKLDMQKDAADMLNEAAALQEKRQRGGRGS

SEQ ID NO: 82496 - protein, 252 aa, Gossypium hirsutum
  unsure (1)..(252): unsure at all Xaa locations
  Clone ID: GOSHI-09MAY01-C37618_1.pep
KFTVPQRFFSHFYMTGTLWTTLLLLTTWLYACTAGSTSSTIFALHKSHRVWRAVFLLWLMEAQVLRRLYESLYVFHYRPLARMHIFGYFIGMSYYIVAPLSLCCTCAPEVFEFTLDLVSEGRKQWQPLEVIGGNRFPLWLKWKQWVGSAIFLWGWIHHXRCHAILGSMRAEVKXYFIPKGWVEMVSSPHYLAEIVIYVGLLIASGGADITIWLLLAFVVTNLGFAAAETQKWYIGKFEDYPKHRYAMIPFIF

SEQ ID NO: 82497 - protein, 174 aa, Gossypium hirsutum
  unsure (1)..(174): unsure at all Xaa locations
  Clone ID: GOSHI-09MAY01-C37608_1.pep
EVVTLIGSCQDAASLINQXEIHWGLLEDSLEERLEKEGGLXSDSEKTEAENKEGDVDDSKKRSVEGGKQGASTKKLKKDKAVNATAKSARPEAKPTPAAPRVKPELTLPVMSTEVEQSILEDLRNRVQLSSVALPSVSFYTFLNTHNGLNCSSISQDGSFVAGGFSDSSLKFGI

SEQ ID NO: 82498 - protein, 45 aa, Gossypium hirsutum
  Clone ID: GOSHI-09MAY01-C37138_2.pep
LCCSKIKEQKPCLCQYLKNPNLKKFINTPNARKVASTCGTPFPKC

SEQ ID NO: 82499 - protein, 97 aa, Gossypium hirsutum
  Clone ID: GOSHI-09MAY01-C37138_1.pep
MKKASYTAAFSAAAVVVLLLLAEAKVSMAVTCSPTQLSSCVSAITSSSPPSKLCCSKIKEQKPCLCQYLKNPNLKKFINTPNARKVASTCGTPFPKC

SEQ ID NO: 82500 - protein, 59 aa, Gossypium hirsutum
  Clone ID: GOSHI-09MAY01-C37128_1.pep
LIKFALPLGFYIVAVLLLELKLLKVRLNSVYMSLVQFLLKKKEKMLNEVAVEVSNCHCS

SEQ ID NO: 82501 - protein, 86 aa, Gossypium hirsutum
  Clone ID: GOSHI-09MAY01-C37098_1.pep
FYWILSQNKAAIYSFSSFTMSNCNMTRFRAVHCKAMAPCSMSRRWRNGCQRTLSTSTTHFSRNTSLTVHAPTSIVLALNLTTFDAT

SEQ ID NO: 82502 - protein, 63 aa, Gossypium hirsutum
  Clone ID: GOSHI-09MAY01-C37038_1.pep
MFFLCLATLFLSPALPSIGCLTIKYPQNTLFFYLGFLFLAIFFCFFMKEKVGREKSKVVICHL

SEQ ID NO: 82503 - protein, 110 aa, Gossypium hirsutum
  Clone ID: GOSHI-09MAY01-C37308_1.pep
KASKPVIHEDIPTPFVAKALAGLDAMKLVIEMGLTKATIEGDLKTVIQKCQRMEMDKSVLGAIIYDIQSRKFRVKEAIFKFIHKTKNIQAHNLAKAALVRRETHTWEGKR

SEQ ID NO: 82504 - protein, 150 aa, Gossypium hirsutum
  Clone ID: GOSHI-09MAY01-C37288_1.pep
DAWADAWVVFVLAATNLPWELDAAMLRRLEKRILVPLPEPEARKAMFEELLPQQHGEEALPYDTLVERSEGYSGSDVRLLCKEAAMQPLRRLMAVLEGSLELVPDDELPKVGPVTSDDIETALRNTRPSAHLHAHRYEKFNADYGSQILR

SEQ ID NO: 82505 - protein, 54 aa, Gossypium hirsutum
  Clone ID: LIB3145-040-Q1-K1-C8.pep
MNSKTILLFAELPNVGPVTSNDIETALRNTRPSAHLHAHRYEKFNTDYGSQILR

SEQ ID NO: 82506 - protein, 67 aa, Gossypium hirsutum
  Clone ID: LIB3148-019-Q1-K1-C6.pep
REVQYRLWQSNTPMMACCCKWTFKLLVSNFPRFYIDQNSIQFLLCIVRLWKLVYPCFFFRSVLSKVY

SEQ ID NO: 82507 - protein, 188 aa, Gossypium hirsutum
  unsure (1)..(188): unsure at all Xaa locations
  Clone ID: GOSHI-09MAY01-C37258_1.pep
AFWPHVHSRIIASLLISQLLLMGLLSTKEAANSTPLLVILPILTLSFHKYCKSRFEPAFRKHPLEEAMAKDLLGRTTEPDINLKAFLADAYLHPIFRSFKEDELVEIRVDKVRVDRHQSYADXPKAEMISVPPPPPHHAYHPTSPPHHSYHQPTTSPPQDIYHHGIPPQYDYNLYGYHYEAESWTSRD

SEQ ID NO: 82508 - protein, 139 aa, Gossypium hirsutum
  Clone ID: GOSHI-09MAY01-C37208_1.pep
MTSGFSGGGTEFYGRIAGGSVSNSGTMSNNQPTAPYGTHGIFMDPKSQIVNRAAPGFVGKRTRADFNNHGLNDLYPRPVKPRNYQHAYPISPLSPIDFSCNILPDVTCNFSPSSSMSQRYGVPVLQQLRRQQLPLGISS

SEQ ID NO: 82509 - protein, 112 aa, Gossypium hirsutum
  Clone ID: GOSHI-09MAY01-C37238_1.pep
WYIARNLVIYQGSSTQTHILQKMNENNHMTWLFHWRLRGLESPFPSASWLSVRCELSLTLAPWELNLTSASKVERSRHHLPVHIHIRGYQHDGSPHPPHSPRLGLQPNHMLM

SEQ ID NO: 82510 - protein, 58 aa, Gossypium hirsutum
  Clone ID: GOSHI-09MAY01-C30938_2.pep
YLFNDQTAAYPPPPPSTAPGPYVTAPPAGYPMSKDEYSQQNPAAVETKSRGDGFWKGW

SEQ ID NO: 82511 - protein, 78 aa, Gossypium hirsutum
  Clone ID: GOSHI-09MAY01-C30938_1.pep
MNHNQQHFNQSSAAAYPPPPPSTAPGPYVTAPPAGYPMSKDEYSQQNPAAVETKSRGDGFWKGCCAALCCCCLLDACF

SEQ ID NO: 82512 - protein, 126 aa, Gossypium hirsutum
  unsure (1)..(126): unsure at all Xaa locations
  Clone ID: GOSHI-09MAY01-C30858_1.pep
RPRVRPRVRPRVRIIVTKARALKVTEEVERLVSVSRPVRMHWTGCPNTCGQVQVADIGFMGCMARDENGKPCEGADIFLGGRIGSDSHLGELYKKGVPCKNLVPXVADILGEHFGAVPRQREEAED

SEQ ID NO: 82513 - protein, 92 aa, Gossypium hirsutum
  Clone ID: GOSHI-09MAY01-C30878_1.pep
TGFADLNCVVDGFQNPSLQIQSKVKTGLRFTSLIYIGRYYVLKLIQVSFFFFWDMYMYMYNECGCVKIFAIVDICTAFIEVEHYTANRTCNN

SEQ ID NO: 82514 - protein, 77 aa, Gossypium hirsutum
  Clone ID: uC-gsflmaxxa047b05b1.pep
QYHAHILQAHQLIITSPVSRIIFNFIKGCTNIHYSKDFCHGEETHLCIFSCNEAKGQQVQTGCWYESIKSYSYIDQE

SEQ ID NO: 82515 - protein, 183 aa, Gossypium hirsutum
  Clone ID: GOSHI-09MAY01-C30838_1.pep
MEIFQTIIVITTSLMLLSSVVSSDNTITTSNTTSKYQIECTMCSSCENPCQQTPSPPPPSPPPPKPSSPPPTVPNPNHCPPPPSPPTCSGGGNYYYSPPPPSQSSGGNNYYAPPPPGGVIGGMYYPPPTYKNYPTPPPPNPIVPYFPFYYHTPPPPSEARSLSSTAHWLSIFISMLGFFLSFF

SEQ ID NO: 82516 - protein, 125 aa, Gossypium hirsutum
  Clone ID: GOSHI-09MAY01-C30548_1.pep
TLNAELENLSPCGSGKRSTSSHSSSPEFEFWMVRNPPFPEPDLISADELFVNGVLRPLHLLPNKQPEENPQIDSNQPASQPPIPDPDPIITSDPVPVLSASKRWRDIFKKEKGKNGKQSKKDKDK

SEQ ID NO: 82517 - protein, 131 aa, Gossypium hirsutum
  Clone ID: GOSHI-09MAY01-C30568_1.pep
MATISATSSITIAASLSYKPSSLKLTSPIAIGLPTMAKKGKVMCSMKEEEEKNSSSVGMSAASLLAAAVMSSSPAMALVDERMSTEGTGLPFGLSNNLLGWILFGVFGVIWALYFVYTSSLEEDEESGLSL

SEQ ID NO: 82518 - protein, 94 aa, Gossypium hirsutum
  Clone ID: AI055711.1.pep
RGMSCFPYIYILAYYILFFSLLISLIDPDIFVILHALKRVHSGASNMLPILIESSLHLQVLHIKCLHYHLMLEILHCWSWITLFIEGPFLSSPH

SEQ ID NO: 82519 - protein, 67 aa, Gossypium hirsutum
  unsure (1)..(67): unsure at all Xaa locations
  Clone ID: AI054553.1.pep
QSHSKLXSIYXRSSIVYLXRLSHNDTCLLSMVXPLAXYGXSLVGXKHKMAPSHWFRYPSQAMTKLPA

SEQ ID NO: 82520 - protein, 147 aa, Gossypium hirsutum
  unsure (1)..(147): unsure at all Xaa locations
  Clone ID: GOSHI-09MAY01-C30158_1.pep
MATTTATCFHLQNIPSSPWVNNTSRITTYKAMDGSLRASNPRTQTFIKPVKCSSSSSSGNEIGIADFIGGDLLKFDLGQWLSDVEQHKALAIYTPHEGGYEGRYFTRLRHQGYYFLDLTARGLGDPETTLTKIHPVCPPXLGRQPIS

SEQ ID NO: 82521 - protein, 192 aa, Gossypium hirsutum
  Clone ID: GOSHI-09MAY01-C30138_1.pep
MMSGPLSMSIGLSSALNITEEATTVTKKQGIVSILGSDTDQRPTKGSSLRRTLSADMSSKKWLTQLSHIASSDELPVSIADSSSEEAEEEDYQEKKALEKPAQFDIWTSIISSKPQDDSKSLPPPYIHPLVKRSGSCLSEKSLEICTESLGSETGSDGFSSYPPTETGDVEEDRKEEGQRLRQQKLASTMIK

SEQ ID NO: 82522 - protein, 76 aa, Gossypium hirsutum
  Clone ID: GOSHI-09MAY01-C130300_1.pep
TGVDISLSELQAWNRTIKAGQDQRHCTLEVKLPWIVRYRLAILVYSVLALLLLALVGIICAVTLACRVCLKKCKTD

SEQ ID NO: 82523 - protein, 338 aa, Gossypium hirsutum
  Clone ID: GOSHI-09MAY01-C30258_1.pep
MEAGLPMLNCLLQHTPHASVRSLCSYSDSSSSSSSSSSKWVYAVFWRILPRNYPPPKWDYGGSALDRSKGNKRNWILVWEDGFCDFHECERAGSGYVKGRFGADIFFKMSHEVYNYGEGLVGKIAADNSHKWVHKEIPNENDPGFISSWNMSIEPQPKAWTSQFNSGIQTIAIISVREGIIQLGSLDKMVEDLNLVISIQRKFSYLQSIPGVFAIQRPYLPIQHPYALKPNNQMPEHHETTTICHDDKRQFGGTKRLIEERPEDSPIKSINLGWNSPQNGIIGPPFWSIPPLLPTVSCSLGALLSKLPSVIPSYSVSEPPEINIINQTNKYNPKRKGR

SEQ ID NO: 82524 - protein, 187 aa, Gossypium hirsutum
  Clone ID: GOSHI-09MAY01-C30208_1.pep
QLLLCGQAVPNVFDGRMDLGGGMFLKGIFTSVEVGFLTLLESLNFCKVGQNLKCPKWPIWVVGSESHYTVLFALDTAVQDENELEERESQIRKAFDAQDQSGGGGFISVEAFHQVLRETSIRLPSEKLDSLCNSGFIVWSEFWQVILDLDKNLGGLKDSTGQMGRKIFDLYHFNGIAKSDLNGSQAT

SEQ ID NO: 82525 - protein, 126 aa, Gossypium hirsutum
  Clone ID: GOSHI-09MAY01-C31918_1.pep
MEPMELQFCNGGNGSSLGDPLNWAASAQSMKGSHLDEVKRMVEEYKKPVVRLGGETLTIAQVTAIANRDVPVHVELSEAARPAVKASSDWVMEGMNRGTDSYGVTTGFGATSHRRTKQGGALQRSL

SEQ ID NO: 82526 - protein, 120 aa, Gossypium hirsutum
  Clone ID: GOSHI-09MAY01-C31938_1.pep
MCKGLEQGGNRSSSWLKQGFSSGLVNCELCNSRASLYCQADDPYLCRKCDKWVHQANFLPLRLFTGFLCSPCQTLTQRYLIGASHEVMLPTMVTSSETSHCYSDMETHLSTTLKTPFLFL

SEQ ID NO: 82527 - protein, 188 aa, Gossypium hirsutum
  unsure (1)..(188): unsure at all Xaa locations
  Clone ID: GOSHI-09MAY01-C31928_2.pep
VPAKLPPCFYIYVTGSYKLYGLHSPGPKRMHCILHSIPVSAIQEGGTASTPSAFPQSLDEXLSPLHSSPARPPIVDIISPSIQATPVFSPGSREPLALKNKAPRWHEQLQCWCLNFKGRVTVASVKNFQLVAAVEPSHNVSPEEQEKVVLQFGKIGKDIFTMDYRYPLSAFQAFAISLSCFDTKPACE

SEQ ID NO: 82528 - protein, 241 aa, Gossypium hirsutum
  Clone ID: GOSHI-09MAY01-C31928_1.pep
FIRPDFSRASNTYVGKLRSNFLGTKFTVYDSQSSCDSWIQSTARPRRRFHSKQVSPRLPACNYIIGTVTYELNVLRTRGPRRMHCILHSIPVSAIQEGGTAPTPSALPQSLDEQLSPLHRSKGKEPIVDIISPSIQATPVFSPCSREPLALKNKAPRWHEQLQCWCLNFKGRVTVASVKNFQLVAAVEPEHNVSPEDQEKVILQFGKIGMDIFTMDYQYPLSAFQAFAICLSSFDTKPACE

SEQ ID NO: 82529 - protein, 83 aa, Gossypium hirsutum
  Clone ID: LIB3120-034-Q1-K1-F10.pep
PTRPVDTISPSIRATPVFSPGSREPLALKNKAPRWHEQLQCWCLNFKGRVTVASVKNFQLVAAVEPSHNVSPEEQEKVGNLHH

SEQ ID NO: 82530 - protein, 104 aa, Gossypium hirsutum
  Clone ID: GOSHI-09MAY01-C31878_1.pep
GGLGQYPIGEIGRFDAEQFAPRFPGNGVSLTLGLPHWENLSLSGSHQNLLPNQTMQMGRRLDIDEPNEFGAINPPTPHSSAAYESINLQNRKRFVAQLLPDFVA

SEQ ID NO: 82531 - protein, 187 aa, Gossypium hirsutum
  unsure (1)..(187): unsure at all Xaa locations
  Clone ID: LIB3543-061-Q6-K6-A3.pep
MAAFSATHCRSYSYSHSSSINGGQNQRFSFSSFSRLSVPAKAIRNSHQTVVLMQDGVVATKVTPVEKETPKEKLKDELLSVTSTKEWDEKAGFDSNENESTVSITVVGASGDLAKKKIFPALFALYYEDCLPKHFTIYGYARSKMTDAELRNMVSKTLTCRIDKRENCSEKMDQFLKRXFYHSGQYD

SEQ ID NO: 82532 - protein, 87 aa, Gossypium hirsutum
  Clone ID: LIB3120-021-Q1-K1-G8.pep
LFNREMAAFSATHCRSYSYSHSSSINGGQNQRFSFSSFSRLSVPAKAIRNSHQTVVLMQDGNTSKDIGEKNFQLWKIFILFGIGKNP

SEQ ID NO: 82533 - protein, 124 aa, Gossypium hirsutum
  Clone ID: GOSHI-09MAY01-C31438_1.pep
MSFTMVKPWIHWSYLQPTKFGNYPSSSSTRLFNNGCQQIDEGNKSKRRGAFVKVNALPDWPLMAVLVHHVQQLDAQREIITNKSIWHLSDEAIKKGYAFYIMFTCWGCLVFGSTKDPYYDSEVY

SEQ ID NO: 82534 - protein, 86 aa, Gossypium hirsutum
  Clone ID: GOSHI-09MAY01-C31778_1.pep
MAAATMALSSPSFAGKAVKFSPSTPEIQGIGRVSMRKTATNPAASGSPWSGPDRVLYLGPLSGEPPSYLTGEFPGDYGWDTAGLSA

SEQ ID NO: 82535 - protein, 157 aa, Gossypium hirsutum
  unsure (1)..(157): unsure at all Xaa locations
  Clone ID: GOSHI-09MAY01-C31608_1.pep
SNICTAQALLANMAAMXPPPPGPEGLKAIAQRVHGLAGVFALGLKKLGTVEVQGLPFFDTVKVTCADAHSIADAGYRSEINLRVLDAKTITVSFDETTTLEDVDKLFEVFSGGKPVSFTAASLASQVETAIPSGLERQSPYLTHSIFNMYYTEHELF

SEQ ID NO: 82536 - protein, 86 aa, Gossypium hirsutum
  Clone ID: GOSHI-09MAY01-C31048_2.pep
LVSVARKTESSLQRIRQGAQRRAGASSDVSDHNVSDTDKICMQLFLDIQEYGRNLAVLGVEAADIDAYRSLWQCVAPADRQDEIKF

SEQ ID NO: 82537 - protein, 219 aa, Gossypium hirsutum
  unsure (1)..(219): unsure at all Xaa locations
  Clone ID: GOSHI-09MAY01-C31048_1.pep
VIHDINCLGKEISGAYLDHVLRVLSSCSTEVLDLVKQSILHCGKSLDDLLPLVINTIKEALVQKSVEDLRQLKGITATYRMTNKPLPVRHSPYVAGVLRPLKTFLDGEQATKYLTNDARNSLLLGAATDITIRYYELAADLVSVARKTESSLQRIRQGAQRRAGASSDVLDHNVSDTDKICMXVFLIFRSYGRNLAVLGVEAAVIDAYRSLWHCVAPAE

SEQ ID NO: 82538 - protein, 337 aa, Gossypium hirsutum
  unsure (1)..(337): unsure at all Xaa locations
  Clone ID: GOSHI-09MAY01-C31078_1.pep
LNFSVFLSYLYTXGKLKPSPMEVSTCVDNVCAHDACRPAISFAVELMYASSIFQILELVPLFQRRLLNFVEKALLEDIIPILVVAFHCQCSQLVSQCVDRVARSDLDSICIEKELPYEVTESIRLLRRKSPSDGEGNEAVVDPLREKRIRRIHKALDSDDVELVKLLLTESDITLDDATALHYAAAYCDPKVVSEVLGRRLADVNLRNSRGYTLLHIAAMRKEPSVIMALLAKGASASTLTLDGQSAVNICRRLTRPKDYHAKTEQGKETNKDRICIDILEREMRRNPMAGDVSGASHALSDDLHMRLLYLENRVALARLLFPSEAKLAIDIAHAET

SEQ ID NO: 82539 - protein, 122 aa, Gossypium hirsutum
  Clone ID: GOSHI-09MAY01-C31008_2.pep
MGGVTSSIAAKFAFFPPNPPSYRVLEDELCAGQLYIPEVPRRDGVDVLKLRTRRGNDIVAVHIKHPKASATLLYSHGNAADLGQMFELFVELCNRLRVNLMGYDYSGYGQSTGKPTECNTYA

SEQ ID NO: 82540 - protein, 174 aa, Gossypium hirsutum
  Clone ID: GOSHI-09MAY01-C31008_1.pep
MGGVTSSIASKFAFFPPNPPSYTVVEDDACDGRLYIPEGPRRDDVDVLKLRTRRGNDIVAVHIKHPKASATLLYSHGNAADLGQMFELFVELCNRLRVNIMGYDYSGYGQSTGKPTECNTYADIDAAYTCLKERYGVKDEDLILYGQSVGSGPTVDLASRLPNLRGVVLHSPIL

SEQ ID NO: 82541 - protein, 344 aa, Gossypium hirsutum
  unsure (1)..(344): unsure at all Xaa locations
  Clone ID: GOSHI-09MAY01-C31028_1.pep
PQQLVEMASKLCDSCKSATATLFCRPDSAFLCPNCDSKIHAANKLASRHARVLVCEVCEQAPAHVTCKADAAALCVTCDRDIHSANPLARRHERVPLAPFYDSVKPNTAFNFLDDRYLSDVDGDADSSREEAEAASWLLPNPNHKAHESPDVNTGQYVFPEMDPYLDLDYGHVDPKMETPDQDQNSSGTDGVVPVQSXSVQAPMINDHCFDMEFTTPKAFPYGYNYNCNYNPHCLSHSVSSSSLDVGVVPDGGSTITDVSVPCAKVTETTYQTVQLSLAEREARVLRYREKRKNRKFEKTIRYASRKAYAEVRPRIKGRFAKRSDVEVEVDGGNMYGFGVVPSF

SEQ ID NO: 82542 - protein, 118 aa, Gossypium hirsutum
  Clone ID: LIB3120-015-Q1-K1-C8.pep
MINEDCFEREFTTPKAFPYGYNYNCNYNPHCLSHSVSSSSLDVGVVPDGGSTITDVSVPCAKVTETTYQTVQLSLAERKARVLKYREKRKNKKFEKTIRYASKKAYAEVRPRIKRRFA

SEQ ID NO: 82543 - protein, 62 aa, Gossypium hirsutum
  unsure (1)..(62): unsure at all Xaa locations
  Clone ID: LIB3493-036-P1-M1-G3.pep
DGVVPVQSNTGQGXMINEHCFDMEFTTPKAFPYGYNYNCNYNPHCLSHSVSKRAATSYFFHN

SEQ ID NO: 82544 - protein, 193 aa, Gossypium hirsutum
  Clone ID: GOSHI-09MAY01-C31368_1.pep
MKNTIRCCISCILPCGALDVIRIVHSNGRVEEISGSIKASDIMKAYPKHVLKKPSSSSDDGMVPKIVIVPPDAELQRGKIYFLIPLPSTPDKTRSKTSSTTKKKKRDRLDTTNNNNGRGASSNGRTRQHNHSRSMSNANKNNNTISMSNLLISDQYLSEILSEKLSTQRDRRRGRVGVWRPHLESISESPNDG

SEQ ID NO: 82545 - protein, 52 aa, Gossypium hirsutum
  Clone ID: GOSHI-09MAY01-C31258_1.pep
MNPGGVATTNGGSGSGSVGVRIQQSRSLPDFLQSVNLKYVKLGYHYLISNLL

SEQ ID NO: 82546 - protein, 170 aa, Gossypium hirsutum
  Clone ID: GOSHI-09MAY01-C31218_1.pep
MAGLLKTLPGGSTPLPPLSPSLRPISLNSPRPFYVCFKLRLPRTPGALRFSSSPSLRFVKLVPFASNGGETETAETQEEVEEPQIEDSSDGAVSVEEDTTGDESNDFEDAPSPTIVSLLQTYKGALASNDESKVADIEAFLNFIEDEKVDLEKKMAFFVRRICQLKKDRG

SEQ ID NO: 82547 - protein, 137 aa, Gossypium hirsutum
  Clone ID: LIB3120-018-Q1-K1-A5.pep
FIIFHLERPFHLPAMAVLLKALSVKSTSLSSLFSFLKTIFLNFSRAFYVCFKQRLSCTPGALRFNPSSSLRVVKVGPFASNGGETETAETQEEVEEPQIEDSSHGAVNVEEDTTGDESDDFEDTPSPTIVSLLQTYK

SEQ ID NO: 82548 - protein, 214 aa, Gossypium hirsutum
  Clone ID: GOSHI-09MAY01-C132990_1.pep
QVYRLSELKDATHGFKEFSELGRGSFGFVYKAVLPDGRQVAVKRANAATIIHTNSRDFEAELEILCNVKHTNIVNLLGYCAEMGERLLVYEYMPHGTLHDHLHGDLSPLGWDLRLKIAFQASRGLEYLHNEVSPPIIHRDVKTSNILLDSEWGARIADFRIVSATTDNDLSGNMEDDVYNFGIVLLEILSGRKAYDRDCTPPGIVEWALPLIRR

SEQ ID NO: 82549 - protein, 76 aa, Gossypium hirsutum
  Clone ID: GOSHI-09MAY01-C32978_1.pep
HIAALPHTDDEYVRRPLTTSLSLKSFSSSAMVANIVVNGRLETEINRGGATSFMNWSRFRDLGYVGSIEQVKIQAN

SEQ ID NO: 82550 - protein, 229 aa, Gossypium hirsutum
  Clone ID: GOSHI-09MAY01-C132950_1.pep
LAWNKEYRNILASASADKQVKIWDVAAGKCNITMEHHEGKVQAVAWNHHVPQVLLSGSFDCSVVMKDGRVPTHSGFKWSVTAEVECLAWDPHTEYSFVVSLEDGTIRGYDIRAAKSDPSSESKPSFTLHAHDKAACTLSYNPAAPNLLATGSMDKMVKLWDLSNNQPSCVASKNPKAGAVFSISFSQDNPFCLAIGGSMGKLGVWDTLTEITVSGKFGNYSQQPNRPKA

SEQ ID NO: 82551 - protein, 86 aa, Gossypium hirsutum
  Clone ID: GOSHI-09MAY01-C132930_1.pep
FGGPILPIYSCYISLNFGLKFACRRIRSGNCIRAMKGQTTETGFFRGAGIGAVAGAITAVQLLESLADGESLSKVTIRINFILTNS

SEQ ID NO: 82552 - protein, 197 aa, Gossypium hirsutum
  unsure (1)..(197): unsure at all Xaa locations
  Clone ID: GOSHI-09MAY01-C132570_1.pep
VIRSESDTESDTDAETMKCISCKEEYGSRDAGTCKECYEEASETEEELKREIEDLKAKVAFLRFWSPLDHAHRGSTTTPGPFFSDVVLIASDDGSPGFPPVPVPANKAVLVNRSPVFKAMLENEMEESRSGTIKVSDVSYDALRAFVNYLYTAEACLDEQLACDLLVLAEKYQVKHLKGYCEKFLVSXLNWDNSLMR

SEQ ID NO: 82553 - protein, 93 aa, Gossypium hirsutum
  Clone ID: GOSHI-09MAY01-C32448_1.pep
QPKRSLRGNWKRFLSTQKGRREAIMPSGSKKRKAAKKNKEQAAKNENSSTNNNPHGNDDSKSQDEGDTYGGDVGYPASQDDHNHHHRFNHREE

SEQ ID NO: 82554 - protein, 63 aa, Gossypium hirsutum
  Clone ID: GOSHI-09MAY01-C32768_1.pep
DQLKVHFGSNNVLTVSGERPLEGSKWTRFRREFTIPKDCKANEIRARFSSGFLYIPFPKKIVF

SEQ ID NO: 82555 - protein, 77 aa, Gossypium hirsutum
  Clone ID: GOSHI-09MAY01-C32688_1.pep
MEECQVYVELNRSRRHDFLYPLIFREYIYALAHEHGLNKSMILFENQGYGNKFSSLIVKRLILRMDQQNRSISSAND

SEQ ID NO: 82556 - protein, 392 aa, Gossypium hirsutum
  unsure (1)..(392): unsure at all Xaa locations
  Clone ID: GOSHI-09MAY01-C132690_1.pep
LDELELYENPIAIATFAAIEKNIFVSTSAGNEGPDLETLHNGTPWVLTVAAGTMDRSFGASLTPASAGYVRGAALYPGNFSSIQYPIVFMDKCDETKELKKLVGMIIVCQDPGKEDSLNDQFSSIQVAGNVPGVFITNSTLLDIFTQSPLPAIFLEQKGGDIVVDYIKTNKNPKASIEFKTTFLGSKPSPTVTSYTSRGPSYSAPSVLKPDIMAPGDSILAAWPLNIGVARLNDDMLFSSFNLLSGTSMACPHVAGIAALLKGAHPDWSPTAIRSALMTTSDPIDNAGNPIEDIGTNLQPATPLXMGAGHINPNKALDPGIVYDATVQDYIDFLCGLNFTPQQIKTITGSSSNKCSNPSLDLNYPSFIAYFNDRNVKPDSNTVKEFQRTVTI

SEQ ID NO: 82557 - protein, 78 aa, Gossypium hirsutum
  Clone ID: GOSHI-09MAY01-C32658_1.pep
KYCQYQNCVNLNIMQHTLPQGKMLQAPSIIERGKEQIDALFHHGKKPHHHKGTHGTSDHIADEHRLLMMLKALTCLKE

SEQ ID NO: 82558 - protein, 46 aa, Gossypium hirsutum
  Clone ID: uC-gsflnu33B022d06b1.pep
FLCLTSSLSLSDFLYICPSALCLEFFILMLLDCSLTESIEYKASII

SEQ ID NO: 82559 - protein, 225 aa, Gossypium hirsutum
  unsure (1)..(225): unsure at all Xaa locations
  Clone ID: GOSHI-09MAY01-C32148_1.pep
MERGKEQGMVVMPQQNPLEQLQAKFKEVETSFRGWLAKQSLPIEAAVVTTTSAAQGAAIGAFMGTLTNDVSSSLPTPPQASLDPQAMASLKQAQALSGGPLIQARNFAVMTGVNAGISCVMKRLRGKEDVQSSMVAAFGSGAMFSLVSGMGGQNQIANAATSGLFFALVQGGLFQLGQKFSQPPAEDIYYSKARSMXSSLGLQNYEKNFKKGLLTDNTLPLLTDS

SEQ ID NO: 82560 - protein, 110 aa, Gossypium hirsutum
  unsure (1)..(110): unsure at all Xaa locations
  Clone ID: LIB3120-028-Q1-K1-F8.pep
MERGIEQGMVVMPQQNPLDQLQAKFKEVETRFRGWLAKLSLPIEAAVVTTTSAAQGAAIGAFMGTLTNDVSSSLSTTPXIQARNTAVMTGVNAGISXVMKRLRGQDDVQS

SEQ ID NO: 82561 - protein, 165 aa, Gossypium hirsutum
  Clone ID: GOSHI-09MAY01-C32178_1.pep
MGKGWAVKVMMMSLVVVVGAGDESGLAKECSKDLQSVMTCLSFAQGKMEKPSKECCSSVSSIKEEEPKCLCYILQQTQASGAQNLKSLGVQQDKLLQLPSACQLKNASVTDCPKLLGLAPNSPDAAIFTNSSSTPTTPSTGTPSSASENADNNSGGTKLETAHLV

SEQ ID NO: 82562 - protein, 171 aa, Gossypium hirsutum
  unsure (1)..(171): unsure at all Xaa locations
  Clone ID: GOSHI-09MAY01-C132310_1.pep
MATGLSTRNGNIGMTLPTAAASKLNNPLLSKECSNCSGHSPFFIHQVRHLGILRRLCTACVLRLHPSSFCPACFTFYGGSPPHPSKRVNCSNCCSLTHSHCAGDTVLTSYLCPPCKDSSFSFFPLKDNKIDKKLAHALLCAAKIASFSMGKAVTVPWAEADRRXREAALAK

SEQ ID NO: 82563 - protein, 84 aa, Gossypium hirsutum
  Clone ID: LIB3120-031-Q1-K1-G1.pep
LVTLFCFSSKDTYELLELLNVVTSKEMNYPSFVGQIRYRSNLYLFPILVIVIIQCRNLKFSFYQCSFNCPYKHTKNLLKDQYQL

SEQ ID NO: 82564 - protein, 69 aa, Gossypium hirsutum
  unsure (1)..(69): unsure at all Xaa locations
  Clone ID: LIB3147-032-Q1-K1-G2.pep
GNLNXXHPFVGGQXXRYXXPXFFTFLSXXLSHHVIIXXARNPLKLQTSIXIAPFNSVPDGAWGRARXIP

SEQ ID NO: 82565 - protein, 211 aa, Gossypium hirsutum
  unsure (1)..(211): unsure at all Xaa locations
  Clone ID: GOSHI-09MAY01-C32248_1.pep
FAVEHFSQDCDQVLDNKLDSSEFEIQNFSFLPKMIFEKHEEYLYLNMIQDIISEGNLKGDRTGTGTLSKFGCQMRFNLRKTFPLLTTKKVFWSAPARPLLWFISGSTNAQXSCQEKGIHIWDGNASREVLDSIRLTDREEGDLGPVYGFQWRHFGARFSGLHADYTGQGFDQLLDVIDKIKNNPNDKRIILSTWNPFDLKLMALSPCHMFA

SEQ ID NO: 82566 - protein, 169 aa, Gossypium hirsutum
  Clone ID: GOSHI-09MAY01-C33948_1.pep
EDSPLPVSSPPPEGVPLNSPHENESSGKLVSAMRERRHLSGRFQWLLRFGRNNVSQEASDKGGGTNETPKSLNRDSKSNTADSSIAGASRNSSLASQRDVDQNVMGTLKNLGQSMLEHIQVLESVFQQDRVQVGSVDNLGKSNLVGKGQVTAMTALKELRKISNLLSEM

SEQ ID NO: 82567 - protein, 61 aa, Gossypium hirsutum
  Clone ID: GOSHI-09MAY01-C33898_1.pep
IHLQVGFDELGGTDEFSTDDLADRLAKVQGIFSEGESSSKPRTQTKRSVRQSSNPDSSDSD

SEQ ID NO: 82568 - protein, 81 aa, Gossypium hirsutum
  Clone ID: LIB3135-055-Q1-K1-D11.pep
RKFKSSSLKANRHRNPEHKPKGVSDRARTQTRPIRINCGLSRFVSFLYLFQWKSIGFIIIPCLNTLKANEENIVCCMNEII

SEQ ID NO: 82569 - protein, 113 aa, Gossypium hirsutum
  Clone ID: LIB3189-032-P1-K1-C10.pep
AISKSNQKATDLKQETSQDKEGKFLDDDHSHDTPAKILRRQLRDDRREKRATELVKQDEKVTVKLESAAIERSKAVDSAVLGKYNLWRRENENVNSDFTVRLMRDQIIMSKVY

SEQ ID NO: 82570 - protein, 69 aa, Gossypium hirsutum
  Clone ID: LIB3135-009-Q1-K1-H3.pep
FDKLRLVNIPTLQFNQKANILSIEGVVDHFMQDNKSKSNYIKYKIDCICPKQQSLQLWIVQCPTFQVSR

SEQ ID NO: 82571 - protein, 282 aa, Gossypium hirsutum
  Clone ID: GOSHI-09MAY01-C33838_1.pep
MAKEGENSTFHARDYVDPPPAPLIDASELKKWSFYRALIAEFIATMLFLYITVLTVIGHKSQVATSPDACSGVGLLGIAWAFGGMIFILVYCTAGISGGHINPAVTFGLFLARKVSLIRAIAYMVAQSLGAICGVGLVKAFQSAYYNRYGGGANTLADGYSTGTGLGAEIIGTFVLVYTVFSATDPKRKARDSHVPVLAPLPIGFAVFMVHLATIPITGTGINPARSIGAAVIFNNKKAWDDHWIFWVGPMIGAAIAAFYHQFILRAGAAKALGSFRSQTHV

SEQ ID NO: 82572 - protein, 77 aa, Gossypium hirsutum
  Clone ID: LIB3825-024-Q6-N6-F5.pep
AVFMVHLATIPITGTGINPARSIGAAVIFNNKKAWDDHWIFWVGPMIGAAIAAFYHQFILRAGAAKALGSFRSQTHV

SEQ ID NO: 82573 - protein, 108 aa, Gossypium hirsutum
  Clone ID: GOSHI-09MAY01-C33828_1.pep
MERPGPENKDASDTEGDDDDEDEDEDNADDQDDDGGDEDFSGEEGEEGDPEDDPEANGDGGSDEEDDDDDDDDGDEDDDDDDDGEDEEEEDEEDEDDEVPQPPSKKRK

SEQ ID NO: 82574 - protein, 190 aa, Gossypium hirsutum
  Clone ID: GOSHI-09MAY01-C33578_1.pep
ATSALSPIRKLSHLLSHIKLLIRRITAAIAASDAGLYSESVRHFSKIVDGRRLASQGFLAECYMHRASAYKASGRIAESISDCNKTLALDPTSIQALETRAELLETIRCLPDCLHDLEHLKLLYNSIMRDRKLPGPPWKRHNVRYREIPGKLCALTAKIQRLKQRVASGETGNVDYYALIGLKRGCSRSE

SEQ ID NO: 82575 - protein, 52 aa, Gossypium hirsutum
  unsure (1)..(52): unsure at all Xaa locations
  Clone ID: LIB3135-005-Q1-K1-F6.pep
NLTINPTSIHALVTMAELLXTILCMPDCLHDLEHLKLLYNSIMRDRKQPRPP

SEQ ID NO: 82576 - protein, 141 aa, Gossypium hirsutum
  Clone ID: GOSHI-09MAY01-C33568_1.pep
ENKKSDSLAEICINELQMAFGNVPTTITNDIGHGQHLVLLSSSYRPIPDNITISGNSQQEMPDNYVNGAFVYDVGDGFIWIVFWTKNNQVSTKIFIRYNDSTEPNNSILWHQVVNNLHPRLSEDCAFGYTAWARIEPNANG

SEQ ID NO: 82577 - protein, 223 aa, Gossypium hirsutum
  Clone ID: GOSHI-09MAY01-C33538_1.pep
MDHEKPAACVLDASTYVGFWILKGLLNRGYTVHAAIQMKGSETDIVKKIKEMERVEERLSVFSVDILDYHSILVALKGCSALFCCLDCPDGYDDLIVDLEVRGAINVVEACAQTDSMQKIVFTSSLTAAIWRENICSQTDVDERFWSDQDFCRKMKLWYALAKTLSEHAAWALAMDRMLNMVSVNAGLVVGPAVAHQNPCSTMSYLKGAAETVENGVLAVVDV

SEQ ID NO: 82578 - protein, 121 aa, Gossypium hirsutum
  unsure (1)..(121): unsure at all Xaa locations
  Clone ID: LIB3135-005-Q1-K1-B6.pep
SHIIIHISFASCAHTNLMQKVVFTSRLTPTIWIENIHSQTDVYNRPXIDQYFCLIIKLKYTLAKTLSEHAACALAMDLMLNMVSVNAQLIFRPALSHQNPCSTMSYLKGATDMFQNGVLPV

SEQ ID NO: 82579 - protein, 271 aa, Gossypium hirsutum
  Clone ID: GOSHI-09MAY01-C33448_1.pep
MDLRSERSTALVVTDDASYARNALEAIWSSENEDQKRLDPLIIFQTSSLARLPLQSSYVDQVIFFTRSVEFPVDELYAEIFRVMTPGGKLVVYRSFQIEISEVETALSALERKLLLAGFLEGERFQLKKIAHTVGIKAKKPSWKIGSSFAIKRTVKSPLKIQMDDDSDLIDEDSLLTEEDLKKPQLPTVGDCEVGSTRKACKNCTCGRAEQEEKVQKLELSADQLNNPQSACGNCGLGDAFRCSTCPYKGLPPFKLGEKVSLSGNFLAADI

SEQ ID NO: 82580 - protein, 84 aa, Gossypium hirsutum
  Clone ID: LIB3135-004-Q1-K1-A12.pep
CISLQYMPIQGSSTIQAGREGISVRELPCSLHLNSQINGFLAKILVFEPLKTLDTDFGLVFKCGSLKKYMQFLCKCSSGYFIFN

SEQ ID NO: 82581 - protein, 142 aa, Gossypium hirsutum
  Clone ID: GOSHI-09MAY01-C33468_1.pep
MGSLLSGWDSPTSDPSSAILKRNRSLTKEEIEAFWRSKRKTEEEHLNAIYGSPDSCNQQYGREYMRSSSMPIPNRNQGFIDMDTEKSLENIVKQSGWWTRSTWAFLNEPPVLDRPTNNYQPQFHVASLATSKFNKNSGISAN

SEQ ID NO: 82582 - protein, 72 aa, Gossypium hirsutum
  Clone ID: uC-gsflmaxxa090a03b1.pep
IKKLNPCCLIFDHMKNISAILKRNRSLTKEEIEALWRSKRKTEEEHLNAIYGSPDSCNQQVQIICLIISVAW

SEQ ID NO: 82583 - protein, 111 aa, Gossypium hirsutum
  unsure (1)..(111): unsure at all Xaa locations
  Clone ID: LIB3189-010-P1-K1-A3.pep
KKFGHFTLKNEYXXAFWRNQKGETERIEHLNGYIXXQPDSVXXQQYGRGIYXXSSSMPIPNRNQGFIDMDTEKSLENIVSKVGVARSTWLLDDLSFADYNNTNKSCAARLK

SEQ ID NO: 82584 - protein, 61 aa, Gossypium hirsutum
  unsure (1)..(61): unsure at all Xaa locations
  Clone ID: LIB3146-015-Q1-K1-B6.pep
KLEIKRFSMDDCRWTRSTWAFLNEPPVLDRPTXNYQPQFHVASLATSKFNKTSGISANYAF

SEQ ID NO: 82585 - protein, 244 aa, Gossypium hirsutum
  unsure (1)..(244): unsure at all Xaa locations
  Clone ID: GOSHI-09MAY01-C33408_1.pep
MICTKDRGGIFMKILVFSTRLQNRKFTRTLSGIAENRKLTRILSGTERIGLSWPEPPLNFLPQNVLERPGSFKPRKSFRAIKSFKTYNSFKSINDMGHMVSVIALLAELDLESLMKRRRRSSYVRIVSKQMAGIFLTIWVXRSSRRHIQILKVSTVGVGVMGYIGNKGSISVSMSIYQTLFCFICTHLTSGEKDGDELKRNADVHEILRRTRFHSLSAIGLPNXIHDHERXIWMGDLNTVSPAI

SEQ ID NO: 82586 - protein, 134 aa, Gossypium hirsutum
  Clone ID: uC-gsflmaxxa094e12b1.pep
MEDFSEDVGDSIRLQNRKFTRTLSGIAENRKLTRILSGTERIGLSWPEPPLNFLPQNVLERPGSFKPRKSFRAIKSFKTYNSFKSINDMGHMVSVIALLAELDLESLMKRKRRSSYVRIVSKQMVGIFLTIWVR

SEQ ID NO: 82587 - protein, 160 aa, Gossypium hirsutum
  Clone ID: GOSHI-09MAY01-C33428_1.pep
DELLVTELIFNGTFNDLDHQQVVALASCFIPVDKSSEQIQLRTEIAKPLQQLQESARKIAEIQHECKLDVNIDEYVESTVRPFLMDVIYCWSKGATFAEVIQMTDIFEGSIIRSARRLDEFLNQLRAAAQAVGEVNLESKFAAASESLRRGIMFANSLYL

SEQ ID NO: 82588 - protein, 83 aa, Gossypium hirsutum
  Clone ID: GOSHI-09MAY01-C33708_2.pep
VFLIDCSFCVDDVRYAHLQSADVTDANLEGANLEGANLKGAKLSNANLKGANLQRAYLRHVNVRDTHLEGAKLDGANLLGAIR

SEQ ID NO: 82589 - protein, 133 aa, Gossypium hirsutum
  Clone ID: GOSHI-09MAY01-C33708_1.pep
ANLQCAKFQDVDAEGSIFHNGRVGACEFTGANLRGALLAGANLQSANLQDACLIGCSFCGANLRSAHLQNADLTDANLEGANLEGANLKGAKLSNANLKGANLQRAYLRHGNLRDTHLEGAKLDGANLLGALR

SEQ ID NO: 82590 - protein, 113 aa, Gossypium hirsutum
  Clone ID: LIB3828-032-Q6-N6-B7.pep
VYEVFLVCNYLKTFTQHDGCLLSKPSGLHATLMQIKSKDLSVFIFFQIPYRNSLHNFCLYFFLVLIYQHLEGAKLDGANLLGAITGNGGAKTVKWNCTCDMSVIKIKIILCVF

SEQ ID NO: 82591 - protein, 258 aa, Gossypium hirsutum
  unsure (1)..(258): unsure at all Xaa locations
  Clone ID: GOSHI-09MAY01-C133660_1.pep
GYGNRCRYNHPRNRAAVEAAVRATGEYPERPGEPACQFYLKTGTCKFGASCKFHHPKHRGGSFGHVPLNIYGYPLRPGEEECSYYLKTGQCKFGVTCKFHHPQPAGTSMPASAPQFYQPVQSPSVPLPEQYGGAPTSVRVAKPPLLPGSYVQGAYGPVLFSPGVVPIPGWSHYSAPVSPALSPGAQPAVGATSLYGLTQLSSSAPSLAGXYPSLPSSTGPSSSNQKDQTFPKRPGEPECQYYLRTGDCKFGSTCRYHH

SEQ ID NO: 82592 - protein, 243 aa, Gossypium hirsutum
  Clone ID: GOSHI-09MAY01-C133650_1.pep
MTKKLYSAASCYLIMLLLLQETSCSTGIRQDKLFELGSKLQELASPPSVPLHLDSLDSVTKNNGRAFYPIAYGADPTGVQESSDAISQALNDAFQVQTTLQMLPGLKDLGGVVIDLLGGSYKISNPIRFPASGGANIVVKGGSLRASDTFPGDRHLIEVWSPNSQPSSPTGFNDMKDENVGIYYEDVTFRDILFDSSSRGGGISVIDSAKIRINNCFFLHFSTQGILFQKGHETFISSCFLGR

SEQ ID NO: 82593 - protein, 52 aa, Gossypium hirsutum
  Clone ID: GOSHI-09MAY01-C33628_3.pep
INIFFIISLVVLFFFFLCVKTMNPLFFIDPTTCLHHYCFLFPSLETRRVGHL

SEQ ID NO: 82594 - protein, 60 aa, Gossypium hirsutum
  Clone ID: GOSHI-09MAY01-C33628_2.pep
PTRPSTRPPKHPFTYKSPPPPTAVYKYKSPPPPPPAYYYKSPPPPPPHYVYSSPPPPHHY

SEQ ID NO: 82595 - protein, 87 aa, Gossypium hirsutum
  Clone ID: GOSHI-09MAY01-C33628_1.pep
PYYLSTSFLFSFSSLETRRLGDLSLLSFSVALLDHTLLFPLVRSKPLLSSGEEEVVMSRHNGVVQGLKQEGKVGEWRWHWSDMVCWV

SEQ ID NO: 82596 - protein, 104 aa, Gossypium hirsutum
  Clone ID: GOSHI-09MAY01-C133190_1.pep
RKVKIGMGTSNFVIRWINFLTMLLAIAVAIFGVWMSTHHDGCRKSLTLPVLGVGGFIFLVSMIGFLGALKKNAILLWIYLILLCMILVAILVFTVLAFIITNNG

SEQ ID NO: 82597 - protein, 121 aa, Gossypium hirsutum
  unsure (1)..(121): unsure at all Xaa locations
  Clone ID: LIB3828-017-Q1-N6-B6.pep
RDGKKKNNETNRASELNLDLVSGQGGSLESVLRRLRIFHALKLCPNLIFIPTVFWDYDPNFMAASLDEAYLDITKGCKKKXITGAKNAKKLKSKVYEKTGLTCRAGVAPNRLLAKALQSGN

SEQ ID NO: 82598 - protein, 71 aa, Gossypium hirsutum
  Clone ID: LIB3135-002-Q1-K1-H4.pep
VFWDYDPNFMAASLDEAYLDITKVCEKRSITGAENAKELRSRVYEETGLTCSAGVAPNRLLAKVLFSVLGT

SEQ ID NO: 82599 - protein, 110 aa, Gossypium hirsutum
  Clone ID: LIB3135-020-Q1-K1-G11.pep
RQSPASGETVTFVDGAESSRVPPANQVPTRGNEAGPSNQPPQGVPYPHQENQIIGGDSILAIERRLLEHKHTPSDHELYMARIQAEHLFEVKVEIIKLMAVLEPTGDWMG

SEQ ID NO: 82600 - protein, 104 aa, Gossypium hirsutum
  Clone ID: LIB3135-002-Q1-K1-G2.pep
LPLPSPGPSAPASSNNSDADSFGINVILESWPTTESERQSSASAETGTSVNKPESGRVPPANQVPPRGNEAGPSNQPPQGVPYPYQENQIIGGDSILAIERRLL

SEQ ID NO: 82601 - protein, 85 aa, Gossypium hirsutum
  Clone ID: LIB3135-018-Q1-K1-B7.pep
LPSPGPSVPACSNNSDADSFGINVILESWPTTESERQSSASAETGTSVNKPESGRVPPANQVPSRGNEAGPSNQPPQGVPNKKKK

SEQ ID NO: 82602 - protein, 207 aa, Gossypium hirsutum
  unsure (1)..(207): unsure at all Xaa locations
  Clone ID: GOSHI-09MAY01-C33318_1.pep
PRVPPPVPSSSYKKYEIRKRDPNPKTTALLVIDMQNYFASMAKPILSNAITTINLCREASIPIFFTRHCHKSPADYGMLGEWWDNDLIFDGTVDSELIPEIGRLSKPDEVVEKNTYSAFENTRLHEMLMEKKVEEVIITGVMTNLCCETTARAAFVKGYRVFFSTDATAPADSEMYEATLKNMAYGVAYLVDXCKRLQQGLFGKGMK

SEQ ID NO: 82603 - protein, 153 aa, Gossypium hirsutum
  unsure (1)..(153): unsure at all Xaa locations
  Clone ID: LIB3829-029-Q6-K6-G9.pep
PXPPXLFXXHQXILMXXRVFFSXXALGTXVFFSXXTXXRXFXXKPGXDXXGXXQFXGXXTXXPSXKMXXSLXXHXXSXXSMXRSXGGXDXXGSXAKVKXKWXXWKXXLGXXXXXWWGNCXXLXXXRFXXHGGXKIVXXHVXXHXXKXXVVXXG

SEQ ID NO: 82604 - protein, 103 aa, Gossypium hirsutum
  Clone ID: GOSHI-09MAY01-C28178_1.pep
RIDSLYILEGYIVTGEIGRPSSVTELKSTCLERRQLGHRREKSMPVSLKRGSLLEAGFEKLGHCVRGKQTRVSFDLAVSKSRAGSLSVSKHKFDSVNSMHSLI

SEQ ID NO: 82605 - protein, 61 aa, Gossypium hirsutum
  Clone ID: LIB3048-042-Q1-L1-G4.pep
CMSVSLNSSSLLDAGFDKLGPCVRMNQTRVSFDLPVYKSKARSLSVSKHKFASVNSMHSLI

SEQ ID NO: 82606 - protein, 129 aa, Gossypium hirsutum
  unsure (1)..(129): unsure at all Xaa locations
  Clone ID: GOSHI-09MAY01-C28058_1.pep
MTNQQNVVVVDVKPHGGVKPPLSLPVAKSFSPQDLKLLLMKKRFETENAWVLDSMRASSPSRISNPTTTSLPETDVKSSWIVHHPSALNMFEQIVTASKGKQIXVLFLDYDGTLSPIVEDPDRAFMPRE

SEQ ID NO: 82607 - protein, 78 aa, Gossypium hirsutum
  Clone ID: GOSHI-09MAY01-C28008_1.pep
KAKFPKHTRKSESTFCSPNSLAFAQISRVCGGFQFPLLCFCFFRVLTTGQFYLIITLASLNFNPIESIIGEEEEITSL

SEQ ID NO: 82608 - protein, 55 aa, Gossypium hirsutum
  Clone ID: GOSHI-09MAY01-C28028_1.pep
KSILSKDSSFTLLSQKKLITVKLSACHHFRHVNFTIHASDCKLIDAHHIATQQEL

SEQ ID NO: 82609 - protein, 194 aa, Gossypium hirsutum
  unsure (1)..(194): unsure at all Xaa locations
  Clone ID: GOSHI-09MAY01-C28258_2.pep
MVELKHRKRKEKEKAENLTLGSSEEAIETQKSKKGRNPENLNLGSLDSNVESSGLDAKGKKRKRDEVEKEYEDRKYGTVAVASDAEEEVVVGQKRKKPEDVGVVALVPKEGFDDDSKLMRTVFVGNLPFKANKNVLXKEFSKFGEIESVRIRSVPLNDTKKPRKGAIMLKQINENADSVHAYIVFKTEQSAEAS

SEQ ID NO: 82610 - protein, 267 aa, Gossypium hirsutum
  unsure (1)..(267): unsure at all Xaa locations
  Clone ID: GOSHI-09MAY01-C28258_1.pep
KTRADATRPPTRPPTRPVFVGNLPIKAKRRVLLKEFTKFGEIESVRIRSVPLNDTKKPRKGAIMLKQINENADSVHAYIVFKTEQSAEASLANNMAVIAENHIRVDRACPPRKKLKAENAPLYDNTRTVFVGNLPFDVKDEEIYQLFCGINNLGSSIEAVRVIRDPQFGVGKGIAYVLFKTREAANVVVKKRTLKLRDRELRLSHAKSDATSSKRKNNHLQGQNIPHQKXLPLIQGLPQLPATNQNTKLLWSYQGLRANKSSLDKKV

SEQ ID NO: 82611 - protein, 265 aa, Gossypium hirsutum
  Clone ID: GOSHI-09MAY01-C29878_1.pep
MGRDSESDSNGWSRARGLVVKTLVLIGGALLLKRFTKSTTRWDHARIVARSLSGEKFSREQASRNPDSYFNIRALTCPATEMVDGSNVLYFEQAFWRTPQKPFRQRFFMVKPCPKDLKCDVEVSSYAIRDADEYKNFCDRPRDQRPLPEEVIDDIAEHLTTIYLKRCERGKRCLYEGSTPPGGFPNSWNGAAFCPSELTILKTNEIHPWDRGYDDDGNQVWGVKEGPYEFKPAPASSFNGMFSPLNFAPSQPMEKRIEGSFVLQE

SEQ ID NO: 82612 - protein, 81 aa, Gossypium hirsutum
  Clone ID: GOSHI-09MAY01-C129850_1.pep
AGQLREPYHPRQDLVPSKGPHVLRPMIQRISTSKTVAVALPVPDYRCYATSFFNPNTTMVLVPCNETHGKKHTQSHDNCYD

SEQ ID NO: 82613 - protein, 119 aa, Gossypium hirsutum
  Clone ID: GOSHI-09MAY01-C29548_1.pep
TAPFPSAHGSPYRDRTAEFRSLSQTLQKLGGGISTVNHNSKDLQDDHVAKPLPSPSSRSEFNKKASLIGSGIHETSQKIGRLAKLAKRLINVSMIPVLKIQELTCVIKTDITTLNMALS

SEQ ID NO: 82614 - protein, 212 aa, Gossypium hirsutum
  Clone ID: GOSHI-09MAY01-C29758_1.pep
LLEHTCSWNARVYDLCKTTFTPSGLSSSPSPQPIHKLCSLLDTFGPADVGLKEESPDGEGGRGFFGLNRVTRWAQPITYLDIHECDSFTMCVFCFPTSSVIPLHDHPGMTVLSKVLYGSMHVKAYDWVEPSCIKESQEPGCPQVRLARLAADKVLTAPCGASILYPKTGGNLHWFTAVTPCAVLDVLAPPYREDLGRKCTYYVDYPYSALVS

SEQ ID NO: 82615 - protein, 98 aa, Gossypium hirsutum
  Clone ID: LIB3148-040-Q1-K1-C2.pep
KVLTAPCGTSILYPKTGGNLHCFTAVTPCAVLDVLAPPYREDLGRKCTYYVDYPYSAFGNGAQISNGKEEEYAWLAEIETPDDLYMRSGVYVGPSIRV

SEQ ID NO: 82616 - protein, 85 aa, Gossypium hirsutum
  Clone ID: GOSHI-09MAY01-C129710_1.pep
SSKQSESQDSSLHTFHLLKKVLNLQQFYGRSFLLSSSAATADFDTLPSRHRPRSLPANIQDPALSELPADKPTPDQLQTRLERAY

SEQ ID NO: 82617 - protein, 135 aa, Gossypium hirsutum
  Clone ID: LIB3582-036-P1-K1-D5.pep
SEPLWSPPDLGVIKINFDATFQSDSRTSTSAVIARYYKGEYVGVETYLFNGVVDAFMAEARACERALLFAINMGFRHFLFVPRWLIGWPIPWRWKKGEDNTLGFGLMKSRILLKCWWRKIREFGHRDIKVCCRSL

SEQ ID NO: 82618 - protein, 62 aa, Gossypium hirsutum
  Clone ID: LIB3582-051-P1-K1-E9.pep
ESPPYLFNGVVDAFMAEARACERALLFAINMGFRHFLVEGDSLTVINKLKAQKPDRSIRTRG

SEQ ID NO: 82619 - protein, 105 aa, Gossypium hirsutum
  Clone ID: LIB3048-048-Q1-L1-A1.pep
NNFFNHRKDDKNKSKRKPKSFESNHGDSKNLLHFQSDLQQTLMSLCPNSLIFLHQHFNRIRDFINPKPRVLSSPFFHRQGMGHPINQRGTKSLLITVKESPSTRK

SEQ ID NO: 82620 - protein, 88 aa, Gossypium hirsutum
  Clone ID: GOSHI-09MAY01-C129350_1.pep
AISATAFTVTGVVNKFLTVVINVLIWDKHATPFGLVCLLFTLAGGVLYQQSVTGPPRESSASKQTGDVDKNDADENQDKSVSGKHASV

SEQ ID NO: 82621 - protein, 197 aa, Gossypium hirsutum
  Clone ID: AW187267.1.pep
PKITEIGFLVLTKIQMVVCQASKIHLPTPFASPSSSKTPTSLLFEPHSFSLALSHSDSSLSLFPSISFPFSSTQKSLSIPPPSSSSTFLLLKTQKSPNPRVLFVVAGPYKGGSKVLLKFFLYRNDGSKAFEKAKVVVSKQKGIEFDDKVGVLIDVSHGLKLIISGSVNFFALYSVSSSKVLIFGVNLVVDTDESDDG

SEQ ID NO: 82622 - protein, 70 aa, Gossypium hirsutum
  Clone ID: AW187139.1.pep
SFIPKPKITEIGFLVLTKIQMVVCQASKIHLPTPFGSLMVLNMYFVVSYLLFHCCLGLDIDVAISYRVPD

SEQ ID NO: 82623 - protein, 157 aa, Gossypium hirsutum
  Clone ID: GOSHI-09MAY01-C29318_2.pep
AFCSGVDAVALYRLHNEGKVEDCKRFLETLYKFVYPHASDLKPHVAILDGITMGCGGGISLPGMFHLVTDKTVFAHPEAQLGFHPDSGASFYLSRLPGYLGECLALTGEKLNGVEMIACGLATHYCLNARLSWVEECLGNMMNDDPTVIESSLAQYG

SEQ ID NO: 82624 - protein, 243 aa, Gossypium hirsutum
  unsure (1)..(243): unsure at all Xaa locations
  Clone ID: GOSHI-09MAY01-C29318_1.pep
VSLSHQRCFSAQPNYAPYHDFQDQVLVEGRAKSRAAILNRHFALNSLTTSMASRLKKLYESWEENPDIGFVILKGNGRAFCSGVDAVALYHLHNEGKVEDCKRFLETLYKFVYLQGTYLKPHVAILDGITMGCGGGISLPGMFHLVTDKTVFAHPEAQLGFHPDSGASFYLSRLPGYLGNNHSNNFSNAXLNSLIICSRLDLHCPFFLTRCVLFSLGECLALTGEKLNGVEMIACGLATHYCL

SEQ ID NO: 82625 - protein, 193 aa, Gossypium hirsutum
  Clone ID: GOSHI-09MAY01-C29218_1.pep
NLLFAPMGQVLILHPEKKFSPHHHLLPSGTGLYCLTCQVSDNDSEEKLLLAAQRVFFNSPHPLEILSDRSAYGSEGTIQRDHDMNSYLKCVKGVIRQELKRIRKTKREQRRKIWWPLVLPHDINAGGIILRRSVATMNAGQDQFNFAGVLQTGRESLKRFSRLVASQHMHLFVVLLLPAKLLLVGAFSLISLR

SEQ ID NO: 82626 - protein, 186 aa, Gossypium hirsutum
  unsure (1)..(186): unsure at all Xaa locations
  Clone ID: GOSHI-09MAY01-C24948_2.pep
RMLEVHTATPEVAMRAPIXKVTRIFVARIPPSVDESTFRRHFEEYGEITDLYMPKDQVSKAHRGIGFITFASAESVENLMADAHELGGSTVVVDRATPKEDDLKPIGRMSQGGYGAYNAYISAATRYAAVGAPTLYDHPGPMYGRGESSRGMGKKIFVGRLPQEATADDLRLYFGRFGRVIDVYVP

SEQ ID NO: 82627 - protein, 397 aa, Gossypium hirsutum
  Clone ID: GOSHI-09MAY01-C24948_1.pep
MSPATTALFFLLLLFSTSNAHNITRILAKHPEFSTFNHYLTLTHLASEINRRETITVLALNNAAMSSLLSKQLSLYTLKNVLSLHVLVDYFGSKKLHQITNGTALTSTMFQASGAAPGSSGYINITDLKGGKVGFGAENNDGNIDAVYVKSVAEIPYNISVLQISQVVNSAEAEAPTAEPSKLNLTEIMSKQGCKAFADLLIASGADATFNENIDGGLTVFCPTDPVIKDFMPKYKNLTASKKASLLLYHGVPVYQSMQMLESNNGIMNTLATDGANKYDFTIQNDGEVVTLETKVMTAKITGTLKDEEPLIVYKINKVLLPRELYKPVEAPAESPKPSKSKSKSKHKIADAPESDAPAESDPADDQTADNDNGVAGLDGRRLVMGMLSLCIGVLLI

SEQ ID NO: 82628 - protein, 91 aa, Gossypium hirsutum
  Clone ID: GOSHI-09MAY01-C24968_1.pep
MILASGWMCMSFRRKILASNSLKYRRLDMELPVSVAAKAEPERDVNDGWDNSWGDDWDDEEAPMTPSKPVTPGLSSKGLASRRLSKEGWKD

SEQ ID NO: 82629 - protein, 294 aa, Gossypium hirsutum
  unsure (1)..(294): unsure at all Xaa locations
  Clone ID: GOSHI-09MAY01-C24938_1.pep
SCPKAEKIISDYVKEHIPNAPSLAASFIRMHFHDCFVRGCDGSVLLNFTNGQSPEKNAVPNQTLRGFDFIDRLKSMVEAECPGIVSCADILTLIARDSIVTVGGPSRPVPTGRRDGXISNVTEANNNIPSPFSNFTTLLTLFNNQGLDTNDLVLLSGAHTIGIAHCPAFSRRLYNSTGPGGVDPTLDSEYAANLKTNKCTTPNDNTTIVEMDPGSRKTFDLSYYTLLTKRRGLFNSDAALTTDSTSLGLINQLLSSPQSFFYAQFAKSMEKMGRINIKTGSQGEIRKQCALVNS

SEQ ID NO: 82630 - protein, 98 aa, Gossypium hirsutum
  Clone ID: GOSHI-09MAY01-C24898_1.pep
HASAHASAHASVLFKVQSRLSCNDFVDHRLVGSFTMAGIKDMIKLALKCMSFPGERRPDMNTVSIELERIRENEMEMTTVKGEGTAKIALGSELFASK

SEQ ID NO: 82631 - protein, 160 aa, Gossypium hirsutum
  unsure (1)..(160): unsure at all Xaa locations
  Clone ID: GOSHI-09MAY01-C24848_1.pep
MFKGIFGKTKPETNALTTLDKLNETLEMLEKKESVLLKKTAAEVEKAKEYAKGRNKKAAIQCLKRKKLYEQQIEQLGNFQLRVHDQMIMLEGAKATTETVDALRTGATAMNAMQKATSIDDVDKTMDEINEHTENMKQIQEALSTPIXCADFDEDELEAE

SEQ ID NO: 82632 - protein, 211 aa, Gossypium hirsutum
  unsure (1)..(211): unsure at all Xaa locations
  Clone ID: GOSHI-09MAY01-C24838_1.pep
VRKYLARXPGWSRVTDDGVQTRAHLEAQLASSLALKSPNEYRQSLLSYIRFLAREADESRLREVCESFLGPPTGMASDSKNPAWDAYVLGMKKHKLLREDILPAMASNRKVQRLLNEFMDLLSEYASIENNLDQRDPSPLTVSQPEIDPMDSNPPATCQTDTVEPTTDKTENPSPGIIDQMDSILSNQVNSGTKSSDQVNQAPPSEDPAGS

SEQ ID NO: 82633 - protein, 149 aa, Gossypium hirsutum
  Clone ID: GOSHI-09MAY01-C24598_1.pep
FEAQTILRIAKTMAEFKKPKVERSKFMMPQLINSRMPGGPLLAEETQFSFEEWKRYYLLAKKDDESPITFIRKNGLKQGIASLMATKEDKTRLLYSRLAMCIYFNEEAQLKFLPEGLQAAIIKYCRILKIHFDRTIPGHKEQSTRLRRK

SEQ ID NO: 82634 - protein, 63 aa, Gossypium hirsutum
  Clone ID: GOSHI-09MAY01-C24588_1.pep
ITKAKKLITRHTMKFRSRGQKGSGSGSSSQQRESLPSSPMELEITSFETDSSSGSSPYEDFHE

SEQ ID NO: 82635 - protein, 149 aa, Gossypium hirsutum
  unsure (1)..(149): unsure at all Xaa locations
  Clone ID: GOSHI-09MAY01-C24558_1.pep
LDDFSDGVYRWLDGALLAKXIPTIFSHTRKHNFLWPDTKIDCIVSIGSGSLPTKARKGGWRYLDAGQVLIESACSVDHAEEALRTLLPMHPEIHYFRFNPVDERCDMELDETDPTIWAKLEAATKDYIDNNSETFKDACERLVAPFKNA

SEQ ID NO: 82636 - protein, 78 aa, Gossypium hirsutum
  Clone ID: GOSHI-09MAY01-C24548_1.pep
YITCNVYKTNVVHVTDLAHKAQDIGSKRGKLSVEEVLFLIRKDLPKLNRCTELLSMQEELKQARKAFEVDEDKLATLE

SEQ ID NO: 82637 - protein, 58 aa, Gossypium hirsutum
  unsure (1)..(58): unsure at all Xaa locations
  Clone ID: uC-gsflnu33B082g12b1.pep
LLYFFFFFFFXAQHWFYINFSYYQENTTISTPSGFKGSFMRFKTFNTLQNHKHNINND

SEQ ID NO: 82638 - protein, 296 aa, Gossypium hirsutum
  unsure (1)..(296): unsure at all Xaa locations
  Clone ID: GOSHI-09MAY01-C24448_1.pep
MAFGQTLVSSRNMLFTVVSQNPKPNTKTLAFFPSPTPLNSSSVLAKRQRLPFRTLGCPVDRAAHPPHPQVSYPKPSEIPWSKDRWDTVHLIGNVGSPVEVKHLPSGKVLAWTRLAVKKSPTDTTWINLTFWDELANTAYQHVEKGQQIYVCGRLVSDTVESXMANSRLITRIVVQQINFVQRNSPSMASNDRGFSGMSSNRKVGYNGENNVGSAMELWQAFFANPTEWWDNRKNKRNPRYPDFKHKDTGEALWIEGRNTPHWVRSQLEILDSRMSSLQDEDERMFSSMASDNLLPF

SEQ ID NO: 82639 - protein, 185 aa, Gossypium hirsutum
  Clone ID: GOSHI-09MAY01-C24788_2.pep
RTRGRTRGRTRGLSLVGKVGGFIASIPEVMVAALLCFMWAMLAALGLSNLRYSEAGSSRNIIIVGLSLFFSLSIPAYFHQYGISPNSNWSVPSYFQPYIVTSHGPFRTKYEGVNYIMNTLLSLHMVIAFIVAVILDNTVPGSRQERGVYVWSESEAARREPAGVKDYELPFRVGRIFRWVKWVGL

SEQ ID NO: 82640 - protein, 337 aa, Gossypium hirsutum
  unsure (1)..(337): unsure at all Xaa locations
  Clone ID: GOSHI-09MAY01-C24788_1.pep
PRVRPRVRPRVRHDKLLKDALDEIPDTRHVGSGGLXIVGINTTSAGWVVVAASCFLIMLYKLMAYWFVELLVVLFCIGGVEGLQTCLVALLSRWFKRRAESYVKIPLFGAVSYLTLAVSPFCIAFAVVWAVYRNVSFAWIGQDILGIALIITVLQIVHVPNLKVGTVLLSCAFLYDIFWVFVSKKLFHESVMIVVARGDRSGEDGIPMLLKIPRMFDPWGGYSIIGFGDILLPGLLITFSLRYDWLANKTLRAGYFLWAMIAYGLGLLITYVALNLMDGHGQPALLYIVPFTLGTFLTLGKKRGDLRVLWTRGEPERPCPHIRLEHQHHEELDDDDH

SEQ ID NO: 82641 - protein, 151 aa, Gossypium hirsutum
  unsure (1)..(151): unsure at all Xaa locations
  Clone ID: LIB3829-027-Q6-K6-B5.pep
FKRAXKNYIKVPFFGTLSYLTLAVSPFCIAFAVVWAVYRNVSFAWIGQDILGIALIITVLQIVHVPNLKVGTVLLSCAFLYDIFWVFVSKKLFHESVMIVVARGDRSGEDGIPMLLKIPRMFDPWGGYSIIGFGDILLPGLLITFSLRYDW

SEQ ID NO: 82642 - protein, 100 aa, Gossypium hirsutum
  Clone ID: LIB3585-050-P1-K1-G7.pep
PRVRSVPSYFQPYIVTSHGPFRTRCEGVNYIMNTLLSLHMVIAFIVAVILDNTVPGSRQERGVYVWSESEAARREPAVVKDYELPFRVGRIFRWVKWVGL

SEQ ID NO: 82643 - protein, 89 aa, Gossypium hirsutum
  unsure (1)..(89): unsure at all Xaa locations
  Clone ID: LIB3583-033-Q6-K7-E7.pep
AVGTILCASYWSAWSAREAAIEHDKLLKDALDEIPDTRHVGSGGLLNINTRSAVLFVVFAWGVLIMLYKLMAYWFVEXLVVFXXIGGXE

SEQ ID NO: 82644 - protein, 210 aa, Gossypium hirsutum
  Clone ID: GOSHI-09MAY01-C24758_1.pep
TGYEVEQTKNWALPINCSALAEESVSIQMAAKAAVSECRADGWIQFEEGELQQRKNFVERNDTWQHKMQFSYSCLSPVLSPNPTSTTAAISTVTTVAPPPPIRPMGPKHQYQHQQLFKTHHGLNNIFKSPCGYTTNNTNVFDFNFVRNQEATLGEDDSQTLQLFPLHSCNDDGSDDSNEKENEISIATAPGNANLGGPNYQFFEFLPLKS

SEQ ID NO: 82645 - protein, 173 aa, Gossypium hirsutum
  Clone ID: GOSHI-09MAY01-C24718_1.pep
GPESTRRGRMYHGWALLLPDGRVLGAGGNPYNTYTCRNVAYPTELRLQAFVPDYMDRQFNDLRPGNVTIEYEGHSSGVAYGTAFTIHFWLGRRPSKDVEYSVYAPPFTTHSISMNQRLLKLRCRHKTRDGGGSMSAVLEAPPSPNVAPPGYYLLTVVNNGIPSLSQWIRFIPA

SEQ ID NO: 82646 - protein, 175 aa, Gossypium hirsutum
  Clone ID: GOSHI-09MAY01-C24618_1.pep
DALILNRLFGHLFSNGVILVATSNRAPDNLYEGGLQRDLFLPFIATLKERCIVHEIGSAVDYRKLTSAEEGFYFIGKDLSSLLKTTFQQLIGEHVASPQVVEVVMGWTLQVPLGANGCAYFSFEELCDKPLGAADYFGLFKNFHTLALEGVPKFGLHNRTAAYRVVTLVDVMYED

SEQ ID NO: 82647 - protein, 197 aa, Gossypium hirsutum
  unsure (1)..(197): unsure at all Xaa locations
  Clone ID: GOSHI-09MAY01-C124630_1.pep
MHTLIRDRDISKHDFVFYSDRLIRLVVEHGLGHLPFTEKHVXTPTASIYTGVDFCKKLCGVSIIRSGESMENALRACCKGIKIGKILIHRDGDDGKQLIYEKLPKDISERHVLLLDPVLGTGNSANQAIELLIQKGVPESHIIFLNLISAPEGIHCVCKRFPSLKIVTSEFDVALNEEFRVIPGMGEFGXRYFGTDD

SEQ ID NO: 82648 - protein, 57 aa, Gossypium hirsutum
  Clone ID: GOSHI-09MAY01-C124180_1.pep
MGWLQSLFSPLMKLWFRLHSSQRKRRGIYILYEDVKSCPCEDVHALWHNTGGIKCTC

SEQ ID NO: 82649 - protein, 145 aa, Gossypium hirsutum
  unsure (1)..(145): unsure at all Xaa locations
  Clone ID: GOSHI-09MAY01-C24138_1.pep
MVFSSKDSTITDEDIDRIIAKGEAATAELDAKMKKFTEDAIKFKMDDTAELYDFDDDKDENKFDFKKIVSENWIEPPKRERKRNYSESEYFKQTLPQSAPAKPKEPRIPRMPQLLDFQFFTXQRLSEXLYEKESTLSHATHQRIR

SEQ ID NO: 82650 - protein, 250 aa, Gossypium hirsutum
  Clone ID: GOSHI-09MAY01-C24098_1.pep
PPLTWKQRLEACIGAARGLHYLHTGAERGIIHRDVKTTNILLDENFVAKMSDFGLSRAGPSLEHTHVSTAVKGSFGYLDPEFFRRLQLTEKSDVYSFGVVLFEVVCARAAINPSLPKEQINLAEWAMKWQRQKSLETIIDPHLRGNYSAESMEKFGEIAEKCLADEGKNRPTMGDVLWHLEYVLQLHKAWIGSNTTDNSFSSSQALRDLEVKEAENKQFDGNSCLRASNSHCSLSYDGQVKNWLLDSFTI

SEQ ID NO: 82651 - protein, 227 aa, Gossypium hirsutum
  unsure (1)..(227): unsure at all Xaa locations
  Clone ID: GOSHI-09MAY01-C24068_1.pep
MQILPFRGGALVCFIASLLFVASFCNADAKTVEVVGAGECANCAKNNLEISQAFSGLRVNIDCKPENGKNFKTRGSGELDKQGNFKVSVPEDLVENGELKEECYAQLHSVSAAPCPAHDGLESAKLVLKSRSDGKHGFGLKGKLKFSPLTCASAFFWPHFKFPPLPNWNHPPLPKFPLPPFKGFHHHYPIIPPIYXNPLPPPSPVYKPPPFPVNPPVPIYKPPPFPV

SEQ ID NO: 82652 - protein, 190 aa, Gossypium hirsutum
  unsure (1)..(190): unsure at all Xaa locations
  Clone ID: GOSHI-09MAY01-C24038_2.pep
SRVRTAVRNYWSLLSPLIFSDHPKRPGDEDPSPPYNMFRNVLDMNARYGGFNAALLEAGKSVWVMNVVPTTGPNYLPLVLDRGYIAVFHNWCEAFPTYPRTFDMVHADGLLSLETSQYRRCTMXDLLTEIDRLLRPEGWVIIHDKAPLIESARALTVQLKWDARVVEIESNSDERLLICQKPFFKRQATS

SEQ ID NO: 82653 - protein, 199 aa, Gossypium hirsutum
  Clone ID: GOSHI-09MAY01-C24038_1.pep
FTLRKLNEDTTDSRTAVRNYWSLLSPLIFSDHPKRPGREDPSPPYNMLRNVLDMNARYGGLNAALLEAGKSVWVMNVVSTSGPNYLPLILDRGYVGVLHDWCEAFPTYPRTYDMVHADGLLSLETSQHRRCTMLDLFTEIDRLLRPEGWILIRDAAPLVESARALTTRLKWDARIIEIESNSDERLLICQKPFFKKQAM

SEQ ID NO: 82654 - protein, 80 aa, Gossypium hirsutum
  Clone ID: LIB3829-032-Q6-N6-H10.pep
LSLETSQYRRCTMLDLLTEIDRLLRPEGWVIIHDKAPLIESARALTVQLKWDARVVEIESNSDERLLICQKPFFKRQATS

SEQ ID NO: 82655 - protein, 92 aa, Gossypium hirsutum
  Clone ID: GOSHI-09MAY01-C24248_1.pep
NIYNKYISSSYREWGRGGGILPRAEMQLQQTKARKKTSQHKFSHDLQPMSTNRQTQRKKGTDGRGMEKPSRKMKMYPECMRKRPDCKNEQNV

SEQ ID NO: 82656 - protein, 165 aa, Gossypium hirsutum
  Clone ID: GOSHI-09MAY01-C25988_1.pep
VWDRDLKSSGLFMEKIGPGSAPKVFLLSNSISSSGANISTGVFNMTVIPKPWRASMLAAALQRTMGVGNKGNPCNGQLPSLSLRNLLLGRKILIVDDNNVNLKVAAGALKKYGADVVSATRGIEAIELLTPPHQFDACFMDIQMPEMDGFEATRRIRDMEHNINN

SEQ ID NO: 82657 - protein, 139 aa, Gossypium hirsutum
  Clone ID: GOSHI-09MAY01-C25948_1.pep
VHSRPIFQCVDQLSQGASQSQNESRHKDIPMFQRILMNGNGSFNHSSELQGNSNSQAGQAQNMHTLDGSSKIPNVLERQLSLQNDARSPSQSFGSHEIASNYSLENKRGMREKHGGSLYRSRSQKEQDKLLLGGADCAE

SEQ ID NO: 82658 - protein, 295 aa, Gossypium hirsutum
  Clone ID: GOSHI-09MAY01-C25938_2.pep
MGSEKQGFIWLSGLLFLNILVLSTADVHYYEFFLQESQFTKLCSTKSILTVNGSFPGPEIRVRRGDTVFVNVHNQGNHAVSLKWEGVKGSIDGSNESIQPGGDVTYKIELGGEIGTLWWHATSAWAAATVHGAFVISPAANEDYPFPAPTSDQTIILGEWFREELTEANQTIAPGSADAYTINGHPGETYGCSNDTTFEMQVDYQGLYLVRVINAVANETMLFDIEKHRLTIVGQNGTYTNRSFTSSLTLAPGQVIDVLLCPNQNVGRYYITARSSSGRHITNGILRYTTTTTSF

SEQ ID NO: 82659 - protein, 177 aa, Gossypium hirsutum
  Clone ID: GOSHI-09MAY01-C25938_1.pep
MGSEKQGFIWLSGLLFLNILALSTAEVLYYEFFLQESQFTKLCSTKSILTVNGSFPGPEIRVRRGDTVFVNVHNQGNHAVSLKWEGVKDSIDGSNELIQPGRNFTYEIELEDEIGTLWWHATSAWAAATVHGAFVILPAANEDYPFPAPTSDQTIILGAWFRQELPEPIPYPATKLT

SEQ ID NO: 82660 - protein, 75 aa, Gossypium hirsutum
  Clone ID: LIB3135-062-Q1-K1-E8.pep
MGSGKQGVIWLSGLLFLNILALSTAEVLYYEFFLQESQFTKLCTTKSILTVNGSFPGPDIRFRRGDTRFSTNSPI

SEQ ID NO: 82661 - protein, 111 aa, Gossypium hirsutum
  unsure (1)..(111): unsure at all Xaa locations
  Clone ID: GOSHI-09MAY01-C25858_3.pep
RIFDSTNADLENSRVPSSSELKTKPDGWETTSKAPDGNVWEMSQREEDILLXQEFDRRIAYCKFQIASFIKTHIFSRRRPIDGWKYMIDXIGPNARNGKGSVLRLPSLSDA

SEQ ID NO: 82662 - protein, 125 aa, Gossypium hirsutum
  unsure (1)..(125): unsure at all Xaa locations
  Clone ID: GOSHI-09MAY01-C25858_2.pep
RIFDSTNADLENSRVPSSSELKTPPVRPRAPSKAPDGNVWEMSQREEDILLXQEFDRRIAYCKFQIASFIKTHIFSRRRPIDGRPRVRPRVRPNARKGKGSVSRLPSLSDASTQPFKEEKLQLKP

SEQ ID NO: 82663 - protein, 64 aa, Gossypium hirsutum
  Clone ID: uC-gsflmaxxa043f05b1.pep
STLPQLQNLFILSSSYNKYIGFLLIKLKLINSYIEFVVGGNGDTFNNKIIRKIAPTYHRFRLRL

SEQ ID NO: 82664 - protein, 60 aa, Gossypium hirsutum
  Clone ID: uC-gsronu33B087f02b1.pep
PSDGWKYMIEEIGPNARKGKGSVSRLPSLYDAYTQPYKEEIFLLPHLLVLATFSINLSLF

SEQ ID NO: 82665 - protein, 148 aa, Gossypium hirsutum
  Clone ID: GOSHI-09MAY01-C25598_1.pep
MKTVFTIFSVLVSTVISPANGCPPSDRAALLAFKAALHEPYLGIFNSWTGTDCCHNWYGVSCDPQSHRVADINLRGESEDPIFERAHRTGFMTGFISPEICKLTRLSSLTIADWKGITGEIPKCITSLPFLRILDLIGNKLSGEIPAD

SEQ ID NO: 82666 - protein, 93 aa, Gossypium hirsutum
  unsure (1)..(93): unsure at all Xaa locations
  Clone ID: LIB3149-064-Q1-K1-B12.pep
HTCYRFCFYPPTQPVAGGYFRGEAEXPSFERAHRTDITTGFINPEICKLTLLSMLTIAVWKGITGEIPKCMTILLFVRILDLIGYKLFRINSC

SEQ ID NO: 82667 - protein, 188 aa, Gossypium hirsutum
  unsure (1)..(188): unsure at all Xaa locations
  Clone ID: GOSHI-09MAY01-C25558_1.pep
MLLLRQLHYLIHHLLFPLHLTSGVEFFDAWDELSSESGSQSILRDTEAEAREIRLSLLMEIEKRKQAEEALNKMLHMWKTISQGLAVVGLSLPADPIDVTDDELVNQAEELRQQADVARFVSLTVGRGIARAEMEMEMEAQIDSKNFEIARLLDRLHYYGAVXGMSQRNQEAVEMARRERQRKKRRQR

SEQ ID NO: 82668 - protein, 116 aa, Gossypium hirsutum
  Clone ID: GOSHI-09MAY01-C25578_1.pep
CFELSFDTHSLSIHQGLSPITLSPLPFSLSSSPDPIKGTQLSISLPDDDILNSFFIVFSTSRSSSALQWLSPPHTFGLIMIYMTDQILRGPNEPLPAHCSLLLPALQFMSLVWPSN

SEQ ID NO: 82669 - protein, 127 aa, Gossypium hirsutum
  Clone ID: GOSHI-09MAY01-C25508_2.pep
MASKASSSLFQSLRRYIKKPWEITGPCADPEYKNAVPKATEYRVRCPATTLQKPIVPTSDPETVFDIKYYSRDQRRNRPPIRRTILKKDDVVKMMREKTFDVNDFPKVYLTAKVEEDENAVGGGYQK

SEQ ID NO: 82670 - protein, 127 aa, Gossypium hirsutum
  Clone ID: GOSHI-09MAY01-C25508_1.pep
MASKASSSLFQSLRRYIKKPWEITGPCADPEYKNAVPKATEYRVRCPATTLQKPIVPTSDPETVFDIKYYSRDQRRNRPPIRRTILKKDDVVKMMKEKTFDVNDFPKVYLTAKVEEDENAVGGGYQK

SEQ ID NO: 82671 - protein, 204 aa, Gossypium hirsutum
  Clone ID: GOSHI-09MAY01-C25498_1.pep
EELIPGFKFSRCSYLQSLLRPSVISELELARHGLKLLKRNPSSFTPCLDGRYLLLGPTKVLNHREISKFSRRDADAYPKYESQLERFCTLMDPLLDSSPPESLQGISSLQERLKNKVHNSVFWTRLLHQAASLGQKDMADFMDLLLSPASQVLNNWFEPVVPLATLATDAVIGSTASVNTPGSGYVLLHHVMGETDGDRGMWSY

SEQ ID NO: 82672 - protein, 144 aa, Gossypium hirsutum
  unsure (1)..(144): unsure at all Xaa locations
  Clone ID: uC-gsflmaxxa043e10b1.pep
MMEIEEVSNYEALPLLSLNHVSLLCRSVLDSMRFYEEILGFVLIKRPSSFKFNGAWLYNYGIGIHLIENPSIDDFDTIVEPRPINPKDNHILFQVXDVGLVTRRLEDMGMKYVTAAVEDERNAVDQVFFHDPDGYMIELCNCEN

SEQ ID NO: 82673 - protein, 145 aa, Gossypium hirsutum
  Clone ID: uC-gsronu33B087g12b1.pep
LPLLSLNHVSLVCRSVLDSMRLYDEILGFVLIKRPSSLKFNGAWLLFYGTVIHLIQIPLIVDFLTFVLPRPFNLHGSSHFISCAVLPFSSLFFPYSLLFFFSFSPYFLFYSFLLLILLSSFIFPPLSLLPLIPPFFFFFPLSPSL

SEQ ID NO: 82674 - protein, 236 aa, Gossypium hirsutum
  unsure (1)..(236): unsure at all Xaa locations
  Clone ID: GOSHI-09MAY01-C25458_1.pep
MACRINFNLRCPSSHTPRFVPLKNPTLLIPPFKPHSHTHPSHPFKLSISTSRWLRRRRMGFVTVNSHMATEEKPISDDRMLVFVPPHPLIKHWISVLRNEQTPCPIFKNAMAELGRLLMYEASRDWLPTVTGEIQSPMAIASVEFVDPREPLAIVPILRAGLALAEHASSILPATKTYHFGLSRDEETLLPSVYLNKLPDKFPEGSRIFVVNPMLXTGGTIVAALNLIKERGVDNN

SEQ ID NO: 82675 - protein, 152 aa, Gossypium hirsutum
  Clone ID: GOSHI-09MAY01-C25408_1.pep
RFVFLESLPVSASGKVDYAQLTDSIFCISHVKDEIGDIGASNLMQIIKKAICDALMVEDVSDDDDFFMIGGNSITAAHVSHNLGIDMRLLYTFSTPAKLVISLLEKNVLNNTKFGVNDIPESTMEPDKVNQYSFPESETSDPLGSKLQGHLH

SEQ ID NO: 82676 - protein, 123 aa, Gossypium hirsutum
  Clone ID: GOSHI-09MAY01-C25748_1.pep
RERKRGKSDFCFNWGFAMAANINTANFNTSSASVTTVNHSPSSPKQSHRATRAGSSTRTGIGRREPDPIAGVPLSPSSSSSSPPPLIAATEQPPVVAVVEEQGGRMRVLGLMEMRVRGPLGTN

SEQ ID NO: 82677 - protein, 103 aa, Gossypium hirsutum
  Clone ID: GOSHI-09MAY01-C25768_1.pep
FFHCRNFLGPDKISRFDYFLEKTSGFVWSLRKPLFPWSERSGFDLENKAEHLFWRRSACTWAMAVSTIALYASPPGSVCSTPHHININSCDFDLNSRSSSSTP

SEQ ID NO: 82678 - protein, 57 aa, Gossypium hirsutum
  Clone ID: GOSHI-09MAY01-C25718_1.pep
GRSKPRDPPGLKDSGPRLKSVREHRGVLPKVLSQVRQVSPSRFASLLDCTMLDALLS

SEQ ID NO: 82679 - protein, 329 aa, Gossypium hirsutum
  unsure (1)..(329): unsure at all Xaa locations
  Clone ID: GOSHI-09MAY01-C25728_1.pep
MMAIKSHHCCLSFIFLLLPLLLQLHSVKGNLQLNYYAQSCPNAEEIIKQQVIKLYNKHGNTAVSWVRNLFHDCMVKSCDASLLLETVNGIESEQKSDRSFGMRNFKYVKTIKDALEQECPRTVSCADIVSLSARDGIVLLGGPRIEMKTGRKDSKRSYLPEVENTIPNHNDSMELVLSRFQSIGIDTQGVVALLGAHSVGRVHCVNLVHRLYPTVDPTLEPDYAEYLKGRCPTPDPDPEAVLYSRNDRETPMILDNMYYKNLLKHKGLLVIDQQLTSDPTTSPFVEKMAADNGYFHXQFARAVLLLSENNPLTGDEGEVRKDCRYVNSE

SEQ ID NO: 82680 - protein, 76 aa, Gossypium hirsutum
  Clone ID: LIB3048-002-Q1-L1-A3.pep
KKNHSKTNKGHSKLLTNKTLETTSCFLVRNLFHDCMVKSCDASLLLETVNGIESEQKSDRSFGMRNFKYVKTIKDA

SEQ ID NO: 82681 - protein, 106 aa, Gossypium hirsutum
  Clone ID: GOSHI-09MAY01-C25688_1.pep
LQCLSQSINPSQDVSTILFCNTNPSYASVLQAYIRNARFNTSSTPKPVIIITPLEESHVSAAGICSQKVRFQLKIRSGGHDYEGLSYVSDKPFFVLDMFNLRSISI

SEQ ID NO: 82682 - protein, 170 aa, Gossypium hirsutum
  Clone ID: GOSHI-09MAY01-C25658_1.pep
MSNSIEDDSFSKPVGRWSVYCYGVGHMLNDITSACWFTYLLLFLTEIGLSSRDAAIVMLSGQIADGLATIFFGELIDRFGHFKIWHGAGAILVAVSFSSVFGGCIPCKLLSSFSTIVETVSYSTFAAIFNVGWAATQVSHMSMVSCITLNSTSRVVLASCRNAFTMVANL

SEQ ID NO: 82683 - protein, 257 aa, Gossypium hirsutum
  unsure (1)..(257): unsure at all Xaa locations
  Clone ID: GOSHI-09MAY01-C25648_2.pep
DEYSKFHGHSPAVVTGKPIDLGGSLGRDAATGRGVLFATEALLNEHGKSISGQKFVIQGFGNVGSWAAXLIHEKGGKVVALSDITGAIMNSNGIDIPSLLKHVKENKGIKGFHGGDSIDPKSVLVEDCDILIPAALGGVINRENANEIKAKFIIEAANHPTDPEADEILSKKGVIILPDIYANSGGVTVSYFEWVQNIQGFMWDEEKVNSDLKTYMTKGFKDVKEMCQTHNCDLRMGAFTLEVNRVARATALRGWEA

SEQ ID NO: 82684 - protein, 225 aa, Gossypium hirsutum
  Clone ID: GOSHI-09MAY01-C25648_1.pep
MNALVATNRNFKLAARLLGLDSKLEKSLLIPFREIKVECTIPKDDGTLATFVGFRIQHDNARGPMKGGIRYHPEVDPDEVNALAQLMTWKTAVANIPYGGAKGGIGCNPGELSKSELERLTRVFTQKIHDLIGIHTDVPAPDMGTGPQTMAWILDEYSKFHGHSPAVVTGKPIDLGGSLGRDAATGRGVLFATEALLNEHGKSISGPKFVIQGFGNVGSWAAQLI

SEQ ID NO: 82685 - protein, 174 aa, Gossypium hirsutum
  Clone ID: GOSHI-09MAY01-C25198_2.pep
FSVALCISNLFGFSFWLIIRFLFLASLYFSPIHTQSKSFIFVICKEKKMKESMGNPLHLKSLNHISLVCRSVEESMNFYQDILGFAPIRRPGSFDFNGAWLFGYGIGIHLLQSEDPESLPKKKEINPKDNHISFQGEISILFIPAYYFIPPWANPISKCEETTSCSLQINIWRI

SEQ ID NO: 82686 - protein, 214 aa, Gossypium hirsutum
  Clone ID: GOSHI-09MAY01-C25198_1.pep
FVWFFFLEINPKANHSLSVSRIFIFFSDLYTVEIFLFVICKEKKMKESMGNPLHLKSLNHISLVCRSVEESMNFYQDILGFVPIRRPGSFDFNGAWLFGYGIGIHLLQSEDPESLPKKKEINPKDNHISFQCESMGAVEKKLKEMELEYVRAIVEEGGIDVEQLFFHDPDGFMIEICNCDNLPVVPLAGEMPRSCSRLNLQHMQRQQIQQVVQQ

SEQ ID NO: 82687 - protein, 85 aa, Gossypium hirsutum
  Clone ID: LIB3829-024-Q6-K6-H2.pep
MGNPLQRGGGNHISLVCRSVEESMNFYQDILGFAPIRRPGSFDFNGAWLFGYGIGIHFLQSEDPESLPRKKEINSQDNHISFQCE

SEQ ID NO: 82688 - protein, 92 aa, Gossypium hirsutum
  unsure (1)..(92): unsure at all Xaa locations
  Clone ID: LIB3829-012-Q6-K6-B4.pep
INLNYFYSIVFFFFFFFILXFFFYFFFFFFFFFFFFFFFFFFFFFFFYMKPTSKLIEMITSLGITLHRLYYKTSKKPTTYLNRDHYRNKQSR

SEQ ID NO: 82689 - protein, 206 aa, Gossypium hirsutum
  Clone ID: GOSHI-09MAY01-C25168_1.pep
MEVSSLRHWKVIPILLITLQFTTNMVLSLVDAPFDNQRNIEYIKSSCSSTTYPRLCYRSLSIYANKIDTSPRLLVDTALNVTLKASKSTSRLMVKISRIHGLRPRVAAAMADCIEVIGDSVDELQQSIEELGHVSRSNFALTMSDIQTWVSTALTDEDTCMDGFAGKSMNGNVKTMVRKRIVKIAHLTSNALALVNNYASTQSNLP

SEQ ID NO: 82690 - protein, 199 aa, Gossypium hirsutum
  Clone ID: AI731721.1.pep
PPPSPPPPTYPSPPPPSPPPPSPVYCVRSPPPPPPNSPPPPPPLFSPPPPVPYYYNSPPPPHHSPPPPVHSPPPPPHSPPPPIYPYLSPPPPPPPVYSPPPPVHSPPPPSPPPCIEPPPPPPPPAPCVEYTPSPPPPPPSPSPPPPIHYKPPPSPSPPPPPIHYHSPPPPSPPPAPVYEGPLPPVIGVSYASPPPPPFY

SEQ ID NO: 82691 - protein, 89 aa, Gossypium hirsutum
  unsure (1)..(89): unsure at all Xaa locations
  Clone ID: LIB3149-004-P1-K1-E5.pep
TIHRHLLSHFAPFSPHPPPGPPAPCVEYTPSPSPAIHYKPPSSPSPPPXPPIHYHSPAPPSPAPAPVYEGPLSPVIGVSYASPSPTPFY

SEQ ID NO: 82692 - protein, 60 aa, Gossypium hirsutum
  Clone ID: GOSHI-09MAY01-C25128_1.pep
RRSAFTRSTRPVRVLKGYLVASKLPLKLRFRWSKRKPMALKQGKAHPIPFLLFSLFFKKK

SEQ ID NO: 82693 - protein, 41 aa, Gossypium hirsutum
  Clone ID: GOSHI-09MAY01-C25028_1.pep
LSLEKNFTNCIISLHSPLIKDVTSKTCVPEEKYNYQLKLNT

SEQ ID NO: 82694 - protein, 131 aa, Gossypium hirsutum
  Clone ID: GOSHI-09MAY01-C25398_2.pep
AAWAAAWGVGGFFFFFFFFFFFLGKKTLNNSLTLLFYMGSDVKFSCIFLHFLASQTLWGGGFHWFLSFQWHSMILHYLLVLITFIQMDENLALVLVFPALSSSNYHSWSRAMKLALLSKNKLQVVDGTITV

SEQ ID NO: 82695 - protein, 55 aa, Gossypium hirsutum
  Clone ID: uC-gsronu33B129b08b1.pep
HTGLGLLGFINWVWVLYLGYWTLIFGYLGFVISSPVKVWAKQNHYTNIEKKVSKI

SEQ ID NO: 82696 - protein, 101 aa, Gossypium hirsutum
  Clone ID: LIB3493-026-P1-M1-G8.pep
SLINFFSLIWISFFHLFKFLFIYTTNLKNKKGIKSKKGTYPNRSDRRRISLLRRRIRPEEVVGGSFFGSSLVEEVFAIEFALNRGLKARFTPQPPPVVALR

SEQ ID NO: 82697 - protein, 61 aa, Gossypium hirsutum
  Clone ID: GOSHI-09MAY01-C26988_1.pep
RRITFMILDIHQNQTLIYWNKNYELCRHENQKKKNTKVEEKRENPLSLFYFHLLRFYYQRI

SEQ ID NO: 82698 - protein, 203 aa, Gossypium hirsutum
  Clone ID: GOSHI-09MAY01-C26958_1.pep
MGRGRVQLRRIENNISRQVTFSKRRSGLLKKANEISVLCDADVALIVFSNKGKLFEFSSDPSMERILERYERQIYAPTGSESQANWSLESSKLMSTIEVLQRNLRNFRGEELEPLSSRDLQLLEQQIGNSLKRIRTRKNKLMNESISVLQKREKTLQDQNNMLAKSLKKNSRHRQNMHNMKCNKTCPKLTTINIHTTTNTTTG

SEQ ID NO: 82699 - protein, 144 aa, Gossypium hirsutum
  Clone ID: GOSHI-09MAY01-C26918_1.pep
YPSASDPVFVPTVSQHAGAAGTIKCEIGCQHEATEINNIQGNKHVPDDIDVSKTEKTAFEVPVSIHGNKSPSKSKAAEQVKESNPMESTSLQVVTSEVASLTVKDISQYIADSKVPDGQHVTFPTHFQVSENGLTFGSFDTSFG

SEQ ID NO: 82700 - protein, 190 aa, Gossypium hirsutum
  Clone ID: GOSHI-09MAY01-C26808_1.pep
MKPKFLFLFLVLCSLTIDNVLATSLGTHGKIPDNETIYRVSKQRCWGCIGESLEFLFTHNLVRATKWEPLLFWDFQLEKYARWWALQRKADCKLQHSFPEGDFKLGENIYWGSGSAWRPSDAVSAWSEEEKYYDYATNSCQEGQMCGHYTQIVWKNTRRIGCARVVCDTGDVFMTCNYDPPGNYIGERPY

SEQ ID NO: 82701 - protein, 224 aa, Gossypium hirsutum
  Clone ID: GOSHI-09MAY01-C26588_1.pep
LKELTGNIEIEKKKERETMTHFVLVHGMCHGAWCWYKIVSLLKSGGHRVTPLDLGASGINPKTITDLASLSDYAEPLMALMASLPEDEKVILVGHSYGGVIISLAMESFPMKVLAAVYLTAFMPNHDSSIATGVAEYFRRVMAEPLMDFQVLFEDGVGKSTTSPLIWTKIHGDKVYHLSPKADIKLGLTLMKQENYSSRFTNESLLSKEKFGSIHRVYIVAKMI

SEQ ID NO: 82702 - protein, 144 aa, Gossypium hirsutum
  Clone ID: GOSHI-09MAY01-C26558_1.pep
NVEMPHHYINGGWDEPSHHIVHKRGPSLLKLTDEPAELATMRAELHRRSIAQMRINNRSIQDMQIFGDPSGVPIVIMERVINAPRRTVSDISFLKNFDVMHLATTSTVLEAGKSQSSTSAAQSGQDLKIVVFEHGFHGHHLDLR

SEQ ID NO: 82703 - protein, 270 aa, Gossypium hirsutum
  unsure (1)..(270): unsure at all Xaa locations
  Clone ID: GOSHI-09MAY01-C26488_1.pep
MGSYGMLARRIVETEMPIMVQIQQLIRGAKNAVSLAQGVVYWKPPKQALDKVKALVEESSVSCYGADEGLPELREALIRKLRQENNLQRSSVMVTAGANQAFVNLVLTLCDAGDSVVMFAPYYFNSYMSFQMTGVTKILVGPGYPKTLYPDADWLERTLLETKPVPKLVTVVNPGNPSGTYIPEPLLKRISDICKNAGCWLVVDNTYEYFMYDGLKHSCVEGDHIVNIFSFSKAYGMMGWRVGYIAYPPXGEGLATQLLKVQDNIPICAS

SEQ ID NO: 82704 - protein, 124 aa, Gossypium hirsutum
  Clone ID: LIB3196-064-P1-M1-D2.pep
SPTRSPTRPRTRGLARRIVETEMPIMVQIQQLIRGAKNAVSLAQGVVYWKPPKQALDKVKALVEESSVSCYGADEGLPELREALIRKLRQENNLQRSSVMVTAGANQAFVNLVLTLCDAGDSVV

SEQ ID NO: 82705 - protein, 137 aa, Gossypium hirsutum
  Clone ID: GOSHI-09MAY01-C26448_1.pep
MAKANILLVFLCSLGLLLLGGVGVEGNPNYRDALQKSFLFFQGQRSGKLPANQKVSWRSNSGLSDGSLDHVDLTGGYYDAGDNVKFNFPMAFTTTMLSWGTLEYGKRMGPQLQEARAAIRWATDYLLKCANSKPGKL

SEQ ID NO: 82706 - protein, 138 aa, Gossypium hirsutum
  Clone ID: GOSHI-09MAY01-C26428_1.pep
KNFSSPVDLSAYDGFELRLKGDGCRYKLIVRTSTDWDTVGYTASFDTIGGQWQSIRLPFSSLRPVFRARTVSDALPFNPSNVVSFQLMFSKFEYDGKLNPTFVEGPFELPLSTIKAYIKDPITSRVVHVSFAGVTRPD

SEQ ID NO: 82707 - protein, 246 aa, Gossypium hirsutum
  unsure (1)..(246): unsure at all Xaa locations
  Clone ID: GOSHI-09MAY01-C26778_1.pep
MLPTYFPLRWESTGDQWWYASPIDWAAANGHYDLVRELLRIDGNHLIKLTSLRRIRRLETVWDDEEQFDDVAKCRSEVARKLFIECESKKTKNSLIRCGYGGWLMYTAASAGDLGFIQELLQRNPLLVFGEGEYGVTDILYAAARGKNSEVFTLIXDFAVSPRFMTANAEGFKEHIGEIPSVYKWKITNKAVHDAVRGGNLKLSMELLHGYDKDVLAYRDKRGSTVLHAAAGLGQVEVRLKYSMFM

SEQ ID NO: 82708 - protein, 61 aa, Gossypium hirsutum
  Clone ID: GOSHI-09MAY01-C26718_1.pep
TLTTRPFKTLRLFSLAIFEYFKQSIFYVFAKGGWLLLLNTLIATLGILLVTIEGPHEKVIF

SEQ ID NO: 82709 - protein, 143 aa, Gossypium hirsutum
  unsure (1)..(143): unsure at all Xaa locations
  Clone ID: GOSHI-09MAY01-C26698_1.pep
HAVIELTRKAEEITKALNLDHVLEVSNKQCPCYNSMGEADIDNNKLRKAASREDATDNYLYCPKAKDIESGDLKHFQKHWANGEPVIVSNVLENASGLSWEPMVMWRAFRQVTNKKSDHQLEVKALHCLDWSEVXVNIHQFFK

SEQ ID NO: 82710 - protein, 100 aa, Gossypium hirsutum
  unsure (1)..(100): unsure at all Xaa locations
  Clone ID: LIB3048-041-Q1-L1-C12.pep
HAVIELTRKAEERTKALNLDHVLEVYNIQCPCYNSMGQADIDNNMLRKAASKEDATDNYLYGPKAKDIDSXDLKHFQKHWANGEPAIASTVLENASGSSL

SEQ ID NO: 82711 - protein, 107 aa, Gossypium hirsutum
  Clone ID: GOSHI-09MAY01-C26668_1.pep
MAGYRAEDDYDYLFKVVLIGDSGVGKSNLLSRFTRNEFSLQSKSTIGVEFATRSLNVDGKVIKAQIWDTAGQERYHFYYSLALLSFISDLGIFSSLLILHGIWFCSY

SEQ ID NO: 82712 - protein, 97 aa, Gossypium hirsutum
  Clone ID: GOSHI-09MAY01-C26148_1.pep
MGKRNTIVISSSDDEDYEPSSRLTRSYQKPKSTSSLTRTNPSRAKKPRLPGSRLTKQSSNVDEMRLAFRDLDEVLNGFKVSAGSRRSNPKELWVDKH

SEQ ID NO: 82713 - protein, 93 aa, Gossypium hirsutum
  Clone ID: GOSHI-09MAY01-C26098_1.pep
MYRILLHCYPISIASNAYTYAHSNNHTYTSSFPTCTKDFATWLVDSNIFLPYNYPDLMDVQVQQPNQKKQIKDKDMDTSLFPDNLNSLGKNSC

SEQ ID NO: 82714 - protein, 132 aa, Gossypium hirsutum
  Clone ID: GOSHI-09MAY01-C126060_1.pep
GCPPLPPPFMGPLRGRPLFPSCWAPFWGGSWCAPFWFSPRWRTGGFFPGGLGGVPPGFPRPGVGQGWPVFFFLGPPYGSFCLACPGELSLLPLEGPPFFFFFFLFSFFFSFFLGCSPPKVFFKSHHFANEAD

SEQ ID NO: 82715 - protein, 238 aa, Gossypium hirsutum
  Clone ID: GOSHI-09MAY01-C26058_1.pep
EGLLIKDYPYAVDGLEIWFAIENWVKDYCSFYYKTDEMVQQDSELQAWWKELREEGHGDKKDEPWWPKMQTREELIDSCTIIIWVASALHAAVNFGQYPYAGYLPNRPTISRRFMPEKGTPEYTELESPPGTVFLKTITAQLQTLLGISLIEILSRHSSDEVYLGQRANPEWTSDETPLAAFDEFRKRLTEIEERIVEMNNDEQLKNRVGPVNMPYTLLYPTSEGGLTGKGIPNSVSI

SEQ ID NO: 82716 - protein, 272 aa, Gossypium hirsutum
  Clone ID: GOSHI-09MAY01-C26018_1.pep
GKFDLIISQLGAFLRSCGFKDSSVSWIPLSAVENQNLVSAPSNFRLSWYHGPNLLDAIDSFQPPTREFSKPLIMPICDVIKSPSQGQVSACGKLEAGAVRSGSKVLVMPSATIATVRSLERDSQACPIGRAGDNIAVSLNGIDGNHVMAGGVLCHPDFPIAFAKHLELKVLVLDGATPILIGSQLEFHIHHAKEAARVARISFLLDSKTGKVVKKAPRCILAKQSAVVEVILQEAVCVEEFSKCKVLGRVFLRTLGRTVAVGIVTRIVEEQQ

SEQ ID NO: 82717 - protein, 109 aa, Gossypium hirsutum
  Clone ID: GOSHI-09MAY01-C26008_1.pep
NKFTGKIPSGTQLQSLNAYSFLGTKLFGPPLSESSTDVRFGTGSGVLKNREDQDKVDWFFLTVELGFLSGFFGAVFLLMLCKSGRSVHFQYMDETGHSLGRIIRKYILK

SEQ ID NO: 82718 - protein, 214 aa, Gossypium hirsutum
  Clone ID: GOSHI-09MAY01-C26358_1.pep
MMQQPPPGGVATPPSMAADQSQTQHYQQQQQSQTWMMMSQQQQQVGQPVPPPSGWNTQPIPPPSQMQQYPAGSAAAGSGEIRSLWIGDLQPWMDENYLMNIFAQTGEVVSAKVIRNKQTALPEGYGFIEFVSQAAAERVLQSYNGVPMPNSEQNFRLNWAALGYGDKRQEEGTDYTIFGGGLSGGCFGYLVQETFKLVTHLLRCQSGTGRTLDG

SEQ ID NO: 82719 - protein, 103 aa, Gossypium hirsutum
  Clone ID: uC-gsflnu33B059h01b1.pep
RLSSCFSSDGSTFCNNKESYITRWGVLLPYVVNHIQVQLFDFWECDDHVFILTSITFERRQLFLFDIAKNQLKTKQAKRRRGHLKFKGRRRRSTALTSDSRNG

SEQ ID NO: 82720 - protein, 115 aa, Gossypium hirsutum
  Clone ID: GOSHI-09MAY01-C26368_1.pep
SCDKSYPNPLQNNPAYSVVEQYFVDEDDTVTEKIVVHKESARGVHFRRAGPRQKVYFKPDDVNACIVTCGGLCPWLNTVIREIVCGLYHMYGVRKVLGIDGRYKGFYAKNTITLT

SEQ ID NO: 82721 - protein, 190 aa, Gossypium hirsutum
  Clone ID: GOSHI-09MAY01-C26318_1.pep
ISVLYIEYRSRKEKENVSFKNHVIQWFEVLDGLLGPYWKAAGLAFNCTFLLFGSVIQLIACASNIYYINDKLDKRTWTYIFGACCATTVFIPSFHNYRIWSFIGLGMTTYTAWYMAIAAVLHGQAEGVTHSGPTKLVLYFTGATNILYTFAARADCGNMHACEASNSVHILLHMYVLPTISLSCLSLGPL

SEQ ID NO: 82722 - protein, 150 aa, Gossypium hirsutum
  Clone ID: GOSHI-09MAY01-C26248_1.pep
ASLRLFLCFFLFTASSVNIVCSRSLQKDHIALFVFGDSVYDPGNNNYIDTIARANYYPYGETFFKYPTGRFSDGRLIPDFIAEYANLPLIPPYLQPGNHEVTTGVNFASAGAGALSETNQGFVIDLKTQLSYFKKVAKQLRQELGDAEAM

SEQ ID NO: 82723 - protein, 199 aa, Gossypium hirsutum
  Clone ID: GOSHI-09MAY01-C26278_1.pep
GTTGDDTTRKRGIAAFLAQTSHETTGGWPTAPDGPYAWGYCYVQEQGNPGDYCVPNQQWPCAPGKKYFGRGPIQISYNYNYGPAGEAIKANILNDPDLVAKDPTISFKTGLWFWMTPQSPKPSSHDVITGQWKPSAEDTAAGRVPGYGVITNIINGGIECGKGSNPQVEDRIGFYKRYCDILKVSYGDNLDCYNQRPFA

SEQ ID NO: 82724 - protein, 113 aa, Gossypium hirsutum
  Clone ID: LIB3048-015-Q1-L1-D4.pep
PDGPYAWGYCYVHERGNPGKKYFGRGPIQISYNYNYGPAGEAIKADILNDPDLVAKDPTISFKTGLWFWMTPQSPKPSSHDVITGQWKPSAEDTAAGRVPGYGVITNIINGGI

SEQ ID NO: 82725 - protein, 235 aa, Gossypium hirsutum
  Clone ID: GOSHI-09MAY01-C26208_2.pep
QIQDLDAQRFIGKCLVNASNRLSAEQLLLDPFLAKDEATRLGSPKLFLNQSEIEKWHLNDNPPRTDMTITGKLNPEDDTIFLKVQIADTEGSTRNIYFPFDIVEDTPLDVATEMVKELEITDWDPLEIAEMIDGEISALVPQWKKSDLPRHQAHNTYNYQEDDDDGCHHPFYSFSSCSSSQMSVLMSHGCDWLRDDDTSSQSSSHSGIYSNFSYLSGDDHNPDMSPTTTARKHVS

SEQ ID NO: 82726 - protein, 184 aa, Gossypium hirsutum
  Clone ID: GOSHI-09MAY01-C26208_1.pep
LAAILRGSKSAHSVIGTPEFMAPELYEEDYNQLVDVYSFGMCVLEMLTSEYPYSECANPAQIYKKVTSGKLPGAFYQIQDLDAQRFIGKCLVNASNRLSAEQLLLDPFLAKDEATRLGSPKLFLNQSEIEKLHLNDNPPRTDMTITGKLNPEDDTICFKVQNADEGSTGTSTFLDMGKIRMDVH

SEQ ID NO: 82727 - protein, 262 aa, Gossypium hirsutum
  unsure (1)..(262): unsure at all Xaa locations
  Clone ID: GOSHI-09MAY01-C27838_1.pep
TGRTEIASCVRVAEVEQIRITIKELPVHSIDLAVGAEIELSISYHDAIGNPFYEASNVILHHXETNYPDVVSVNNTRGTNMIHLKAMRHGRALLRVSIDNRPQKSDYMLISVGAYVHPQNPVLHQGSSINFSVVGSDDQASGHWHSVNESVIVLHTQSGQAEAVGEGSTQVSFESSNVKLRTTVTVLPGSTLVVDAPKEMLTNVPFPSQGFSFSVKFSDTNDKINTVGSSKGAPYDCRVDPPFVGYAKPWIDLDTGNSFCLF

SEQ ID NO: 82728 - protein, 174 aa, Gossypium hirsutum
  Clone ID: GOSHI-09MAY01-C27578_1.pep
MAITSISTNWSALFRFSNHSKHSLSLPQSTISLRFSRSSLSCGKPLSIRATAVPAAPTAEGLAPAITLTDDALRHLNKMRAERDEDLCLRIGVKQGGCSGMSYTMDFEKRSNARADDSIIEYNGFTIVCDPKSLLFLFGMQLDYSDALIGGGFSFRNPNATQTCGCGKSFTAEM

SEQ ID NO: 82729 - protein, 82 aa, Gossypium hirsutum
  Clone ID: GOSHI-09MAY01-C27568_1.pep
MAANKFATMLHKNTNRITLILVYVLLEWILIVLLLLNSLFSYLIIKFADYFGLKRPCLWCSRLDHIFEPSKYNKSYRDLVCD

SEQ ID NO: 82730 - protein, 56 aa, Gossypium hirsutum
  unsure (1)..(56): unsure at all Xaa locations
  Clone ID: uC-gsflmaxxa010c10b1.pep
KEGRKEKRDGNGRKRATLYSLSCIHQAFXMKIILREASTNHRYSAGSKTCPDLKIK

SEQ ID NO: 82731 - protein, 38 aa, Gossypium hirsutum
  Clone ID: uC-gsflmaxxa010c04b1.pep
KFSFQCKNYALKLNFLLEFWAILFLISDMLLIQLNNDG

SEQ ID NO: 82732 - protein, 67 aa, Gossypium hirsutum
  Clone ID: GOSHI-09MAY01-C27758_1.pep
IFHFRIPKIIAVTQVPQSGYTSMQRQRPGHRSNLVCRSRAANRKIAQNQLKISEISSNYDLIRSAFH

SEQ ID NO: 82733 - protein, 135 aa, Gossypium hirsutum
  Clone ID: GOSHI-09MAY01-C27768_1.pep
AAGGFGGIRILRRPRIPVPFPDPASDFTVLIGDWFKTDHKKLQAKLDRGHKLPFPDGILINGHGPNGAFFTVEQGKTYRFRISNVGLQNSLNFRIHGHKMKLVAVEGTHTVQTMYESLDVHVGQSYSVLVTMDQS

SEQ ID NO: 82734 - protein, 69 aa, Gossypium hirsutum
  Clone ID: GOSHI-09MAY01-C27158_1.pep
KQSCMTLHPRRLQTTSLIIYHSLILIVTRPTKLRALEDVINFDIPLQFQTSKVVRVSKNARSNPKLIKL

SEQ ID NO: 82735 - protein, 86 aa, Gossypium hirsutum
  Clone ID: GOSHI-09MAY01-C27068_1.pep
CGLQGFLQVFMGYARTKRIKVHVWRLFNNFLPNYCNLKQRSLRVRVDCPLCKVAPENTNHLLWSCDMPQSVGASLQIRIAPVDTTL

SEQ ID NO: 82736 - protein, 291 aa, Gossypium hirsutum
  unsure (1)..(291): unsure at all Xaa locations
  Clone ID: GOSHI-09MAY01-C20898_1.pep
NYRAGSQRDSHRLPPHERSLGSRLQGKIKLPGRSVNGSDLHSEREIERGRNWGRHSPGKPQTSSQGRLRDRIKGKVEGDFNNNEGRNFGGPRIRRXVTDGRNAGLAGPKSLAELKVGKNSDNKQHQSLGKRRSVGDHQQIEGNLSFKGPMPLSEILKRKRQSEGAASGDGIASVNKEDVDQKQSKGSLISGSNNKEVSVTGKEANKDEESKVAATDIGITEATHGESSQPLNMSEHEADADAEDGIIGDERIEDHEVEADDQRDGEYYYEQVDEGNTTMRRMKTWTRKRNT

SEQ ID NO: 82737 - protein, 198 aa, Gossypium hirsutum
  Clone ID: GOSHI-09MAY01-C20888_1.pep
MRPNCCHVSFAFVLKFLNFLQAFLGVSILLYSFWMLDQWNHHVPISPPPSVPWPDSSLSALFNSRPEVGGARGAKVFDDLAAGLVSGLDNGVGFELSSVKLPAPWFIYSFLGVGIVLCCISLIGCIAAESINGCCLCFYTLIKIGLILIEASLGAFIAIDPHWEKDIPVDPTGELDSLRSFIEDNIVICKWGWPSMWS

SEQ ID NO: 82738 - protein, 369 aa, Gossypium hirsutum
  unsure (1)..(369): unsure at all Xaa locations
  Clone ID: GOSHI-09MAY01-C20848_1.pep
MSKTLVQPIGQKRLTNVAVVRLKKHGMRFEIACYKNKVLSWRSRVEKDVDEVLQSHTVYSNVSKGVLAKTKDLVAAFGTDDQTKICLEILEKGELQVAGKERESQFSSQFRDIATIVMQKTINPETDRPYTISMIERLMHEIHFAVDPNSSSKKQALEVIRQLQNNFPIKRSPMRLRLIVPGQNFHSLCEKLNEWGATIVSKDESGTQLSVICEIEPGLFRECDSLVRNLQGRLEMLSVSVHAEXGDTQVDNYDDEDISSQLPKDSAKSASSRLPPESSDSVIQLSEKIQKNTIYSGNGNAEGEAKQHKCSTCNAFVGDSKQYRDHFKSEWHKHNLKRKTRQLPPLTAEECLADVELSDSKSDLQDYSF

SEQ ID NO: 82739 - protein, 66 aa, Gossypium hirsutum
  Clone ID: GOSHI-09MAY01-C20868_1.pep
ERIIPPPYIAIPFYIASKKGPFQRQRIKLAAFTRIKTRRQIFTWDWLYPERMEIKEILRQATLSKF

SEQ ID NO: 82740 - protein, 164 aa, Gossypium hirsutum
  Clone ID: GOSHI-09MAY01-C20458_1.pep
LRHTSNSSGLPFEYCYDLSANQTSFEYPIVNLTMKGGDYFFVNDPIIVISLQGGDVYCLGIVKSDNVNIIGQNFMTGYRIVFDRERMVLGWKASYCYDLEASNTLPVNPPTAVPPAIAVNPEATSGNANNTNISGASPSITCSSRHLKTLFYALTFALIPFFAL

SEQ ID NO: 82741 - protein, 231 aa, Gossypium hirsutum
  unsure (1)..(231): unsure at all Xaa locations
  Clone ID: GOSHI-09MAY01-C120470_1.pep
MGVDYYRILQVXRNGCDEDLKKAYRKLAMKWHPDKNPKSKKEAEAKFKQISEAYDVLSDPQKRAVYDQYGEEGLKGQMPPPGAGGFPGGADGGSGPTMFRFNPRSPEDIFSEFFGCSSPFGGMGDMGGSRAGMSGFPTGVFREDLFRSFRGGAREGATPMLPEGPAIERPXPCRLEDPFQGASPHVQISRDVTDASGRPSTEEEILTIQIKPGWKKGTXITFPEKGNEQRG

SEQ ID NO: 82742 - protein, 124 aa, Gossypium hirsutum
  Clone ID: GOSHI-09MAY01-C20798_1.pep
MTRTERFRHEAITILPTFLSANKVLVFVCLIVLSLKEGYATAEAESHTIHVASLLPSSVCTPPATAKGLDKKSSLQVIHKHGPCSQPHEEKANIPTHVQILLLDEVRVKSIHSKLAKNLGSVNV

SEQ ID NO: 82743 - protein, 276 aa, Gossypium hirsutum
  Clone ID: GOSHI-09MAY01-C120790_1.pep
MFIETSRTNKTLTATPLLFPLRLPPLQAIYQTPKLKVRNTLPRWLLPLKHFHKHLAAMAEDGAVTLYKATSITDAKKNSFSIKAGLAQMLRGGAIVEVSTLSQAKIAEEAGACCLVITEPNRQGISRMPDPSIIKQIKRCVLIPVMARSRVGHFVEAQILERVGVDYIDESEVLAIADEDNFINKHNFGCPFVCGCKNLGDALRRVREGAAMIRTQGDLLGTGNIAETVKNVRSVMGEIRILNNMDEDEVFAFSKEIAAPYDLVAQTKQMGRLPVV

SEQ ID NO: 82744 - protein, 118 aa, Gossypium hirsutum
  Clone ID: GOSHI-09MAY01-C20718_1.pep
MGMPLVSIAAAPKSAFVPNSISLPSIKVRNIPSSTASTGGVSIECSSRPQKKATKHHMKTRPRKTQPWDIRRKPTVYAPLPPLPPDWALVSSVGENDGADVAEVGLAGSALQAPASTG

SEQ ID NO: 82745 - protein, 176 aa, Gossypium hirsutum
  unsure (1)..(176): unsure at all Xaa locations
  Clone ID: GOSHI-09MAY01-C20688_1.pep
FYKQQDPIFSPSSSSTYSNVSCSSAACTSLNSATGNSPGCSASTCVYGIQYGDSSFSIGLFAKEKLTLTSNVVFDNFLFGCGQNNQGLFGGAAGLLGLGRNKLSFPSQTAIKFKKIFSYCLPSSPSSTGFLKFGNDGLSKSXVKFTTLSTISGGESFYGITIIAMSCGGKKLLNLA

SEQ ID NO: 82746 - protein, 205 aa, Gossypium hirsutum
  Clone ID: GOSHI-09MAY01-C20668_1.pep
MESDSAMVAFPLLTTPIESNYRACTIPYRFPSDNPRKATPTEIAWIDLFRNSIPSFKKRAESDTTVVDASTKAEKFAQRYADILDDIKKDPESHGGPPDCILLCRLREQVLRELGFRDIFKKVKDEENTKAISLFPDVVRLNDDIEDGGKCLENLVRGIFAGYIFDLGSAQLAEVSQGMNVPLVVSNLVLDLVMMTNTLSNEQKS

SEQ ID NO: 82747 - protein, 81 aa, Gossypium hirsutum
  unsure (1)..(81): unsure at all Xaa locations
  Clone ID: LIB3189-015-P1-K1-C1.pep
MQSDSSMVAFPLLTTPIESNYRACTIPYRFPSDNPRKATPTEIAWIDLFRNSIPXSFKKRADSDTTVVDASTKAEKFVQRY

SEQ ID NO: 82748 - protein, 88 aa, Gossypium hirsutum
  Clone ID: GOSHI-09MAY01-C20168_1.pep
GIIFVLQSRVILPMQFGILCSSHKLDKTVVVDRNTQITEYFILSFLCVFLCDKHETWFPSVHVCLLVVGILVFLIIIVLYDGLEKCLN

SEQ ID NO: 82749 - protein, 282 aa, Gossypium hirsutum
  unsure (1)..(282): unsure at all Xaa locations
  Clone ID: GOSHI-09MAY01-C20078_1.pep
HFRAGNCLYVXGKYKEAKEEFLLALEAAEAGGNQWGYLLPQIYVNLGIALEGEGMVLSACEYYREAAILCPTHYRALKLLGSALFGVGEYRAAVKALEEAIFMKPDYADAHCDLASALHGMGEDERAIEVFQKAIDLKPGHVDALYNLGGLYMDLGRFQRASEMYTRVLAVWPNHWRAQLNKAVSLLGAGETEEAKKALKEALKMTNRVELNDAIYHLKQLQKKKVKTNGGGNGEAAFVIVDPSKFKTLGEKTTLRQDLGNALQIRAFQRLTRLNRCEVDLL

SEQ ID NO: 82750 - protein, 106 aa, Gossypium hirsutum
  Clone ID: GOSHI-09MAY01-C20028_2.pep
MDRADLTVGPAMDMPIMHDGDRYDFVRDIGSGNFGVARLMTDKVTKELVAVKYIERGRKIDENVQREIINHRSLRHPNIVRFKEVILTPTHLAIAMEYASGGELFE

SEQ ID NO: 82751 - protein, 269 aa, Gossypium hirsutum
  unsure (1)..(269): unsure at all Xaa locations
  Clone ID: GOSHI-09MAY01-C20028_1.pep
MDRADMMVGPGMDMPIMHDSDRYDFVKDIGSGNFGVARLMRDKITRELVAVKYIERGDKIDENVRREIINHRSLRHPNIVRFKEVILTPTHLAIVMEYASGGELFERICAAGRFNEDEARFFFQQLLSGVSYCHAMQVCHRDLKLENTLLDGSPAPRLKICDFGYSKSSVLHSQPKSTVGTPAYIAPEVLLRQEYDGKIADVWSCGVTLYVMLVGAYPFEDPDEPRDFRKTIQRILSVNMAFLDVIQNIPECQHLISGLFVXDPSARIT

SEQ ID NO: 82752 - protein, 43 aa, Gossypium hirsutum
  Clone ID: LIB3825-013-Q1-N6-C12.pep
YQIADVWSCGVTLYVMLVGAYPFEDPDEPKDFRKTIQVYHWIL

SEQ ID NO: 82753 - protein, 116 aa, Gossypium hirsutum
  unsure (1)..(116): unsure at all Xaa locations
  Clone ID: LIB3149-019-Q1-K1-G6.pep
MLPYXKLENTSWDGSPAPRLKICNFGYSKSSVLHSQPKSTVGTPAYIAPEVLQRQEYDGKIADVWSCGVTLYVMLVGAYPFEDPDEPKDFPKTIQRILRIQYSIPDFVQISSECRH

SEQ ID NO: 82754 - protein, 264 aa, Gossypium hirsutum
  Clone ID: GOSHI-09MAY01-C20308_2.pep
SLQEARRFELRELSLATKNFSDRNLIGEGKFGEVYKGLLQDGMLVAIKKRAGAPSQEFIDEACYLSSIQHRNLVTLLGYCQENNQQFLVYEYIPNGSVSSHLYGVGQVSAHKIGFKHRRSLALGAAKGLAHLHSLSPRLVQIDFKPANVLVDENFTPNAAVAGLRNFLGRIDVAGPSSQVTADEIFLAPEVRESRRFSDKSDVYSFGVFLLELVSGREASQLPPSNSTENLVEWVPNTHDYSNISIIIDPTLGDSFTPDSMDEF

SEQ ID NO: 82755 - protein, 221 aa, Gossypium hirsutum
  Clone ID: GOSHI-09MAY01-C20308_1.pep
MFIFYGCDFRNLLPDFRCLDLLFVPFAGLAHLHSLSPRLVHKDFKTANVLVDENFIAKVADAGLRNFLGRIDVAGPSSQVTADEIFLAPEVREFRRFSEKSDVYSFGVFLLELVSGREASELPSSNSTENLVEWVQNSHDYSNISSSIDPRLGSSFTAEGMEEFIRLTVRCLEPSSERRPTMSYVVAELDRILDKEMSLTTVMGEGSPTVTLGSQLFRATK

SEQ ID NO: 82756 - protein, 61 aa, Gossypium hirsutum
  Clone ID: LIB3146-027-Q1-K1-E10.pep
EMTAVGIFLCMKGKLVSFHFFVHVFDFQGFANAMDWRCYELLVLYRLNRAFLNIVVTNHVI

SEQ ID NO: 82757 - protein, 129 aa, Gossypium hirsutum
  unsure (1)..(129): unsure at all Xaa locations
  Clone ID: LIB3083-091-Q1-L1-D3.pep
QQFLVYEYIPNGSGSIHLYGVGQVSAQKIEFKHRLSIALGAAKGDPLQNXLAHLHSLSPRLVHKDFKTANVLVDENFIAKVADAGLRNFLGRIDVAGPSSQVTADEIFLAPEVREFRRFSEKSDVYSFG

SEQ ID NO: 82758 - protein, 76 aa, Gossypium hirsutum
  Clone ID: GOSHI-09MAY01-C20288_1.pep
MSSLGTSKGVLEIAKFGLYVTIPIVLIYTFAKNTKNLQKLMGNRSYIVYPPEGPRPPSPEELREMARELARKRNNH

SEQ ID NO: 82759 - protein, 114 aa, Gossypium hirsutum
  Clone ID: GOSHI-09MAY01-C20278_1.pep
TKGGSMNLAIPEPGPPTIRNVCGALKCVVILMSGRPVVIEPDIDSVDALVAAWLPGSEGHGVADVLFGDYGFSGKLPRTWFKTVDQLPMNVGDPHYDPLFPFGFGLTSEPTKAY

SEQ ID NO: 82760 - protein, 71 aa, Gossypium hirsutum
  Clone ID: GOSHI-09MAY01-C20228_1.pep
VLGKFGVLCVKDVIHEIMSVGLHFKEANNFLWPFKIKAPLGGLKKKRIHYVEGGAAGTGENYINELIRRMN

SEQ ID NO: 82761 - protein, 44 aa, Gossypium hirsutum
  Clone ID: LIB3135-028-Q1-K1-F10.pep
DFILCARILDLFWRLREVFIKIMKLAIIYYLIVLIKFINCIFKI

SEQ ID NO: 82762 - protein, 234 aa, Gossypium hirsutum
  unsure (1)..(234): unsure at all Xaa locations
  Clone ID: GOSHI-09MAY01-C21908_1.pep
MAFPQQQFQQHYQPQQQQQQQSKSFRNLYAIDAQVSPPLAYYNTPNLQDSSQHPPYIPPFHVVGFAPGPVPVTDGSDGGAEMQWNNGVEPKRKKLKEQDFLENNSQISSVDFFQAQSVSTGLGLSLDNNNNNRMASSGDSALLSLIGDDINNELQRQDAEIDRFLKVQGDRLHQSVLEKVQANXQTISLVEEKVFQKLREKEAEVENINKKNMELEEKMEQLTMEAGAWHTSQI

SEQ ID NO: 82763 - protein, 53 aa, Gossypium hirsutum
  Clone ID: GOSHI-09MAY01-C21818_3.pep
KLDCEVSSYPISYESRSDLSSSLVASTRLLELITILVWRSSTFLYLWFLPLYR

SEQ ID NO: 82764 - protein, 62 aa, Gossypium hirsutum
  unsure (1)..(62): unsure at all Xaa locations
  Clone ID: LIB3083-072-Q1-L1-F2.pep
EDFLQFVNEHCSCEVASSHISYKFRKTYLVCASGVNRPCLNLSPXLVWCSPSILFILFTLTI

SEQ ID NO: 82765 - protein, 40 aa, Gossypium hirsutum
  Clone ID: LIB3196-065-P1-M1-E11.pep
QIGKKSLLHEMNKLFISLRCLLIFGIYDVHTNLNSVHIYI

SEQ ID NO: 82766 - protein, 59 aa, Gossypium hirsutum
  Clone ID: GOSHI-09MAY01-C21448_1.pep
LCLFGFGKLQGIPNTFGCCWYYLISYMLKGFLLSSTICLEFYCLVWCLFVSAVDSIILL

SEQ ID NO: 82767 - protein, 385 aa, Gossypium hirsutum
  Clone ID: GOSHI-09MAY01-C21468_1.pep
MMMRFSLQKVKNLPALRPQVLASASPRFSTATESSFNHRNPSRVPNLIGGAFVDSKSTSTIDVINPATQEVVSQIPLTTNEEFKAAVAAAKQAFPSWRNTPITTRQRIMFKLQELIRRDMDKLAKNITTEQGKTLKDAHGDVFRGLEVVEHSCGMATLQMGEYVPNVASGIDTYSVREPLGVCAGICPFNFPAMIPLWMFPVAVTCGNTFVLKPSEKDPGASIMLAELAIEAGLPPGVLNIVHGTNDIVNAICDDDDIRAISFVGSNTAGMHIYGRASAKGKRVQSNMGAKNHGIVMPDANKDATLNALLAAGFGAAGQRCMALSTIVFVGDSESWLNDLVERAKGLKVNAGIEPNADLGPVISKQAKERICRLVQSGVERGAKL

SEQ ID NO: 82768 - protein, 190 aa, Gossypium hirsutum
  unsure (1)..(190): unsure at all Xaa locations
  Clone ID: LIB3584-008-P1-K1-H12.pep
GGGGVGAELAIEAGLPPGVLNIVHGTNDIVNAICDDDDIRAISFVGSNTAGMGXGGVFSSKGKRVQSNMGAKNHGIVMPDANKDATLNALLAAGFGAAGHLFFFFIFLFFVGDSVLFFFVLXEXAKXXKXXAGEEPNADLGPVISKQAKERICRLVQSGVERGAKLLLDGRNVLVPGFEQGKFIGPAFLT

SEQ ID NO: 82769 - protein, 43 aa, Gossypium hirsutum
  Clone ID: LIB3083-065-Q1-L1-B7.pep
GICPFNFPAMMPLWMFPVAVTCGNTFVLKPSEKDPGEFNIIIV

SEQ ID NO: 82770 - protein, 193 aa, Gossypium hirsutum
  unsure (1)..(193): unsure at all Xaa locations
  Clone ID: GOSHI-09MAY01-C21798_1.pep
GVRYVGLECLDVISTQTGQPVPADGKTIGEIVFRGNIVMKGYLKNPKANEETFANGWFHSGDLGVKNPDGYIEIKDRSKDIIISGGENISSVEVENNLYLHPAVMEASVVARADERWGESPCAFVTLQPGVGKSDEQRLPEDIMXFCRSKMPAYWVPKSVIFGPLPKTATGKIQKHVLRAKAKELGPVRMSKL

SEQ ID NO: 82771 - protein, 54 aa, Gossypium hirsutum
  Clone ID: LIB3272-057-P1-N1-F5.pep
AEDIMKFCRSKMPAYWVPKSVIFGPLPKTATGKIQKHVLRAKAKELGPVRMSKL

SEQ ID NO: 82772 - protein, 103 aa, Gossypium hirsutum
  Clone ID: uC-gsflnu33B143g12b1.pep
GVFGSIIRSNVHLACTRMKGPFYVPMFKPFGVVFATVFGTSFFTNSLHYGSVIGTIIVGTGYYAVMFGQIREEELRKEREVGTVSDISDLKVPLLQENQDAQV

SEQ ID NO: 82773 - protein, 127 aa, Gossypium hirsutum
  Clone ID: uC-gsflnu33B009g01b1.pep
HASDRWVLGGILLAAATLSISVWNIVQMGTVKQYPQVMKVASSYSLVGTIQCLVFSLIMEGDLDAWKLKRKPDLLLIIVTGVFGSIIRSNVHLACTRMKGPFYVPMFKPFAVVFATVFGTSFFQTVL

SEQ ID NO: 82774 - protein, 313 aa, Gossypium hirsutum
  Clone ID: GOSHI-09MAY01-C21748_1.pep
MAVMESSKPTVEINGLSFTYPGIDGHPPPGSKPLIDGFSLTLNAGDRCLLVGSNGAGKTTILKILGGKHMVEPHMVRVLGRSAFHDTVLASSGDLCYLGGEWRRDVAFAGFEVPIQMDISAEKMIFGVAGIDPKRRDELIKVLNIDLSWRMHKVSDGQKKRVQICMGLLKPFKVLLLDEITVDLDVLARADLLNFLRKECEERGATIIYATHIFDGLEKWPSHIVYVAHGKLQLAMPMDKVKEISNSSLMRTVESWLRKERDEERKKRKERKSQGLPEFENQTEGSRVTGDPARAAVRSLNNGWAAGRLNSTV

SEQ ID NO: 82775 - protein, 223 aa, Gossypium hirsutum
  Clone ID: GOSHI-09MAY01-C21718_1.pep
MSFLFGKRKTPAELLRENKRMLDKSIREIERERQGLQNQEKKLIAEIKKTAKQGQMGAVKVMAKDLIRTRHQIEKFYKLKSQLQGVSLRIQTLKSTQAMGEAMKGVTKAMGRMNRQMNLPSLQKIMQEFEMQNEKMEMVSEVMGDAIDDALEGDEEEEETEELVSQVLDEIGIDINQELVNAPSAAVFAPAAKGKVAQAKATGNDDGGINSDLQARLDNLRRM

SEQ ID NO: 82776 - protein, 49 aa, Gossypium hirsutum
  Clone ID: LIB3147-044-Q1-K1-B11.pep
FILDILYAYIFLATKAMGRVNRQMNLPSLQKIMQEFEMQNEKMEMGSEV

SEQ ID NO: 82777 - protein, 193 aa, Gossypium hirsutum
  Clone ID: GOSHI-09MAY01-C21678_1.pep
KRQRELEEGKAGLGWGTSGINGGHGEQIWEQQQSQMQRVKNSGIILTNETPLKDDKEEEMAKSALALFRAKEEEIERKKMEVRDKVQAYMGRVEEATRRLSDIREELDALIDPMRKDIAFLRKKIDTVNRELKPLGQSCQKKEREFKEALEAFNDKNKEKTHLVSKLMELVSQSERLRMKKLEELSKSIETLS

SEQ ID NO: 82778 - protein, 74 aa, Gossypium hirsutum
  Clone ID: uC-gsronu33B169g03b1.pep
FLRKKIDTANRELKPLGQSCQKKEREYKEALEAFNDKNKEKTQLVSKLMELVSESERLRRKKLEELSKSIETLS

SEQ ID NO: 82779 - protein, 178 aa, Gossypium hirsutum
  Clone ID: GOSHI-09MAY01-C21158_1.pep
MATSEASVTRIMVAVNESTIKGYPHASISSKGAFEWTLQKIVMSNTSGFKLLFLHVQVPDEDGFDDMDSIYASPEDFKSLKSRDRARGLHLLEFFVTRCHEIGVACEAWIKKGDPKEVICHEVRRIQPDLLVLGSRGLGPFQRVFVGTVSEFCVKHAECPVVTIKRRSDETPQDPVDD

SEQ ID NO: 82780 - protein, 51 aa, Gossypium hirsutum
  Clone ID: LIB3083-060-Q1-L1-A7.pep
GDLLVLGSRGLGPFQRVFVGTVSEFCVKHAECPVVTIKRRLDETPQDPVDD

SEQ ID NO: 82781 - protein, 178 aa, Gossypium hirsutum
  Clone ID: GOSHI-09MAY01-C121120_1.pep
FGWPPGRPTEDKPGKALFFLLLSYEETDGKRSLIATKILEGTHYVLHPNGSAMFIVNIDEPSLDPFPWDSDADSHPVSVKHAFMGEGIANGYGFRYPGSKPGSLFAIQNGLLAFIWKESRAVLTLQRLNLQDLLKIGEQVPALPPVANFSYLTKSYSNVLAGFSNTSTFSSSLRQRHI

SEQ ID NO: 82782 - protein, 177 aa, Gossypium hirsutum
  unsure (1)..(177): unsure at all Xaa locations
  Clone ID: GOSHI-09MAY01-C21048_1.pep
YIAHGNCYACDYAGTYSDQKCRTNCGEPAQRWYHVPRSWLKPSGNFLVAYEEWGGDPNXIALAKRTTASVCADIFEGQPTMKKRGMLIAGRISRPKAHLWCPPGQKISKINFASYGMPEGSCGNFREGSCHAHKSYGAFQKNCIGKQSCSVTVAPEVFGGDPCPGSRKKLSVEAACK

SEQ ID NO: 82783 - protein, 289 aa, Gossypium hirsutum
  Clone ID: GOSHI-09MAY01-C21008_1.pep
MAIISEFQEEEARPSASSSPKAVPFNASLDPSDPVGFLEKVFDFLAKETDFLEKENFDKEIAVVVRVAKEKRKQKVEEVAPKVEIKKEEVKKEKEIKEEVNREAMEVDKNEDQSSSGLKVPNKGNGLDLDKYSWTQSLQEVTVNVPVPNGTKSRFVVCEIKKNHLKVGLKGQPPIIDGELFQTVKPDDCYWSIEDSCALSILLTKHNQMEWWKSLVKGDPEIDTQKVEPENSKLSDLDPETRQTVEKMMFDQRQKAMGLPTSDELQKQEILKKFMSEHPEMDFSRAKLM

SEQ ID NO: 82784 - protein, 136 aa, Gossypium hirsutum
  unsure (1)..(136): unsure at all Xaa locations
  Clone ID: GOSHI-09MAY01-C21348_1.pep
MNDLLSDSFEIPRGQGQGSHGGDIELGAQANADELGLQNFFKKVQEIDKQYEKLDKLLKKLQDAHEESKAVTKAPAMKSIKQRTEKDVDEVGKISRFVKGKIDELDRENLANRQKPGCGXGTGVDRSRTSTTLAVK

SEQ ID NO: 82785 - protein, 217 aa, Gossypium hirsutum
  unsure (1)..(217): unsure at all Xaa locations
  Clone ID: GOSHI-09MAY01-C21318_1.pep
MRTSARGYSAVAAAEELSVIEKAADQEALDDDMLLERSXVSKAMSKKYLKVSMAATVKEAMKCMHDNHQKFALVVDEDNFLEGIITLGDIRWCLSKKQPSDISKGDSTADVNPCLVSSVCTKGISYRGQKRGLLTCFADTDLAIARELMEASGVKQLPVVNRGGEPHKGRKRRVIAVLHYESIWNCLREEINHRKSVYQHSHRKDNNEEETINSNGH

SEQ ID NO: 82786 - protein, 94 aa, Gossypium hirsutum
  Clone ID: GOSHI-09MAY01-C21308_3.pep
LLKVMKGYVVMDENMQSIFLVLWFVWRMNLVHKKGDAPIPNGNFSLTTGILKYAAVGLRDSIHRLSIKTNTKPNPPSPKYHCRLTKTLLERCLL

SEQ ID NO: 82787 - protein, 120 aa, Gossypium hirsutum
  Clone ID: GOSHI-09MAY01-C21308_1.pep
RFEEIPVRYWSISIFMHKVHPANTNEGTKKMDCIFSSITTHPFITLRGKLPPSICVTNLAHPNTRICYSKQPKNRRYPRRTKLPPDFGVYLFLEKPRTETDMSTDTEQIKSIYGHNSDSP

SEQ ID NO: 82788 - protein, 73 aa, Gossypium hirsutum
  Clone ID: LIB3582-014-P1-K1-B5.pep
VMKGYMVMDENMQSIFLVLSFVCRMNLVHKKGDVPLPNGNFFKPFICDKSYSLTTAILKYAAVGLRAEMKETM

SEQ ID NO: 82789 - protein, 135 aa, Gossypium hirsutum
  unsure (1)..(135): unsure at all Xaa locations
  Clone ID: LIB3583-039-P1-K1-G10.pep
LYLFSVSEHVGFSSRFLQELVNAKVRREFGATRITAVLGLPALAIPVLGCARLVTQMLCCSFPLKVMKGYVVMDENMQSIFLVLSFVWRMNLVHKKGAAPIPNGPLSLXXGIXXYXAVGLXGSXXRVGGRVGRPG

SEQ ID NO: 82790 - protein, 129 aa, Gossypium hirsutum
  unsure (1)..(129): unsure at all Xaa locations
  Clone ID: GOSHI-09MAY01-C21248_1.pep
MDFSSFLTSXGTPFVIFIVLMLLFAWLSTRQGNAVLYYPNRIVKGMEPWEGGSRTPNPFAWIKEALSSSEHDVINMSGIDTAVYFVFLSTVLGILVLSGIVLLPVLLPIAPTDDGVKKNEHTSNNTSNG

SEQ ID NO: 82791 - protein, 94 aa, Gossypium hirsutum
  Clone ID: GOSHI-09MAY01-C21268_1.pep
MATEEVNKPPSLPSYPQLIMNAIEALNDKNGSNKTSISKYIESKYGDLPAGHTTLLSHHLNRMKQTGELVFLKNNYMKADPNAPPKRGRGRPPK

SEQ ID NO: 82792 - protein, 278 aa, Gossypium hirsutum
  Clone ID: GOSHI-09MAY01-C22968_1.pep
HMGNFMAGSPFSAGVIAADGLAVHSRSHGGGFAVQTEPCMGRSVSVHGCSEAANPPSSQDAEENLDVVKDAATDISQTVSRRDMATQMSPQSSTHSSPKGRPSFSPSSPSALPIMELQSIHGSKSVLRDVPVDERVTLTRWSKKHRARNTGKSSEIVDDWRKKVVDTCTSTWDVTETGKSISKMKREEAKITAWENLQKAKAEAAIRKLEMKLEKKRSSSMDKIMNKLRSAQKRAQDMRSLMLANQAHQVTKTSHMAISFRRTRQMSSLSGCFTCQAF

SEQ ID NO: 82793 - protein, 104 aa, Gossypium hirsutum
  Clone ID: LIB3083-094-Q1-L1-B11.pep
SSTWDATETGKSISKMKREEAKITVWENLQNAKGDAAITKLEMKLEKKRSSSMDKIMNKLRSAQKRAHDMKSLMLANQAHQVTKTSHMAISFRRTRQMSSLSGC

SEQ ID NO: 82794 - protein, 61 aa, Gossypium hirsutum
  Clone ID: LIB3145-029-Q1-K1-F9.pep
KKVVDTCTSTWDVTETGKSISEYVYFTTTLPLFIFLKYRSTTLGVTICLKDWSKHPLGSFL

SEQ ID NO: 82795 - protein, 117 aa, Gossypium hirsutum
  Clone ID: GOSHI-09MAY01-C122890_1.pep
IILSFFLKIEAMRSSRIQSSTWYSASSSSTFPRPPCLTSTSRHCRLSISQRVSRISLLSSCSSGLSKTQLSVSTQRNEQNLLSVGVGADALVTSNAPGVSNEPLVAEEKIGVLLLNL

SEQ ID NO: 82796 - protein, 76 aa, Gossypium hirsutum
  Clone ID: GOSHI-09MAY01-C22578_2.pep
WDEIQDWDLPLNANMVGVSREPEEEKPLESRKGVWKMIQNEKKKTTKKTKVIVRETRVGSSSCSGFKLFPSVLLFH

SEQ ID NO: 82797 - protein, 161 aa, Gossypium hirsutum
  Clone ID: GOSHI-09MAY01-C22578_1.pep
MDDQGGSKSTGIRQIVRLKEILQKWQTITLCTMPSTDTPHSEENHGVFCPPINQRLKNIMSFDSDEDSCHGSEPPPDVPKGYLAVYVGPELRRFIIPTSYLSHPVFTILLEKAEEEFGYDHNGGLTLPCEIETFKYLLKCIENHPNNHPVGSSVSEQLEIH

SEQ ID NO: 82798 - protein, 323 aa, Gossypium hirsutum
  unsure (1)..(323): unsure at all Xaa locations
  Clone ID: GOSHI-09MAY01-C22518_1.pep
FPKYIKKAENQNLFCAKNLVIDKSIPAAEIQGIRSAQHYIYIENQYFLGSSYAWPSYKNAGADNLIPMELALKVASKIRAGERFAVYIIIPLWPEGDPKTATVQEILYWQSQTMQMMYDVVAQELKSMQIKDSHPRDYLNFYCLGKREEVSQEMLSGKDSVSDSAKFGRFMIYVHAKGMIVDDEYVIVGSAKRGQRSMAXVRKDTEIAMGAYQPHYTWAKKKYPRGQVHGYRMSLWAEHLGELNKLFKEPESGEGVKXVIGAEENWKKCTDGAFRLQGTFXCIHLQVDMDGKVNRLPEHENFPDVGGKVIGAHSIQLPDVLTT

SEQ ID NO: 82799 - protein, 150 aa, Gossypium hirsutum
  Clone ID: GOSHI-09MAY01-C22508_1.pep
FQAAAAAGGSGSSSASFNKSLNAAMIGETLPRGRGFDERAARAAAEVRKKAAARGLVTRSHGIPVQAVPPLTQLLNMINMGATPEAGDGGEASGEKREEANGHHNPNGAVDSKKDESTTSKEGEAAPVGLGKGLASLDAKKQKTKLKATS

SEQ ID NO: 82800 - protein, 274 aa, Gossypium hirsutum
  Clone ID: GOSHI-09MAY01-C22488_1.pep
ERERERERERERERERERERIKQSLDLRNQSSIQPPLLPKFPIQTSSSSVVPQGGWLVEEDINESHLNDRPSGTTQESDVIKSDKLRGYQNPFPHTAPGSVSTGLPSYASQVKIEEARTGLDTPKQNVLPTAHLSEIGGTQNHLPSITRELQSEGGKMNLLPSHLSIGVLHEIGRRCGSKVEFRSVVSTIKDLQFSVEVLFTGEKIGVGMGKTRKDAQQQAAELALHNLAEKYVAYIAPRSGAVDKNFNNLSLGTENGFLWDVNPASNEAIKEG

SEQ ID NO: 82801 - protein, 116 aa, Gossypium hirsutum
  Clone ID: GOSHI-09MAY01-C22468_1.pep
YIHEGKWPPGSVDIHIIEKSLRKAVFAAILLIPIACIFLSLKEISATLILWRLQLSGLLVILLLVFWNPVHKESVIIMPAFGVQLETHYTSGRIIRRFIPAGEILKPVLLKCVTPV

SEQ ID NO: 82802 - protein, 229 aa, Gossypium hirsutum
  Clone ID: GOSHI-09MAY01-C22118_1.pep
MDRAQLLLVGLPLFLFATDLLSLFTPPPPKPPSHHHHHHHHHPHLPKPPLNPETLDISLQKPSASGGIGYGSTVNINFCASCSYRGTAVTMKKMLEAQFPGIDVILDNYPPSLPKRLLSKVVPVFQFGVIGIMMAGEQIFPMIGITTPPPWYYSLRANRFGSIATAWLLGNVMQSFLQSSGAFEVYCNDELVFSKLKEGRFPGEIELKDIIAKTLANSRVTGNLGVVLS

SEQ ID NO: 82803 - protein, 296 aa, Gossypium hirsutum
  Clone ID: GOSHI-09MAY01-C22098_1.pep
PTVVPDDSVNPRLAKILEKVAVRKELIVALANSNVKEMLEVWFSSIKRVGIPNYLVIALDDHIEEFCKSNDVPVYKRDPDSGIDAVGRSGGNHAVSGLKFRILREFLQLGYSVLLSDVDIIYLQNPFNHLYRDSDVKSMTDGHNNMTAYGYNDVFDEPAMGWARYAHTMRIWVYNSGFFFIRPTIPSIELLDRVADRLAKQPNSWDQAVFNEELFFPSHPGYDGLHAAKRTMDFYMFMNSKVLFKTVRKDAKLKKLKPVIVHVNYHPDKLRRMKAVVEFFVNGKQDALDPYPDGSE

SEQ ID NO: 82804 - protein, 180 aa, Gossypium hirsutum
  Clone ID: GOSHI-09MAY01-C22378_1.pep
MAMNHAAAVKVGLGLLGLCLFGYIVGPPLYWHLMEGLAAVSRTSNTCPPCLCDCSSQPLLTLPEGLSNASFADCAKHDPEVTEDTEKNSAELLMEELKLREAEALESQRRADMALLEAKKIASQYQKEADKCNSGMETCEEAREKAEAALVAQKKLTAMWETRARQKGWREGVAKSHTDS

SEQ ID NO: 82805 - protein, 107 aa, Gossypium hirsutum
  Clone ID: LIB3145-015-Q1-K1-H12.pep
IEVEFKYSTDCAKHDPEVTEDTEKNSAELLMEELKLREAEALESQRRADMALLEAKKIASQYQKEADKCNSGMETCEEAREKAEAALVAQKKLTAMWETRARKKGGE

SEQ ID NO: 82806 - protein, 184 aa, Gossypium hirsutum
  unsure (1)..(184): unsure at all Xaa locations
  Clone ID: GOSHI-09MAY01-C22328_1.pep
LLGYGGGRGGNSSISNLAGRNMWGNGGLNHATNSNSSPIVGSGSGNSGVNSFGSIAPLSDSSPTSGQGGAAFAYNSGNRRYGSGDIVVGSERIGYDRNSAAGVAHVSSQGASNGGYNGAYADIDENGSFYGEXTWLPSPLDLQRSSSFGFGPGNSTSDVRTNSSXGYIGGYGVPNMQSDRGIAA

SEQ ID NO: 82807 - protein, 159 aa, Gossypium hirsutum
  Clone ID: GOSHI-09MAY01-C22298_1.pep
MEGMNDDNMHGMMMHNTSDGGMNMTNHHKMMMHMTFFWGSDAEILFSGWPGTRTGMYVLALIVVFQLAFMVEGISHSRFMKPGSTKHVTAGLVQTLLHALRVGLAYLVMLAIMSFNGGVFLAAVAGHSLGFLLFGSRVFNKPSATVPAAKTSDLPPMSC

SEQ ID NO: 82808 - protein, 65 aa, Gossypium hirsutum
  Clone ID: GOSHI-09MAY01-C22268_1.pep
INSGFHRFYGYFLNGEVLSIHRSSFLHLIGNLYSSHSSALLINFPVIDLSQRDLSYTVTVCTDED

SEQ ID NO: 82809 - protein, 222 aa, Gossypium hirsutum
  unsure (1)..(222): unsure at all Xaa locations
  Clone ID: GOSHI-09MAY01-C23948_1.pep
MTTRPTPPPVHIDLWPILSESKRIINAHSRHFLALSVLFLLPLSFSFSAFPFINQLFSQSSTPTIETHLSFLHTPFQLQKPPTIPINYLLFTLLYTLFIFIFSLFATGSITYSVFHGFYGRPVKLLSAIKSAFTSFFPLVSTCLVTELIISGILLILALIFLGLLQLTQLLGFHVDYTSPYFISLCLVFVITFLFIVLYLQVKWVLXYVVVVLNQAGGLKHY

SEQ ID NO: 82810 - protein, 102 aa, Gossypium hirsutum
  Clone ID: GOSHI-09MAY01-C23978_3.pep
RKISDFFPLQWFSLQCEEVNLPKLKENLENFLNAQIRLLTLKYDQTQQQHHSSQKEPFFFMGFFGSLRSICCSKSSTTLAHSLEQQNEFVQDSPYSQPVKMT

SEQ ID NO: 82811 - protein, 225 aa, Gossypium hirsutum
  unsure (1)..(225): unsure at all Xaa locations
  Clone ID: GOSHI-09MAY01-C23978_2.pep
RFDPASGPCLFEPLVGVGGALRDPXGPFRMPIIDKFKDMGTVVMGKVESGSVCEGDSLLVMPNKAQVKVVAVCCDESKVRCAGPGENLRVRLSGIEEEDILSGFVLSSIVKPIPAVTEFTAQLQILELLENAIFTAGYKAVLHVHSVVEECEIVELLQQIDPKTRKPMKKKVLFVKNGAVVVCRVQVNNSICVEKFSDFPQLGRFTLRTEGKTIAVGKVTDLPVA

SEQ ID NO: 82812 - protein, 196 aa, Gossypium hirsutum
  Clone ID: GOSHI-09MAY01-C23978_1.pep
APGHKSYVPNMISGASQADIGVLVISARKGEFETGYERGGQTREHVQLAKTLGVSKLLVVVNKMDDHTVNWSKERYDEIESKMVPFLRSSGYNVKKDVQFLPISGLVGTNMKTRVDKNICPWWNGPCLFEALDSVEIPVRDPKGPYRMPVIDKFKDMGTVVLGKVESGSLCAGDSLFVLPNKAPVKVLAVYCDEIR

SEQ ID NO: 82813 - protein, 157 aa, Gossypium hirsutum
  Clone ID: LIB3493-028-P1-M1-A10.pep
LFEALDCVRIPVRDPKGPYRMPVIDKFKDMGTVVMGKVESGSICEGDSLLVMPNKAPVKVLAVYCDEDKVRRAGPGENLRVRLSGIEEEDISSGFVLSSVVKPIPAVTEFTAQLQILELLENAIFTAGYKAVLHIHSVVEECEIVELLQQIDPKTKK

SEQ ID NO: 82814 - protein, 83 aa, Gossypium hirsutum
  Clone ID: GOSHI-09MAY01-C23968_1.pep
MTVEKLMDTYEVCISGLRKTQTRRRIASLKRISPANFTKEARNRVPQMVLQRIQSLNKLDVELYEYAQGIFAKQHKQAAEKVV

SEQ ID NO: 82815 - protein, 193 aa, Gossypium hirsutum
  Clone ID: GOSHI-09MAY01-C23938_1.pep
RPRGRPRAGGTEAFPDLGKHCQFSGCHQLDFLPFKCQACHKVFCVEHRSCKSHECPEPEHNSRKVIICEICSTSIEITGKEDQEKMILEKHEKSGNCDPRKKKKPTCPVKRCKETLTFSNRTICKTCRLEVCLKHRFPADHACKQASSSTTPAAAAGGSWNEKFLVAFGLRNGKDCGKSGRPSSSTTPFLKAY

SEQ ID NO: 82816 - protein, 144 aa, Gossypium hirsutum
  Clone ID: LIB3827-002-Q1-N6-D12.pep
ILKQILIGVANILPKQKLVPQKDLAEAAFRDIKKRELTPYNVIAYKDKPRLRTAVEMLRTTAEIEQHLEKVSLPILILHGENDIVTDPAVSKALYEKASSSDKNIIIYKDAGHSLLEGEPDDMINRVFSDIISWLDEHSSNTAG

SEQ ID NO: 82817 - protein, 76 aa, Gossypium hirsutum
  Clone ID: LIB3083-109-Q1-L1-F2.pep
LQVSLPILILHGENDIVTDPAVSIALYEKARSSDMNIIIYKDAGHSLLEGEPYDMINRAFSDIISWLDEHNCNTAG

SEQ ID NO: 82818 - protein, 63 aa, Gossypium hirsutum
  Clone ID: uC-gsflnu33B082f07b1.pep
VLCLTMIKIEMVRCCDVFGHGISISMIYAYCMVGKICVLDLCLCLVIINLVIRLLHTYIYVCT

SEQ ID NO: 82819 - protein, 66 aa, Gossypium hirsutum
  Clone ID: uC-gsflnu33B076f07b1.pep
MAYILLTNALHIITQYASIIYSITEHHHMKIYTWRYYICHANTSCANIYICGCEPHYMAASEPTYW

SEQ ID NO: 82820 - protein, 150 aa, Gossypium hirsutum
  Clone ID: GOSHI-09MAY01-C23828_1.pep
LTSSTERFQKILKEAPVDCQNYLVQVTKHQAAQNCKTWIVGKWITPWEQSWAPSGTHFHQFVVPPILPIRRDCTYGDLAAMRLPPDVEGLGSCEYTMERGVVHACHAGGVVHQLEGWSHHEVGAIDVDRIDLVWEAALKLGLKPVSSVNN

SEQ ID NO: 82821 - protein, 421 aa, Gossypium hirsutum
  unsure (1)..(421): unsure at all Xaa locations
  Clone ID: GOSHI-09MAY01-C23568_1.pep
MSPPSLLGPPELRHPTPPKPETTVATTTTKVPSDPFMDLMLANFNKAKNTPSMGFTENNSATYLATGNPCLDFFFHVVPNSPPDSIREMLGRAWNFDPLMTLKLICNLRGVRGTGKSDKEGFYTAAFWLHDHHPKTLACNLDSFVNFGYFKDLPEILYRMLEGYTVRQVQKHDWLMRKQGKCREGSRCYSKKQKVEKSKPTGAKNPNLEKAKARDLRKEKKISMAKKVIERYSRDPDFRFLFECVSDLFAACLKSDMEFLKSNETRKIGLAAKWCPSIDSSFDKATLLWESISRKIFSRENYPEYEGIDEEHYAXRVRDRLRKDVLVPLRKILELPEVYIGANKWDSIPYNRVASIAMKFYKEKFLKHDKDRFSKYLEDVKAGKSTIASGALLPHEIIAELNKADDEQVEQVAELQWQRMV

SEQ ID NO: 82822 - protein, 202 aa, Gossypium hirsutum
  Clone ID: GOSHI-09MAY01-C123510_1.pep
MAELEYQANTKTNSATTARLKLFGFNVSEDDDVLESRTTKDPSSGSSEPGGFPAPGDRKYECQYCCREFANSQALGGHQNAHKKERQQLKRAQLQATRSAAVSFARNPIISAFAPPPHLLASATPVVVPAAAGPSWVYLPRGGPPPFHVSHGCVIPSAGGGGGGAEGTSVTTKIRTKMRPSMKSATLSMPPSPILPTKHNFF

SEQ ID NO: 82823 - protein, 162 aa, Gossypium hirsutum
  Clone ID: GOSHI-09MAY01-C23488_1.pep
MSFAASPSAIMIKTYKGKLPLSVITVIVCALAFLALLYTQSLTFLSSNYILKSKSCARRGAVVEANDHRMAEENVEILEIDDRFEFDPEECDIGKGKWVFNRSIKPLYTDTSCPYLDRQFSCVKNGRLDFDYHHWEWQPEDCNLPRFHPELALQKLRGKRLL

SEQ ID NO: 82824 - protein, 205 aa, Gossypium hirsutum
  Clone ID: GOSHI-09MAY01-C23408_1.pep
MKLRLKNFESKETLRIQLLSSSSILQLQEAVFPCLPLNPLHVTPSSLRFSLNAKDLLHAPSPLVSLLSLGVASGDLIYFSLNPNAFSPPPQTLFQEPILMPESSANRENPVREPMLIEPQVSQQANKGRLLEHYLLRKFLGEELGDIRSIHNLMAMEIHVILLDSGFVLFDTVSGLKIDRFRLPDESSSPVSICYSLPQLLIANH

SEQ ID NO: 82825 - protein, 74 aa, Gossypium hirsutum
  Clone ID: GOSHI-09MAY01-C23768_1.pep
WGPHKKIFFFQTRGIKIGPLKRAPPFFFFFFFFVNKTFFCCLNNVFLLFLFFLHFFLVLVYAFFFSLLFFFFSE

SEQ ID NO: 82826 - protein, 160 aa, Gossypium hirsutum
  Clone ID: GOSHI-09MAY01-C23718_1.pep
NSRCRNYREQGQMLTLVEYMMLLYRALLPTPVWYRFFLNKDYGSLFSSLMTGLYLTFKLTSVVEKVQSFFAALKALSRKEVHYGAYATSEQVNAAGDLCAICQEKMHAPILLRCKHIFCEDCVSEWFERERTCPLCRALVKPADLRSYGDGSTSLFFQIF

SEQ ID NO: 82827 - protein, 160 aa, Gossypium hirsutum
  Clone ID: GOSHI-09MAY01-C23618_1.pep
MAAEDNLDLSTLQSQLSETHELWKQEIENRRGQVDVLQAKIMEVKASIQGSEEESKKELDVLWRRVETTATLLTYLKSKARVMAVPDLAHISCGIKLLDGVGLVDKEGTPLSSWSRSVDLSSFDCLDDETWIGISRQQGSLDEKDGAYIGELIKVVQMVT

SEQ ID NO: 82828 - protein, 87 aa, Gossypium hirsutum
  unsure (1)..(87): unsure at all Xaa locations
  Clone ID: LIB3146-047-Q1-K1-H6.pep
MAAEDNLDLSTLQSQLSETHELWKQEIENRRGQVDVLQAKIMEVKASIQGSEEESKKELDVLWRRVETTATLLTYLKSKARVMAXPD

SEQ ID NO: 82829 - protein, 186 aa, Gossypium hirsutum
  unsure (1)..(186): unsure at all Xaa locations
  Clone ID: GOSHI-09MAY01-C23148_1.pep
VRENTHLYREVVQKIDGRLGPNYAMDAAWCSTIERKAEQRKEKLESELNAYRTNLIKESIRMGYNDFGDFYYAHGALGDAFKSYVRTRDYCTTSKHIIQMCLNAILVSIEMVQFSNVTSYVSKAEQTPEALDPPPVAKLCCAAGLAHLEAKKYKLAARKFLEVGPXLVNSYSEVIAPQDVATYGGL

SEQ ID NO: 82830 - protein, 97 aa, Gossypium hirsutum
  Clone ID: GOSHI-09MAY01-C23398_2.pep
SNFYLCIISCLAFSFKSFDRCGSSYSIVSPNRSSRHFALASANTASLHLRSVSWITWIIPRRSDCIGHCIFIWLRWQRICLEAFVFPMLVAFSTFFV

SEQ ID NO: 82831 - protein, 213 aa, Gossypium hirsutum
  Clone ID: GOSHI-09MAY01-C23398_1.pep
ILKSDLDHLRNTMSAMEAVLRGAGERSATSNFTVRLTNPEDEEQPVTDYSFQRWLKVKKNLEIMPIDSARTAFPEVRRSRMKMMEKMGYGMAKPEHQSMSNGSKKRFMNFVYDDFLRLEAERKKKQKDIRNWRQKRAKFYDDPTERGINNNGKITNWRCKWQRVVVMLLSVPKATNVGKTKASQQVLCHRNQMKMQWPIQSDPLVIIHCDPRN

SEQ ID NO: 82832 - protein, 297 aa, Gossypium hirsutum
  Clone ID: GOSHI-09MAY01-C23348_1.pep
VLLISFKVEKLVITAIPNVVETWTKGFGFKLVEEEERKALNKINLMVFPGTVLLSKSLYQSQKTGGQSETGNTSCLQQDNSIEHLRREELTNIGIQAVGDQGANSLQHTIYAKETCAKIVTEFVGDKTLQDSEINGTKEIANASGEELCDNLALRVIEETTRLVICTKGKPADESVQCADCNFLSEEVRIKLGERPKVRSCQESPAGETSSGSQTDGCCGDNEADTVMKVESVQQSDPVCVDNHSAKIDEWVLVTPEQLLEVSCEEQEMALASSSVKESCICNGTHVSVRETTAERL

SEQ ID NO: 82833 - protein, 307 aa, Gossypium hirsutum
  Clone ID: GOSHI-09MAY01-C23298_1.pep
MFKPASTAIFFFFFSCHGGPIKTIVVLVMENRSFDHMLGWMKKINPEINGVDGTEWNPLSTTDPNSKKLFFQNQAQFVDPDPGHSFQAIREQIFGSNDTSTNPPPMNGFAQQAYSMDPSTTMSQNVMNGFDPEMVAVYKSLVSEFAVFDRWFASVPSSTQPNRLYVHSATSAGATSNIPALLVKGYPQRTIFENLDDAGISWGIYYQNIPATLFYKNLRKLKYLFRFRPYGVTFKKHAQEGKLPGYVVVEQRYMDTKLEPANDDHPSHDVYQGQMFVKEVYETLRASPQWNQTLLIITYDEHGGFYD

SEQ ID NO: 82834 - protein, 97 aa, Gossypium hirsutum
  unsure (1)..(97): unsure at all Xaa locations
  Clone ID: LIB3083-100-Q1-L1-D4.pep
SNDXSAIPPPMNGFAQQAYSMDLSTTMSQNVMNGFDPEMVAVYKSLVSEFAVFDRWFASVPSSTQPNRLYVHSATSAGATSNIPALLVKGYPQRTIF

SEQ ID NO: 82835 - protein, 56 aa, Gossypium hirsutum
  Clone ID: GOSHI-09MAY01-C23278_1.pep
SSFPLLDYSFGLQCAVFVKNREIVCTIADEAPRRKRGTRINSMYFALPWAQIQKYI

SEQ ID NO: 82836 - protein, 148 aa, Gossypium hirsutum
  Clone ID: GOSHI-09MAY01-C23228_1.pep
FEKILELSYAMAEEGFWTEQDLKFTAAWLQDLVAVGYQQPRLMTLELDRPRANIGHGDRKEFIPQKLPSVHLAVEETGVVSSEIGNLIRWRKNFGNIVLIMFCNGPVERTALEWRLLYGRIFKTVVIFSAQKNSDLAIEEGQLDQIYK

SEQ ID NO: 82837 - protein, 77 aa, Gossypium hirsutum
  Clone ID: GOSHI-09MAY01-C98528_1.pep
ICFNELGNPDAISKVQGREEINYLDGLVNQENLQLLNLIYDATPSDYVSMIITDYGMIPPTSVPVIVREYRRDHLWS

SEQ ID NO: 82838 - protein, 167 aa, Gossypium hirsutum
  unsure (1)..(167): unsure at all Xaa locations
  Clone ID: GOSHI-09MAY01-C98728_1.pep
MEQNVPVMTKRXWSIGKAVLFMMRKGLLSKRKLMVDLNVMLKRGKIAGAKAIGNLMFHHHSNRQVSSSSTAEATATAVQEYEFSCSNTPNYIFPFNLAAKKKNSYHHHFFACTHAPPTLDDDNVATMNALKAALEMINKNDGNNSVGAAPPMLPGFGQTPLARQLRI

SEQ ID NO: 82839 - protein, 34 aa, Gossypium hirsutum
  Clone ID: GOSHI-09MAY01-C98038_1.pep
YSYISYIYRYINYLTFVMILLVYFLFRNENCFPS

SEQ ID NO: 82840 - protein, 246 aa, Gossypium hirsutum
  Clone ID: GOSHI-09MAY01-C99528_1.pep
GRTRGKKLEGVGGVAWTEEEDQLLKKCIERYGEGKWHRVPLLAGLNRCRKSCRLRWLNYLRPNIKRGTFAEDEVQLIIKLHKLLGNKWSLIAGRLPGRTANDVKNFWNCHLSKKLNNAQETEEEYQNGMKMETLKPQPRCIAVTGSIKPRTQDHFAPKNQPPIQESPMPPPFNFVEVDKQQGQELVKEEEALREEAAGGVFFGDLATEDHQFGQLDEVNVLSSTEGCSKWDWDDLMLDMDLWADSL

SEQ ID NO: 82841 - protein, 112 aa, Gossypium hirsutum
  Clone ID: GOSHI-09MAY01-C99728_1.pep
AHCFENRNPRVSSPLLRCNQAAKPQPSRRTTASCLRTPQQRHAHASIRQYSLVHAPCTRTPLLGRRLPLASSKSELRGKSMAKIGHTSKPGAPVTVHCSGLVFFEGENVKCC

SEQ ID NO: 82842 - protein, 170 aa, Gossypium hirsutum
  Clone ID: GOSHI-09MAY01-C99088_1.pep
GPSAGKAAIGGPFSLVNHDGKRVTEKDFKGKWTLVYFGFTHCPDICPDELLKLAAAIDKIKEKAGIDIVPVFISVDPERDTVEQVREYVKEFHPKLVGLTGTPDEIKKVARAYRVYYMKPAEEDSDYLVDHSIVMYLMDPKMEFVKFFGKNNDVNSLTAGVIKEISPQKK

SEQ ID NO: 82843 - protein, 55 aa, Gossypium hirsutum
  Clone ID: GOSHI-09MAY01-C94108_1.pep
GALAGQYEQKIQFGTNLKLPRIFSKFQNSYYIPGPTKIYSFHEDIYNLKDSQKTS

SEQ ID NO: 82844 - protein, 111 aa, Gossypium hirsutum
  Clone ID: GOSHI-09MAY01-C95448_1.pep
IFQTNSKTLNSKFTSHDNDGGDASLPDSAMLLAKYPAAFVNYPASLSQVHPQALQTLVQSTERNFNGVPVYSLKEISSTGVDYLVYGGHHCMKVAQFTIDMKQQHEMFPQM

SEQ ID NO: 82845 - protein, 148 aa, Gossypium hirsutum
  unsure (1)..(148): unsure at all Xaa locations
  Clone ID: GOSHI-09MAY01-C95418_1.pep
TFLVIADLKTHEKHCGKDKWLCSCGTTFSRKDKLFGHITLFQGHTPAIPSDEIKVAPAGTSDGATNKVGSVNFNLSSYVSSESEVQSSSMDIKGGIDDAVGYFSPLSFDTCNFGGFHEFPRPPFDDSXSSFAFLLSRSCNYSQKSGEE

SEQ ID NO: 82846 - protein, 113 aa, Gossypium hirsutum
  unsure (1)..(113): unsure at all Xaa locations
  Clone ID: LIB3829-011-Q6-N6-H2.pep
FGHIXLFQGHTPAIPSDEIKAAPAGTSDGATNKVGSVNFNLSYVSSESEVQSSSMDIKGGIDDAVGYFSPLSFDTCNFGGFHEFPRPPFDDSESSFAFLLSRSCNYSQKSGEE

SEQ ID NO: 82847 - protein, 138 aa, Gossypium hirsutum
  Clone ID: GOSHI-09MAY01-C95738_1.pep
TRGAGGDAIFSAQRSSVPIDSCYLGSQNSAFLQQASYITGGVHHKPQNLDGLFQYLMTIFATDLHSRSFIHLPKPVGVDFRASCFCHKNTIDMGYICSVCLSIFCKHHKKCSTCGSVFGQAQSEAASASDKKRKTPET

SEQ ID NO: 82848 - protein, 107 aa, Gossypium hirsutum
  Clone ID: LIB3829-016-Q1-N6-G7.pep
RLLMYAKVLSIKQLKVQLVLKITKNSVTSRTFLRQKCWLSGISFINFSSCETLNILLVFWDSFNHPLILVCKVDFLLASAGLYLVKLNLRRLQHLTKRERLLRHKVN

SEQ ID NO: 82849 - protein, 74 aa, Gossypium hirsutum
  unsure (1)..(74): unsure at all Xaa locations
  Clone ID: GOSHI-09MAY01-C95618_2.pep
LWYGCWFWRYKVKQAPIXWEDAAYLTRNSLRVPLDAWLNIDESTKEDLLQRRLWIKSNLDSYLSEMRKEHKRRR

SEQ ID NO: 82850 - protein, 100 aa, Gossypium hirsutum
  unsure (1)..(100): unsure at all Xaa locations
  Clone ID: AI055028.1.pep
GAEKPSIWELVGVRFILLPYTIGKLLLWYGCWFWRYKVKQAPYSWEDAAYLTRNSLRVPLDAWLNIDESTKEDLLQXRLWIKSNLDSYLSEMRKEHKRRR

SEQ ID NO: 82851 - protein, 266 aa, Gossypium hirsutum
  unsure (1)..(266): unsure at all Xaa locations
  Clone ID: GOSHI-09MAY01-C95608_1.pep
MRRASALILNTFEQLETPFISKLASIFSKIYTIGPLHCLSNVDDPTALASTKVFFGKXKGCLTWLDSHPSKSVVFVSFGSVVTFTLDQMLEFWHGLVNSGKPFLWVIRSNAIIGEDDPRKILEDLKDNTKGKGSIVSWAPQEEVLAHPAVGAFLTHSGWNSTLESIYAGVPMICWPLFVDQYVNSRCVSHVWRVGFDMKDSCHRSIVEKMVRDVIEMKNEEIMKSMEEISKQAQESVKESGPSYCNLDKMIQDIMSVNLENINRRD

SEQ ID NO: 82852 - protein, 103 aa, Gossypium hirsutum
  Clone ID: LIB3829-014-Q6-N6-D3.pep
ESIYAGVPMICWPLFVDQYVNSRCVSYVWRVGFDMKDSCHRSIIEKMVRDVIEMKNEEIMKSMEEISKQAQESVKESGPSYCNLDKMIQDIMSVNLENINRRD

SEQ ID NO: 82853 - protein, 83 aa, Gossypium hirsutum
  Clone ID: LIB3829-019-Q6-K6-A7.pep
FCLNPKCILFSLPMKCCSMIWLLQIGPSFPGHQPVIFNPQVAPIQSPQAYFHPNGPQYGQQMVLGQRQVVYCQPEMQYKGRDY

SEQ ID NO: 82854 - protein, 81 aa, Gossypium hirsutum
  Clone ID: LIB3825-015-Q1-N6-C8.pep
GSFYYQTQMSPLPHMHMPVSFGIGPSFPGHQPVIFNPQVAPIQSPQAYFHPNGPQYGQQMVLGQRQVVYCQPEMQYKGRDY

SEQ ID NO: 82855 - protein, 66 aa, Gossypium hirsutum
  Clone ID: GOSHI-09MAY01-C96058_1.pep
SHGFQLIFQDEEMDSSALNIWIVLFCSSSPICRSRDDSCIVFVSSDNLLCSNGFMPDQQFPIRLRP

SEQ ID NO: 82856 - protein, 133 aa, Gossypium hirsutum
  Clone ID: GOSHI-09MAY01-C96388_1.pep
TSRAFPTMTAISSGWNMDSPIYLVQAVQAMECGTVLRLSREKGRRRPATHPWLYQYHFNYVSCMLCKNVIFFHVYCIFLFYTTDPGIRVLTEKSLAWNFITMILHLWFFVIMRCYFINYVRYFCNFNKFKANI

SEQ ID NO: 82857 - protein, 112 aa, Gossypium hirsutum
  unsure (1)..(112): unsure at all Xaa locations
  Clone ID: AI729190.1.pep
GERRCLPHATIMIHQPSGGYSGQAKDLTIHTKQIVRVWDALNXLYSKHTGQSVDVIQKNMDRDYFMTPEEAKEFGLIDEVIDRRPMALVTDAVANETKDNQDDKDSKDKGSN

SEQ ID NO: 82858 - protein, 89 aa, Gossypium hirsutum
  Clone ID: LIB3825-008-Q1-N6-A2.pep
SLKRNKENQNNNTTTRILLAFMIESIFRIETNECFNTVEGILIFSPKITPFHGKKQIKPIHLMNIHLHLSANDSQTKTFESKTLYMHLI

SEQ ID NO: 82859 - protein, 67 aa, Gossypium hirsutum
  Clone ID: GOSHI-09MAY01-C97398_1.pep
KDPYGSSLSTVRQKAYVEALRLDTMFTPQVVVQGRAQCVGNDEDTLLSIIAGAPRFPAPTFQGTMDQ

SEQ ID NO: 82860 - protein, 208 aa, Gossypium hirsutum
  Clone ID: GOSHI-09MAY01-C90878_1.pep
MIKSILLRTYSAPILVEVKDIRRSGLSPLSKTRFASTIRCSSSNDAYIPKLEPFSRTKFERAVKDPPLIEKSENDLADYCSTLEGDESYSCWRAYFELKDLEKEVAKEEVEQLIIQAGGVKSLIGFLHGIASIHNNGNNKGISSKAKPLQTEHEGKRFSHIPDGLPKSAEEIEEEERARMLDSPFTRMLRTKGTLPAWYSPAPDHETN

SEQ ID NO: 82861 - protein, 134 aa, Gossypium hirsutum
  unsure (1)..(134): unsure at all Xaa locations
  Clone ID: GOSHI-09MAY01-C90638_1.pep
LLKQLSVASNQGEXQFVTEIAAISAVLHPNLVKLYGCCIGGNRRLLVYEYLVNKSLDHALWGQKDLRLDWPTRFIIGLLTAQGLAFLHEESRPKIVHRDVKASNXLLDAELRPKISDFGLAKLYDDKKTHITSR

SEQ ID NO: 82862 - protein, 216 aa, Gossypium hirsutum
  unsure (1)..(216): unsure at all Xaa locations
  Clone ID: LIB3543-063-Q6-K6-E11.pep
TGVSKGXGGALAVELSKRGHTVIGCSRAQEKLNSLQSELSSPDRHLLLNVDVRSDNSVKELARVMMEKKFVPDIIVNNAGTINKNNRIWEVPVEEFDTVIDTNVKGIANVLRHFIPLMLPKSRGIIVNMSSGWGRSGAALVAPYCASKWAVEGLSRAVAKEMPDGFAVVALSPGVINTEMLQSCFGNSASGYQTPDTWSLKAATMILNLTAADNGA

SEQ ID NO: 82863 - protein, 118 aa, Gossypium hirsutum
  unsure (1)..(118): unsure at all Xaa locations
  Clone ID: LIB3543-034-Q1-K1-C5.pep
MMEKKFVPDIIAEDAYVFLVNWFERFPQYKHRDFYIAGESYAXVGNAVTDDYHDFIGTFEYWWTQGLISNSSYRSLRVACDLESSTHPSLQCMNALRAAQIEQGNIDPYSIFHSTLQR

SEQ ID NO: 82864 - protein, 162 aa, Gossypium hirsutum
  Clone ID: GOSHI-09MAY01-C90118_1.pep
EKSGRSGGGGSLFCNWELFVANLMDANNWRSTPPSGEPTMDTGDWRTQLLPVSRQRIVNKVMDTLKRHLPFSGQDGLNELRKIAVRFEEKIFTAATSQSDYLKRISLKMLTMENRSQSTVPNTGDNSIPPDPGSQGMQNQVHSQGQPIPISLQSNQSQAQLL

SEQ ID NO: 82865 - protein, 158 aa, Gossypium hirsutum
  unsure (1)..(158): unsure at all Xaa locations
  Clone ID: GOSHI-09MAY01-C90078_1.pep
MEPRVGNKYKLGRKIGSGSFGEIYLGTNIQTNEEVAIKLENVKTKHPQXLMYESKVVKILSGRNLGIPNVRWFGVEGDYNVLVMDLLGPSLEDLFNFCSRKLSLKTVLMLADQMINRVEFAHSKSFLHRDIKPDNFLMGLGXRANQVYIIDFGLAKKY

SEQ ID NO: 82866 - protein, 307 aa, Gossypium hirsutum
  unsure (1)..(307): unsure at all Xaa locations
  Clone ID: GOSHI-09MAY01-C90068_1.pep
HEWIDLIFGYKQRGKEAISANNMFFYITYEGTVDIDKIYDPVQQRATQDQIAYFGQTPSQLLTVPHMKKIPLSEVLHLQTIFRNPREVKSYAVPNPDRCNLPAAAIHASSDSVIIVDTDAPAAHIAQHKWQPNTPDGQGAPFLFQHGKATTSSAGGALRRMFRGPAAAGSGSDDRHFPQALAFASSGIRNSSIVSITCDKEIITGGHADNSIKLLSSDGAKTIEMAFGHSAPVTCLALSPDSNYLVTGSRDSTVILWRIHRAFTSCPSSTSEPTAGTGTPTSTSGGXLANSLADKSRKHRIEGPIYV

SEQ ID NO: 82867 - protein, 148 aa, Gossypium hirsutum
  Clone ID: GOSHI-09MAY01-C90298_1.pep
QRPIGIRPRGAPSGANSGVGFSIPVDTVSGIVDQLVKFGKVTRPILGIKFAPDQSVERGGVSGVLVLDAPANGPAGKAGLRPTKRDAYGRLVLGDIITSVNGKKVTNGSDLYRILDQCKVGDKVTVEVLRGDHKEKIPVILEPTPDET

SEQ ID NO: 82868 - protein, 63 aa, Gossypium hirsutum
  Clone ID: GOSHI-09MAY01-C91928_1.pep
PPRPILFYFIYLYFLDSFEFRLHGIVIEDHNIGFDELDNPMICHGRIVVSFCFINCHLYLFEF

SEQ ID NO: 82869 - protein, 66 aa, Gossypium hirsutum
  Clone ID: GOSHI-09MAY01-C91608_1.pep
MTVFTLENYHVETYNNISNWHVPILAMTADVIQATHEECLRRGMDGYVSKPFEAEQLYREVSRFFH

SEQ ID NO: 82870 - protein, 91 aa, Gossypium hirsutum
  Clone ID: GOSHI-09MAY01-C91388_1.pep
ISKLKKPSIFSCLISFNLIEVDIKHYLRLWLISSTKFLHNVQLAPILKYLLTHSCIIMNQPKKTLIICNQQEHQICFHYESLLKEFESNSP

SEQ ID NO: 82871 - protein, 181 aa, Gossypium hirsutum
  unsure (1)..(181): unsure at all Xaa locations
  Clone ID: GOSHI-09MAY01-C92918_1.pep
MPYLDLAGFGSAVLIQTFDLQYDSISALVERWHPKTYTFHLPCGKCNVTLEDVALQLGLPIDGSAVKGVSTIAELTTLCYGLLEVSPNNAESNFTSLKFSWLKINFEHLSINVTEHEVMCTAGAYIMHIIRGVLMPDGNNKVHLMYLPLLADLQNVRSYSXGSAVLAILYREFFRRQSLML

SEQ ID NO: 82872 - protein, 107 aa, Gossypium hirsutum
  Clone ID: GOSHI-09MAY01-C92668_1.pep
KWCGIMQAHIPPPPGYFVQLENLDGLFLKKRTRMRRWLCYSCQVEENYQSRENNHLKCNSDGICYFDLNFFFVFLIYCLESLVKCELCSYLAWSESDHLNSLYFYNF

SEQ ID NO: 82873 - protein, 104 aa, Gossypium hirsutum
  unsure (1)..(104): unsure at all Xaa locations
  Clone ID: GOSHI-09MAY01-C92068_1.pep
VIMGDTGSSALGGALAAMAACTGMFFPLFIASGLFVLEASSVVMQVVYFKATKQYHGSGSRLFKXPLHHHLELCGLQEPMIVAGAXAVSSVLALCAAYIGLKSA

SEQ ID NO: 82874 - protein, 232 aa, Gossypium hirsutum
  Clone ID: GOSHI-09MAY01-C92298_1.pep
MNDGDVSKQIQQMVRFIRQEAEEKANEISVSAEEEFNIEKLQIVEAERRKIKQEYERKAKQVEIRKKIEYSMQLNASRIKVLQGQEELVNSIKESARKELQRLGTDKRGYKNLVKALVVQSLVRLREPSVLLRCREVDRKLVETIIDEAKREYAEKFNVPPPKIVIDSVYLPPPPPANGDEFAHQPYCSGGVVLASEDGKIVLENTLDARLEVAFKQKLPEIRRRLVGQLGA

SEQ ID NO: 82875 - protein, 91 aa, Gossypium hirsutum
  Clone ID: GOSHI-09MAY01-C92248_1.pep
SNSKLFPLICEMIIILQWIGRYIHFTESNKADQLLLENQNLLLLWIPAKVNEWSSVASHIYIYILWIIIKNLISSYAFLEVNESPLYIIHG

SEQ ID NO: 82876 - protein, 166 aa, Gossypium hirsutum
  Clone ID: GOSHI-09MAY01-C93988_1.pep
RPAEPSGNSVSAINLVRLASMVSGSKSDHYRQNGEHLLAVFESRLKEMAMAVPLMCCAADMLSIPSRKQVVLVGHKPSEEFENMLAAAHASYDPNKTVIHIDPTNTAEMEFWETNNDKVALMARNNFAADKVVALVCQNFSCRPPVSSPKSLQHMLSNKSASSSVV

SEQ ID NO: 82877 - protein, 39 aa, Gossypium hirsutum
  Clone ID: GOSHI-09MAY01-C93908_1.pep
GKLIIIPLRRASLLKESIFGLKIADRKELHTMYDKHYCL

SEQ ID NO: 82878 - protein, 73 aa, Gossypium hirsutum
  Clone ID: GOSHI-09MAY01-C93928_1.pep
NSSIQVKNNLFYFQTIYLGKLLATITDSKTIDTNFQSFELLERVHSSKTSFFAADFASMVISRLKPCSPLVVY

SEQ ID NO: 82879 - protein, 88 aa, Gossypium hirsutum
  Clone ID: LIB3825-011-Q1-N6-E2.pep
ANGQTQWLIPLGSGKRRELAARAPLVVATLQAICCLGETLFEKNLPQFFPLISNLVSTEHGSTEVQVALSDMLSSSVGPVLLRSCLSW

SEQ ID NO: 82880 - protein, 64 aa, Gossypium hirsutum
  Clone ID: LIB3825-031-Q6-K6-G9.pep
KKKKKKQKKKKKKKKKKKKKRGKKKKKKKKRKKKKEKKKKKKKGHKKKNKMKRKKKTKKNRKNF

SEQ ID NO: 82881 - protein, 132 aa, Gossypium hirsutum
  Clone ID: GOSHI-09MAY01-C93528_1.pep
MTDEPSARVSISRIVMLAEALFEVLHRQPVSLSLSMVSPPAPESVVDSFPLRSHNRKANVAEDGDAVEQCHICLGEYEEGDQIRILPCQHEFHMSCVDKWLKEIHGVCPLCRGDVRHGGGESSVSNSEIPSL

SEQ ID NO: 82882 - protein, 102 aa, Gossypium hirsutum
  Clone ID: GOSHI-09MAY01-C93748_1.pep
TKKKKKKPWLSQQERDELDRRAREGKTVVPGGTGGKSVEAQENLAGGRSRGGQARRDQIGREGYQEMGRKGGLSTVEKSGGERAAEEGIPINEDKFATKQRG

SEQ ID NO: 82883 - protein, 83 aa, Gossypium hirsutum
  Clone ID: GOSHI-09MAY01-C93198_1.pep
NVASALHDNCRAVLVGERTFGKGLIQSVFELRDGSGVVVTVGQYVTPNHLDINGNGIEPDFRNFPGWSDVSQHLLKCNLHQQG

SEQ ID NO: 82884 - protein, 169 aa, Gossypium hirsutum
  Clone ID: GOSHI-09MAY01-C93048_1.pep
MDQTFNKLPTLPTNNVDPGLQQISKDTDHPEECISNIVPFLGHSKFVAEPVSVLKLEIQAMDNKVKEAIDKATKLMQDHSTQKMTASCLETCLDSYKSILDSDKRVLDALSLHDVYQVSMELSSNIENVQTCEDAFLEANIKSPNIQMDSAIRKMISNTLAIGVDKVHF

SEQ ID NO: 82885 - protein, 145 aa, Gossypium hirsutum
  Clone ID: GOSHI-09MAY01-C93028_1.pep
MADSEDIPESTVHNILEQDTLKWVFVGGKGGVGKTTCSSIISMLLARVRPSVLIISTDPAHNLSDAFQQRFTKTPTLVYGFKNLYAMEVDPSVDNDEFGTEGMDSLFSDLANAIPGIDEAMSFGEMLKLVQCENRNFVSVLTPDH

SEQ ID NO: 82886 - protein, 110 aa, Gossypium hirsutum
  Clone ID: GOSHI-09MAY01-C93298_1.pep
SEKVELVRTARRIRNEELVVVVGNHQVEGLVEVALKGVLAGLERVMKAADCVRLKALKGVLDVLNPSQSLGFLAGICMLQIQIRKWGPNRDNPKGSNPLILGELPPNVLF

SEQ ID NO: 82887 - protein, 157 aa, Gossypium hirsutum
  Clone ID: GOSHI-09MAY01-C88528_1.pep
MVMLVRKVAMAVGVKRIKRRGKKLMLNEGGEQHPGDPVPASIGSHFKVQGPHGSVPMPSPANHSPPRQHPMYEYPTYYHAPPVYLPSYNMAYPTSSYTASYYPSPPPYSYAYMHPGHTTERQRWDMDMYSSYPWYSSQKKKTFEMFSEENPKACSIM

SEQ ID NO: 82888 - protein, 81 aa, Gossypium hirsutum
  unsure (1)..(81): unsure at all Xaa locations
  Clone ID: LIB3825-002-Q1-N6-E8.pep
DQQPKPRFPSPRQQPXPLGPEDDFSASRSPPSFDFNKAEGGLRRISQVRGVLVLGYRSWRTEARVAAETLERTEALEGLGC

SEQ ID NO: 82889 - protein, 110 aa, Gossypium hirsutum
  unsure (1)..(110): unsure at all Xaa locations
  Clone ID: LIB3825-002-Q1-K6-E8.pep
TNQTPNPAAVGEIKVKKELKSLRRTLDQHPSHRFPSPRQQPAPLGPEDDFSASRSPPRGGGNIFFLGDGXXPRXGGGGXXXTAPAXGGAXGXXNXGAXGGNKRSTXXRXR

SEQ ID NO: 82890 - protein, 71 aa, Gossypium hirsutum
  Clone ID: GOSHI-09MAY01-C88788_1.pep
PTLSPTRPPTRPDQPSQSVEEIMRIIQEAKTTTAEGAKVGEQAAAGSSDPDDVEADLESEIDVSGDFEAPM

SEQ ID NO: 82891 - protein, 80 aa, Gossypium hirsutum
  Clone ID: GOSHI-09MAY01-C88748_1.pep
TKISPPLSLQITHPTQETHHHKRPVPFYHLGFLMMTLTSLCSPALETGSSTTTLILICSCSEKENFAFQPLENQLHNGCE

SEQ ID NO: 82892 - protein, 228 aa, Gossypium hirsutum
  Clone ID: GOSHI-09MAY01-C88618_1.pep
GDQERSEIIDADDDPTASESLVDGQIGMTSSLTMHVKPGNRLPLPDDPRTASGVKKILNSHDLYASKDSPIRTVSRSETLNVNCKLTSDPPAPLSTKMYYSQRNSRLRLALSHQYFITSTKELCSEMANRQVSKQSTMMLRDSSQGVCPLEQADNLLTKKQESSLQKPDQVLAQISELCSSKSEGCLPSNDFSNPHPVDIIPRPQADSVGLTRSKYVPEHHAFAGNSV

SEQ ID NO: 82893 - protein, 105 aa, Gossypium hirsutum
  Clone ID: GOSHI-09MAY01-C88278_1.pep
MAAQPRRGGISLPERSSAPKPHSNILARITSSPIVSRGKQAASDAAFVSKKLLRSTGKAAWIAGTTFLILFVPLIIEMDREQQFNELELQQASLLGAPPTAPARS

SEQ ID NO: 82894 - protein, 115 aa, Gossypium hirsutum
  Clone ID: uC-gsflnu33B075c06b1.pep
MPTEETMGPPLGGQPRRGGISLPERSSAPKPHSNILARITPYPIVTRGKQAVSDAAFVSKKLLRSTGKVAWIAGTTFLILFVPLIIEMDREQHFNELELQQASFLGAPPTAPARS

SEQ ID NO: 82895 - protein, 333 aa, Gossypium hirsutum
  unsure (1)..(333): unsure at all Xaa locations
  Clone ID: GOSHI-09MAY01-C89908_1.pep
PASAPRPATRPPTRPGDHKTATDTHAFLLKWFGLYPEFVSNPFYIAGESYAGIYVPTLSSEVVKGIKVGAKPTINFKGYMVGNGVCDPVFDGNALVPFTHGMALISDDIFQGVESSCGKNYSNPSKICDENIEKVYKAIPVRPIYDILEPGYHDPTSQLSSKGNKSLPVSFQQLGATSKPLPVRTRIFGRAWPFRAPVKDGIVPLWPELAQTNSRDVPCFNDEVATLWLNDAKVRQAIHAQPENVSGTWELCTDRISYYHDAGXMILYHKXLTLQGYRALIYSGDHDMCVPYTGTQAWTRSLGYKTIIPWRSWMSNGQVSGYXAGYDHDITFL

SEQ ID NO: 82896 - protein, 213 aa, Gossypium hirsutum
  Clone ID: LIB3543-051-Q6-K6-D8.pep
PASAPRPPTRPPTRPRTRGRERSRQMLSHGISDIPVEATFTNIEQFLEPLELCYRSLCGGGDQPIADGSLLDFLRQVSTFGLSLVRLDIRQESDRHTDVIDAITKYLEIGSYREWSEEQKQEWLLSELSGKRPLFGLDLPKTEEIADVLDTFHVIAELPADSFGAYIISMATTPSDVLAVELLQRECHVKQPLRVVPLFEKLADLEAAPAALA

SEQ ID NO: 82897 - protein, 187 aa, Gossypium hirsutum
  Clone ID: AI725492.1.pep
ALKNIGINERVPYNAPLIQFSSWMGGDRDGNPRVTPEVTRDVCLLAKLMAANLYYSQIEDLMFELSMWRCSDELRVRAEGLHKSSRRDAKHYIEFWKQVPPNEPYRVILGDVRDKLYQTRERSRQMLSHGISDIPVEATFTNIEQFLEPLELCYRSLCSCGDQPIADGSLLDFLRQVSTFGLSLVRL

SEQ ID NO: 82898 - protein, 160 aa, Gossypium hirsutum
  Clone ID: GOSHI-09MAY01-C89598_1.pep
MASSVFSLASATPSASLSSHDIEKGKLNLRNTSLCFKKEKNNPFMKTKSFGRISMVVASNVSRFEGITMAPPDPILGVSEAFKADNHELKLNLGVGAYRTEELQPYVLDVVKKADKLLLEKGENREYLPIEGLAAFNKVTADLLFGADNPVIKQQRVATV

SEQ ID NO: 82899 - protein, 190 aa, Gossypium hirsutum
  Clone ID: GOSHI-09MAY01-C89438_1.pep
KRIHAEIEELKMLGDLKAAVDNMMVAQMQCSIVELSRQKAYERKTLKEQTVMQNSGSCSVKNRVVADNGNGFNSPMSKPDSASPSSARFSWIKRCRELIFKNASDMAQMKPEERSLISDREDVCLTSAGKLVLSHECDGQKYKQYGRKPLGFDGEPKVTVEVPSEDEVIKGIHHLESGLEKKQCGKVFSI

SEQ ID NO: 82900 - protein, 334 aa, Gossypium hirsutum
  unsure (1)..(334): unsure at all Xaa locations
  Clone ID: GOSHI-09MAY01-C89708_1.pep
AQGNLGNSPVYGDMDPQRFSGLSRGTLNTKEGHQXVNDGYIGSPMQSTSSKQMSMPPIRQSSSQQDPLQSPQVQQNNRKRKGPSSGPANXTGTGNTVGPSPNSQPSTPSTHTAGGGAALVGNMQHGSSMAKNLMMYGSDGTGGIASSTNQLDDMEHFGDVGSLDDNVESFLSHDEGDGGNLFGTLKRNPSEHATETSKGFGFNEVGSIRKSNGKVTCCHFSSDGKLLASAGHDKKXAVLWNMETLETECTPEEHTHIITDIRFRPNSTQLATSSFDTTVRVWDAAQPSYCMWKYTGHTAQVMSLXFHPKKNDLFCSCDGNSEIRFWNINQYSCT

SEQ ID NO: 82901 - protein, 71 aa, Gossypium hirsutum
  Clone ID: LIB3825-021-Q1-N6-B8.pep
HYFQKDNKQTSYHYKKDLGFYFVETLMNTVHIPCTYINCLQPSYSIWKYTGHTAQVMSLDFHPKKNELFCS

SEQ ID NO: 82902 - protein, 327 aa, Gossypium hirsutum
  unsure (1)..(327): unsure at all Xaa locations
  Clone ID: GOSHI-09MAY01-C89658_1.pep
TINHRKARMVAKGCSXVPGCDFKEMFSPVVKPPTIRVILSVAVTKGWPLRQVDVNNAFLNGDLTDDVFIQQPPGFEQHGSNGEKLVCHLTKALYGLRQAPRAWFDKLKQFLVSTGFRLSKSAASLFVQSSSHYTLYVLVYVDDIVITGSSSDEIDYFVQQLHNKFALKDMGDLHYFLGIEVSXSSSGGLHLCQRKYIRELLERSSLSNAKSVHTPMVSSSLLSKDEGEYLADPTEYRSIVGALQYIILTRPDIAYVVNRVCQFMHAPTNLHMVALKRILRYLRGPLSHGLFFQLSEWLSLVGYADANXGLDFDDRRSTTGYCVYFGH

SEQ ID NO: 82903 - protein, 194 aa, Gossypium hirsutum
  unsure (1)..(194): unsure at all Xaa locations
  Clone ID: GOSHI-09MAY01-C84718_1.pep
MQQGDQMVLSLSPPARPGSRLFGAPSSSSSSSSLAFGSLSSDLPVFRPHAGAPPAFSVKAGDSRFEGPERVQYTRDQLLKLREAVEVSDEILKIEREIEVELFGEDQNRTRGESNPPNQSHNRYSEPDNRDWRNRSAQFSSDGEERSWESLHDRELGNHYDSKQPEASQFNRQAQISSNQXGGQTPALVKAEVP

SEQ ID NO: 82904 - protein, 258 aa, Gossypium hirsutum
  Clone ID: GOSHI-09MAY01-C84038_1.pep
YFLIYIIFRLLAFLFPIYSAIFRSLLYEACGRIVNPIYGSVGLLWSGSWQLCQAAGRAGRRGAPITPIASEAAANGQGPPLKAYDIRHVSKDENSAASNDVQRVKTRCRVKRTLKPKVNNPVLEEENRSSEPPEPRCYADEGFEGNRSTSHESSLSHQSELAVMDGESKETSSMISEETVAASRLFPAGPELGGKVSEERAVEGSSEVGLELTLGFKPVVSRACQVVVPVKKRRVEAYGTFEDGQTCKVELGLDYPAA

SEQ ID NO: 82905 - protein, 194 aa, Gossypium hirsutum
  unsure (1)..(194): unsure at all Xaa locations
  Clone ID: LIB3543-038-Q1-K1-H2.pep
SARVGLSFVAPTFSKCAWSCNGDAXILRKGAAVKIVAXRPCLQXDQEPXESQANATVFLAKVYGRAGLMNLINAGPEHLRPAIFRSLLYEACGRIVNPIYGSVGLLWSGSWQLCQAAVEAVLKGAPITPIASEAAANGQGPPLKAYDIRHVSKDENSAASNDVQRVKTRCRVKRTLKPKVNNPVLEEENRSSEP

SEQ ID NO: 82906 - protein, 151 aa, Gossypium hirsutum
  Clone ID: GOSHI-09MAY01-C84248_3.pep
MSPPAAAAVAAAAAGGGGGQPQRQQQQGGFGQSITGIIRIAVFWYFASKFFSPKKPVDPSNLISNLFQKGEPLDMWLYLSEHQRFNDFGNEASLVWHETNIPYATWGPESTRTLSLDYHPSDTLKNNGSLYAHVFFARSGYPPDPNDPEYQ

SEQ ID NO: 82907 - protein, 243 aa, Gossypium hirsutum
  Clone ID: GOSHI-09MAY01-C84248_1.pep
MSPPAAAAGGGGGQPQRQQQQGGFGQSITGIIRIAVFWYFASKFFSPKKPVDPSNLISNLFQKGEPLDMWLYLSEHQRFNDFGNEASLVWHETNIPYATWGPESTRTLSLDYHPSDTLKNNGSLYAHVFFARSGYPPDPNDPEYQPQAAFGRTHPVVKYLPKSRSDKRKSLLGNSKDGEVFEPEPQVADDAEADSKDDGPDEWIAYWKPNITINLVEDFTRYGHNAVPPNIAPYLNIEPITGN

SEQ ID NO: 82908 - protein, 117 aa, Gossypium hirsutum
  Clone ID: LIB3543-039-Q1-K1-D1.pep
MAPPAAAGGGGGGGGGEEGQQPRQQQQQNGFGQTITGIIRIAVFWYFASKFFSPKKPTDPSNLISNLFQKGEPLDMWLYLSEHEKFNDFGNEASLVWHETNIPYVTWGPESTRTLSL

SEQ ID NO: 82909 - protein, 90 aa, Gossypium hirsutum
  unsure (1)..(90): unsure at all Xaa locations
  Clone ID: uC-gsflnu33B037h08b1.pep
MAPPAAAGGGGGGGGGEEGQQPRQQQQQNGFGQTITGIIRIAEFWHFAYKFFSPKKPTDPSNLKSNLFQKGEPPEMWLXLSEHEKFKDSG

SEQ ID NO: 82910 - protein, 169 aa, Gossypium hirsutum
  Clone ID: LIB3583-034-P1-K1-D8.pep
ALSDQLSPKRKVFSRLGRGLAACLIAITGLMLNSSFNGPVVGSLFQGYYGVSDATISLHFSSFSSVSKATVDTQNTLEVDNGSSVIAKKQEFWEESESGQVDLKDEVDIDREGTQLENSYEGSKTRNFDVVEGRIQQIAQDANGSVVSKNGDEVILEETWFREFFQYIK

SEQ ID NO: 82911 - protein, 115 aa, Gossypium hirsutum
  unsure (1)..(115): unsure at all Xaa locations
  Clone ID: LIB3583-035-P1-K1-C6.pep
PRVRPRVRDATISLHFSSFSSVSKATVDTQNTLEVDNGSSVIAKKQEFWEESESGQVDLKDEVDIDREGTQLENSYEGSKTRNXDVVEGRIQQIAQDAXGSVVSKNGDEVILEKT

SEQ ID NO: 82912 - protein, 73 aa, Gossypium hirsutum
  Clone ID: GOSHI-09MAY01-C85668_1.pep
KKGESCIYSSLIYDNPNYVYHCNLGRMGRDHLPGNFPSYNAFPTSSISSYKITTLKNYITRKAVVTISLGRLG

SEQ ID NO: 82913 - protein, 236 aa, Gossypium hirsutum
  Clone ID: GOSHI-09MAY01-C85148_1.pep
SAGEVLYDTNGFLDKNRDPLSSEVVQLLSSCDSQLPQLFVKKMFNQPLQSVTSLDTPMQSVALQFKGQLFKLMHQLESTRSHFICCIKPNSKQLPGTYEEDLVLQQLRCYGIFEVIRISRSGYPTRMTHHAFTERYGFLLSEPIVSQDSLSISVALLKQFNVLPQMYQIGYTKLFLRTGQISALEDRRKQVLRGVIEVQKYFRGHRARRLFHEHNKRAKSIQSFVCGENIPRKYAS

SEQ ID NO: 82914 - protein, 146 aa, Gossypium hirsutum
  Clone ID: GOSHI-09MAY01-C85178_1.pep
GVVGVDDVGGVMSTTRPSTPDPIPEHTPPLTPVVSIQNGKFKSLYSNYWISQTPLWRVIVIGHNNFTFLSYRKKHKIQIPNKQAIHTSVGTGKRHIPSKTPDYNRVVTITRHLQLKAFFFNTRRSYKGQRSRRRRRTKDKAAKAIV

SEQ ID NO: 82915 - protein, 240 aa, Gossypium hirsutum
  unsure (1)..(240): unsure at all Xaa locations
  Clone ID: GOSHI-09MAY01-C86898_1.pep
FFSSRQAHRKDQQIADLCAQIDALETSLSETSNKLVMADQEKESLLKDNASLSNTVRKLQRDVSKLEVFRRELMQSLQEDDESSATGGPPIIAKPTLSEDDSALISRTASMRSQYSDSGAEDRDSDVSASRPGLPHGLLLASQTSTPRLTPPGSPPSVSASVSPTRTSKPVSPKRHAVSFSTSRGMFDDRSSISSSDSGSQAGRTRVDGKEXFRQVRSPLSNEQVGAFLANVKELNSHKQ

SEQ ID NO: 82916 - protein, 129 aa, Gossypium hirsutum
  Clone ID: GOSHI-09MAY01-C86888_1.pep
KAGAVKDQFPNGVVGCTRDVNVISGLPAATSTERLDILNDNEKVTGFSIIGGEHRLTNYRSVTTVHGFERDGKIWTVVLESYVVDVPEGNTEEDTRLFADTVVRLNLQKLATVAEGLARDGDCNKSQVM

SEQ ID NO: 82917 - protein, 189 aa, Gossypium hirsutum
  Clone ID: GOSHI-09MAY01-C86778_1.pep
MGGCCCSSRKPLLHGTPVYYYCPPALEENESVTPHDGSASAMAARFLVNLDLEVPDTFRPPPAPLPYDVVLGCPQSTNSESFRETLSRGSFETLPTCEDLEESDCKTQSGLLLSPRKSEVSKLTESKESMAEEEDACPICLEEYGTEIPKLITKCEHHFHLSCILEWMERSDSCPICDQEMILNQTFDQ

SEQ ID NO: 82918 - protein, 203 aa, Gossypium hirsutum
  unsure (1)..(203): unsure at all Xaa locations
  Clone ID: GOSHI-09MAY01-C86768_1.pep
LAVAPRSEPDHTVAPGGKSEHQHIRYQEQQPVVGGVMGSLRLIELQLVAFIMVFSISGLVPLLDLVFPAFTSAYLIALSRFAFPSRGSRVSSGGSEEIFRGSRLFNLYXTENVISGLSLFSPPVRALVPLLYTVRRVFVILDWVHDTWVNKTLPYNAPSKDIAWDWFGKGLSAANLMYFAINLLCFLIPRFLPRAFERYFREN

SEQ ID NO: 82919 - protein, 135 aa, Gossypium hirsutum
  Clone ID: GOSHI-09MAY01-C86618_1.pep
GIKSVSRKRWELSTDRYRLYYRVLQIWVLLLKINFDATFQSDTRTSTSAIIAKDHKGDYIGAATYLFNDVVDAFVAEARAPLIRASENRWRQVILAMEGRRSNRSGSWVDEIPVSVQRLMEEDRRGWVQRQQSLL

SEQ ID NO: 82920 - protein, 244 aa, Gossypium hirsutum
  Clone ID: GOSHI-09MAY01-C86178_1.pep
RFCLEEKEREAGLKLQKAQELGKAELAAAIANEKAAQIEKLAEANLNINALCMAFYARSEEAHKSHSVHKLALGALALEDALSKGLPIQKEIDALRTYLEGLEKDSVLDLVLSSLPEETRYHGTHTVLQLNQKFNALKGTLRHFSLIPPGGGGILTHCLAHIASWLKVKEVDQSGEGIESLIGRVDKYLAEGKLAEAATVLEQGVKGSQAEEIVNDWVKQARNRAITEQALTALQSYATCISLT

SEQ ID NO: 82921 - protein, 54 aa, Gossypium hirsutum
  Clone ID: GOSHI-09MAY01-C86078_1.pep
FLSTFKKLIPVDGGRFGAILYCTLDFNVEEWLVKISFLDDDVDAFIYFMFCDYV

SEQ ID NO: 82922 - protein, 164 aa, Gossypium hirsutum
  unsure (1)..(164): unsure at all Xaa locations
  Clone ID: GOSHI-09MAY01-C86018_1.pep
KLWNSNSQQPATGVSPPKPWEXKQGDSTGAGPFKPPSPGSTSDVVEASXTARPGELVSTADRTAAVNRNAVGRPLPSRPWEQQNYGSTYGGYGSGLNYNSAYGSGMYGSSSYGGMGSYGGGLYGNSMYRGGYGGLYGNSGMYGGGMYGGGLGGGFGGPMGGYGM

SEQ ID NO: 82923 - protein, 85 aa, Gossypium hirsutum
  Clone ID: GOSHI-09MAY01-C87978_1.pep
WVWRRLRKLVNSSGCGSGCGGCGGGCGSMVNSSGCGLKEESGGCGGCGGCGGGCGTLINTCVGTGGVVKSNGCENPTYMEAAIKA

SEQ ID NO: 82924 - protein, 127 aa, Gossypium hirsutum
  Clone ID: LIB3543-001-Q1-K1-G5.pep
CHLFYYEHLVNVFSCFYCCPYYDDLFVFCYLIALNDALKEEIQHLKVLTAQPMPNGGPMMNFASFGASQQYIPNNHAMQALLTAQQFQQLQIQLQKHQHQFPPHQLHQLQQQLQLQQEHQQQSGDES

SEQ ID NO: 82925 - protein, 164 aa, Gossypium hirsutum
  unsure (1)..(164): unsure at all Xaa locations
  Clone ID: LIB3543-014-Q1-K6-E3.pep
VSVANAVCLRGQRERKMRYIAXELERKIQTLQTEATSLAAQLTLLQKDSTGMSAENSELKLRLQTMEQQVYLQDSLNDALKEEIQHLKVLTAQPMPNGGPMMNFASFGASQQYIPNNHAMQALLTAQQFQQLQIQLQKHQHQFPPHQLHQLQQQLQLLQEHQQQ

SEQ ID NO: 82926 - protein, 188 aa, Gossypium hirsutum
  Clone ID: GOSHI-09MAY01-C87578_1.pep
MMKSFMFHQQQQQQQQQQQQQQVLEENMSNLTSASASGEASVSSGNRTEAGSNYPQQYFTTSQQPQTQPVKRKRNLPGNPDPDAEVIALSPKTLMATNRFVCEICNKGFQRDQNLQLHRRGHNLPWKLKQRTNKEVRKKVYVCPETNCVHHDPSRALGDLTGIKKHFSRKHGEKKWKCEKCSKKYAVQ

SEQ ID NO: 82927 - protein, 33 aa, Gossypium hirsutum
  Clone ID: GOSHI-09MAY01-C87718_1.pep
LARKLPHDKSVYLKPGERVLNWTAGPFGDLKPW

SEQ ID NO: 82928 - protein, 51 aa, Gossypium hirsutum
  Clone ID: GOSHI-09MAY01-C87728_1.pep
RVDPASADAWAGNLEQADFAGFWGSFSFFILNVCSFISSLTLSSLEFERQS

SEQ ID NO: 82929 - protein, 256 aa, Gossypium hirsutum
  Clone ID: GOSHI-09MAY01-C87028_1.pep
RTRGEKAGFCCSARRKGLSSSSITKDPPATPSWFTPERLLILFCVINMINYVDQGVIASNGVNGSIRTCDDKGICTSGSGIQGEFDLTNFQDGLLSSAFMVGLLVASPIFASLTKSHHPFRLIGVGLSVWTLAAAGCGSAFSFWFIAICRMLVGVGEASFISLAAPFIDDSAPVSQKTAWLAMFYICIPTGIAVGYVYGGFVGSQFNWRYAFWGEALLMLPFAVFGFAFEPLQLKGICLYASSAFQSFMSYYLTTI

SEQ ID NO: 82930 - protein, 93 aa, Gossypium hirsutum
  Clone ID: GOSHI-09MAY01-C87348_1.pep
THILNLAQIQNPKGESQQPRALEASGTCQNSTKGSGSHERFPRTASFTHTFPHSSVRLFSASRPWISSPFFSEIEVEEGFRAEISPGSTSTIR

SEQ ID NO: 82931 - protein, 202 aa, Gossypium hirsutum
  Clone ID: GOSHI-09MAY01-C80548_1.pep
MVLFSSLFSIAPRKRNFLKEIEREIFSEEAKEEERAEASLSVFVDQMKSCELCDLAARTYCESDQASLCWDCDAKVHGANFLVARHVRCLLCHACQSLTPWRAAGSKLGHTVSVCESCVDGGDREDTEAENDDEDGEGNDGGAVSDDDVQEDEDNQVVPWSAVANTPPPASSSSSSEGILLLPKEEIYKSTNLFPLKRLREN

SEQ ID NO: 82932 - protein, 83 aa, Gossypium hirsutum
  Clone ID: GOSHI-09MAY01-C80538_1.pep
EEMRPTMGMVVKMLEGVVEVTIPPPPNLIQAIVAGESDHGIGTNSGMSKVDGCSDYNVGFSSAGSRSSLSNLSSPLEPKFGEV

SEQ ID NO: 82933 - protein, 220 aa, Gossypium hirsutum
  Clone ID: GOSHI-09MAY01-C80768_1.pep
PYATAVNSYGTESVISLPDRVSNPEWTRFKYSSSRYAVRDARIILDSYNLKLPNVRWSVLGDDDTVFFTHNLVSGLARYDHREMWYIGGISESVEQNGMHAYDMAFGGGGIAVSYPLAEKLVKALDGCLSRYFYFYGSDQRIWACIYEIGVPLTKEPGFHQFDIRGDPYGLLAAHPMAPLLSFHHVEALTPMFPNKTRTDSLKALIEPYRLDPSRILQQY

SEQ ID NO: 82934 - protein, 65 aa, Gossypium hirsutum
  Clone ID: GOSHI-09MAY01-C80108_1.pep
EIRNYIIYISKSIKSMIIIQYKNYLHAELQTLPLSKTNNQIQIRYDLRILKLIPLIWCKEIILIK

SEQ ID NO: 82935 - protein, 86 aa, Gossypium hirsutum
  Clone ID: uC-gsflnu33B146f03b1.pep
HWYLCPLMSNFYIYVFHFEFLDDSSVNEFFVPCYAISSFGFHFLFFFFSQSHLSQLSCFFMHFLGYGVLLGSYAAFYWKLKLMPVL

SEQ ID NO: 82936 - protein, 63 aa, Gossypium hirsutum
  Clone ID: LIB3585-049-P1-K1-H11.pep
HWHLCPLMSNLYIYVFHFEFLDDSSVNQFFVPCYAISSFVLHYLFFFFCQTHLFEVSCFFMQL

SEQ ID NO: 82937 - protein, 77 aa, Gossypium hirsutum
  Clone ID: GOSHI-09MAY01-C80098_1.pep
RRKLSSLQLQKSRKVKFRQQGNVFLLARERNEVGYYGLTDQCSESCLITQWTFQFSKLLVGLRIMCVLIFQFPLSIL

SEQ ID NO: 82938 - protein, 195 aa, Gossypium hirsutum
  Clone ID: GOSHI-09MAY01-C80328_1.pep
MKSYQSILILLLMILPLLLSPNAVEGGKRKIHITDDLDDVVDDEEDEAWKEWGKKKTSQEFDPPPSDFDKMELSQIQEEIMKRHTGPAFGFVKLRLGIPRDKNMVAEIALKWTQLLRTGALGVKFMGIDLGTIMFNVEDGHKVLELKEFILSQDQAYEIKIGDKVYRRAGDPPIEVVAEKLRQSKKNEEHVKEEL

SEQ ID NO: 82939 - protein, 138 aa, Gossypium hirsutum
  unsure (1)..(138): unsure at all Xaa locations
  Clone ID: AI055512.1.pep
VSAYEYIFIWDEDLGVEHFNAERYIELVKKHGLEISQPGLEPNNGLTWQMTKRRGDREVHKFTEEKPGWCSDPHLPPCAAYXSVSLSLIFTHVFVEIIAPVFSREXWRCVWDMIHVSAGKNSLTLPDCTCMDCCLMVP

SEQ ID NO: 82940 - protein, 89 aa, Gossypium hirsutum
  unsure (1)..(89): unsure at all Xaa locations
  Clone ID: LIB3585-053-P1-K1-D9.pep
FTVGFDQRSNIDKCVKKFSEDFXLLVFHYDGRTTEWDQFDLLLIYVCVYIIRWYAKRFLHPDVVSAYEYIFIWDEDLGVEHFNAERFVL

SEQ ID NO: 82941 - protein, 205 aa, Gossypium hirsutum
  unsure (1)..(205): unsure at all Xaa locations
  Clone ID: GOSHI-09MAY01-C81978_1.pep
MQIKIQSKRSTMSGFCSAMAMTVTVVFFFFLFLQQTPLMAVAAKLEEDHFIIKNKPTLYDFSSRDEMVHLAGYGEEKLSTVLVTGTVLCEACHRRRRRRDPQPQLRSWPISGALVSVKCETPCKTKSGTTPATTDEYGDFMIDLPSHLHGVADLQKICPVKVMGIPEESMCRPAFVKKHEHLKTXSVRTGIRTYTAGRDRFQDIM

SEQ ID NO: 82942 - protein, 190 aa, Gossypium hirsutum
  unsure (1)..(190): unsure at all Xaa locations
  Clone ID: GOSHI-09MAY01-C81498_1.pep
LKALQLIYSSKQSKTKGGLIAGTATTNVFRNSQFKNTMKAMQSQCCSPDEVIFGPDFHQSLYCHLLCGLIFRKEIQFISSTFSHSIVHAFRTFEQVWEELCADIREGVLTSRINVPXSVRSAMAKLLKPNPELADLIHKKCLGLNNWYGLIPELFPNVKYIYGIMTGSMEPYLKKLRHYARDXPLISADY

SEQ ID NO: 82943 - protein, 135 aa, Gossypium hirsutum
  Clone ID: GOSHI-09MAY01-C81738_2.pep
NCLFLFYCYVLHINESSVLLGSLAVHHEVLGSQFLILYRNLSDVLWEAVSTGQVLSLYQGLGTKNLQSFIAQFVYFYGYSYFKRLYLENSGSKSIGTKVNLILAAGAGACTAIVTQPLDTASSRMQTSAFGKSKG

SEQ ID NO: 82944 - protein, 182 aa, Gossypium hirsutum
  unsure (1)..(182): unsure at all Xaa locations
  Clone ID: GOSHI-09MAY01-C81738_1.pep
MGVDLESISEATSGAIGSLLSTTILYPLDTCKTKYQAEVQAHGQRKYRNLSDVLWEAVSTGQVLSLYQGLGTKNLQSFIAQFVYFYGYSYFKRLYLENSGSKSIGTKVNLILAAGAGACTAIVTQPLDTASSRMQTSAFGXTKGLWKTLTEGTLSDAFDGLGISLLLTSNPAIQYTVFDHRT

SEQ ID NO: 82945 - protein, 142 aa, Gossypium hirsutum
  Clone ID: GOSHI-09MAY01-C81648_1.pep
MASRVKQDERNERIIRGLLKQPENRRCINCNSLGPQYVCTNFWTFVCTTCGGIHREFTHRVKSVSMAKFTSQEVTALQEGGNQRAREIYMKEWDPQRNSGPDSSNVERLRDFIKHVYEDRRYTGERNYDKPPRGKMGDKEDV

SEQ ID NO: 82946 - protein, 136 aa, Gossypium hirsutum
  Clone ID: GOSHI-09MAY01-C81188_1.pep
MALTISPFSMPDIHKNPSNFHHKLKNPCLSSIKTHQIQSKSGLFPIFCTSKPSTKNLKTCKNCKTQFDPLLNHPRACHFHTAHFGGETKRKFESVYAGGTMDTPESGKVFQYWHCCGSEDPFDPGCTAAPHASYDD

SEQ ID NO: 82947 - protein, 53 aa, Gossypium hirsutum
  Clone ID: GOSHI-09MAY01-C81098_1.pep
ASSVSMLHCDFRLLKSRCKKEVMVMKTLLFISKTVFDHQCFRFHVKWYYLFFS

SEQ ID NO: 82948 - protein, 201 aa, Gossypium hirsutum
  Clone ID: GOSHI-09MAY01-C81348_1.pep
TESMPATLKDSASSTWLSIAANTRTVFMMEQASGVTHSFNPDSKTWYGPFDLRPDRSIYFSVITCVRDNLIMLGLLGDAEDVNYVKLWELNGESLEFGKEIGVMPTELVEKLKGEGTSLNSIRVSCMGGFFYIYNPGEPGELVALEVGEEGWCRWGSLKNAAVSDRSRVAERVVLTCSDVGLGEIAKLVGSGNGIFTLLKR

SEQ ID NO: 82949 - protein, 171 aa, Gossypium hirsutum
  Clone ID: GOSHI-09MAY01-C81318_1.pep
MATTADKPLATARNSAAPSSVANSSAEPISKKTAEPALPSTDKLDPPSSDTSASEVPLKESEGSKTGRTAGGSASGGGSAPVSDIQKKIRRAERFGVPVQLSEQEKRNSRAERFGTGPSTNGSEASKQSEDLKRKARAERFGLSVPTTAADEEAKKKARLARFAQDSKPDT

SEQ ID NO: 82950 - protein, 237 aa, Gossypium hirsutum
  Clone ID: GOSHI-09MAY01-C82538_1.pep
YGLSDLMNQEKLLAYLSECSRSSTISLADFKINEALLTVESDAPIPLCSKVDSPVSMPFWKDSGGTSDYHHQEFLSLGKSAAHAQYELGEHSELRKYVNLIFKKVEDFWSLVELGCTTEAFKGIRACKEEVASFTADSPGSSGAVAFTLQYLQVIGMLAKVWGHLRPTKMLNPYGVGELELLFAKLDTRLTEISNRCIGLSPGEELQILDLVLVACLLRLSKMEICCCNAAMNYCCL

SEQ ID NO: 82951 - protein, 180 aa, Gossypium hirsutum
  Clone ID: GOSHI-09MAY01-C83858_1.pep
NLGNFVESDHESAASPTDMSLDKSTTDSKALVAVPAMSVEALAAVPAHRKSKRSEVAQRRIRRPFSISEVEALVQAVEKLGTGRWRDVKLRAFDNAKHRTYVDLKDKWKTLLHTARISPQQRRGEPVPQELLDRVLNAHTYWSQQQAKQQQQQLPESCLPHYNSTMIGSGRCDDDENILG

SEQ ID NO: 82952 - protein, 96 aa, Gossypium hirsutum
  Clone ID: GOSHI-09MAY01-C83868_2.pep
QGNLTLNHGIMQGILPQLSCLLFQYPFTTKKEAQIVWNNMMIFSSGVDRCHCCPLCKHGDSSESFVFSLFQWLSHGFPLCMPQRTPCSLSPTQSKL

SEQ ID NO: 82953 - protein, 117 aa, Gossypium hirsutum
  unsure (1)..(117): unsure at all Xaa locations
  Clone ID: uC-gsflnu33B026g12b1.pep
MADSSSSSSSSSSYIHMVHRLIEECLVFKMSKEECMEALSKHANIKPVITSTVIXLIGCVYVLVKVWNELEKENKEFFEAYTRGSHERATEIEKRQRIQRSLHAYIRDNNGNDQLHH

SEQ ID NO: 82954 - protein, 153 aa, Gossypium hirsutum
  Clone ID: LIB3829-002-Q1-K6-D6.pep
MMIKQIFNRLPRKQSKSSDNREGGGTSASSSNAYTSSRNNANSGGPASSGVSSTPNLGLNQGNKVSQVVNTKLNGDVFASSFVTLPSFKDIPNSEKQNLFIRKLNLCRVVFDFSDPTKNLKEKDIKRQTLLELVDYVSSANGKFSEIVMQEFV

SEQ ID NO: 82955 - protein, 153 aa, Gossypium hirsutum
  Clone ID: LIB3585-040-P1-K1-C10.pep
HASGHSFYLKRAVNTNIKTFASSSNAYTSSRNNANSGGPSSSGVSSTPNLRLNQWNKVSQVINTKLNADVLTSSFETLSKYKDIPNSEKQNLFIQNLNLCRVLFDFSDPTKNLKQKDIKRQTLLQLVDYVSSDNAKFPEIVMQEFIKTVSLNF

SEQ ID NO: 82956 - protein, 169 aa, Gossypium hirsutum
  Clone ID: LIB3543-047-Q6-K6-H3.pep
LYRYVDNFKRKFAEQEFNAIKRRYSGQHGQTYTCVVTVRKEERNVKRTVLKSVVGTLDFSIRHLLHGESFPGEREKHLFCSISRTNLNRYIYVSNLCVAKSARRQSIASNMLYFVIESARSEGVELVYVHVHRNNEPALELYQKIGFEMVEMASSQLLKQQMYLLCYKT

SEQ ID NO: 82957 - protein, 64 aa, Gossypium hirsutum
  Clone ID: LIB3584-043-P1-K1-E7.pep
RLQEREKHLFCTINRTNLNRYIYVSGVCVTKSGRRQIIASNMVDFVIESARSEGKITNLSFRIT

SEQ ID NO: 82958 - protein, 181 aa, Gossypium hirsutum
  unsure (1)..(181): unsure at all Xaa locations
  Clone ID: AW186684.1.pep
MENVEESTNEMEEEVGKVMEQARELQEAGAGLISMISNDEQSLRLKANSLDSSIRHLRSSITTVLSQKLLDPKLADKLEEDLQTAICIITDGDAAGFLPANAQGWYLRMFLGPISVRASRKEIQLKASEELYTYRDRTALMFILFPLILLXLRSWIWGRCLPAFPFXLYQAWLLFLNTGLA

SEQ ID NO: 82959 - protein, 160 aa, Gossypium hirsutum
  Clone ID: LIB3584-044-P1-K1-H10.pep
PRVRPRVRPRVRGRVGDEQSLRLKANSLDSSIRHLRSSITTVLSQKLLDPKLADKLEEDLQTAICIITDGDAAGFLPANAQGWYLRMFLGPISVRASRKEIQLKAKEEYNSYRDRTALMFILFPLILLILRSWIWGGCLPAFPVQLYEAWLLFLNTGLAL

SEQ ID NO: 82960 - protein, 52 aa, Gossypium hirsutum
  Clone ID: GOSHI-09MAY01-C119447_1.pep
VSNINVRSYFMYLEVFTLVFISIFVVCKTNQALFSFVLLLQVVINLSAYDDA

SEQ ID NO: 82961 - protein, 45 aa, Gossypium hirsutum
  Clone ID: GOSHI-09MAY01-C119747_1.pep
KKIWYLLVISYLLKLQDEHASKELKSANASNNRSSLYGTPLIEHR

SEQ ID NO: 82962 - protein, 160 aa, Gossypium hirsutum
  Clone ID: GOSHI-09MAY01-C119267_1.pep
SFRSQIGSPFCLNAYPFLAYMSNKDQIDINYALFLPTKGADDPKTKLHYDNLLDAQIDAAYAALEDAGYGKMEVIVTETGWASHGDENEAAATANNARTYNYNLRKRLAKMKGTPLRPKSVLKVYVFAIFNENLKPGPTSERNFGLVKPDGSISYDIGFH

SEQ ID NO: 82963 - protein, 86 aa, Gossypium hirsutum
  Clone ID: GOSHI-09MAY01-C115857_1.pep
SRTSALIFSPFLSATSTSCCTLCSFCNQRPVFLLELVNNFLVEDYISNMTFNLVENTFGSLGRDIGSSTSTNCFHFYFIFLLWGYR

SEQ ID NO: 82964 - protein, 160 aa, Gossypium hirsutum
  Clone ID: GOSHI-09MAY01-C115727_1.pep
FPIEPAPWRYANGSRGTQKQPLKHVKVPPKPPNCSPSVYSEIEKRLKDLEFRHSGKDLRALKQILEAMQAKGLLETGKEEQAANLVSQRDYEPKCTSPGQHLRGQRSQRGSDSIGTYESPIVIMKPAKLVEQVSMHASTVVPIVDISSLPKIQNGASVDN

SEQ ID NO: 82965 - protein, 208 aa, Gossypium hirsutum
  Clone ID: GOSHI-09MAY01-C115367_1.pep
MANHTVTFLPKLSIEAIQTVTPMRITEPRQTRQVLAGELVGPGIFQRCLNVVQYYMKEKEEDSGWLLAGWIKETLGRALHEQPMISGRLRKGERNDGELEIVSNDCGIRLIEARIQMNLSDFLDLKQREDAEAQLVFWKDIDEQNPQFSPLFYVQVTNFQCGGYSIGISCSILLADLLLMKEFLKTWADIHNKVIINKNDEQKLPLFY

SEQ ID NO: 82966 - protein, 147 aa, Gossypium hirsutum
  Clone ID: GOSHI-09MAY01-C116727_1.pep
MAISLLSKFSTQTLLIASIFVVSALGHDFSIVGYSPEDLGSADKLIELFESWISKHGKIYESIEEKLMRFEVFKDNLKHIDKRNKAISSYWLGLNEFADLSHDEFKKMYLGLRPDVRRRSQSTKDFSYGDVAELPKSRDWRKKGAVT

SEQ ID NO: 82967 - protein, 224 aa, Gossypium hirsutum
  Clone ID: GOSHI-09MAY01-C116247_1.pep
MVKLTTIARVTDGLPLAEGLDDGRDLVDAEMYKQQVKALFKNLSKGHNEASRMSIETGPYVFHYIIEGRVCYLTMCDRSYPKKLAFQYLEDLKNEFERVNGAQIETAARPYAFIKFDTFIQKTKKLYQDTRTQRNIAKLNDELYEVHQIMTRNVQEVLGVGEKLDQVSQMSSRLTSESRIYADKARDLNRQALIRKWAPGAIVLAVVFLLFWVKAALWRFNCDP

SEQ ID NO: 82968 - protein, 96 aa, Gossypium hirsutum
  unsure (1)..(96): unsure at all Xaa locations
  Clone ID: AI055627.1.pep
NEASRMSVETGPYVFQFILYGLLRERNKFCCMFFSVRFAGASELYHYXCYLDLSSXSYIIEGRVCYLTMCDRSYSKKLAFQYLEDLKNEFERVNGA

SEQ ID NO: 82969 - protein, 216 aa, Gossypium hirsutum
  Clone ID: GOSHI-09MAY01-C110967_1.pep
APPAIGGSASASTIKQVKLERESELRIEVCNETPLKLRLLNGSAEIFGSELAPEMWLTFPPRLKFAVFTWYGATIEMDGATETDYTADETPMVSYVNVHAVLEGRRNRAKALSPNDSEASQGPRVIVVGPTDSGKSTLSRMLLSWAAKQGWKPTFVDLDIGQGSITVPGCIAATPIELPIDPVEGIPLEMPLVYFYGPTTPCNNVYLYKTLVNELA

SEQ ID NO: 82970 - protein, 115 aa, Gossypium hirsutum
  Clone ID: GOSHI-09MAY01-C110867_1.pep
KLLVSDIGRTGLGNGSHHDLQSSPILWASPQSSHLLALLRTTPTPNANTLSTNNPVSIKEEVSLLGSHAMNEPAVANAALNARTLGLDPLSQVPSLGLCSPFWKNNQHQAQQQHQ

SEQ ID NO: 82971 - protein, 94 aa, Gossypium hirsutum
  Clone ID: GOSHI-09MAY01-C110527_1.pep
VVLTNTSVSGTGYIDGHFAVYQIDRVLQPLQIFDPRPPAPAPAPAKSKKKKDDDVADSPADDSTDNSKAVRFTMGNNVGLFGVTAIVLIALISL

SEQ ID NO: 82972 - protein, 104 aa, Gossypium hirsutum
  Clone ID: GOSHI-09MAY01-C110177_1.pep
MGKSNSSRDWTQIYAIYGMDQWQTLLFLLCHAVFFSLLSIIFLFYFGSIFHFFQTLFPSPSTARFAPGFSGAVTSILLLLVLRCANFVLRCPLHTKCAAMVGSL

SEQ ID NO: 82973 - protein, 61 aa, Gossypium hirsutum
  Clone ID: uC-gsronu33B007b03b1.pep
AHDIPLQLKCFLIALGLEFCFNVNYLEKGSNVLKGYVLSLLYTQIISMLLFCYASAIAEQH

SEQ ID NO: 82974 - protein, 39 aa, Gossypium hirsutum
  Clone ID: uC-gsronu33B007b08b1.pep
GNTLIAMECHELIRWYGIFYQTIYRDLSQLHQVNRVPSA

SEQ ID NO: 82975 - protein, 187 aa, Gossypium hirsutum
  unsure (1)..(187): unsure at all Xaa locations
  Clone ID: GOSHI-09MAY01-C110067_1.pep
FASAHASAVPEITFRHLTENDEFVVLATDGIWDVLSNEEAVEIIASAPARSSAARALVEVAIRAWRYKYPTSKVDDCAVVCLFLDSNSNHLSTASNGNTEVQPTSKDQLDNDIEENNNLDVLXLSTSAGITRTEEETSLEGNEDPSMLENMNSDMGIYWSALEGVSRVNTLVNLPRFIPEKEEKAGK

SEQ ID NO: 82976 - protein, 119 aa, Gossypium hirsutum
  unsure (1)..(119): unsure at all Xaa locations
  Clone ID: GOSHI-09MAY01-C111957_1.pep
MACIAVGDTIPDGTLSYADEAHQILNVSVHSLAAAKQVILCGVPGAFTPTCXLKHVPGFIDKAEELKSKGISEIIAISVNDPYVMRVCGQSFSENKYVKLFSLLLIVPSFKTLMFFNFI

SEQ ID NO: 82977 - protein, 82 aa, Gossypium hirsutum
  Clone ID: GOSHI-09MAY01-C111587_1.pep
IFFSYDLNFQDGFIILKEMNPSNALPQTSPPSDAVDTSPLLTHSISDHLLRSRRILRRRPPPLPGTAARLLRRVSRSSFDAS

SEQ ID NO: 82978 - protein, 167 aa, Gossypium hirsutum
  Clone ID: GOSHI-09MAY01-C111547_1.pep
LSSAHASGKYGQKVVKGNPYPRSYYKCTHPGCPVRKHVERASHDLKAVITTYEGKHNHDVPAARGSGSHSVNRPLLDNNNNIGAMTLRPSPLNNPMSNNQALRGLRQSTTEGESPFMLEMFQGNGNLGFSGFGNSGGSIMNQHDVNNMFSRTKEEPRDEAFIESLLY

SEQ ID NO: 82979 - protein, 176 aa, Gossypium hirsutum
  Clone ID: GOSHI-09MAY01-C111447_1.pep
PRVRPRVRDPPLGSGDGGSEQKTERPLEEEPMLAARITIEDGLSLLLDVDDIDRLIQFSQPQDGGIQLRRRRQILLEGMAASLQLVDPLSKGAHAVKCVAKDDIVFLRLVSLAKGRKLVTRFLQLLIPGSELVRVVCMAIFRHLRLLLGGLSSELEAAETTTKFAKTVSTCVNGMD

SEQ ID NO: 82980 - protein, 129 aa, Gossypium hirsutum
  unsure (1)..(129): unsure at all Xaa locations
  Clone ID: GOSHI-09MAY01-C111727_1.pep
MAALNSVRVAAVQMTSVNDLASNFSTCSRLVKEAASAGAKMICFPEXFSFLGPKSEDSLLVAEXLDGPIMHKFCSLAREYSIWLSLGGFQEKGHDAHLRNTHVIVDDAGNIRSTYRKIHFVDVDVPVGS

SEQ ID NO: 82981 - protein, 135 aa, Gossypium hirsutum
  Clone ID: uC-gsronu33B078h12b1.pep
MLNGCLHFCLIGARLPRPLRSSLVNSYSNFSAVRSSADSAMAALNSVRVAAVQMTSVNDLASNFSTCSRLVKEAASAGAKMICFPESFSFLGPKSEDSLLVAEALDGPIMQKYCSLAREYSIWLSLGGFQEKGHD

SEQ ID NO: 82982 - protein, 106 aa, Gossypium hirsutum
  Clone ID: GOSHI-09MAY01-C112547_1.pep
KTYIALKSYSYSIYPPPFSQQPNMIKTPKKKKKIKKRRIKSQALDLPRRLIIPRSRHQHHHLLLNLLQIFYIGHDSNVNLKSFFKTWPSNDFPSDSILIVSPPPLS

SEQ ID NO: 82983 - protein, 112 aa, Gossypium hirsutum
  Clone ID: GOSHI-09MAY01-C112687_2.pep
MFECVPKADAAVFMWVLHDWGDEECIQILKKCREAIPQDKGKVIIVESVLEEDENDKLEFVGLMLDMVMMTHTNKGKERTLKEWTYVLGQAGFTRIDVKPIHAVQSVIEAYI

SEQ ID NO: 82984 - protein, 203 aa, Gossypium hirsutum
  unsure (1)..(203): unsure at all Xaa locations
  Clone ID: GOSHI-09MAY01-C112687_1.pep
WCYAEENPXIADSIDEAMACDARVAVRALIEGCPRVFDGIKSLVDVGGGNGTALSMMVKAFPWMHGINFDLPHVVAGAPKVDGIEYVGGDMFECVPKADAAFFLWVLHDWDDEECIQILKKCREAIPQDKGKVIIGEAVLEEDENDKLEFVGLMLDMVMMAHXTNKGNVRXFKEWKYVLGEAGFTRINVKPIHAVQFIIEAYI

SEQ ID NO: 82985 - protein, 109 aa, Gossypium hirsutum
  Clone ID: GOSHI-09MAY01-C112657_1.pep
MKLLHNQTRGDLRVKAMFGQVKLLFGLQPNWGFIDLQREIAKHFNIEDVDRNHLKALDDDNEWGGLTCDADGEECIDIYKSSQTHTIKISLHQASNLNLGSSFGYSDPL

SEQ ID NO: 82986 - protein, 146 aa, Gossypium hirsutum
  Clone ID: GOSHI-09MAY01-C113067_1.pep
GNMGGCATKPKVLKGDEMPSPVAPSPEPAKQHVQVADDEGKKVEAEIVKAKDVDETKEVVIVNDAKLDDQANDPQSGSNLLNENEKKGVAETESDSNTPSEPTKTESVEAVKQESMETEPPSIGGKAATVAVGETQNRETAAAAEG

SEQ ID NO: 82987 - protein, 165 aa, Gossypium hirsutum
  Clone ID: GOSHI-09MAY01-C113227_1.pep
VLVGATPVKVHGPPLSTAVSRVLACLIEKDVQFQLIPVNMSKGEHKSPDFLKIQPFGQVPAFQDESTSLFESRAICRYVCEKYAEKGNKGLYGSNPLAKASIDQWLEAEGQSFNPPSSVLVFQLAFAPRMKIKQDQSLINQNHDKLAKALEVYEKRLGESRLGPG

SEQ ID NO: 82988 - protein, 208 aa, Gossypium hirsutum
  unsure (1)..(208): unsure at all Xaa locations
  Clone ID: GOSHI-09MAY01-C108527_1.pep
MLPHSNMPREDNQVPLLSDQDVAYESGEKVHILGINEPDEEGSSVVPPFSWKKLWLFTGPGFLMSIAFLDPGILEGDLQAGAIAGYSLLWLLMWATAMGLLVQLLSARLGVATGRHLAELCKEEYPTWVSMVLWVMAELALIGADIQEVIGSAIAIKILSNGILPLWAGVVVTLXDCFILLFLENYGVRKLEAFFAVLIATMAVSFAC

SEQ ID NO: 82989 - protein, 84 aa, Gossypium hirsutum
  Clone ID: GOSHI-09MAY01-C108537_1.pep
MKPPLSSSSSAVLRKARLSPYLFTLLALIAFRSILYGEDFMCILGQLEPIPGPAMSKPLKRSGKLAFAIWKGEEGCDIFNGRWV

SEQ ID NO: 82990 - protein, 132 aa, Gossypium hirsutum
  Clone ID: GOSHI-09MAY01-C109917_1.pep
MPIGGNSTAGVSGFAGDWSRPRTGHGFEDFFAEEIRLRSSEMLETDDMQRLLKTFGVGVGMGAGFGHPDESSYAYTIPYDHQRDHPYPYAPERGKGSGKAVVGWLKLKAALRWGIFIRKKAAERRAQLVELD

SEQ ID NO: 82991 - protein, 224 aa, Gossypium hirsutum
  Clone ID: GOSHI-09MAY01-C109517_1.pep
RYVILYCLPVFVLQLILILIAPKLHKDRRDLPSYFTRSAAPVRQNSDDIALCTYPLLNTILLGLFATILTAYLFWLGRQILELVINKGLLKRVYTLIFSVLSLLQIRVALLGLSVLSKPEEFLFEALAFSAFIVQLCCAGVCIYILAYYPVKDCLALGNLHDLEATRRKGFLDGQNDTVSLIADPSRLEGSADASSVRGSFSFRMYENDGTSALTFVELSCFSS

SEQ ID NO: 82992 - protein, 230 aa, Gossypium hirsutum
  Clone ID: GOSHI-09MAY01-C104507_1.pep
MKRIRDDIYSGSQFKRPFASSKAESYAQNQMPGGGGGTGGGEGEGGGGSMSQTLAMNEALTYLMEVKEIFQDQKGKYDMFLEVMKDFVARRTDTAGVIARVKELFKGHNNLIYGFNTFLPKGYGITLDEDEAPPKKTVEFDEAISFVNKIKKRFQNDEHVYKSFLDILNMYRKEHKDINEVYTELASLFEDHPDLLYDFHIGFYRRAWTSTRLLRKKRFLNLTKHSNLER

SEQ ID NO: 82993 - protein, 109 aa, Gossypium hirsutum
  Clone ID: GOSHI-09MAY01-C104677_1.pep
RKIERNTSNLMTRPRTYSIHRYDRMHEFQPLDYYSFTFFPIKWGTLTIMKSTTHVQHYAFSMRLLVGVYPFESYLIQSRNCSSIAFLVLQLTLETNYNTGDIILTVSVQ

SEQ ID NO: 82994 - protein, 182 aa, Gossypium hirsutum
  unsure (1)..(182): unsure at all Xaa locations
  Clone ID: LIB3828-029-Q6-N6-A11.pep
SRWQIHSYQDHIHFSFSSFIWFYYRFQSRFLFRSCRFPAIFNFGASNSDTGGFAAAFFQPKPPYGDTFFGMPSGRACDGRLIVDFTVENLDLPFLSSYLNSLAINFSHGANFATVSSTIRLPTADVIPQGQASPFYLSLQCSQFAQFKNRSQIIRRQGGIYASLMPREXTFAKALYTFDIGQ

SEQ ID NO: 82995 - protein, 162 aa, Gossypium hirsutum
  unsure (1)..(162): unsure at all Xaa locations
  Clone ID: uC-gsflnu33B005g10b1.pep
LSVLLYGSTTGFCRVFSSESCRFPAIFNFGASNSDTGGFAAAFIQPKPPNGDTFFGMPSGRVCDGRLIVDFTAESLGLPFLSSYLNSLATNFSHGANFATVSSTIRLPTADVIPQGXGEIYASLMPREETFAKALYTFDXIGQNDLTHSLFLNMSIVQVIAA

SEQ ID NO: 82996 - protein, 153 aa, Gossypium hirsutum
  Clone ID: GOSHI-09MAY01-C104207_1.pep
RFLAPEIIKGEGHGSAVDWWTFGIFLYELLFGKTPFKGAGNRATLFNVVGQPLRFPEYPSVSFAAKDLIRGLLVKEPQHRLAYRRGATEIKQHPFFQSVNWALIRCANPPDVPKQVVMDCSAGTNSAKVPPTNDKVPGLDVKPSGNYLEIDFF

SEQ ID NO: 82997 - protein, 82 aa, Gossypium hirsutum
  Clone ID: GOSHI-09MAY01-C105597_1.pep
AVSWFTGEAIQGDELEIGDDDDDVDEDEDEDDEDEDEDGDDDDDDEDDEGSKTKKSSFARKKSGRAQGDGQQGVRPPDCKQQ

SEQ ID NO: 82998 - protein, 128 aa, Gossypium hirsutum
  Clone ID: LIB3829-017-Q6-N6-E1.pep
KHLARLCCSFWWSSALEFLSTCKLTNLTVKAELGCCLLHRSGRLIIDECILQCESNPLDYLSCPIVSTAGSGVFPSNLKSDGDSISVSHTRIEGGAKAVLTSGDLALQQVRVIYARTCLYFWFDVDCR

SEQ ID NO: 82999 - protein, 114 aa, Gossypium hirsutum
  Clone ID: uC-gsronu33B016b09b1.pep
ALEFLSTCKLTNLTVKAELGCCLLHRSGRLIIDECILQCESNPLDYLSCPIMSTAGSGVFPSNLKSDGDSISVSHTRIEGGAKAFLTSGDLALQQVRVIYARTCLYFWFDVGCR

SEQ ID NO: 83000 - protein, 198 aa, Gossypium hirsutum
  unsure (1)..(198): unsure at all Xaa locations
  Clone ID: GOSHI-09MAY01-C106557_1.pep
TGVEPLALMSQLATVMTDVLAGSYDFSQERRRRKFFRRQPLSKEDMEKLRQALXKTLSEAEKHLTMSNDKLTWLTAALLHLAPDQQYILPISSSGTSSRHSPLPLNDLGGREIVHKGGELVELPNNNTRVLSTNARPENLYAGSSGDFETSIMKGKRHALAGMAPQSVAENRNRTVRIWLEVLQKIQDDSLKEFLYRQ

SEQ ID NO: 83001 - protein, 261 aa, Gossypium hirsutum
  unsure (1)..(261): unsure at all Xaa locations
  Clone ID: GOSHI-09MAY01-C106427_1.pep
MFTLLFLQLEKLVSKDALHYDTICFHYYNQFHLHLQLSEAAEYARAKGVVLKGDLPIGVDRNSVDTWVYPTLFRMNTSTGAPPDYFAKNGQNWGFPTYNWEEMSKDNSGSRPARLTQMGKHFTAHRIDHILGFCRIWELPDHAMTGLIGKFRPSIPLSQEELEREGIWDFDRLTRPYVRKEFXQENFGDSWILIAANFFKEYLDRYEFKEECNTEKKIAAKAHSCAXKSLLPESEDKIRXDLFDLLKNIVLIRDLEHDKVS

SEQ ID NO: 83002 - protein, 185 aa, Gossypium hirsutum
  unsure (1)..(185): unsure at all Xaa locations
  Clone ID: GOSHI-09MAY01-C106667_2.pep
GPITPTVLAPPTRPYTIPYHEIDWNRARNACAKEDLYYPHPLVQDILWASLHKIVEPILMCWPGKKLREKALQTAIEHIHYEDENTRYICIGPVNKVLNMLCCWVEDPNSEAFKLHLPRLYDYLWVAEDGMKMQGYNGSQLWDTXAFAVHAILSTNLTEEYSSTLRKANMYLRNTQVXKNCPGDL

SEQ ID NO: 83003 - protein, 218 aa, Gossypium hirsutum
  unsure (1)..(218): unsure at all Xaa locations
  Clone ID: LIB3543-056-Q1-K6-G3.pep
RNRIPCRPSVRQHCTTPHPLVHDILWASLHKIVEPILMCWPGXELKKGSQTXRPYTMNKKTRYICIGPVNKVLNMLCCCVEDPNSXAFKLHLPTLYDYLWVAENSMKNAGXYNESQLWDTAFAVQAFLSTNLTEEYSSTLRKANMYLRNTQVLENCPADLNFRYRHISKCAWPFSTANHGXWPISYCTAEGLKAVLLLSKIPPDIVXRTVXAKRLYDA

SEQ ID NO: 83004 - protein, 83 aa, Gossypium hirsutum
  unsure (1)..(83): unsure at all Xaa locations
  Clone ID: LIB3543-041-Q1-K6-H11.pep
LFIAPRFSRKSSPFLLQFVSYHVKRNPEHSQQNHQDWQPTWEPRPDHPHDPVYPHPKRSLSRTGEFGYTGLIAAXETLTLSFV

SEQ ID NO: 83005 - protein, 158 aa, Gossypium hirsutum
  unsure (1)..(158): unsure at all Xaa locations
  Clone ID: uC-gsflnu33B100d09b1.pep
FVSVDRMKTPFVVVQGHRPMYTTSFESRDAALREKMLEHLEPLFVNNNVNLALWGHVHRYERFXSLKNFTCGSMGQKGKDWEALPVHVVIGMAGQDWQPTWEPRPDHPHDPVYPQPKRSLYRTGEFGYTRLIATKEKLTLSVVGNHDXEVHDMXEILA

SEQ ID NO: 83006 - protein, 162 aa, Gossypium hirsutum
  Clone ID: GOSHI-09MAY01-C100827_1.pep
MENEGTAIDLRGTPTYDGRYVRYNILGNIFEVSSKYVPPIQPVGRGAYGIVCCATNSETKEEVAIKKIANAFDNRIDAKRTLREIKLLCHMDHDNIIKIKDIIIPPEKDKFNDVYIAYELMDTDLHQIIRSSQALTDDHCQYFLYQLLRGLKYTHSANVLHR

SEQ ID NO: 83007 - protein, 167 aa, Gossypium hirsutum
  Clone ID: GOSHI-09MAY01-C100837_1.pep
TRKRRSNLSVKEEAILPHSSEQSEPLPAAALTTSSEPVELNYECFNSSNNRVADAILFPELKDGSSDSDSSAILNEDDHTNTNNGVVSSSGVLQSQHLLMSPTTTSSFNFDSSSSSSPSSMNCFQFSKTTYLVKMEEHNFFTADEACNFFSDEQAPSLQWCYPEQWN

SEQ ID NO: 83008 - protein, 117 aa, Gossypium hirsutum
  unsure (1)..(117): unsure at all Xaa locations
  Clone ID: GOSHI-09MAY01-C100817_1.pep
RRVGARNALAVLKEKETAEAKENCEXENGKKKKNGNQTFTRQTLNDICLRRNWPMPFYRCVNEGGPAHAKRFTFAVKVNTTDRGWTDECIGEPMPSVKKAKDSAAVLLLELLNKWYS
